United States Patent Application Publication US 2018/0126003 A1 - sequence listing, part 102

SEQ ID NO: 183596 - DNA, 3252 bp, Artificial Sequence
  derived and/or modified sequence
atggcctgccccgccctgggcctggaggccctgcagcccctgcagcccgagcctccccctgaacccgccttttccgaagcacaaaagtggattgagcaagtcaccggccgctcgttcggtgataaagattttcgcacgggattggagaatgggatacttctgtgcgaactgctcaatgccattaaacctggcctggtgaaaaaaattaaccgcctgcccacacccatcgcaggtctggataacatcatcttatttttgcggggctgtaaggaactgggcctcaaagaatcccaactgtttgatccgtccgaccttcaggacacttccaatcgggtcacggtgaagagccttgattacagtcggaagcttaagaacgtactggtgacaatatactggttggggaaagctgctaatagctgcacatcgtatagcggtacaactctgaatctgaaggaatttgaggggcttctggcacagatgcgaaaagatacggatgatattgagagccctaaaaggagtataagggacagtgggtatattgattgttgggatagcgaacggtcagactctctttccccacctagacatggccgggatgactcctttgattctttggattcttttggaagccggagcagacagaccccatctcctgacgtggtgctgagaggatcttcggacgggagagggtccgatagcgagtccgacctgccacatcgcaagcttcctgatgtgaagaaagacgacatgtctgcacggcgcacctcccacggtgagcctaagtctgctgtgccatttaatcagtacctgccaaataaaagcaatcagacagcctatgtgcctgcacctcttcgcaaaaaaaaagctgaaagggaggagtataggaagagctggtccacagcaaccagccccctgggcggggaacggccgttcagatacggtccccgcacacccgtctcagatgacgccgagagcaccagcatgtttgacatgcgctgtgaggaggaggccgcggtccagccacattcccgcgctcggcaggagcagcttcagctgatcaacaatcaactgagggaagaggacgacaagtggcaggatgaccttgcgcggtggaagtctcgcaggcgctctgtgagccaggacctcatcaaaaaggaggaggagcgtaagaaaatggagaagctcttagctggggaagatgggaccagcgagcgccggaagagtataaagacctatcgggaaatagtacaggaaaaggagcgtagagagcgggagctacacgaggcctacaaaaatgcgcggtcccaagaggaggccgaaggaattcttcaacagtacatcgaacggtttaccatcagtgaggccgtactggaacggctcgaaatgcccaagattctggaacgttcccatagtacagagcccaatctaagctcgtttctcaacgatcccaatccaatgaagtacctgaggcagcaatccttaccaccacccaaatttacagcgaccgttgaaacgaccattgcaagggccagtgttctggatacatcaatgtccgcaggttcagggtctccatcaaagacggtcacgccaaaggccgttccgatgctgactccaaagccatattcccagcctaaaaatagccaggacgtgctgaagactttcaaagtagatggaaaggtgagtgtcaacggggaaaccgtccaccgggaagaagaaaaggaaagagagtgtccaaccgtggcacccgcgcacagtcttacgaagtctcagatgttcgaaggggtggcaagagtgcacgggagcccgctagaacttaaacaggataatggcagcatcgaaattaacattaagaagcctaattctgtgccccaggagctcgcagctaccactgagaagacggagcccaattcgcaagaggataaaaatgatgggggcaagtcgagaaagggcaatatcgaactggcttctagcgagcctcagcacttcacaaccactgtcacacggtgttcacccacagtggctttcgtcgaatttccatcctctccacaactgaagaatgacgtctccgaagagaaggaccaaaagaagcccgaaaatgaaatgtcaggcaaagtggagctggtcctgtcccaaaaagtagtgaagccaaagagccctgagcctgaagctaccctgaccttccctttcttggacaaaatgcccgaggccaaccagctgcacctccccaatttgaacagccaggtcgactcccccagttctgaaaagtcacctgttatgaccccccagttcaaattctgggcctgggaccccgaggaggagagacgtaggcaggagaagtggcagcaagagcaagaacgcctgcttcaggagcgctaccagaaggagcaggataagttaaaggaagagtgggaaaaggctcagaaagaggtagaggaggaggagcggcgctactacgaagaagaacgcaagatcatcgaggacacggttgtgcccttcacagtgagcagctctagcgctgatcagctgagtacatcaagcagtatgaccgaaggctcaggcaccatgaacaaaattgacctcggcaactgccaggacgagaagcaggacaggagatggaagaagtcattccaaggagatgattctgaccttctactgaagacccgcgagtccgatagactggaggagaagggatcgctgaccgaaggggccctagcacattctgggaaccccgtgtctaaaggagttcatgaggaccatcagctcgatacggaagccggcgcaccccactgtgggactaacccacaacttgctcaggatcccagtcagaatcagcaaacgtcaaacccaacacattcatccgaagacgtcaagcccaagacgctgcctttagacaaaagcattaaccatcaaattgagagcccctctgaaagacggaagaaaagcccgagagagcacttccaggcgggaccgttttcaccctgcagccccactccccccggccaaagtcccaatagaagcatctccggaaaaaagctgtgtagttcatgtgggctgcctctcggaaaaggagccgcaatgatcatcgagacacttaatctatactttcatatccagtgctttcgctgtggaatttgcaagggccagttaggggacgcagtgtcgggcaccgacgtacgcatcagaaacggactcctgaactgcaacgattgctacatgcgcagccgatccgctggacaacccacaacactatag

SEQ ID NO: 183597 - DNA, 3252 bp, Artificial Sequence
  derived and/or modified sequence
atggcctgcccagccctgggacttgaagctctccagcctctgcagccagaaccccctcccgaaccggctttcagtgaggcccagaagtggattgagcaggtgacaggacgttccttcggggataaagacttcagaacggggctggagaacggtatcctcttgtgcgaactactaaacgctattaaacccggactagtaaagaagatcaaccggctcccaaccccaattgctggcctagacaacataattttgtttctgcgcggatgtaaggagctgggcctcaaggagtcacagctattcgacccgtctgatttgcaagatactagcaaccgggttactgtgaaaagcctcgactattcgcgcaaactcaaaaatgtcctcgtgacaatctactggctgggaaaagccgctaacagctgtacgtcgtattcggggactaccctgaaccttaaggagtttgaaggcctcttagcccaaatgcgcaaggataccgatgatattgagtcgcctaagcgttctatccgggactcagggtatattgattgctgggactcagagcgaagtgacagcctgtccccacctaggcatggaagagacgattccttcgactcgctcgatagtttcgggagccgttctcggcaaacaccctcccccgatgtcgtgttgcgcggaagtagcgatggaagggggtctgatagcgaatccgacctccctcataggaagctgcccgacgtgaagaaggatgacatgtccgccaggcgcacttcccatggtgagcctaaaagcgcagtgcccttcaatcagtacttacccaacaaaagcaatcagactgcatatgttcctgctccactccggaaaaagaaagcggagagagaagagtaccggaagagctggtcaacagcaaccagcccattgggaggagaacgtccctttagatacggacccaggacgcccgttagcgacgatgctgagagcacttccatgtttgacatgaggtgcgaggaggaagctgccgttcagcctcactcccgggcaaggcaggagcaactgcagctcatcaataatcagcttcgggaagaagacgacaaatggcaggacgatctagcaaggtggaaatccagacggagatcggtctctcaggacctgataaaaaaggaggaggagaggaaaaaaatggagaaacttctggccggagaagacggaacatctgagagacgaaaatcaataaaaacatatcgtgaaatagtacaggagaaggagagaagagagagagagctgcacgaagcttataagaacgctcggagccaggaagaagccgagggtatattgcaacaatacattgaacgcttcactatttccgaggccgtattggagagattggagatgcccaaaattctggagcgatctcacagtactgagccaaacctgtcctctttcttaaatgaccccaaccccatgaagtacttgaggcagcagagtctgccaccccctaagttcaccgcgactgtcgagacaacaattgctcgcgcttctgtcctggatactagtatgagcgcgggaagcgggagtccctccaagactgttacccccaaagctgtgcccatgctcaccccaaagccctatagtcagcctaagaatagtcaggacgtccttaaaaccttcaaggtagatgggaaggttagcgtgaacggggaaaccgttcaccgcgaagaggagaaagaacgcgaatgcccaaccgttgcccctgctcactctctgacaaagtcccaaatgttcgagggggttgcacgggtgcacggtagtccgctggaactcaagcaagacaatggctctatcgagattaacattaagaagccaaactctgtgccccaggagctcgccgcaacaaccgagaagaccgaacccaacagccaagaggacaagaacgatggaggtaaaagcagaaaaggaaacatagaactggcctctagcgagccccaacacttcacaacaaccgtgaccaggtgcagccctaccgttgccttcgtggagttccctagttcacctcaactgaagaacgatgtgagtgaagagaaagatcagaagaagcccgagaatgagatgtccggtaaggttgaactggtgctttcccagaaagtggtgaaacctaagtcccctgagcccgaagccacacttaccttcccgttcctcgacaaaatgccagaagctaaccagcttcacctgccaaatctgaacagccaagtggactctccgtcctccgagaaatctccagtgatgacgcctcaatttaaattctgggcttgggatcccgaagaggaacgcagacgacaggagaagtggcagcaggaacaagaaagacttctacaggagaggtatcagaaagaacaggacaagctaaaagaagagtgggagaaagcacaaaaggaagtagaggaagaagaacgaagatattacgaggaggagaggaagattattgaggataccgtcgtcccttttacagtgtcttcgtctagtgccgatcagctctccaccagttcttcgatgaccgaaggttcaggcactatgaataagattgacctgggcaattgtcaggatgagaagcaggaccgcaggtggaagaaatctttccagggagatgatagcgacctcctgctgaagacgcgggagagtgaccgcctggaagaaaaagggtcattgactgaaggggcattagctcatagcgggaacccagtgagcaaaggcgtacatgaagaccatcagctggataccgaagctggggcaccccactgcggcaccaacccccagctagcccaggacccgagtcaaaaccaacagacaagtaaccccacgcactccagcgaagacgtgaagcctaaaactctcccactcgacaagtccattaatcatcagatcgagtccccttctgaacgcaggaaaaagagtcccagagaacatttccaggccggtccatttagtccatgctcccctactccacctgggcagagtcccaatcgctcaatcagcgggaagaagctgtgctccagctgtggacttcccctggggaaaggtgcagctatgataatagaaaccttgaatctatactttcacatacaatgctttagatgcggaatttgcaagggtcagctcggggacgctgtaagcggcaccgacgtgcgcatccgtaacggattgctgaactgtaacgactgttatatgcgatctagatccgctggccagccaacaaccctttag

SEQ ID NO: 183598 - protein, 1692 aa, Artificial Sequence
  derived and/or modified sequence
MSSAVGPRGPRPPTVPPPMQELPDLSHLTEEERNIIMAVMDRQKEEEEKEEAMLKCVVRDMAKPAACKTPRNAENQPHQPSPRLHQQFESYKEQVRKIGEEARRYQGEHKDDAPTCGICHKTKFADGCGHLCSYCRTKFCARCGGRVSLRSNNEDKVVMWVCNLCRKQQEILTKSGAWFFGSGPQQTSQDGTLSDTATGAGSEVPREKKARLQERSRSQTPLSTAAASSQDAAPPSAPPDRSKGAEPSQQALGPEQKQASSRSRSEPPRERKKTPGLSEQNGKGALKSERKRVPKTSAQPVEGAVEERERKERRESRRLEKGRSQDYPDTPEKRDEGKAADEEKQRKEEDYQTRYRSDPNLARYPVKPPPEEQQMRMHARVSRARHERRHSDVALPRTEAGAALPEGKAGKRAPAAARASPPDSPRAYSAERTAETRAPGAKQLTNHSPPAPRHGPVPAEAPELKAQEPLRKQSRLDPSSAVLMRKAKREKVETMLRNDSLSSDQSESVRPSPPKPHRSKRGGKKRQMSVSSSEEEGVSTPEYTSCEDVELESESVSEKGDLDYYWLDPATWHSRETSPISSHPVTWQPSKEGDRLIGRVILNKRTTMPKDSGALLGLKVVGGKMTDLGRLGAFITKVKKGSLADVVGHLRAGDEVLEWNGKPLPGATNEEVYNIILESKSEPQVEIIVSRPIGDIPRIPESSHPPLESSSSSFESQKMERPSISVISPTSPGALKDAPQVLPGQLSVKLWYDKVGHQLIVNVLQATDLPARVDGRPRNPYVKMYFLPDRSDKSKRRTKTVKKILEPKWNQTFVYSHVHRRDFRERMLEITVWDQPRVQEEESEFLGEILIELETALLDDEPHWYKLQTHDESSLPLPQPSPFMPRRHIHGESSSKKLQRSQRISDSDISDYEVDDGIGVVPPVGYRSSARESKSTTLTVPEQQRTTHHRSRSVSPHRGNDQGKPRSRLPNVPLQRSLDEIHPTRRSRSPTRHHDASRSPVDHRTRDVDSQYLSEQDSELLMLPRAKRGRSAECLHTTRHLVRHYKTLPPKMPLLQSSSHWNIYSSILPAHTKTKSVTRQDISLHHECFNSTVLRFTDEILVSELQPFLDRARSASTNCLRPDTSLHSPERERGRWSPSLDRRRPPSPRIQIQHASPENDRHSRKSERSSIQKQTRKGTASDAERVLPTCLSRRGHAAPRATDQPVIRGKHPARSRSSEHSSIRTLCSMHHLVPGGSAPPSPLLTRMHRQRSPTQSPPADTSFSSRRGRQLPQVPVRSGSIEQASLVVEERTRQMKMKVHRFKQTTGSGSSQELDREQYSKYNIHKDQYRSCDNVSAKSSDSDVSDVSAISRTSSASRLSSTSFMSEQSERPRGRISSFTPKMQGRRMGTSGRSIMKSTSVSGEMYTLEHNDGSQSDTAVGTVGAGGKKRRSSLSAKVVAIVSRRSRSTSQLSQTESGHKKLKSTIQRSTETGMAAEMRKMVRQPSRESTDGSINSYSSEGNLIFPGVRLGADSQFSDFLDGLGPAQLVGRQTLATPAMGDIQIGMEDKKGQLEVEVIRARSLTQKPGSKSTPAPYVKVYLLENGACIAKKKTRIARKTLDPLYQQSLVFDESPQGKVLQVIVWGDYGRMDHKCFMGVAQILLEELDLSSMVIGWYKLFPPSSLVDPTLTPLTRRASQSSLESSTGPPCIRS

SEQ ID NO: 183599 - DNA, 5079 bp, Artificial Sequence
  derived and/or modified sequence
atgagcagcgccgtgggaccgaggggtcctcgtccacccacggttccccctccaatgcaggagctgccagatctttcccatcttacagaggaggagaggaatataattatggccgttatggaccgacaaaaagaagaggaggagaaggaggaagcaatgttgaagtgcgtggtgagggacatggctaagccagcagcttgtaagactccacggaacgccgaaaaccagcctcatcagccttctccccggctgcaccagcagttcgaatcatacaaagaacaggtgcggaagatcggtgaggaggcacgccgctaccagggagaacacaaggatgacgcgcctacttgtggtatttgtcacaagaccaaatttgctgacggatgtggccatctctgctcgtattgcaggacaaagttctgtgcacggtgtggggggagggtaagtttaagatctaacaatgaggataaagtggtcatgtgggtgtgcaatctctgtcggaaacagcaagagatcttgacaaagtcaggcgcctggttctttggctccggccctcaacagacttcccaagatggcaccctatccgacactgcaactggagcaggcagcgaggtgcctagggaaaagaaggccagactgcaggagcgttctcgcagtcagacacccctcagtacagccgctgcatcctcccaggacgccgccccccctagcgcccccccggaccgcagtaaaggcgctgaaccaagccagcaggcactgggccctgaacagaaacaggcctccagtagaagccgttctgaacccccccgagaaaggaaaaaaacccctggattgtcagaacagaacggaaagggggcgttgaagtccgagagaaaaagagtgccgaaaacatcagcgcaacctgtcgagggcgcagtggaagaaagggaaagaaaagaacggagagagtcaagacggcttgaaaagggccgctcccaggactaccctgacacaccagagaagagagacgaaggcaaggcagctgacgaagagaaacagaggaaagaagaggattatcagactaggtatcgaagtgacccaaacctggctagatatccagtgaagcctccccctgaagaacagcagatgaggatgcacgcaagagtgagtcgcgcccggcacgagcgtcgccattccgacgtagcactgccccggaccgaggccggcgctgccttaccggagggaaaagccggaaagagggctcccgccgcagctcgcgcatccccaccagactctccacgagcttacagtgccgagaggacagctgaaacccgtgctcccggggctaagcaactgactaaccactctcctccagctccaagacacggcccagtccccgctgaggcacctgaattaaaggcgcaggaaccgctgaggaagcagtctcggctggatcccagttcagcagttctgatgagaaaagcgaaaagggaaaaagttgagaccatgctgagaaacgatagcctgagctcggaccagtccgaaagcgtgaggccttcaccaccaaaaccccaccgcagcaaacgcggcggcaaaaagaggcaaatgtctgtttcttcttccgaggaggagggggtgtccacccccgaatacacctcatgcgaagacgtggaattggagagcgaaagcgtctcagagaaaggagacttggactactattggttggaccccgcaacatggcactccagagaaacctctcctattagttcacacccggtgacctggcagcctagcaaggagggtgacaggttgatagggcgcgttatcctcaacaaaaggaccacaatgcctaaggactcaggcgctctcctggggcttaaagttgtcgggggcaagatgacagacctagggcgccttggagccttcattactaaagtcaagaagggttcactcgctgacgttgtgggccatctgcgggccggcgatgaggtgttggaatggaacgggaagccacttcctggggcaacaaacgaggaagtgtataacatcattctggagtctaagtccgaaccacaggttgaaatcatcgtgagcaggcctattggggatatccctcgcattccggagagttcccacccgcctctcgaatcctcatcctctagctttgagtctcaaaagatggaaaggccgtctatttctgttatatccccgacgtctcccggggccctcaaggacgcccctcaggtgctgcctggacaactgtctgtgaaactgtggtatgacaaggtcggccaccagcttattgtaaacgtcctgcaggctacggacttgccagctcgagtggacgggcgcccccgtaacccctatgtcaagatgtatttcctacccgataggagcgacaaaagtaagcggcgcaccaagaccgtgaaaaagattctggagccgaaatggaatcaaaccttcgtctactcacacgtccaccggagggattttagagaacggatgctcgaaatcacagtttgggatcagccacgcgtacaggaggaggaaagcgagttccttggcgagattctgatcgagctggagaccgcccttctagatgacgaaccacattggtataaactccagacgcacgacgaatcctctctgccactgccacagccttcgccattcatgcccagacgccatattcacggcgagtcgtcttcaaaaaagctgcagcgttcacagagaattagtgactctgacatttccgactacgaagttgatgacggcattggagtggtgcccccagtgggctataggtcctctgcccgcgagtctaaatctactacactcacagtccccgagcagcaacgcacaacccatcaccgtagtaggagcgtgagtcctcacagaggaaatgatcagggaaagcctcggagcaggctgcctaacgtgcctttacagcggagcctggatgagatacaccctacgcgccgctcgaggtctccaacccgacaccacgatgcaagtcggagtcctgtggaccacaggacccgggatgtagactcccaatatctcagcgaacaagattccgaactccttatgcttccacgggctaaaaggggtaggtctgcagagtgcctgcataccaccaggcacctcgtcaggcactacaagacgctgccgcctaaaatgccccttttgcagtcaagctcgcactggaatatctactcatcaatcctgccagcccataccaagacaaagtcggtgacacgacaggatattagcctgcatcatgagtgttttaatagcaccgtcctccgatttactgatgagatcctcgtgtctgaactccagccttttctggaccgggctaggtcagcctctaccaattgtctgcgtccagatacttcattgcatagccctgagcgagaaagggggagatggtcccccagcctggatagacgacgccctccctcgccgcggatacagatccagcacgcttcgcccgagaacgatcggcactctagaaagtcggagagatcctccatccaaaagcaaacgagaaaaggtaccgcctctgatgctgagcgggtcttgccaacatgtttgagccgcagggggcacgccgcacctcgggccactgatcagcctgtcatccgcgggaagcacccagccagatcgcggagcagtgaacactctagcattagaacgctctgctctatgcaccatctggtccccggtgggtccgcccccccctcaccactgttaacacggatgcaccgacagcgatcccccacgcaatccccgcctgctgacacttccttctcctctcgcagagggaggcagctcccccaagtgccagtgaggagcgggtctatagagcaagcgagtctggtggtcgaggaaaggactcgacagatgaagatgaaagtccatcggttcaagcagacaacggggagtggctcttcccaggagctcgacagagaacagtacagtaagtataatatacataaggatcagtatagatcgtgcgataatgtgtccgctaagtccagtgattccgatgtttccgacgtcagcgcaatttcaagaactagttctgcgagtaggcttagcagtacctccttcatgtccgaacagtctgaaagaccgagagggcggataagctccttcactcctaaaatgcagggacggcgaatgggcacatccgggcggtctatcatgaaaagtacaagcgtttccggagagatgtacaccttggagcacaatgatgggagccagtcagataccgcggtcgggacagtcggggcaggtggtaaaaagcggcgcagtagcctctctgcgaaggttgtggcaattgtctcacggaggtccaggtctaccagtcagctaagccagactgaatctggccataaaaagttgaaatctaccatccagagaagcacagaaactggaatggctgctgaaatgaggaaaatggtgagacaaccgtcacgagaatccacggacgggagtatcaacagttatagctctgagggtaatctgattttccccggagtgcgcctcggggccgattcccagttctctgatttcctggacgggctgggccctgcccaacttgtgggcaggcaaaccctggcaaccccggcaatgggcgacattcagataggcatggaagacaagaaaggccagctcgaggtcgaggtgattagggcgagatccttgactcaaaagccgggaagtaagtctacacccgcaccgtacgtcaaagtgtacctgctggaaaatggcgcttgtatcgcaaaaaaaaagactcggatcgctcggaagacccttgaccccctgtatcagcaatctcttgtgttcgacgagagcccccagggcaaagtgctgcaggtgatcgtctggggggactacggccgtatggaccataaatgctttatgggcgttgcgcagatactgcttgaggagttggacttaagttccatggtcatcgggtggtataagctattcccgccaagttctttagtagacccaacgttgacacctttaacccgccgtgcctcccagagcagtctggaaagctctacaggtcccccgtgcatccgctcttag

SEQ ID NO: 183600 - DNA, 5079 bp, Artificial Sequence
  derived and/or modified sequence
atgagcagcgctgtgggcccccggggcccccggccccccaccgtgcccccacccatgcaggagctgcctgacctgagccacctgacagaggaggagaggaacatcatcatggctgtgatggaccggcagaaggaggaggaggagaaggaggaggccatgctgaagtgtgtggtgcgggacatggccaagccagctgcctgcaagaccccaagaaatgctgagaaccagccccaccagcccagcccccggctgcaccagcagtttgagagctacaaggagcaggtgaggaagatcggggaggaggcccggcgctaccagggcgagcacaaggatgatgcccccacctgtggcatctgccacaagaccaagtttgctgatggctgcggccacctgtgcagctactgcaggaccaagttctgtgcccgctgtggcggccgggtgtccctgcggagcaacaatgaagacaaggtggtgatgtgggtgtgcaacctgtgcaggaagcagcaggagatcctgaccaagagcggggcctggttcttcggcagcggcccccagcagaccagccaggacggcaccctgagtgacacagccaccggggccggcagcgaggtgccccgggagaagaaggcccggctgcaggagaggagccgcagccagacccccctgagcacagctgctgccagcagccaggatgctgccccacccagcgcccccccagacaggagcaaaggagctgagcccagccagcaggccctgggccctgagcagaagcaggccagcagccgcagccgctctgagcccccccgggagaggaagaagaccccaggcctgtctgagcagaatggaaaaggagccctgaagtctgagaggaagagggtgcccaagaccagcgcccagcctgtggagggcgctgtggaggagcgggagaggaaggagcggcgggagagccggcggctggagaagggccgcagccaggactacccagacaccccagagaagagagatgagggcaaggccgcagatgaggagaagcagaggaaggaggaggactaccagacccgctacagaagtgaccccaacctggcccgctaccctgtgaagcccccacctgaggagcagcagatgaggatgcacgcccgggtgtcccgggcccggcatgagcggcggcacagtgatgtggccctgcccaggacagaggccggggccgccctgcctgagggcaaggccggcaagagggccccagctgctgcccgggccagccccccagacagcccccgggcctacagcgctgagaggacagctgagacccgggcccctggggccaagcagctgaccaaccacagccccccagcccccaggcatggccctgtgcctgctgaggcccctgagctgaaggcccaggagcccctgaggaagcagagccggctggaccccagcagcgctgtgctgatgaggaaggccaagcgggagaaggtggagaccatgctgagaaatgacagcctgagcagtgaccagagcgagagcgtgcggcccagcccccccaagccccacaggagcaagaggggcggcaagaagaggcagatgtctgtgagcagcagcgaggaggagggcgtgtccaccccagagtacaccagctgtgaagatgtggagctggagagcgagagcgtgtctgagaagggggacctggactactactggctggaccctgccacctggcacagccgggagaccagccccatcagcagccaccctgtgacctggcagcccagcaaggagggggaccggctgattggccgggtcatcctgaacaagaggaccaccatgcccaaggacagcggggccctgctgggcctgaaggtggtgggcggcaagatgacagacctgggccgcctgggcgccttcatcaccaaggtgaagaagggcagcctggctgatgtggtgggccacctgcgggctggagatgaggtgctggagtggaatggcaagcccctgcccggggccaccaatgaggaggtgtacaacatcatcctggagagcaagtctgagccccaggtggagatcatcgtgtcccggcccatcggggacatcccccgcatccctgagagcagccacccccccctggagagcagcagcagcagctttgagagccagaagatggagcggcccagcatcagcgtcatcagccccaccagccctggggccctgaaggatgccccccaggtgctgcccggccagctgtctgtgaagctgtggtatgacaaggtgggccaccagctgattgtgaatgtgctgcaggccacagacctgcctgcccgggtggatggccggcccaggaacccctacgtgaagatgtacttcctgcctgacagaagtgacaagagcaagaggaggaccaagacagtgaagaagatcctggagcccaagtggaaccagacctttgtgtacagccacgtgcaccggcgggacttccgggagaggatgctggagatcaccgtgtgggaccagccccgggtgcaggaggaggagagcgagttcctgggggagatcctgattgagctggagacagccctgctggatgatgagccccactggtacaagctgcagacccatgatgagagcagcctgcccctgccccagcccagccccttcatgccccggcggcacatccacggggagagcagcagcaagaagctgcagaggagccagaggatcagtgacagcgacatcagtgactatgaggtggatgatggcatcggcgtggtgccccctgtgggctaccgcagcagcgcccgggagagcaagagcaccaccctgactgtgcctgagcagcagaggaccacccaccacaggagccgctctgtgagcccccacagaggaaatgaccagggcaagcccaggagccggctgcccaacgtgcccctgcagaggagcctggatgagatccaccccaccaggaggagccgcagccccaccaggcaccatgatgccagccgcagccctgtggaccacaggaccagagatgtggacagccagtacctgtctgagcaggacagcgagctgctgatgctgccccgggccaagaggggccgctctgcagaatgtctgcacaccaccaggcacctggtgcgccactacaagaccctgccccccaagatgcccctgctgcagagcagcagccactggaacatctacagcagcatcctgcctgcccacaccaagaccaagtctgtgacccggcaggacatcagcctgcaccacgagtgcttcaacagcacagtgctgcgcttcacagatgagatcctggtgtctgagctgcagcccttcctggaccgggcccggagcgccagcaccaactgcctgcggccagacaccagcctgcacagccctgagcgggagcggggccgctggagccccagcctggacagaagaagaccacccagcccccgcatccagatccagcacgccagcccagaaaatgacagacacagcaggaagtctgagaggagcagcatccagaagcagaccaggaaaggaacagccagtgatgctgagcgggtgctgcccacctgcctgagcagaagaggacatgctgccccccgggccacagaccagcctgtgatccggggcaagcacccagcccggagccgcagcagcgagcacagcagcatccgcaccctgtgcagcatgcaccacctggtgcctgggggcagcgccccacccagccccctgctgaccaggatgcaccggcagaggagccccacccagagccccccagctgacaccagcttcagcagccggcggggccggcagctgccccaggtgcctgtgcgcagcggcagcattgagcaggccagcctggtggtggaggagaggacccggcagatgaagatgaaggtgcaccgcttcaagcagaccaccggcagcggcagcagccaggagctggaccgggagcagtacagcaagtacaacatccacaaggaccagtaccgcagctgtgacaacgtgtctgccaagagcagtgacagtgatgtgtctgatgtgtctgccatcagcaggaccagcagcgccagccggctgagcagcaccagcttcatgtctgagcagagcgagcggccccggggccgcatcagcagcttcacccccaagatgcagggccgcaggatgggcaccagcggccgcagcatcatgaagagcacctctgtgtctggagagatgtacaccctggagcacaatgatggcagccagagcgacacagctgtgggcaccgtgggcgccggcggcaagaagaggaggagcagcctgagcgccaaggtggtggccatcgtgagccgccgcagccgcagcaccagccagctgagccagacagaaagtggccacaagaagctgaagagcaccatccagaggagcacagagaccggcatggctgctgagatgaggaagatggtgcggcagcccagccgggagagcacagatggcagcatcaacagctacagcagcgagggcaacctgatcttccctggggtgcggctgggcgctgacagccagttcagtgacttcctggatggcctgggccctgcccagctggtgggccggcagaccctggccaccccagccatgggagacatccagatcggcatggaggacaagaagggccagctggaggtggaggtgatccgggcccggagcctgacccagaagccaggcagcaagagcaccccagccccctacgtgaaggtgtacctgctggagaatggagcctgcatcgccaagaagaagaccagaattgccaggaagaccctggaccccctgtaccagcagagcctggtgtttgatgagagcccccagggcaaggtgctgcaggtgattgtgtggggagactatggccgcatggaccacaagtgcttcatgggcgtggcccagatcctgctggaggagctggacctgagctccatggtgattggctggtacaagctgttcccccccagcagcctggtggaccccaccctgacccccctgacccggcgggccagccagagcagcctggagagcagcactggaccaccctgcatccgctcctag

SEQ ID NO: 183601 - DNA, 5079 bp, Artificial Sequence
  derived and/or modified sequence
atgagcagcgccgtgggcccccggggcccccggccccccaccgtgcctcctccaatgcaggagctgcctgatttgtcacatctgacagaagaagagcgcaatattatcatggcggtcatggaccgccagaaagaagaggaagagaaggaggaagctatgttgaaatgtgtggtgcgcgatatggcaaagcctgcggcctgcaaaactccaaggaacgctgaaaatcagccccaccagccaagtccgaggttgcatcagcagttcgaatcttacaaagagcaggtccgtaagataggtgaggaggcccgtcgatatcagggagagcataaagatgatgcccctacatgcgggatatgtcataagactaaattcgccgacggttgcggccatctatgttcttactgtaggactaaattctgcgcacggtgtggaggccgcgtgtccctgcgctcaaacaacgaggataaggttgtgatgtgggtatgcaacttgtgcagaaaacagcaagaaatcctgacgaaatccggtgcctggttcttcggtagtggaccccaacagaccagtcaggatggaacactgtccgatacggccactggcgccgggagcgaagtccccagggaaaagaaagcccgactgcaggaacgaagcagatcacagacacctctgtccaccgctgccgctagctcacaagatgccgctcccccatccgctcccccggacagaagcaaaggtgccgagccaagtcaacaggccttagggcccgaacaaaaacaggccagctcccgaagtcgctcagagcctccccgcgagcggaagaagaccccgggattaagcgaacagaacggcaaaggggccctgaaatcagaacgtaagagggtgcctaaaaccagcgctcagccggtggaaggggccgtcgaagagagagaacgtaaagagcgcagggaatcccgcaggctggaaaaagggaggagccaggactaccccgatacacctgaaaaaagagatgaggggaaagcggccgacgaggagaagcagagaaaggaggaggactatcagacacgctatagatcagatccaaatctggcgcggtatcccgtcaaacccccccccgaagagcagcagatgcgcatgcatgctcgcgtcagccgggcccgccatgaaaggaggcactctgatgttgcgctcccaagaaccgaggcaggggctgccctgcccgaaggcaaggcagggaagagagccccggctgcagcgagagcaagcccccccgatagcccacgggcctatagtgctgaacgaacggccgaaacaagagccccaggggcaaaacagctaacaaaccatagccctccggcgccgcgtcatggaccggtccctgccgaggcgcctgaacttaaggcccaggaacccttacggaagcagtcccggctcgatcccagctccgcagtacttatgaggaaagcaaaaagagaaaaagtcgaaaccatgcttcgaaacgactccctgtcatctgatcagagtgagtccgtccgaccgagccctccaaagccccatcgttcaaagaggggagggaagaaacgccagatgagtgtgagttcatccgaagaggaaggcgtatctacacctgaatacaccagctgcgaagacgtggagctggagtctgaaagtgtctccgaaaaaggagacctcgactattactggctagaccctgccacatggcatagtcgtgagacgtcccctatctcaagccatccagtaacatggcagcccagcaaggagggggatcgcctgattggaagagtcattctgaacaagcgaacaactatgcccaaggactctggcgcccttctcggattgaaagtcgtcggcggaaaaatgactgatctagggcgtctgggggccttcataacaaaggtcaaaaagggaagtctcgcagacgtcgtgggccatctcagggccggagatgaggtgctggaatggaatggcaaaccattacccggagcaacaaatgaagaggtttataatatcatacttgaatccaagtccgagcctcaggttgaaatcatcgtttcccggccgataggagatattccgcgaatccctgagagctctcatccccccctggagagctccagctcttcatttgaatcacaaaagatggagcgcccatcgatctcagtgatcagccctacttcccctggcgctctcaaggacgccccgcaggtccttcctggccaactcagcgtgaaactttggtacgataaggtggggcatcaactgatcgtcaatgtccttcaggctacagacctcccagcccgggtggacggtcgcccccggaatccatatgttaaaatgtacttcctgcccgaccggtctgataaatccaaacggcggaccaagaccgtgaagaagatcctggaacccaaatggaaccagacctttgtatactctcacgtgcatcgaagagactttagggagagaatgctggagatcacggtgtgggatcagccacgcgtccaagaggaagagagtgagttcttaggtgagattttaatagagctggaaacagcattgctcgatgacgagccacactggtataagctacaaactcacgacgagagtagcctgcctctcccccagccgtctccattcatgcccaggcgacacattcatggagagagctcttctaagaagttgcagcgctcacagaggatatccgatagcgatatttcagattacgaggttgatgacggtattggtgtcgtgcctcctgtgggataccgctcctccgcgcgcgagtccaagagcactactcttaccgtgcccgagcagcagcgaaccactcatcacagaagcagatctgtgagccctcacaggggcaatgatcaagggaagcctagatcccggttacccaatgtgccactccagcgaagtctggacgagatccatcccacccgccggtctcgaagcccaactagacaccacgatgcaagtagatcacccgtcgatcaccgcacacgcgacgttgatagccagtatttgagtgaacaggacagtgaactgctgatgctgccacgggctaaaagaggcagatcagccgagtgtctgcacaccacccgccatctggttaggcactataagactctccctcccaagatgccgctgttacagtcctcgagccactggaacatctactcaagcatccttccggcacacacaaaaactaaaagcgtgactagacaagatatatcgcttcaccacgagtgctttaactccaccgtcctgaggtttaccgatgaaatcctggtttccgagctgcaacctttcttagaccgcgctaggtccgccagcaccaactgcctgagacctgatacgagtctgcacagcccagaacgcgaaaggggacggtggtcaccatcacttgatcgccgcaggcctccttctccaaggatccagatccagcatgcatcaccagagaatgacaggcacagccgtaagtctgagcgatcctctatacagaaacagacacgcaaaggtaccgcttctgatgctgagagggtcctgccgacatgtctatcccgtcgcgggcacgccgctcctcgagcaacagaccaacctgtcattcggggcaaacatcccgcaagaagcaggagcagcgagcattcctccatccgcaccttgtgttctatgcaccatcttgtacccgggggtagcgcccctccaagtccactgttgacaagaatgcataggcagcgctcacccacacagagtccacctgccgacacatcatttagctctcgaagagggagacagctgccacaggtcccggtacggtctggctctatcgagcaggcaagcttagtggtggaggagcgtacccgccagatgaagatgaaagtgcatcggtttaagcagacaaccggcagtggctcctcacaagaattagaccgggagcagtacagcaagtacaatatccataaggaccagtatcgatcatgcgataacgttagcgccaagtcatccgatagtgatgtcagtgacgtgtctgccatctcacggacatcttcggccagcaggttgtcatctacctccttcatgagcgaacaaagcgagagacccagaggtagaatttcgagctttacccccaaaatgcagggccgcaggatgggaacaagtgggagaagcatcatgaaatccacctccgtgagtggcgagatgtacacactggaacataatgatggttcccaatcagatacggccgtgggtaccgtgggtgccggcggcaaaaagcgccgcagcagcctgtctgccaaagtggtggcaattgtcagtagaagatcacgtagcacatcacagctctctcagaccgaaagcggtcataagaaactcaagagtaccatccagaggtcaacagagacaggaatggcggcagagatgcggaagatggtcagacagccctcccgggaatcaacagatggatccattaactcctattctagcgagggaaatctgattttcccaggcgtccgcctgggggcggattctcagttctccgacttcctggatggcctcgggcccgcccagttggtgggacggcagactctcgccactcccgctatgggcgacatacagataggtatggaagacaaaaagggacagttggaggtggaggtcattagggcgagaagcttaacacagaagcctggcagcaagtctacaccggctccatatgtcaaggtttacctcctggaaaacggcgcatgtatcgccaagaaaaagacccggattgcacgcaagactctggaccctttgtaccagcagagcctggtgttcgatgagagtccccagggtaaggtcttgcaggtgatcgtgtggggtgactatggaagaatggatcacaagtgctttatgggagtcgcccagatcttgctggaagagctggatctgagtagtatggtgatcggctggtacaaactgtttccaccttccagtcttgtggacccaacgctgacaccactgacccgacgggcaagtcagtcttctttagagtcctcaaccggccctccttgtataaggtcctag

SEQ ID NO: 183602 - DNA, 5079 bp, Artificial Sequence
  derived and/or modified sequence
atgtcttccgcggtggggccacggggtcctaggcctcctacagtgccacccccaatgcaggaactgccagatctgagccatctcacggaggaggaaaggaacattatcatggctgttatggaccgccaaaaggaggaggaagagaaagaggaggccatgttaaagtgtgtcgtcagagatatggccaaacccgctgcctgcaagaccccacgcaatgcggagaatcagccccaccaaccttctccgagattgcaccaacagttcgagagctataaggagcaggtgagaaagattggtgaggaggcccgacgatatcaaggggagcacaaggacgacgctcctacatgtggtatctgccacaaaactaaattcgcagacggctgtgggcatctatgttcttattgccgcaccaaattctgtgctcgatgtggcggtcgagtttccctgaggagcaacaacgaggataaggtcgttatgtgggtgtgtaacctttgtcgcaagcagcaagagatcctcaccaagtctggcgcttggttctttgggtccggtccacaacagactagccaagatgggactttatccgacaccgccaccggggctgggagcgaggtcccaagggaaaagaaagccaggctgcaggaaagatctaggtctcagaccccactttctactgctgccgcatcctctcaggatgccgctcccccaagtgcccctcctgatagatcgaagggggctgagccaagtcaacaggcgcttggcccagagcagaaacaggcctcctctagatcccgatcagagcctcccagagagcgcaaaaagactcctgggcttagtgaacaaaatggtaaaggtgctctaaaaagtgagagaaagcgagtgccaaagacaagcgcacaacctgtcgagggtgcagtcgaggaaagggagaggaaggagcggcgtgaatcacgtcggcttgaaaaaggccgttcacaggattacccagatacaccggagaagcgcgacgaaggcaaagccgctgatgaagaaaaacagcggaaggaggaggactatcagactcggtaccgatccgaccccaatctagcccgttaccctgtaaagccgccaccagaggaacagcagatgagaatgcatgccagagtgtccagggctagacacgaaaggcggcattcagatgtggccttgcctcggacagaggcaggtgccgcactccctgagggcaaggctggtaagcgcgcaccggctgcagctcgtgcttcgcctcctgacagcccaagagcgtacagtgctgaacggacagctgagacgcgggcaccgggtgcaaaacagctgacaaaccacagtcccccagcccctcgccatgggcctgtgccagccgaggccccagagctgaaggcacaagaacctctcagaaagcagtcccggctggacccctcaagcgcagtccttatgcgtaaggccaagcgggagaaggtcgagacgatgttacgcaacgactcgctgtcctctgaccaatccgagtcagtgcgccctagcccccctaaaccgcacagaagtaagagaggtggcaaaaagcgccagatgagtgtctcaagctcagaagaagaaggcgttagcacgcctgaatacacaagctgcgaggacgtcgagcttgagtcagaatcggtgtcagaaaagggggatcttgactactactggctggaccccgctacttggcactcaagagaaacatccccgatcagctcccatcctgtcacttggcaaccttctaaggagggcgacagactgattggaagagtgatcttgaacaagcgcacaaccatgcctaaagattccggcgctctcctgggtttaaaagtggtcggaggcaagatgacagacttaggtcgcctgggggctttcattacgaaagtaaaaaaagggagcctggccgatgttgttggccacctgagagctggagacgaggtgcttgagtggaatggtaaacctcttccaggcgctactaatgaggaggtctataacatcatcttggagtctaaatccgaaccccaggtcgagataatcgtgtcaagacccataggagacattcctcgtatcccagaatctagtcatccccctctagaaagctccagtagctcgttcgaatctcagaagatggagagacccagcatttccgtcatcagcccaacatcaccgggtgccctgaaggatgcgccacaggtcctgccaggtcaactctctgtgaagctctggtacgataaagtgggacaccagctaattgtaaacgtcctgcaggcaactgatctgccagcacgcgttgacggacgaccaagaaatccttatgttaagatgtacttcctgccagacagatctgacaaaagcaagcgcaggaccaagaccgtgaagaaaatcctggaacccaagtggaaccaaacattcgtgtattctcatgttcaccggcgagatttccgggaaaggatgctggagatcaccgtatgggatcagccgcgtgtgcaggaagaagaaagcgagtttctcggagagatcctcatagagttggagacagccctcctggacgatgagcctcattggtataagctccaaacgcacgacgaaagctcacttccactgccccagccgtcgcccttcatgcccagaagacacatccacggggagtctagtagtaaaaagctgcaaagatcccagaggatctccgactcagacatttccgactacgaggtggacgacggtatcggggtggtaccgcctgtgggttatcgatcttctgcgagagaatccaaatcaaccacattaactgtccctgaacaacagcgaactacgcatcatcggagccgatctgtcagtccgcatagggggaatgaccagggtaagccacgtagccgccttccaaacgttcccctccagaggtcactcgatgagatccatcctaccaggcgctcccgaagtcctacaaggcatcatgatgctagtcggagtcctgtggaccacagaaccagagacgtggatagccaatatctgtccgagcaagacagtgaactcttgatgctgcctcgcgctaaaagagggagatctgctgaatgtctgcacaccacgcgccacctggtacgtcactacaagacactgccaccaaaaatgccactccttcagagctcttcccattggaacatttacagctctattctgcccgcacacactaaaactaagtccgtcaccaggcaggacataagcctgcaccacgaatgttttaactcaactgtattgaggtttacagacgaaattctcgtcagcgagctgcaaccctttctggatagagcacgaagcgctagcactaactgccttagaccggatactagcttgcacagtcccgagagggaaagaggtaggtggtcccccagtttagacagaagaaggccaccctcccctaggatccagattcagcacgcttctccagaaaacgaccgccactcacggaagagcgagaggagttcaattcagaagcaaactagaaaaggcacagcaagcgacgcggaaagggtcctgcctacttgcctgagcagacgcggacacgccgctcctcgggctactgaccagcctgtgatcaggggaaaacacccagctaggtcccgctcctcagaacactcttccatcagaacgctgtgcagtatgcatcaccttgtgcctggaggtagtgcacccccatctcctttgctcaccaggatgcatcgccagcgctctccaacgcagtcccctcccgctgacaccagcttctctagccgcagaggaaggcagctgccacaagttccagttaggagcggaagcatcgagcaggcttcgctggtagtcgaggagcgcacccgccagatgaagatgaaagtacaccgcttcaaacagactaccggatcagggagctcccaggaactggatcgcgaacagtatagtaagtacaatatccataaggatcagtacaggtcctgcgataacgtctcggccaaatcctctgattcggacgtgtcagacgtatccgcgatcagccgtaccagcagcgcatcccgcttaagtagcacatccttcatgtccgagcaatccgagaggcctcgtgggcgaatctcttccttcactccaaagatgcaaggcagaaggatggggaccagtgggaggtctattatgaagtcaacgtccgtgagtggggagatgtacacccttgagcacaatgacggctctcaatccgataccgcagtagggactgttggcgcaggcggaaaaaagagaaggtctagcctgagtgcaaaggtggtggcgatcgtgtctaggagatccagatccacttcccagctatcccagaccgagtccggacataagaagttaaagtctaccatccagagatcaactgagacggggatggctgcagagatgcgtaagatggtgcgacagccatccagagagagcaccgatggaagtattaatagttatagcagcgaggggaatttaattttccccggagtgcggctcggagctgattcacagttcagcgactttctcgacgggcttggaccagcacagctggtcggcaggcagaccctggcaacaccagcaatgggcgacatccagatcgggatggaggataaaaaaggacagctcgaagtcgaagtaatcagggctcggtccttaactcaaaaacccggaagtaaatctacccccgcaccctacgtgaaagtgtatttgcttgaaaatggcgcatgcatcgccaaaaagaagacaaggatcgccaggaaaaccttagatcccctgtatcagcagtctctcgttttcgacgaatcccctcaaggcaaggtcttacaagtgatcgtatggggtgattacggtagaatggatcataaatgcttcatgggggttgctcagatcttgctggaagaactggatctctcaagtatggtgattggttggtataagctatttcccccatccagtctggtagaccccacacttacccctctgactaggcgggcttcgcaatcatctctggaaagctctactgggcctccctgcatacgatcctag

SEQ ID NO: 183603 - DNA, 5079 bp, Artificial Sequence
  derived and/or modified sequence
atgtcctcggccgtggggccccgcggtcctcgcccacccacggtgcctccccccatgcaagagctgcccgacctgagccacctgaccgaagaggagaggaacattatcatggcagtgatggaccggcagaaggaagaggaggaaaaagaagaagccatgctcaagtgtgttgtcagggacatggcgaagcctgctgcctgcaaaacaccaagaaatgctgaaaaccagccccaccaaccttcaccgagattgcatcaacagtttgaaagctataaggaacaagtgagaaaaataggggaagaagcgcggcgttaccagggcgagcacaaagacgatgctccgacttgtggaatctgtcataaaacaaagtttgctgatgggtgcggtcatctctgctcctattgtcgcactaagttctgtgcgcgctgcggaggccgcgtgtctctacggtcaaacaacgaggacaaagtggttatgtgggtatgcaatttatgtcgaaagcaacaagaaatcttaaccaaatctggggcatggttctttggaagtggccctcagcagacaagtcaggatggaaccctgagtgatacagctacaggtgctggctctgaggtaccaagagaaaagaaagcacgactccaagagcgatcgcggtctcagacacccctaagcacagcagctgcctcctcccaggatgctgctcctcccagcgcaccaccagacaggagcaaaggggctgagccctcgcagcaagccttggggcctgaacagaagcaggcttcatccaggtctagaagtgaacctcctagagagagaaagaagaccccagggctttccgagcagaatggcaaaggagccctgaagagcgagcggaaacgcgtgccaaagacctcagcgcagcccgtggagggggccgtcgaagaacgggagcgcaaagaaaggcgggaaagccgaaggcttgagaaagggcgatcacaggattacccagacacgccggaaaaacgggatgagggcaaagcggcggatgaggaaaagcaaagaaaagaggaggattatcagaccaggtaccgcagcgacccgaacctagctcggtacccggtgaaaccgccgcctgaggagcagcagatgcgcatgcacgcccgggtgtcccgcgccaggcacgagcggcgccacagcgacgtggcgctcccgcgcaccgaggcgggcgcggcgctgccggagggcaaggccggcaaacgcgcgccggcggcagccagggcctcgccgccggactcgccgcgggcttactcggctgagagaactgcggagaccagggcgccgggcgccaagcagctaacgaaccacagcccgccggcgcccagacatgggccggttcccgcagaagccccggagctcaaagcccaggagcccctcaggaagcagagccgcctggaccccagctcggcggtcctcatgcggaaggccaagcgcgagaaggtggagaccatgctgcggaacgactctttgagctcagaccagtccgagtcggtgcggccgtccccgcccaagccgcaccggtccaagagaggcggcaagaagcggcagatgtcggtgagcagctctgaggaggagggcgtgtcgacgcccgagtacaccagctgcgaggacgtggagctggagagcgagagcgtcagcgagaaaggtgatttggattattactggttggatcctgccacgtggcacagccgggagacatcacctattagttcgcatcctgtaacgtggcaaccatctaaagagggggaccgattaattggacgtgttattcttaacaagagaacaaccatgcccaaagactcaggtgcattgctgggtctgaaagttgttggaggaaaaatgactgacttaggacgacttggtgctttcatcaccaaagtaaagaagggtagcctagcagatgtagttggacacctaagagcaggggatgaagttctagaatggaatggtaaacccctgccgggagctacaaatgaagaagtttacaacattattttagaatcaaaatcagaacctcaagttgaaattattgtttcaaggcctattggtgacattccccggattcctgagagctcccaccctccactggagtccagttcaagttcctttgaatctcagaagatggaaaggccttccatttctgttatttctccaacaagtcctggagctctaaaagatgccccacaagtcttaccagggcaactttctgtgaagttgtggtatgataaagtgggacaccagctgattgtaaatgttctgcaagcaacagatctacctgctagagtagatggacgtcctcgaaatccctatgtaaaaatgtattttcttccagatagaagtgataaaagtaaaaggaggaccaaaacagtaaagaaaatactagaaccaaaatggaatcaaacttttgtctattcacatgtacatcgtagagattttagagaacgaatgttagaaataactgtgtgggaccaaccaagagtgcaagaagaagaaagtgaatttcttggagagatcctcatagaattggagacagcgcttttagatgatgaaccgcattggtataaacttcagacacatgatgagtcttcactacctctgcctcagccatcacctttcatgccaaggcgacatattcatggagaaagctctagcaaaaagctacaaagatctcagcgaatcagtgatagtgacatctcagattatgaggttgatgatggtattggcgtagttcctccagtaggctataggtctagtgctagagaaagtaaatctacaacattaactgtgccagaacagcaaagaacaactcatcaccgctcacgttcagtatctcctcatcgcggcaatgatcagggaaagccgcgttcacgtttaccaaatgtgccattacagaggagtttagatgaaattcatccaacaagaaggtcacgttctccaaccagacaccatgatgcctcccgaagtccagttgatcatagaaccagagatgtggatagtcagtatttatcagaacaagacagtgagcttcttatgctgcccagagcaaaacgaggacgaagtgcagaatgcctacatactaccagacatcttgttaggcactataaaacattacctcccaagatgcctttattacagagcagttctcactggaatatttacagctcaattctgcctgcacatactaagaccaaatcagtgactagacaggacatttcccttcatcatgaatgctttaactcaacagtattgagatttactgatgaaatactggttagtgaactgcagccctttcttgacagggctaggagtgctagtaccaactgcttgagaccagatactagtttgcattcaccagaacgagaaaggggtagatggtccccctccctagataggagacgacctcctagtcccaggattcaaatccagcatgcgtctccggagaatgacaggcactccagaaagtctgaaagatctagcatccaaaaacagactaggaaaggcactgcctctgatgcagaaagggttctcccaacatgtctttctagaaggggacacgcagccccaagagcaactgatcagccagtcattaggggaaaacatcctgctcgctcaaggtcgagtgagcactctagtatcagaacactgtgttctatgcaccaccttgtccctggagggtcggcgccaccttctccgcttctgacaagaatgcaccgacagagaagtccaacacaatctcctccagcagacacatcgttcagcagtcgcaggggaagacagctcccacaagtgccagtgagaagcggcagtatagaacaagcaagcttagtagtggaggagcgaacaagacagatgaaaatgaaagtgcatcgatttaagcagacaacagggtctggttctagtcaagaacttgatcgcgagcaatattccaagtataacatacataaagatcagtacagaagctgtgataacgtctctgccaaatcatcagatagtgatgtcagtgatgtttccgccatttcccgaaccagcagtgcctcacgcctcagcagcacaagctttatgtcagagcaatctgagcgccccaggggtagaatcagttcatttacccccaaaatgcaaggcagacggatggggacttcaggaagatccatcatgaagagcaccagtgtcagtggagagatgtacacactggagcataatgacggcagccagtcagacacagctgtgggtacagttggagcaggtggaaagaaacggagatccagccttagtgccaaagtggttgccatagtgtctcgaaggagtagaagcacatcccagcttagtcaaacagagtcgggccacaaaaagttaaaaagtaccatccagagaagcacagaaacaggcatggcagctgaaatgagaaagatggtaaggcagccgagccgagagtctactgatggcagcatcaacagttacagctctgagggcaatttaatatttcctggagtgcgactgggagctgacagtcaattcagtgattttcttgatggattgggaccagcccagcttgttggccgccaaacccttgccacccctgcaatgggtgatatacaaataggaatggaggacaaaaagggccaattagaagtggaagtcattagagcacgaagcctcacacaaaagcctggttccaaatctacacctgctccatatgtcaaagtatatcttttggaaaatggggcctgtatagccaagaagaagacaagaattgcacgaaaaacccttgatcctttgtatcagcagtctctggtttttgatgaaagtccacagggtaaagttcttcaggtgattgtctggggagactatggcagaatggaccacaaatgctttatgggtgtggctcagatcttgttggaagaactcgacctgtccagcatggtgatcggatggtacaaattgttcccaccgtcctcactggtggatcccacactcactcccctcacccggcgggcttcccagtcatctctggaaagttcaactgggcctccctgtattcgatcatag

SEQ ID NO: 183604 - DNA, 5079 bp, Artificial Sequence
  derived and/or modified sequence
atgagcagcgccgtgggccccagaggccccagaccccccaccgtgcccccccccatgcaggagctgcccgacctgagccacctgaccgaggaggagagaaacatcatcatggccgtgatggacagacagaaggaggaggaggagaaggaggaggccatgctgaagtgcgtggtgagagacatggccaagcccgccgcctgcaagacccccagaaacgccgagaaccagccccaccagcccagccccagactgcaccagcagttcgagagctacaaggagcaggtgagaaagatcggcgaggaggccagaagataccagggcgagcacaaggacgacgcccccacctgcggcatctgccacaagaccaagttcgccgacggctgcggccacctgtgcagctactgcagaaccaagttctgcgccagatgcggcggcagagtgagcctgagaagcaacaacgaggacaaggtggtgatgtgggtgtgcaacctgtgcagaaagcagcaggagatcctgaccaagagcggcgcctggttcttcggcagcggcccccagcagaccagccaggacggcaccctgagcgacaccgccaccggcgccggcagcgaggtgcccagagagaagaaggccagactgcaggagagaagcagaagccagacccccctgagcaccgccgccgccagcagccaggacgccgccccccccagcgccccccccgacagaagcaagggcgccgagcccagccagcaggccctgggccccgagcagaagcaggccagcagcagaagcagaagcgagccccccagagagagaaagaagacccccggcctgagcgagcagaacggcaagggcgccctgaagagcgagagaaagagagtgcccaagaccagcgcccagcccgtggagggcgccgtggaggagagagagagaaaggagagaagagagagcagaagactggagaagggcagaagccaggactaccccgacacccccgagaagagagacgagggcaaggccgccgacgaggagaagcagagaaaggaggaggactaccagaccagatacagaagcgaccccaacctggccagataccccgtgaagcccccccccgaggagcagcagatgagaatgcacgccagagtgagcagagccagacacgagagaagacacagcgacgtggccctgcccagaaccgaggccggcgccgccctgcccgagggcaaggccggcaagagagcccccgccgccgccagagccagcccccccgacagccccagagcctacagcgccgagagaaccgccgagaccagagcccccggcgccaagcagctgaccaaccacagcccccccgcccccagacacggccccgtgcccgccgaggcccccgagctgaaggcccaggagcccctgagaaagcagagcagactggaccccagcagcgccgtgctgatgagaaaggccaagagagagaaggtggagaccatgctgagaaacgacagcctgagcagcgaccagagcgagagcgtgagacccagcccccccaagccccacagaagcaagagaggcggcaagaagagacagatgagcgtgagcagcagcgaggaggagggcgtgagcacccccgagtacaccagctgcgaggacgtggagctggagagcgagagcgtgagcgagaagggcgacctggactactactggctggaccccgccacctggcacagcagagagaccagccccatcagcagccaccccgtgacctggcagcccagcaaggagggcgacagactgatcggcagagtgatcctgaacaagagaaccaccatgcccaaggacagcggcgccctgctgggcctgaaggtggtgggcggcaagatgaccgacctgggcagactgggcgccttcatcaccaaggtgaagaagggcagcctggccgacgtggtgggccacctgagagccggcgacgaggtgctggagtggaacggcaagcccctgcccggcgccaccaacgaggaggtgtacaacatcatcctggagagcaagagcgagccccaggtggagatcatcgtgagcagacccatcggcgacatccccagaatccccgagagcagccacccccccctggagagcagcagcagcagcttcgagagccagaagatggagagacccagcatcagcgtgatcagccccaccagccccggcgccctgaaggacgccccccaggtgctgcccggccagctgagcgtgaagctgtggtacgacaaggtgggccaccagctgatcgtgaacgtgctgcaggccaccgacctgcccgccagagtggacggcagacccagaaacccctacgtgaagatgtacttcctgcccgacagaagcgacaagagcaagagaagaaccaagaccgtgaagaagatcctggagcccaagtggaaccagaccttcgtgtacagccacgtgcacagaagagacttcagagagagaatgctggagatcaccgtgtgggaccagcccagagtgcaggaggaggagagcgagttcctgggcgagatcctgatcgagctggagaccgccctgctggacgacgagccccactggtacaagctgcagacccacgacgagagcagcctgcccctgccccagcccagccccttcatgcccagaagacacatccacggcgagagcagcagcaagaagctgcagagaagccagagaatcagcgacagcgacatcagcgactacgaggtggacgacggcatcggcgtggtgccccccgtgggctacagaagcagcgccagagagagcaagagcaccaccctgaccgtgcccgagcagcagagaaccacccaccacagaagcagaagcgtgagcccccacagaggcaacgaccagggcaagcccagaagcagactgcccaacgtgcccctgcagagaagcctggacgagatccaccccaccagaagaagcagaagccccaccagacaccacgacgccagcagaagccccgtggaccacagaaccagagacgtggacagccagtacctgagcgagcaggacagcgagctgctgatgctgcccagagccaagagaggcagaagcgccgagtgcctgcacaccaccagacacctggtgagacactacaagaccctgccccccaagatgcccctgctgcagagcagcagccactggaacatctacagcagcatcctgcccgcccacaccaagaccaagagcgtgaccagacaggacatcagcctgcaccacgagtgcttcaacagcaccgtgctgagattcaccgacgagatcctggtgagcgagctgcagcccttcctggacagagccagaagcgccagcaccaactgcctgagacccgacaccagcctgcacagccccgagagagagagaggcagatggagccccagcctggacagaagaagaccccccagccccagaatccagatccagcacgccagccccgagaacgacagacacagcagaaagagcgagagaagcagcatccagaagcagaccagaaagggcaccgccagcgacgccgagagagtgctgcccacctgcctgagcagaagaggccacgccgcccccagagccaccgaccagcccgtgatcagaggcaagcaccccgccagaagcagaagcagcgagcacagcagcatcagaaccctgtgcagcatgcaccacctggtgcccggcggcagcgccccccccagccccctgctgaccagaatgcacagacagagaagccccacccagagcccccccgccgacaccagcttcagcagcagaagaggcagacagctgccccaggtgcccgtgagaagcggcagcatcgagcaggccagcctggtggtggaggagagaaccagacagatgaagatgaaggtgcacagattcaagcagaccaccggcagcggcagcagccaggagctggacagagagcagtacagcaagtacaacatccacaaggaccagtacagaagctgcgacaacgtgagcgccaagagcagcgacagcgacgtgagcgacgtgagcgccatcagcagaaccagcagcgccagcagactgagcagcaccagcttcatgagcgagcagagcgagagacccagaggcagaatcagcagcttcacccccaagatgcagggcagaagaatgggcaccagcggcagaagcatcatgaagagcaccagcgtgagcggcgagatgtacaccctggagcacaacgacggcagccagagcgacaccgccgtgggcaccgtgggcgccggcggcaagaagagaagaagcagcctgagcgccaaggtggtggccatcgtgagcagaagaagcagaagcaccagccagctgagccagaccgagagcggccacaagaagctgaagagcaccatccagagaagcaccgagaccggcatggccgccgagatgagaaagatggtgagacagcccagcagagagagcaccgacggcagcatcaacagctacagcagcgagggcaacctgatcttccccggcgtgagactgggcgccgacagccagttcagcgacttcctggacggcctgggccccgcccagctggtgggcagacagaccctggccacccccgccatgggcgacatccagatcggcatggaggacaagaagggccagctggaggtggaggtgatcagagccagaagcctgacccagaagcccggcagcaagagcacccccgccccctacgtgaaggtgtacctgctggagaacggcgcctgcatcgccaagaagaagaccagaatcgccagaaagaccctggaccccctgtaccagcagagcctggtgttcgacgagagcccccagggcaaggtgctgcaggtgatcgtgtggggcgactacggcagaatggaccacaagtgcttcatgggcgtggcccagatcctgctggaggagctggacctgagcagcatggtgatcggctggtacaagctgttcccccccagcagcctggtggaccccaccctgacccccctgaccagaagagccagccagagcagcctggagagcagcaccggccccccctgcatcagaagctag

SEQ ID NO: 183605 - protein, 2036 aa, Artificial Sequence
  derived and/or modified sequence
MFSKKPHGDVKKSTQKVLDTKKDALTRLKHLRIVIENAESIDLKQFFDQHFSHIYYVFFENFVTIEASLKQKGHKSQREELDAILFIFEKILQLLPERIHQRWQFHSIGLILKKLLHTGNSLKIRREGVRLFLLWLQALQNNCSKEQLWMFSCLIPGFSAPQSEHGPRTLDNLINPPLNLQETQVTIEEITPLVPPQSGDKGQEDLTSYFLEALLKYIVIQVKSLEWKNKENQERGFSFLFSHFKKYYLPYIFPNICKENSLYHPILDIPQMRPKPHYVVIKKDAETNEAIYCTKEPFIKARVIVIRWLVSFWLEPKPHTGPHIPGMEGEVLPKNIQRAAASLVSREESKNDNADKTDRTTEPEQSHSNTSTLTEREPSSSSLCSIDEEHLTDIEIVRRVFSSKRSNVNFVTEIFRQAFLLPICEAAAMRKVVKVYQEWIQQEEKPLFMQEPEEIVITSSDLPCIENVTDHDISMEEGEKREEENGTNTADHVRNSSWAKNGSYQGALHNASEEATEQNIRAGTQAVLQVFIINSSNIFLLEPANEIKNLLDEHTDMCKRILNIYRYMVVQVSMDKKTWEQMLLVLLRVTESVLKMPSQAFLQFQGKKNMTLAGRLAGPLFQTLIVAWIKANLNVYISRELWDDLLSVLSSLTYWEELATEWSLTMETLTKVLARNLYSLDLSDLPLDKLSEQKQKKHKGKGVGHEFQKVSVDKSFSRGWSRDQPGQAPMRQRSATTTGSPGTEKARSIVRQKTVDIDDAQILPRSTRVRHFSQSEETGNEVFGALNEEQPLPRSSSTSDILEPFTVERAKVNKEDMSQKLPPLNSDIGGSSANVPDLMDEFIAERLRSGNASTMTRRGSSPGSLEIPKDLPDILNKQNQMRPIDDPGVPSEWTSPASAGSSDLISSDSHSDSFSAFQYDGRKFDNFGFGTDTGVTSSADVDSGSGHHQSAEEQEVASLTTLHIDSETSSLNQQAFSAEVATITGSESASPVHSPLGSRSQTPSPSTLNIDHMEQKDLQLDEKLHHSVLQTPDDLEISEFPSECCSVMAGGTLTGWHADVATVMWRRMLGILGDVNSIMDPEIHAQVFDYLCELWQNLAKIRDNLGISTDNLTSPSPPVLIPPLRILTPWLFKATMLTDKYKQGKLHAYKLICNTMKRRQDVSPNRDFLTHFYNIMHCGLLHIDQDIVNTIIKHCSPQFFSLGLPGATMLIMDFIVAAGRVASSAFLNAPRVEAQVLLGSLVCFPNLYCELPSLHPNIPDVAVSQFTDVKELIIKTVLSSARDEPSGPARCVALCSLGIWICEELVHESHHPQIKEALNVICVSLKFTNKTVAHVACNMLHMLVHYVPRLQIYQPDSPLKIIQILIATITHLLPSTEASSYEMDKRLVVSLLLCLLDWIMALPLKTLLQPFHATGAESDKTEKSVLNCIYKVLHGCVYGAQCFSNPRYFPMSLSDLASVDYDPFMHLESLKEPEPLHSPDSERSSKLQPVTEVKTQMQHGLISIAARTVITHLVNHLGHYPMSGGPAMLTSQVCENHDNHYSESTELSPELFESPNIQFFVLNNTTLVSCIQIRSEENMPGGGLSAGLASANSNVRIIVRDLSGKYSWDSAILYGPPPVSGLSEPTSFMLSLSHQEKPEEPPTSNECLEDITVKDGLSLQFKRFRETVPTWDTIRDEEDVLDELLQYLGVTSPECLQRTGISLNIPAPQPVCISEKQENDVINAILKQHTEEKEFVEKHFNDLNMKAVEQDEPIPQKPQSAFYYCRLLLSILGMNSWDKRRSFHLLKKNEKLLRELRNLDSRQCRETHKIAVFYVAEGQEDKHSILTNTGGSQAYEDFVAGLGWEVNLTNHCGFMGGLQKNKSTGLTTPYFATSTVEVIFHVSTRMPSDSDDSLTKKLRHLGNDEVHIVWSEHTRDYRRGIIPTEFGDVLIVIYPMKNHMFSIQIMKKPEVPFFGPLFDGAIVNGKVLPIMVRATAINASRALKSLIPLYQNFYEERARYLQTIVQHHLEPTTFEDFAAQVFSPAPYHHLPSDADH

SEQ ID NO: 183606 - DNA, 6222 bp, Artificial Sequence
  derived and/or modified sequence
atgttttccaagaaaccccacggcgatgtaaagaagtctacccagaaggtgttggatacgaagaaggacgcactcacgcggcttaaacaccttcgcatagttatcgagaatgcggaatctattgatttgaaacaattcttcgatcagcacttttcccatatttactatgtgttctttgagaatttcgtgacaattgaggcctccctgaagcagaagggtcacaagtcacagagggaagaacttgacgccatcctgtttatctttgaaaagatcctgcagctcctgcctgagcggatacaccaacgatggcagtttcacagtattggcttgattctcaagaagctgctgcatactggaaacagcctgaaaatccggcgggaaggagtgcggctctttctgctttggttacaggctctgcagaacaattgtagtaaagaacagttatggatgttttcctgtctcatcccaggtttcagtgccccccagagcgaacacggcccgaggaccttggacaacctgatcaatccccctttaaacctgcaggagacgcaagtgaccattgaagagattacccccctcgtgcctccacagtctggcgacaagggtcaggaagaccttacctcttattttctagaagcactgttaaaatacattgtcatacaggtgaagtccctggagtggaaaaacaaggaaaatcaggaaagagggttctcttttctcttctctcactttaagaagtactatctaccatacatcttccctaatatttgtaaagaaaacagcctgtaccaccctatactcgatatcccccagatgcgcccaaagcctcactatgtggtcatcaagaaggatgccgagaccaacgaggccatatactgcacaaaggaaccttttatcaaggccagagtgattgtgatcagatggttggtttcattctggcttgaaccaaagcctcacacaggcccgcacatccccggaatggaaggtgaggtcctccccaagaacattcagagggctgcagcctccctggttagcagggaagaaagcaagaacgacaatgccgacaaaacggaccggactacagagccagagcagtcacactctaataccagcaccctgacagagagagagccatcctcttccagtctgtgcagtattgatgaggaacatctgaccgacatcgagatcgtgagacgtgtttttagttctaagagatctaatgtcaacttcgttactgaaatctttcgtcaagcattcctcctccctatttgtgaagccgccgctatgcggaaagtcgttaaagtgtaccaagaatggattcagcaggaagaaaagccgctatttatgcaagagcccgaagagatagtgattacgagctccgatttaccatgcatcgagaacgtcacagaccacgacatcagtatggaggaaggcgagaaaagagaggaggagaatgggaccaatacagcggaccacgtgagaaacagcagctgggctaagaacggcagctatcagggggctcttcataacgcgtcagaagaagcaaccgagcaaaacatccgagccgggactcaggcagtgttacaggtttttattattaactcatcgaatatctttctgcttgagcccgccaatgaaattaaaaatctgctggacgagcacactgacatgtgcaagcggattttgaacatttaccgctacatggtagtgcaggtgagcatggacaaaaaaacctgggagcaaatgctgttagtcctgctgcgcgtgacggaatccgtgctgaagatgccctcccaggctttcctgcagtttcaaggcaagaaaaacatgacactggccgggagactcgctggaccactgttccagaccttgatcgtcgcttggattaaggctaatctcaacgtctatatttctcgggagctctgggatgacctgttatcagtcctgtcctccttaacatattgggaagagctggcgaccgaatggagccttacgatggagacactgactaaagtgctggcacgcaatctgtactctctagacctgtcagatctgcccctcgacaagttatccgagcagaagcagaaaaagcacaaaggaaagggagttggccacgagttccagaaggtgagcgtggacaaatctttctcccggggctggtctcgtgatcagccaggccaagcacctatgcgccagcgaagcgctacaacaacaggcagccccggaacagaaaaagcacgatccattgtccgacagaagactgtggacattgatgacgcccagatactcccccggtctactcgcgttaggcactttagccaatctgaagagaccggtaacgaggtgtttggagcgctcaacgaggagcaacctctgcccaggtcttcgtccacgtctgacatcctggaaccctttaccgtggagcgcgccaaggtcaataaggaagatatgagccagaagctgccccccctgaacagcgacatagggggatcttctgctaacgttccagatctaatggatgagttcatcgccgagcggctgagaagtggcaacgccagtactatgacccggaggggctctagcccaggatccctggagattcccaaggacctccccgacatcttaaataaacaaaaccagatgaggcctattgacgacccaggcgtgcccagcgagtggacgtcgccagcgtctgctggatcttcagacttaatttccagcgacagccactctgattccttctctgcattccagtacgacggacgaaaatttgataacttcggctttgggacagacacaggcgtcaccagctctgcagacgttgactctggctccggccatcaccagtccgctgaggagcaagaggtggccagccttactacccttcacattgatagtgaaactagttccctgaatcaacaagccttctcagccgaagtggctactattacagggtctgagagtgcaagccccgtgcactcgcccctcggctccagatcccagactccatctcccagtacacttaatatcgaccatatggagcagaaagacctgcagctggacgagaaattgcaccattctgtactgcaaaccccagacgacctggagatatcagaatttccttctgagtgttgcagcgtgatggcagggggaaccctcacaggctggcatgcagatgtggcaaccgtgatgtggcggaggatgcttggcattttaggagatgtgaatagcataatggaccccgaaatccatgcccaggtcttcgattacttatgtgaactttggcagaacctggccaagatccgggataaccttgggatttcgactgataaccttaccagtcccagtccccccgtactcataccgccactaagaattctgaccccttggttgtttaaggcaactatgctcaccgacaaatataaacaaggcaaacttcacgcatacaaactgatctgcaacaccatgaagcgccgacaagacgtatcacctaacagggactttctcacccacttttacaacattatgcactgtgggttgctgcacatagaccaggacattgtaaacaccattatcaagcattgctccccccagttcttttccctgggtttgcctggcgccaccatgttgatcatggatttcatcgttgcggccggccgcgtggcctcatcagcgtttctcaacgcaccccgcgtggaagcccaagtgctgttaggctctctggtatgcttcccaaatctgtactgcgagttgccttccttacaccccaacattccagatgttgcagtgtctcagtttactgatgtgaaagaactcatcattaaaacagttctgagcagtgccagagatgaaccatcgggccccgctcggtgcgtggcactgtgttccctgggtatttggatctgcgaagaactggtccacgagtcgcaccacccacaaatcaaggaagctctgaacgtgatttgcgtgtccttgaagtttactaataaaactgtggctcatgtggcctgcaacatgctgcatatgttggtccattatgtgcctagactccagatttaccagcccgactcacccttgaagattatccagattttgattgcaacaattacccatctgctgccaagcaccgaagcctcctcctacgagatggataaacggctggttgtctctctgctgctgtgcctgctggattggatcatggccctccctctgaaaacactcctccaaccctttcacgcgacaggcgctgaatcagacaagacagagaagtcagtcctcaactgcatctacaaggtactccatggctgcgtgtacggagcacagtgttttagcaacccaagatacttcccgatgtcattgtccgaccttgcttcggtagattacgaccccttcatgcaccttgaatccctcaaggagcctgagcccctgcatagtcctgacagcgagcggtctagtaaactccagcctgtgactgaagtcaagacccaaatgcagcatgggttgatatctatagcggctcggaccgttatcacccatcttgtgaaccacttagggcattacccaatgagcggcggccccgccatgttgacctcccaggtatgtgaaaaccatgacaaccattatagcgagtcaacagagctatctcctgagttgttcgagtcacccaacatccagttcttcgtgctgaataacacaactcttgtgtcctgcattcagatccggagtgaggaaaatatgccgggtgggggtctgagcgccggcctagcttccgcaaattctaatgtgagaatcatagttcgagacctgtcgggcaagtattcttgggactccgcaatcctttatggaccaccacccgtctcggggctaagcgagcctacctcattcatgctttcccttagccaccaagaaaagccggaagagccccctacatcaaacgaatgtctcgaagacattaccgtgaaagatggacttagtctccaatttaagaggttccgggagacggtgccaacatgggatactattagagatgaggaggatgtgctcgatgaactgcttcaatatttgggcgtgacatcacccgagtgcctccagcgtactgggatctctctgaacattcctgcccctcagccagtctgcattagtgagaagcaggagaatgacgtgataaacgccatcctgaagcagcacactgaggagaaggagtttgtggaaaagcattttaacgatctgaacatgaaggcagttgagcaggatgagcccatcccccagaagcctcagtcagccttttactattgtcgtttactgctctcaatcctgggaatgaactcgtgggacaagagaaggtcgttccatctgctcaagaagaatgaaaagctgctgagggagctccgcaacctggactccaggcaatgccgggaaactcacaaaatcgcggtgttctacgtcgctgaaggccaggaggataagcattccatactcacgaataccggtggctctcaggcgtacgaggactttgtcgctggtttgggttgggaagtcaatctgaccaaccattgcggcttcatgggaggccttcagaagaataagtctacaggtttgactacaccatactttgcaacatcaaccgtggaggtgatattccatgtttctacacgaatgccctctgattctgatgacagcctgacgaagaaactgagacacctgggcaacgatgaagtgcatatcgtctggagtgagcatacacgcgattataggcgagggatcatcccaaccgagttcggagacgtactgattgtgatatatccaatgaagaatcatatgttctccattcaaattatgaagaagcctgaagtcccattctttgggccgcttttcgatggggctatcgttaatggcaaggtgctgcctattatggtgcgggccactgcgatcaacgccagccgggcactgaagagcttgattccactctaccagaacttttatgaagagagagcccgctacctccaaaccatcgttcagcaccacctcgagcccactacctttgaagatttcgcagctcaggtgttttctcctgcgccctaccaccatcttccgagcgacgctgaagagaggaatgcggtgattgttctgttcctgcctaaacccccactggagaatataggccatcttaaggcaccaacacagcgcttctaccccgttaaactgcctcagcagcgccgatag

SEQ ID NO: 183607 - DNA, 6111 bp, Artificial Sequence
  derived and/or modified sequence
atgttcagcaaaaagccccatggcgacgttaagaagagtacccagaaggtgctggatacaaagaaggatgctctgactaggctgaaacatctgcggatcgtgattgagaatgcagagagcattgatttaaaacaattcttcgaccagcacttctcacacatctactacgtattctttgaaaactttgtcaccatagaggcaagcctcaagcaaaaagggcacaaatctcaaagagaggaacttgatgccatcctcttcatattcgaaaagatacttcaactgctacctgagcggatccatcagcgatggcagtttcacagtataggacttatcctgaaaaaactcctgcacacaggcaattctcttaagatccggcgggagggggttaggttattccttctatggctgcaagccctacagaacaattgctctaaagagcagctctggatgttcagttgcctcatcccaggcttttcagctccgcaatctgaacacggaccaaggacactcgataatctgataaacccacctcttaatctgcaggaaacgcaggtgacaattgaggagatcactccactggtgccccctcagagcggcgataaagggcaggaggacctgacctcatactttctggaggccctgctgaaatacatcgtcattcaggtgaagtctctggagtggaaaaacaaggaaaatcaagagagggggttctccttcctttttagtcatttcaagaagtactacctcccctacatcttcccgaacatctgtaaagagaactctctgtaccatcccatcctggatatcccgcagatgagaccgaaaccacattatgtggttatcaagaaggatgctgaaacaaacgaggcgatttactgtacaaaggagccctttattaaggcgagagtgatcgtgatcaggtggctggtctctttctggttagagcctaaacctcacacgggcccccatatccccggcatggagggggaagttctgcctaaaaacatccaacgcgccgctgcctcattggtctcgcgcgaggaatctaagaacgacaacgccgataagactgatcgaactaccgaacccgagcaatcacacagcaatacctccaccctgacggaacgcgaaccgagtagcagtagcctctgcagtatcgacgaggaacacctcactgatatcgagatagtgaggagagtgttctctagtaagcgcagcaacgtcaacttcgtgaccgagatcttccgacaggcattcctgttgcctatctgcgaagccgccgccatgcgcaaggttgtcaaggtgtaccaagagtggatccagcaggaagaaaaacctctgttcatgcaggaacccgaggagattgtgattacaagcagcgatctgccctgtattgagaacgtcacggaccatgacatcagtatggaagaaggcgagaaacgtgaagaggagaatggtactaataccgctgatcatgtgcgtaactctagctgggctaagaacggtagctatcaaggcgctttgcacaacgcctcggaggaggccacagaacagaatattcgggcaggaactcaagctgttctccaggtcttcattatcaatagtagcaatatctttctccttgagcccgctaacgagatcaagaacctgcttgatgaacatacagatatgtgtaaacgcatccttaacatttataggtatatggtggttcaggtgagcatggacaagaaaacttgggagcaaatgctcctcgtgctgctaagagtgacagagagtgtcctcaagatgcctagccaggcctttctgcagttccagggcaaaaaaaacatgacgctggccggtcgactcgcaggaccacttttccagacactgatcgtcgcctggattaaggccaacttgaacgtgtatatcagtcgagaactctgggatgacctcctttctgttctcagctctctcacctattgggaagagctagcaacagagtggtccctcacgatggaaaccctgactaaggtcctggcgcgcaacctgtatagccttgacctgtcagatctgccactggataaattgagtgagcagaagcagaagaaacataaaggaaagggggtgggccacgaattccagaaggtgtccgtggacaagagttttagtaggggatggtctagggaccagcctggccaggctccaatgagacagcgatccgccactaccaccggctcaccaggtacagagaaagcaagatcaattgtgcgccaaaaaacagtcgacattgatgatgcccaaatcctgccacgaagcaccagagtgagacattttagtcagtccgaagaaactgggaatgaagtgtttggagctttaaatgaggaacagcccctgccaaggagctccagcacaagcgatattctggagccattcacggtggaacgggcaaaggtgaacaaagaggatatgagtcagaaattgccccctctgaacagtgacattggaggcagttctgcgaatgtgcctgacctcatggatgagtttatcgccgagcgcctcagaagcggcaatgcatccacgatgactcgtagaggttcaagcccaggctccctggagatacccaaagatcttccagacatcttgaataaacagaaccagatgcggccaatcgatgatccaggggtgccttccgagtggacatccccggcatcagccgggtcatccgacctcatctcgagcgattcacactctgattccttctccgcgtttcaatacgacggcagaaagttcgacaatttcggtttcggaaccgatactggcgtgaccagttcagctgacgttgactctgggtccggtcatcatcagtctgccgaagagcaagaagtggccagccttacaacactgcacatcgacagcgagaccagttccctcaatcagcaggcgttctctgccgaagtagctacaatcaccggatccgaatccgcctcccccgttcactcacccttaggtagtcgatcccaaaccccatctccatccactctcaatatcgaccacatggagcagaaggaccttcagctcgacgagaagctgcaccatagcgtattgcaaacacctgatgatctggaaataagcgagttcccatctgagtgttgtagtgtgatggccgggggaactctcacaggatggcatgccgatgtcgcaaccgtaatgtggcgaagaatgctgggtattctgggggatgtaaacagcattatggatccagaaatccacgcccaagtcttcgactacctctgcgaactgtggcagaacctcgcgaagatccgcgacaatctcgggatctctactgacaatctcacttcaccctcacccccggtattaataccccctctgcgtattcttaccccttggctgtttaaagcgacaatgctcaccgataagtataagcaggggaagctccatgcatacaaactcatctgcaatacaatgaagcggaggcaagatgttagccccaatagggacttcctcacgcacttctataatatcatgcactgcgggttgctgcatatcgatcaagacatagtcaacaccataatcaaacattgttcaccacaattcttctccctcggcttgccaggagctactatgctgatcatggatttcatcgtcgcagctggacgcgtggcatcctcagcatttttgaatgctccgagagtcgaggctcaggtcctgctagggagtctggtttgcttccctaatctctattgcgagctgccctccctgcaccccaacatcccagacgtcgccgtttcccagtttaccgacgtgaaggaactcattatcaagaccgtgctgtcaagtgctagagacgaacccagcggaccggctagatgtgtggccctgtgttcactgggaatttggatctgtgaagagctcgtacacgaatcccatcacccgcaaatcaaagaggctctcaatgtcatctgcgtttcactcaaattcacaaacaaaacagttgcccatgttgcttgtaatatgctccacatgcttgttcactacgttcccaggctgcagatctaccagcccgacagtcccctcaagattatccagattctcatcgccacgatcacccatctcttaccatcgactgaggcgtccagttacgaaatggacaaaaggttagttgtttccctactactctgccttctcgactggatcatggccttaccactcaagacgctacttcagccattccatgcaactggagcagaaagcgataaaacagagaagtcggtgctcaattgtatctataaggtgctacacggttgtgtctacggagcccagtgctttagcaaccccaggtactttcctatgtctctttcggacctggcatctgtggattatgatcccttcatgcacctcgaatcccttaaggagccagagcccctgcacagtcccgattcggaacgatcatcgaaactccaaccggttactgaggtgaaaacgcagatgcagcatggcctgataagcatcgccgcccggacagtgatcactcacttggtcaaccatctcggccactatccaatgagtggagggcccgctatgctgacaagccaggtctgcgaaaaccacgataaccattactccgaatcaaccgaattgtcacccgagcttttcgagtcccccaacatacagttctttgtcctaaacaacacaacactggtctcttgtatccagatccgttccgaggagaacatgcccggcggtggcctatctgccggcctcgcttcagcaaatagcaatgtgcgcatcattgtgcgggacctctccggaaagtactcctgggactccgcaatcctgtacggtcctccgccagtgtccgggcttagtgagcccactagttttatgctgagtctctcccaccaggagaaaccggaagagcctccgacatctaacgaatgcctggaggacattaccgtgaaggacggcttgagcctgcagttcaagcggtttcgcgagaccgtcccaacctgggataccatccgcgacgaggaggacgttcttgatgaactgttgcaatacttaggggtgacctcacctgaatgtctgcaaagaaccggaatttccttaaacattcccgctccacagccagtgtgtatttccgagaaacaggagaatgatgttattaacgccatattaaagcagcatactgaagagaaagaatttgtcgagaaacacttcaatgacctcaacatgaaggccgtggaacaggacgagcccattccccagaagccccagtcagccttctattattgccgactcctgctgagtatcctggggatgaacagctgggataagaggcggagcttccacctacttaagaagaacgaaaagctgctgcgggaactaaggaacctcgacagccggcaatgtcgagagacccataaaattgcagtattttatgtcgccgagggccaggaggataagcacagcatcctcactaatacagggggatcgcaggcctacgaggatttcgtggccggtctggggtgggaagtgaacctaactaaccactgcggcttcatgggcggactacagaagaacaaaagcacaggcctaaccaccccttatttcgctaccagcaccgtcgaggtgatattccatgtgagcacgaggatgccctcagattctgacgattccctgaccaaaaagctgcgccatctgggcaatgacgaggtacacattgtgtggagtgagcatacaagggattatcgccgcggcatcataccgactgaatttggggacgtgttgatcgtcatttatccaatgaagaaccatatgttcagtatacaaatcatgaagaaacccgaagtacccttctttgggccgttgtttgacggggccattgtcaacgggaaggtccttcctatcatggtgagagccacagcgattaatgctagccgggccctcaagagcctcatccctctgtaccagaacttttatgaggaaagggcccgctacttacagacaatcgtgcagcaccacctggaaccaaccaccttcgaagatttcgcagcccaggtgttttccccggccccatatcaccatctgccgtcagatgctgatcactag

SEQ ID NO: 183608 - DNA, 6222 bp, Artificial Sequence
  derived and/or modified sequence
atgttcagcaagaagccccatggagatgtgaagaagagcacccagaaggtgctggacaccaagaaggatgccctgacccggctgaagcacctgagaattgtgattgaaaatgctgagagcattgacctgaagcagttctttgaccagcacttcagccacatctactacgtgttctttgagaactttgtgaccatcgaggccagcctgaagcagaagggccacaagagccagcgggaggagctggatgccatcctcttcatctttgagaagatcctgcagctgctgcctgagcgcatccaccagcgctggcagttccacagcatcggcctcatcctgaagaagctgctgcacacaggcaacagcctgaagatcagaagagagggcgtgcggctcttcctgctgtggctgcaggccctgcagaacaactgcagcaaggagcagctgtggatgttcagctgcctgatccctggcttcagcgccccccagagcgagcacggccccaggaccctggacaacctgatcaacccccccctgaacctgcaggagacccaggtgaccatcgaggagatcacccccctggtgcccccccagagcggggacaagggccaggaggacctgaccagctacttcctggaggccctgctgaagtacatcgtcatccaggtgaagagcctggagtggaagaacaaggagaaccaggagcggggcttctccttcctgttcagccacttcaagaagtactacctgccctacatcttccccaacatctgcaaggagaacagcctgtaccaccccatcctggacatcccccagatgaggcccaagccccactacgtggtgatcaagaaggatgctgagaccaatgaggccatctactgcaccaaggagcccttcatcaaggcccgggtcatcgtcatccgctggctggtgtccttctggctggagcccaagccccacacaggcccccacatccctggcatggagggggaggtgctgcccaagaacatccagagagctgctgccagcctggtgtcccgggaggagagcaagaatgacaatgctgacaagacagacaggaccacagagcctgagcagagccacagcaacaccagcaccctgacagagcgggagcccagcagcagcagcctgtgcagcattgatgaggagcacctgacagacatcgagatcgtgcggcgggtcttcagcagcaagaggagcaatgtgaactttgtgacagagatcttccggcaggccttcctgctgcccatctgtgaggccgccgccatgaggaaggtggtgaaggtgtaccaggagtggatccagcaggaggagaagcccctcttcatgcaggagcctgaggagatcgtcatcaccagcagtgacctgccctgcattgaaaatgtgacagaccatgacatctccatggaggagggggagaagcgggaggaggagaatggcaccaacacagctgaccacgtgaggaacagctcctgggccaagaatggcagctaccagggcgccctgcacaatgccagcgaggaggccacagagcagaacatccgggccggcacccaggccgtgctgcaggtgttcatcatcaacagcagcaacatcttcctgctggagcccgccaatgagatcaagaacctgctggatgagcacacagacatgtgcaagaggatcctgaacatctaccgctacatggtggtgcaggtgtccatggacaagaagacctgggagcagatgctgctggtgctgctgcgggtgacagagagcgtgctgaagatgcccagccaggccttcctgcagttccagggcaagaagaacatgaccctggccggccgcctggccggccccctcttccagaccctgattgtggcctggatcaaggccaacctgaatgtgtacatcagccgggagctgtgggatgacctgctgtctgtgctgagcagcctgacctactgggaggagctggccacagagtggagcctgaccatggagaccctgaccaaggtgctggccaggaacctgtacagcctggacctgagtgacctgcccctggacaagctgtctgagcagaagcagaagaagcacaagggcaaaggagtgggccacgagttccagaaggtgtctgtggacaagagcttcagccggggctggagccgggaccagcccggccaggcccccatgaggcagaggtctgccaccaccaccggcagccctggaacagagaaggcccggagcatcgtgcggcagaagacagtggacattgatgatgcccagatcctgcccaggagcaccagggtgcgccacttcagccagagcgaggagactggaaatgaggtgtttggagccctgaatgaggagcagcccctgcccaggagcagcagcaccagtgacatcctggagcccttcaccgtggagcgggccaaggtgaacaaggaggacatgagccagaagctgccccccctgaacagcgacatcggcggcagcagcgccaacgtgcctgacctgatggatgagttcatcgccgagcggctgcggtctggaaatgccagcaccatgacccggcggggcagcagccctggcagcctggagatccccaaggacctgcctgacatcctgaacaagcagaaccagatgaggcccattgatgatcctggggtgcccagcgagtggaccagccctgccagcgctggcagcagtgacctgatcagcagtgacagccacagcgacagcttcagcgccttccagtatgatggcaggaagtttgacaactttggatttggaacagacacaggagtgaccagcagcgcagatgtggacagcggcagcggccaccaccagagcgctgaggagcaggaggtggccagcctgaccaccctgcacatcgacagcgagaccagcagcctgaaccagcaggccttctctgctgaggtggccaccatcaccggcagcgagagcgccagccctgtgcacagccccctgggcagccgcagccagacccccagccccagcaccctgaacatcgaccacatggagcagaaggacctgcagctggatgagaagctgcaccacagcgtgctgcagaccccagatgacctggagatcagcgagttccccagcgagtgctgcagcgtgatggccggcggcaccctgaccggctggcacgcagatgtggccaccgtgatgtggaggaggatgctgggcatcctgggagatgtgaacagcatcatggaccctgagatccacgcccaggtgtttgactacctgtgtgagctgtggcagaacctggccaagatccgggacaacctgggcatcagcacagacaacctgaccagccccagcccccctgtgctgatcccccccctgcgcatcctgaccccctggctgttcaaggccaccatgctgacagacaagtacaagcagggcaagctgcacgcctacaagctgatctgcaacaccatgaagaggcggcaggatgtgagccccaacagagacttcctgacccacttctacaacatcatgcactgcggcctgctgcacatcgaccaggacatcgtgaacaccatcatcaagcactgcagcccccagttcttcagcctgggcctgcccggggccaccatgctgatcatggacttcatcgtggccgccggccgggtggccagcagcgccttcctgaatgccccccgggtggaggcccaggtgctgctgggcagcctggtgtgcttccccaacctgtactgtgagctgcccagcctgcaccccaacatcccagatgtggccgtgtcccagttcacagatgtgaaggagctgatcatcaagacagtgctgagcagcgccagagatgagcccagcggccctgcccgctgtgtggccctgtgcagcctgggcatctggatctgtgaggagctggtgcatgagagccaccacccccagatcaaggaggccctgaatgtcatctgtgtgtccctgaagttcaccaacaagacagtggcccacgtggcctgcaacatgctgcacatgctggtgcactacgtgccccggctgcagatctaccagcctgacagccccctgaagatcatccagatcctgattgccaccatcacccacctgctgcccagcacagaggccagcagctatgagatggacaagaggctggtggtgtccctgctgctgtgcctgctggactggatcatggccctgcccctgaagaccctgctgcagcccttccacgccaccggggctgagagtgacaagacagagaagtctgtgctgaactgcatctacaaggtgctgcacggctgtgtgtatggagcccagtgcttcagcaacccccgctacttccccatgagcctgagtgacctggcctctgtggactatgaccccttcatgcacctggagagcctgaaggagcctgagcccctgcacagcccagattctgagaggagcagcaagctgcagcctgtgacagaggtgaagacccagatgcagcacggcctcatcagcattgctgccaggacagtcatcacccacctggtgaaccacctgggccactaccccatgtctgggggccctgccatgctgaccagccaggtgtgtgaaaatcatgacaaccactacagcgagagcacagagctgagccctgagctgtttgagagccccaacatccagttctttgtgctgaacaacaccaccctggtgtcctgcatccagatccgctctgaggagaacatgcctgggggcggcctgtctgctggcctggccagcgccaacagcaatgtgcgcatcatcgtgcgggacctgagcggcaagtacagctgggacagcgccatcctgtatggccccccacctgtgtctggcctgtctgagcccaccagcttcatgctgagcctgagccaccaggagaagccagaggagccccccaccagcaatgaatgtctggaggacatcaccgtgaaggatggcctgagcctgcagttcaagcgcttccgggagaccgtgcccacctgggacaccatcagagatgaggaggatgtgctggatgagctgctgcagtacctgggcgtgaccagccctgagtgcctgcagaggacaggcatcagcctgaacatcccagccccccagcctgtgtgcatcagcgagaagcaggagaatgatgtgatcaatgccatcctgaagcagcacacagaggagaaggagtttgtggagaagcacttcaatgacctgaacatgaaggctgtggagcaggatgagcccatcccccagaagccccagagcgccttctactactgccgcctgctgctgagcatcctgggcatgaacagctgggacaagaggaggagcttccacctgctgaagaagaatgagaagctgctgcgggagctgaggaacctggacagccggcagtgccgggagacccacaagattgctgtgttctacgtggccgagggccaggaggacaagcacagcatcctgaccaacacaggaggcagccaggcctatgaggactttgtggccggcctgggctgggaggtgaacctgaccaaccactgcggcttcatgggcggcctgcagaagaacaagagcacaggcctgaccaccccctactttgccaccagcacagtggaggtgatcttccacgtgtccaccaggatgcccagcgacagtgatgacagcctgaccaagaagctgcggcacctgggcaatgatgaggtgcacatcgtgtggagcgagcacacccgggactaccgccggggcatcatccccacagaatttggagatgtgctgattgtcatctaccccatgaagaaccacatgttcagcatccagatcatgaagaagccagaggtgcccttcttcggccccctgtttgatggagccatcgtgaatggcaaggtgctgcccatcatggtgcgggccacagccatcaatgccagccgggccctgaagagcctcatccccctgtaccagaacttctatgaggagcgggcccgctacctgcagaccatcgtgcagcaccacctggagcccaccacctttgaagattttgctgcccaggtgttcagccctgccccctaccaccacctgcccagtgatgctgaggagagaaatgctgtgattgtgctcttcctgcccaagccacccctggagaacatcggccacctgaaggcccccacccagcgcttctaccctgtgaagctgccccagcagaggaggtag

SEQ ID NO: 183609 - DNA, 6111 bp, Artificial Sequence
  derived and/or modified sequence
atgttcagcaagaagccccatggagatgtgaagaagagcacccagaaggtgctggacaccaagaaggatgccctgacccggctgaagcacctgagaattgtgattgaaaatgctgagagcattgacctgaagcagttctttgaccagcacttcagccacatctactacgtgttctttgagaactttgtgaccatcgaggccagcctgaagcagaagggccacaagagccagcgggaggagctggatgccatcctcttcatctttgagaagatcctgcagctgctgcctgagcgcatccaccagcgctggcagttccacagcatcggcctcatcctgaagaagctgctgcacacaggcaacagcctgaagatcagaagagagggcgtgcggctcttcctgctgtggctgcaggccctgcagaacaactgcagcaaggagcagctgtggatgttcagctgcctgatccctggcttcagcgccccccagagcgagcacggccccaggaccctggacaacctgatcaacccccccctgaacctgcaggagacccaggtgaccatcgaggagatcacccccctggtgcccccccagagcggggacaagggccaggaggacctgaccagctacttcctggaggccctgctgaagtacatcgtcatccaggtgaagagcctggagtggaagaacaaggagaaccaggagcggggcttctccttcctgttcagccacttcaagaagtactacctgccctacatcttccccaacatctgcaaggagaacagcctgtaccaccccatcctggacatcccccagatgaggcccaagccccactacgtggtgatcaagaaggatgctgagaccaatgaggccatctactgcaccaaggagcccttcatcaaggcccgggtcatcgtcatccgctggctggtgtccttctggctggagcccaagccccacacaggcccccacatccctggcatggagggggaggtgctgcccaagaacatccagagagctgctgccagcctggtgtcccgggaggagagcaagaatgacaatgctgacaagacagacaggaccacagagcctgagcagagccacagcaacaccagcaccctgacagagcgggagcccagcagcagcagcctgtgcagcattgatgaggagcacctgacagacatcgagatcgtgcggcgggtcttcagcagcaagaggagcaatgtgaactttgtgacagagatcttccggcaggccttcctgctgcccatctgtgaggccgccgccatgaggaaggtggtgaaggtgtaccaggagtggatccagcaggaggagaagcccctcttcatgcaggagcctgaggagatcgtcatcaccagcagtgacctgccctgcattgaaaatgtgacagaccatgacatctccatggaggagggggagaagcgggaggaggagaatggcaccaacacagctgaccacgtgaggaacagctcctgggccaagaatggcagctaccagggcgccctgcacaatgccagcgaggaggccacagagcagaacatccgggccggcacccaggccgtgctgcaggtgttcatcatcaacagcagcaacatcttcctgctggagcccgccaatgagatcaagaacctgctggatgagcacacagacatgtgcaagaggatcctgaacatctaccgctacatggtggtgcaggtgtccatggacaagaagacctgggagcagatgctgctggtgctgctgcgggtgacagagagcgtgctgaagatgcccagccaggccttcctgcagttccagggcaagaagaacatgaccctggccggccgcctggccggccccctcttccagaccctgattgtggcctggatcaaggccaacctgaatgtgtacatcagccgggagctgtgggatgacctgctgtctgtgctgagcagcctgacctactgggaggagctggccacagagtggagcctgaccatggagaccctgaccaaggtgctggccaggaacctgtacagcctggacctgagtgacctgcccctggacaagctgtctgagcagaagcagaagaagcacaagggcaaaggagtgggccacgagttccagaaggtgtctgtggacaagagcttcagccggggctggagccgggaccagcccggccaggcccccatgaggcagaggtctgccaccaccaccggcagccctggaacagagaaggcccggagcatcgtgcggcagaagacagtggacattgatgatgcccagatcctgcccaggagcaccagggtgcgccacttcagccagagcgaggagactggaaatgaggtgtttggagccctgaatgaggagcagcccctgcccaggagcagcagcaccagtgacatcctggagcccttcaccgtggagcgggccaaggtgaacaaggaggacatgagccagaagctgccccccctgaacagcgacatcggcggcagcagcgccaacgtgcctgacctgatggatgagttcatcgccgagcggctgcggtctggaaatgccagcaccatgacccggcggggcagcagccctggcagcctggagatccccaaggacctgcctgacatcctgaacaagcagaaccagatgaggcccattgatgatcctggggtgcccagcgagtggaccagccctgccagcgctggcagcagtgacctgatcagcagtgacagccacagcgacagcttcagcgccttccagtatgatggcaggaagtttgacaactttggatttggaacagacacaggagtgaccagcagcgcagatgtggacagcggcagcggccaccaccagagcgctgaggagcaggaggtggccagcctgaccaccctgcacatcgacagcgagaccagcagcctgaaccagcaggccttctctgctgaggtggccaccatcaccggcagcgagagcgccagccctgtgcacagccccctgggcagccgcagccagacccccagccccagcaccctgaacatcgaccacatggagcagaaggacctgcagctggatgagaagctgcaccacagcgtgctgcagaccccagatgacctggagatcagcgagttccccagcgagtgctgcagcgtgatggccggcggcaccctgaccggctggcacgcagatgtggccaccgtgatgtggaggaggatgctgggcatcctgggagatgtgaacagcatcatggaccctgagatccacgcccaggtgtttgactacctgtgtgagctgtggcagaacctggccaagatccgggacaacctgggcatcagcacagacaacctgaccagccccagcccccctgtgctgatcccccccctgcgcatcctgaccccctggctgttcaaggccaccatgctgacagacaagtacaagcagggcaagctgcacgcctacaagctgatctgcaacaccatgaagaggcggcaggatgtgagccccaacagagacttcctgacccacttctacaacatcatgcactgcggcctgctgcacatcgaccaggacatcgtgaacaccatcatcaagcactgcagcccccagttcttcagcctgggcctgcccggggccaccatgctgatcatggacttcatcgtggccgccggccgggtggccagcagcgccttcctgaatgccccccgggtggaggcccaggtgctgctgggcagcctggtgtgcttccccaacctgtactgtgagctgcccagcctgcaccccaacatcccagatgtggccgtgtcccagttcacagatgtgaaggagctgatcatcaagacagtgctgagcagcgccagagatgagcccagcggccctgcccgctgtgtggccctgtgcagcctgggcatctggatctgtgaggagctggtgcatgagagccaccacccccagatcaaggaggccctgaatgtcatctgtgtgtccctgaagttcaccaacaagacagtggcccacgtggcctgcaacatgctgcacatgctggtgcactacgtgccccggctgcagatctaccagcctgacagccccctgaagatcatccagatcctgattgccaccatcacccacctgctgcccagcacagaggccagcagctatgagatggacaagaggctggtggtgtccctgctgctgtgcctgctggactggatcatggccctgcccctgaagaccctgctgcagcccttccacgccaccggggctgagagtgacaagacagagaagtctgtgctgaactgcatctacaaggtgctgcacggctgtgtgtatggagcccagtgcttcagcaacccccgctacttccccatgagcctgagtgacctggcctctgtggactatgaccccttcatgcacctggagagcctgaaggagcctgagcccctgcacagcccagattctgagaggagcagcaagctgcagcctgtgacagaggtgaagacccagatgcagcacggcctcatcagcattgctgccaggacagtcatcacccacctggtgaaccacctgggccactaccccatgtctgggggccctgccatgctgaccagccaggtgtgtgaaaatcatgacaaccactacagcgagagcacagagctgagccctgagctgtttgagagccccaacatccagttctttgtgctgaacaacaccaccctggtgtcctgcatccagatccgctctgaggagaacatgcctgggggcggcctgtctgctggcctggccagcgccaacagcaatgtgcgcatcatcgtgcgggacctgagcggcaagtacagctgggacagcgccatcctgtatggccccccacctgtgtctggcctgtctgagcccaccagcttcatgctgagcctgagccaccaggagaagccagaggagccccccaccagcaatgaatgtctggaggacatcaccgtgaaggatggcctgagcctgcagttcaagcgcttccgggagaccgtgcccacctgggacaccatcagagatgaggaggatgtgctggatgagctgctgcagtacctgggcgtgaccagccctgagtgcctgcagaggacaggcatcagcctgaacatcccagccccccagcctgtgtgcatcagcgagaagcaggagaatgatgtgatcaatgccatcctgaagcagcacacagaggagaaggagtttgtggagaagcacttcaatgacctgaacatgaaggctgtggagcaggatgagcccatcccccagaagccccagagcgccttctactactgccgcctgctgctgagcatcctgggcatgaacagctgggacaagaggaggagcttccacctgctgaagaagaatgagaagctgctgcgggagctgaggaacctggacagccggcagtgccgggagacccacaagattgctgtgttctacgtggccgagggccaggaggacaagcacagcatcctgaccaacacaggaggcagccaggcctatgaggactttgtggccggcctgggctgggaggtgaacctgaccaaccactgcggcttcatgggcggcctgcagaagaacaagagcacaggcctgaccaccccctactttgccaccagcacagtggaggtgatcttccacgtgtccaccaggatgcccagcgacagtgatgacagcctgaccaagaagctgcggcacctgggcaatgatgaggtgcacatcgtgtggagcgagcacacccgggactaccgccggggcatcatccccacagaatttggagatgtgctgattgtcatctaccccatgaagaaccacatgttcagcatccagatcatgaagaagccagaggtgcccttcttcggccccctgtttgatggagccatcgtgaatggcaaggtgctgcccatcatggtgcgggccacagccatcaatgccagccgggccctgaagagcctcatccccctgtaccagaacttctatgaggagcgggcccgctacctgcagaccatcgtgcagcaccacctggagcccaccacctttgaagattttgctgcccaggtgttcagccctgccccctaccaccacctgcccagtgatgctgaccactag

SEQ ID NO: 183610 - DNA, 6222 bp, Artificial Sequence
  derived and/or modified sequence
atgttcagcaagaagccccacggcgacgtgaagaagagcacccagaaggtgctagataccaaaaaggatgctcttacccggctaaagcacttgcgtatagtgatcgaaaatgcggagagcatcgacctgaagcagtttttcgaccagcacttttcacacatttattatgttttcttcgaaaatttcgtgactatcgaagcctcactgaagcaaaaggggcataaatcacagagagaagaactggacgcgattctcttcatatttgaaaagatccttcagctgcttcccgagcggatccaccaacgctggcagtttcactcaatcggactcatactaaaaaaactgctccacactgggaattctctgaagatccgacgcgagggtgtgcgactgtttctgctttggctgcaggccctccagaataactgttcaaaagagcaactctggatgttcagctgtctaattcctggtttcagtgcaccgcaatccgaacatggcccacgcaccctcgacaatctgataaatcccccgctgaatctccaggaaactcaggtcactatagaggagatcaccccccttgttccacctcagtctggggacaaggggcaggaggacttaacctcttactttcttgaggcgttgctcaaatatatcgtgatccaagttaaaagccttgaatggaaaaataaagagaatcaagagcggggtttctcatttttatttagccactttaagaagtattacttgccatacatcttccctaatatatgcaaggaaaactccctataccatccgattctggacatccctcagatgcggcccaaaccgcattatgtagtaataaagaaggacgccgagaccaacgaggccatctattgtaccaaggagccatttattaaggctagagtgatagtcattagatggctagtgagcttctggctggaaccaaagcctcacactgggccccatatccccggtatggagggcgaagtgctgcctaagaatatacaaagagctgctgccagcctggtgtcacgcgaggaaagtaagaatgataatgccgacaaaacagatcgaaccaccgagcccgagcagtcacattctaatacttctactttgacggagagggagccttccagttcaagcctatgcagcatcgatgaagaacatttgaccgacattgagatagtgcgacgtgttttttcctctaagcggagcaatgtgaatttcgtcaccgagatttttcgccaagcatttttgcttccgatctgtgaggctgctgccatgcgtaaggttgtaaaagtctaccaagagtggatccaacaggaagagaagccgctgttcatgcaagaacccgaagaaatcgtgataacatcctcggacctaccatgcatagagaacgtgactgatcacgacattagcatggaggaaggagaaaagcgtgaagaggaaaacggcaccaatacggccgaccatgtgagaaactctagttgggcaaagaatggaagctaccaaggcgcgttacataacgcgtccgaagaagccaccgagcagaacataagagcaggcacacaggccgtgctgcaggtgttcattattaattcttcgaacatattcctgctcgaacccgctaatgagataaagaatttgctcgacgagcatacagatatgtgcaaacgcattctgaacatataccgatacatggtggtacaagtaagcatggataaaaagacttgggaacagatgcttcttgtcctgttacgagttacagagagtgtgcttaaaatgccttctcaggcctttctgcagttccagggcaagaagaacatgactctcgccgggcggctcgctggtccgctctttcagacactgattgtcgcctggatcaaagccaatctcaacgtgtacatcagtcgcgagctgtgggatgacctgctctcagtgctgagttctctcacatactgggaagagcttgctactgagtggtctctgacaatggagaccctcactaaagttttggctcggaatctctatagcctcgatctcagcgatttacccttggacaaactgtccgagcagaaacagaaaaagcataaaggtaaaggggtggggcatgagttccaaaaggtgtctgttgacaagtctttttctcggggctggtctagagatcagcccggacaggcaccaatgcggcagcgctcagctaccaccacaggaagccctgggactgaaaaggcacgatcaatcgtcaggcagaagacggtcgacattgacgacgcccagatactgccacgaagtactcgcgtgcggcatttttcccagtctgaggagactggtaacgaggtgttcggagcactcaacgaagagcagccgttgcctagaagttcttcaaccagtgatatactggagcccttcactgtagagcgggccaaagtgaataaagaggatatgagtcaaaagctccctccactaaactcagatattggtggttcatctgcaaacgtgcccgatctcatggacgagttcattgctgaacgtctgagaagcggaaacgccagcactatgacaagacgcgggtcaagccccggcagcttagaaattcctaaagatttgcctgatatcttaaataagcagaatcaaatgagaccaatcgatgaccctggggttccaagtgagtggacaagtcctgcatccgccggttcgtccgatttaatttcaagcgactctcacagcgactcattcagtgcttttcagtacgacggtcgcaaatttgacaacttcgggtttgggacggatactggcgttaccagcagcgcggacgtggattcgggctccggccaccatcagtcagcagaggagcaagaagtggcctcactaacgaccctccatatcgatagcgagacctccagtctcaaccaacaggcatttagtgcagaagttgcgaccattacaggaagtgaatccgctagtcccgtccatagtccactcgggagcagaagtcagactcctagccccagtacactgaacatagatcacatggagcagaaagatctgcagttagatgaaaaactgcaccactcagtcctgcagacgcctgacgatctagagatcagtgagttcccctccgaatgttgctccgtgatggccggaggaacattaacaggctggcatgcagacgtggccacggtgatgtggaggcgcatgctgggcattctgggagatgtaaactctatcatggacccggagatccacgcccaagttttcgattacctttgtgagctgtggcagaaccttgccaagatcagagacaacctcgggatctccaccgacaacttgacctccccctcacccccagtgctgattcctccgcttcgaatccttactccttggctgttcaaagcaactatgttaaccgacaagtacaaacagggcaaactgcacgcttacaaacttatctgtaatactatgaagcggcgacaggacgtttcgcctaacagggactttctgactcacttctataacatcatgcattgtggactcctgcacatcgatcaggatatcgtgaatacaattattaaacattgttccccccagtttttttctctaggtctccccggagcgaccatgctgatcatggatttcatcgtagcggctgggagggtcgcctcctctgcctttttgaacgctcctcgggtcgaagcccaggttctgttaggaagtttggtttgttttcctaatctgtactgtgaactccctagcctgcatcccaacatccctgatgttgcggtttcccagttcacagatgtcaaagagcttatcattaaaaccgtgctgagcagcgccagggatgaaccttctggcccagccaggtgtgtcgccctgtgttcacttggtatttggatttgtgaagaacttgtccatgaaagccatcaccctcaaattaaagaggcactaaacgtgatatgcgtctcacttaagtttaccaacaaaacagtggcccacgtggcctgcaatatgcttcacatgctggtacattatgtcccccggctccaaatctatcagccagactcacctctcaagatcatacaaatattaattgccaccattacgcacttactaccaagcacagaggctagtagctacgaaatggacaaaagactcgtggtcagcttacttctgtgcctattagactggatcatggcattgcctctgaagacgcttttacagccctttcacgccactggagcagagtcggataagaccgaaaagtctgtgctgaactgtatttacaaggtgctccatgggtgcgtgtacggggcccagtgtttttctaacccccgatatttccccatgtctttaagcgacttggcaagcgtggactacgatccgtttatgcacttagaatccctgaaggaaccagagcctctgcactcgcccgacagtgaaagatcgtccaagttgcagcccgtgaccgaagtgaagactcagatgcagcacggattaataagcattgcagctaggactgttattacacaccttgtgaatcacctgggacactaccctatgagtggtggccctgccatgctgacttcgcaggtctgtgagaaccacgacaaccactacagtgaaagtactgaactatctcccgagttgtttgagtcacccaatattcaattcttcgtgctgaataacactaccctagtgtcatgcatccagattcgtagtgaggaaaacatgcctggcggagggcttagtgcaggcctggccagtgccaatagcaatgttcgaataattgtccgagatctgtccgggaagtacagctgggactccgcgattttatacggccctcctccggtctcaggattgtctgagcctacctcatttatgctgagtttgagccaccaggagaaaccagaagagcctcctacgtcgaacgagtgcctggaggacatcacagtcaaagacggcctatccctccagttcaaaaggtttcgtgaaacagttccgacctgggacactatcagggacgaggaggacgtcctcgacgagctcttgcagtacctcggagttacatcgcccgagtgcctgcagagaacaggcatctccttaaatatcccagccccccaacccgtttgtatttctgagaagcaggaaaatgatgttatcaacgctatcctgaaacagcatacggaggagaaagagttcgtggagaaacattttaatgacttaaatatgaaggctgttgaacaggatgaacctataccacagaaacctcaatccgcgttctattattgtcgattgctcctgagtattctggggatgaacagctgggacaagaggcgcagcttccacttgcttaaaaaaaatgagaagctgctgcgtgaactccgaaatcttgactccaggcagtgccgagaaacacacaagatcgccgtgttttatgttgccgaaggacaggaggacaagcatagcattctgactaacaccgggggatctcaggcatatgaagactttgttgctggccttggttgggaggtcaacctgactaatcattgtgggttcatggggggactgcagaagaataagagtacgggattgaccacgccatattttgccactagcacagtagaagttatctttcacgtcagtactagaatgccttcagattcagacgactcactgacaaaaaaactgcgtcacctcgggaacgatgaagtccatatcgtctggtctgaacatacacgggactatcgacggggaataatcccaactgagttcggggatgtgctgatagtcatctatcccatgaagaaccacatgttctctatccagataatgaagaagccagaggtgccgttctttggccccctcttcgacggcgcgatcgttaatggaaaggtgctgcctattatggtaagagcaactgcgataaatgcttctagagccctgaaatcgctgattcctctgtaccagaatttttatgaagagcgcgcccggtacctgcagaccatagtgcagcaccaccttgagccaactactttcgaagactttgccgctcaggtcttttcccctgccccctaccaccatctaccatccgatgccgaagagagaaacgccgttatagtcctctttctgcccaagccccctttggagaatatcggccacttaaaggcccccacacagaggttttatcctgtgaaactacctcaacagagaaggtag

SEQ ID NO: 183611 - DNA, 6111 bp, Artificial Sequence
  derived and/or modified sequence
atgttcagcaagaagccccacggcgacgtgaagaagagcacccagaaagtcctagacacgaaaaaggacgccctaacccgacttaagcacctgaggatcgtaatcgagaatgccgagtccatcgacctaaaacagttttttgaccagcatttctcacacatatactatgtgttcttcgagaatttcgtgactatcgaggcctcgctgaagcaaaagggacacaagagtcagcgggaggagctcgatgcgatattgttcatctttgagaagatcctgcaattgttgcctgagcggattcaccaacgatggcagtttcacagtataggccttattttaaaaaaactgctgcacaccggcaattctctgaaaatacgaagagaaggggtgcgactctttctcctgtggcttcaagcccttcagaacaattgctccaaggaacaattgtggatgttttcttgcctcatccctggctttagcgctccacagagtgagcatggaccccgaacattagacaatctgatcaatccaccactgaaccttcaggaaacccaggtaacaatcgaggagattacaccgctggtccccccccagtctggtgataagggtcaggaggaccttacaagctatttcctcgaggcccttttaaagtacattgtgattcaggtgaagagccttgagtggaagaacaaagagaaccaagagcggggcttcagcttcctgttcagccattttaaaaagtattacttgccttacattttccctaacatttgcaaagaaaatagcctgtaccatccgattctagacattcctcagatgcggccaaagccccactacgtcgttataaagaaggacgcggaaacaaacgaggcaatttattgcactaaggaaccattcatcaaggcccgcgttatcgtgattagatggctcgtgagcttttggctggagcctaagccacatactgggcctcacattcccggcatggagggagaggttcttccaaagaacatccagcgcgccgcagccagcctggtgtcccgagaagagagcaagaatgataacgctgataagactgatcggacaacagagcctgagcaatcacactccaacacatccacgttaacagagagggagccatccagttcctcactctgtagtatagacgaagagcacctgactgacattgagatagtcaggagagttttctctagcaagcgcagcaacgttaacttcgttacagagatatttaggcaagcctttctgttgcctatctgcgaggcagcagccatgagaaaggtggtcaaagtttaccaggagtggattcagcaggaggagaagccactctttatgcaggagccagaagaaatcgtcatcacaagttcagatctgccttgcatcgaaaacgtgacagaccatgatattagcatggaggagggggaaaagcgggaagaagaaaacggcacgaataccgctgaccatgtcaggaattccagctgggccaaaaacggatcctaccaaggagccctgcacaacgcctcagaagaggcgactgagcagaatatcagagctgggactcaggccgtcctccaggtgttcatcatcaatagcagcaacatcttcctgctagagcccgccaacgagattaagaatctcttggacgagcatacggatatgtgcaagagaattctcaatatttatcgttacatggtggttcaagtgagcatggataagaagacatgggagcaaatgttgctcgtcctcctgcgggtcaccgagtccgtgctgaaaatgccttcacaggccttcctgcagttccaggggaagaagaacatgacgctcgctggcagactggctgggcctctgtttcaaaccttaattgtggcttggattaaggccaatctgaacgtgtacatttcacgggagctgtgggacgacctgctcagtgtgttgagttccttaacatactgggaggagctggccaccgagtggtcattgactatggagacgttaaccaaggtgctggccaggaatctgtatagtctggacttgtcggatcttccactggacaaattgtcagaacagaagcagaagaaacataaaggaaaaggcgtcgggcacgagtttcaaaaagtgtccgtagacaagtccttttcgcgcggatggagtcgggatcaacctggccaagcccctatgagacaaagatctgccacaactacaggatcacccggcacggaaaaggcacgctctattgtgcgccaaaaaactgtggatattgatgacgctcagatcctgccccgctccacaagggtaaggcacttctctcagtcagaagagaccggaaacgaagtcttcggcgcgctgaatgaagagcagcctctcccaaggtcaagttctacctcagatatcctcgagcccttcaccgtcgaacgcgcgaaagtgaacaaagaagacatgagtcagaagcttccaccactcaactcagacatcggaggatcaagcgcgaacgtccctgatctcatggatgagtttatcgccgagcggctgcgatccggaaacgcaagcaccatgacacgcagaggcagttcaccaggaagcctggaaattcccaaagacctgcctgatattctgaataagcagaatcagatgaggcctatcgacgacccgggcgtcccctccgagtggacttctcctgcaagcgccgggagcagcgacctgatctcatcggattcgcactccgacagtttctccgctttccagtacgatggacggaaattcgacaatttcggctttgggactgacaccggagtaacgagtagtgccgacgtcgactctggatccggacaccaccaatccgccgaggaacaggaggtggcaagtttgaccaccctccatatagattcagagactagcagcttgaatcaacaggccttcagtgcggaagtggccaccatcacaggatccgaaagtgcatcgccagtgcactccccactgggctcacggtcccagaccccaagtccaagcaccctgaatatagaccatatggagcagaaggacttacagctggacgaaaaactgcaccacagcgtcctgcagacgcccgacgacctggagattagcgaatttccatccgagtgctgttcggtaatggccggcggaaccttaactgggtggcacgctgacgtggccaccgtcatgtggcggagaatgctcggcatactcggagacgtaaattcaatcatggatccagagattcacgctcaggtgtttgactatttgtgcgagttatggcagaacctggccaaaatacgggacaacctcggcatctctactgacaatctcacatccccctcccctccagtccttattcctcctttgagaatcctaaccccctggctgtttaaggcaaccatgcttacagataaatacaagcaaggcaaacttcatgcctacaagctaatttgcaacacgatgaagcgccgccaggatgtctctcctaacagagacttcctcacacacttctataacattatgcattgcggcctgctacacatcgatcaggacattgtgaatactataataaagcattgcagtcctcagtttttctccctgggactgccgggggcgactatgctgataatggatttcattgtggctgccgggcgagtagcttcgtccgccttcctgaatgctccgcgcgtcgaagcgcaggtgctgctgggctccctggtctgctttcccaatctttactgtgagcttccgtcactccaccccaacatcccagacgttgctgtttcccaattcactgacgtgaaagaactgattatcaaaacagttctgtcctccgcacgcgacgaaccttccggacctgcccgctgtgtggccctttgcagtctgggaatttggatctgtgaggaacttgtccacgagtcgcaccatccacaaatcaaggaggccctgaatgttatctgtgtcagcctgaagtttacaaataagactgtagcacacgtggcctgcaacatgctgcatatgctggtccactatgtacctaggctgcagatctaccagcctgactctcctttaaagataatacagattcttatcgcaacaattacacacttgttacccagcaccgaggcgagctcctacgaaatggataaacgtctcgtcgtgagcctgctgctgtgcctattagattggattatggctctgcccctaaaaactctcctacagcccttccacgcgaccggagccgagagcgataagactgagaagtctgtgctgaactgtatctacaaggtcctgcacggatgtgtgtacggggctcagtgcttcagcaatccccgctattttccaatgtcactgagcgaccttgccagcgtggactacgatccttttatgcatctggagtcactcaaggaacccgaaccattacattcccctgatagtgaaaggtcatccaagctgcaaccggtcactgaagtaaagactcaaatgcagcacggactgatctccatcgcagcccggaccgtcatcactcatctcgtcaatcacctgggccattaccccatgagtggtggcccagccatgttaacatcccaggtctgcgaaaatcatgataatcactactcagagagcacagaactgtcaccagagttgttcgaatcaccaaatatccagtttttcgtgctcaacaacacaacactggtttcatgcattcagatcaggtcagaggagaatatgccgggtggcgggctcagcgcaggcctggctagcgccaactcgaatgtgagaattatcgtacgggatctgtctggcaagtactcatgggattctgccatcttgtatgggccccctccagtcagcggactcagtgagcctactagtttcatgctgtctctgtctcatcaggaaaagccggaagagcccccaacttccaacgaatgtctggaggacattactgttaaagatggactgtcattacagtttaagcgttttagagaaaccgtccccacgtgggatactatccgggatgaagaagacgttctcgacgaactattacagtatctcggagtgaccagccctgaatgcctccagcggaccggtatctctctgaacattccagcacctcaacctgtctgtattagcgagaagcaagagaatgatgtgatcaatgccatcctcaagcaacacacagaggagaaggagtttgtcgaaaaacacttcaacgatctgaacatgaaagccgtggaacaggacgaacccattccccagaaacctcagtctgcattctactattgcagattgttgctgagtattctgggaatgaacagttgggacaaacgacggagcttccacctcctcaaaaaaaatgaaaaactgcttcgcgaactcaggaacctggatagccgccagtgcagggaaactcacaaaatagccgttttctacgtagccgagggccaagaggataaacatagcattctcactaacaccggcggaagccaagcctacgaagacttcgtggctggtctcggttgggaggtgaacctgaccaaccactgcggcttcatggggggacttcaaaagaacaagtcaaccggactgaccaccccttatttcgcgacttcaactgtcgaagtgatcttccatgtaagtacaaggatgccctctgatagtgacgattcccttaccaaaaaattgaggcatctgggtaatgacgaggtgcatattgtgtggtccgagcatacaagagactacagaagaggcataattccgactgaatttggcgacgtgctgatcgtgatttatcctatgaagaatcatatgttcagtatccagattatgaaaaaacccgaggtcccttttttcgggccccttttcgatggggcaatagttaacgggaaggtgctccccatcatggtccgagccaccgccattaacgcttcccgggccctgaagtctctcatacctctgtatcaaaatttttatgaggagcgcgctcgttacctgcaaacgatcgtgcagcaccatctggaacccaccacttttgaggacttcgccgcccaggttttctcaccagctccataccaccatctaccctctgatgccgatcactag

SEQ ID NO: 183612 - DNA, 6221 bp, Artificial Sequence
  derived and/or modified sequence
atgttcagcaagaaaccccacggcgacgtgaagaagtcaacccaaaaagtcctggatacaaagaaggatgctctcacaagattgaaacacttgagaatcgtaatcgaaaacgccgaatctatagacctaaaacaattcttcgaccagcactttagccatatctattacgtgtttttcgagaatttcgtgacgatagaagccagtctgaaacaaaagggtcacaaaagtcaacgggaagagcttgatgcaatcctgttcatatttgagaaaatccttcaactcttgcccgaaagaattcaccagagatggcagtttcatagcattggacttattctcaaaaagctgctgcacacaggtaactccctgaagattcgcagggaaggggtgcgactctttctactgtggctgcaggcccttcagaacaactgcagcaaggagcagctatggatgtttagctgtttgattcctgggttttcggctccccaatccgaacacggacctcggacactggacaacctcattaatccacctctgaatctacaggaaacacaggtgactattgaggagattacccctctggtacctcctcagtcgggggataaagggcaggaggacctgacttcttacttcctcgaggccctgctcaaatatatcgtgattcaggtaaagagtctcgaatggaagaacaaggaaaaccaggaacggggattttcttttcttttttcccactttaaaaagtattatctcccctacatcttccctaacatttgtaaggaaaacagcctgtaccacccaatactcgatatccctcagatgcgccctaagccacactacgtggttataaagaaggacgccgagaccaatgaagcaatctactgcactaaggagccattcataaaggccagggtcatcgtcatccgctggctggtttccttttggttggaacccaaacctcatacagggccacacatcccaggtatggagggagaggtcctgccaaagaatattcagagagccgctgcctctctggttagccgcgaggaatccaagaacgacaatgccgacaagaccgaccggaccacggagccagaacaatcccatagcaatacgtccaccttgactgaaagggaacccagctcctcatctctttgtagtatcgatgaggaacatcttacagatattgaaattgtaagaagagttttcagttctaagcgctctaacgttaattttgtgacagaaatctttaggcaggctttccttctgccgatttgcgaagcagctgccatgcgcaaggtggtgaaagtttaccaggagtggatccagcaggaagagaagccactcttcatgcaagaaccagaagagatagtgattacatcttctgacttaccctgtatcgagaacgtgaccgaccacgacatctccatggaggaaggagaaaaacgggaggaggaaaatggaaccaataccgctgatcacgtcaggaatagctcctgggctaagaatggcagctatcagggcgctctccacaacgccagtgaagaagcaacggaacagaacatacgggctgggacccaagccgtcttacaagtgttcattattaactcaagcaatatcttccttctggagccggcaaatgagattaaaaaccttctcgacgagcataccgacatgtgcaagagaatcctgaatatttaccggtacatggtcgtccaagtgagcatggacaagaaaacttgggaacagatgcttctggttctgctgagggtgacggagagtgtgctcaaaatgcccagccaggccttcctgcaatttcagggaaaaaagaacatgacattagctggacggttagcgggacctctcttccagacacttatcgttgcctggattaaagcgaatctcaatgtctatatcagccgtgagctgtgggatgatctcctgtcagtgctgtccagtttaacatactgggaagagctcgccaccgagtggagcctgacaatggaaaccctgacaaaggtgctcgcccgaaatctgtactccctggacctatctgatctcccactcgacaagctgagcgagcagaaacaaaaaaaacacaagggaaagggcgtgggtcacgagttccaaaaagtatctgttgacaagagctttagtcgaggatggtcccgggaccaacctggccaggccccaatgaggcaaaggagcgcaacgacaaccggctctcccggtaccgaaaaggcgaggtcaattgttcgccagaaaactgtcgatatcgatgatgcacagattctcccgaggtcaaccagggtgaggcacttttcccagagtgaggagactgggaacgaggtgtttggggcactgaacgaagaacagccactgccacggtcatcttccacatccgatattctcgagcccttcaccgtggagagggcaaaagtgaacaaggaggacatgagccagaagctccccccactgaattccgacatagggggaagttccgccaatgtccccgaccttatggacgagttcattgctgagcgactgcgctctgggaatgcctccacaatgaccagacgcggtagctcccctggctccctggagatcccgaaagacttgcccgatatcctgaacaagcagaatcagatgagaccgatcgatgaccccggagttccgtccgagtggacatcacccgcaagcgccggatcttccgaccttatctcctcggactcccactctgattcctttagtgcatttcagtatgacggtcggaaatttgataactttggattcggaacagacaccggagttacttcgagcgcagatgtggatagcgggtcaggccaccaccagagtgctgaggagcaggaagtagcttcgctcacaaccctgcatattgactccgagactagctccttgaaccagcaagccttctctgcggaagtagccactatcaccgggagcgaatcggcatccccagtgcattcaccactcggtagcaggtctcagaccccaagcccttcaacccttaatattgatcacatggagcaaaaggatctccagcttgatgaaaaactgcaccactcggtgctgcagaccccagatgacctcgagatctctgagtttccctcagaatgctgttccgtgatggctggcggtaccctgaccgggtggcacgcggacgtggctacagtgatgtggcgacgcatgctgggaatcctgggcgacgttaatagtatcatggatccagaaattcatgcgcaagtgttcgattacttatgtgaactgtggcaaaatttagccaagataagggacaatctgggcatcagcacagacaatctgacctctccttccccacccgtcttgatccccccactacgtattctgaccccgtggctctttaaggccactatgttaacagacaagtataaacaaggtaagctgcatgcatataagctgatttgcaacacaatgaagcgaaggcaggatgtctcacccaatcgggattttctgactcacttctacaacatcatgcactgtggtctgttacacatcgaccaagacatcgttaacaccattatcaagcactgctcccctcagtttttttctctgggtttacccggtgcaactatgctcattatggactttatcgtggcggcaggcagggtggccagcagtgccttcttgaatgcacccagagtggaagcacaggttttgcttgggtcattggtgtgtttccccaatctgtattgtgaactgccaagcctgcatcctaacattcccgatgtcgctgtcagtcaatttacggatgtgaaggaactcattatcaagactgtgctatcgagcgcaagagacgaaccatccggccctgcccgttgcgtagccctctgctccctcggcatttggatttgcgaggagctggttcatgagtctcatcaccctcagatcaaagaggccctgaatgtgatttgtgtttcactgaaattcacaaacaaaaccgtcgcacacgttgcctgcaacatgctgcacatgcttgtgcactacgtccctcgattgcagatttaccagcccgattccccccttaagatcatccagattctgattgccacaattactcatctgctgccaagcactgaagcctctagctacgagatggacaagcgtctggtcgtgtctctgttgctctgtctcctggactggatcatggctctgccattgaaaaccctgttgcagccttttcacgctacaggggcagagtctgataagacagaaaagtccgtactaaactgcatatataaggtgctacatggctgtgtgtacggagcccagtgcttctccaatccaagatatttccccatgtctctgtccgacctcgccagcgtcgattatgaccccttcatgcacttggagtcattgaaggaacccgagccacttcattcaccagatagtgaacggagttcaaaattgcagcccgttacagaggtcaagacgcagatgcagcacggactgatttccatcgccgcacgaactgtcattactcacctggttaatcacctagggcattaccctatgtccgggggtccggctatgctgacctctcaggtatgcgaaaaccatgacaaccactactcagaatccacagagctgtcccccgaactatttgagagtcccaatatccagttctttgtgctgaacaacactacgctggtgagttgtatccagatccggagcgaagagaacatgccgggtggaggactgtctgcaggcctggcaagcgccaatagcaatgtgagaattatcgtgagagacctgtctggaaagtactcttgggactctgccatcctgtatggtccacctcccgtgtccggtctgagcgagccaacttccttcatgttatcgctgtcccatcaagagaagcctgaagaaccccctacctccaacgagtgcctggaggacatcacagtgaaagacgggctgtcactgcagtttaaacggttccgcgagacggtgccaacctgggataccataagggacgaagaagatgtgctggacgagctgctacagtatctgggcgtgacatcgccagagtgtctccagagaaccggcataagcctcaatattcccgcacctcagccagtgtgtataagcgaaaaacaggagaacgacgtaatcaatgcaattttgaaacagcatacagaggagaaggagttcgtggaaaagcacttcaatgatctaaacatgaaagcggtcgaacaggacgagcctattccacaaaagcctcagagcgcattctactactgcaggctgttattgtccatcctgggcatgaactcatgggataagcgccgatcttttcatctgttaaagaaaaatgaaaagctccttcgggaactcagaaatctagattcgcgccagtgccgcgaaacccacaagatagcagtcttctacgtggcagagggccaagaggataaacactctatactgaccaatacgggcggttcccaagcttatgaagattttgtggccggactgggatgggaggtgaacttaacaaaccactgcggttttatgggagggcttcagaagaacaagtctacagggttgaccaccccctactttgcaacctctaccgtggaggtcatattccacgtgtccactcggatgccatccgactctgacgactctttgacaaagaagctccggcacctgggcaacgacgaggtgcacatcgtgtggtctgaacatacacgggactacagacggggaattatccctaccgagttcggtgatgtgctgatcgtcatctacccaatgaaaaaccatatgtttagtatccaaattatgaaaaaaccagaggttcctttctttggcccactgtttgacggcgcaattgtgaacgggaaggtgctgcccataatggtgagagctacggctattaacgcatctagagctctgaagagtctcattcccctctatcaaaatttttatgaggagagggccagatatctacagacaatcgtgcaacaccacctcgaaccaacaacatttgaagactttgcggctcaggtgttctctccggcaccataccaccacttacccagcgatgccgaggaaagaaacgctgttattgttctcttcctgccaaaacctcccctggaaaacattggccacctgaaggcccctactcagcgcttttaccctgtaaagcttcctcagcagagaagata

SEQ ID NO: 183613 - DNA, 6110 bp, Artificial Sequence
  derived and/or modified sequence
atgttttctaagaagcctcatggtgacgtgaaaaaaagcacacagaaagtcctcgacacgaagaaggacgccctgacccgcctgaagcacctgcggatcgtcatcgaaaatgcagaatcaatcgacctgaagcagtttttcgatcagcacttttcgcatatctactatgtgttcttcgagaattttgtcaccatcgaagcaagcctgaagcaaaaaggccacaagagccaaagggaagaactggatgccatactgttcatatttgaaaaaatcctgcaattactcccagagcgcattcatcaaaggtggcagtttcatagcatagggctgatcttgaagaagctcttgcacaccggaaatagcctgaaaatacgcagagaaggggttaggctctttttgctgtggttacaggctctccagaacaactgctccaaagagcagctctggatgtttagctgtttgatccccggatttagcgctccacaatcagagcacgggccaagaacactcgacaatctgatcaacccccctttgaatctgcaagaaacacaagtgaccatcgaggagattacgcctttggtgccgcctcagtctggagacaaaggccaggaggacctgacatcctattttctcgaggctcttttgaagtacattgttatacaggtgaaatctctcgagtggaaaaataaagagaatcaagagaggggtttttcctttttgttttctcattttaagaaatattacttaccctatatcttccctaacatctgtaaggaaaactccctgtatcatccaattctggatatacctcagatgagacctaaaccacattatgtggtgattaagaaagacgccgagaccaacgaggcaatctactgcacaaaagagcctttcattaaagctagagtgattgtaatccggtggctggtttcattttggctggaacccaagcctcacactggaccccacatccctgggatggaaggtgaggtcctgccaaagaatatccagcgggctgccgcttcactggtgtcccgtgaagaatccaaaaacgacaatgcagacaaaactgacagaaccactgagcccgaacagtcccattcgaatacatccactctgacagagcgtgaaccgtcgagctctagtttatgtagcatcgatgaggaacacctcaccgacatcgaaattgtgcggagagtgttctctagcaagaggagcaacgttaatttcgtgaccgagatcttccgacaggccttccttctaccaatctgcgaggccgcagcaatgcggaaggtggtcaaggtctaccaagagtggatacagcaagaggagaagccgctctttatgcaggaacccgaagaaattgtcatcacgtcttcggacctgccctgtattgaaaacgtgaccgatcacgacatcagtatggaggagggagaaaagagggaagaggagaacggaacaaacacggcagatcacgtgcggaactccagctgggcaaaaaacggctcataccagggagccctacacaatgcctctgaggaagcgacagaacagaatatccgcgctgggacgcaggccgtgctgcaggtgttcattatcaacagcagcaacatctttctgctggagcctgcaaacgagataaagaatctcctcgacgaacacacagacatgtgtaagagaattcttaacatatatcgctatatggtcgtgcaggtgtccatggacaagaaaacctgggaacagatgcttctcgtactcctccgggttacagagtcggttctaaaaatgccgtcccaggctttcctccaatttcagggcaaaaaaaacatgacattagcaggcaggcttgccggaccattattccagaccctcatcgtggcttggataaaagctaaccttaacgtttacatttcccgcgaattgtgggacgacctgctcagtgtgctgtcttctctgacatattgggaggagctggcaaccgagtggtctctgacgatggagacactcaccaaggttctggcaagaaatctgtattctttagacctctctgatctgcctctggacaaactgtcagagcaaaagcagaagaagcacaagggaaagggggtcggacacgagtttcagaaggtgtccgtggacaagtctttcagtcgcggttggagcagagatcaaccagggcaggctcctatgagacagcggtctgcgaccacaacagggtcaccaggtactgagaaggcacgcagcattgtccggcagaagaccgtcgacatcgatgatgcccagatcctccctcgatctacaagggtaagacacttctcccagtccgaagagaccggcaacgaagtgttcggggctctgaatgaagaacagccactccccagaagctccagcacttctgacattctggagccattcacagttgaacgagccaaggtgaacaaggaggatatgtctcagaaactgcccccactgaacagcgacatcggtggatcatccgccaatgtgccagaccttatggatgagtttatcgcagagaggctgcgatctggtaacgcgtccactatgacacgcagaggaagcagccctggttcgttggaaatcccaaaagacctacccgacatcttgaacaagcagaaccaaatgcgtccaatcgatgatcccggtgtaccctctgaatggacatcaccagcatcagccggttctagcgacctgatctcatctgactctcactccgactcatttagcgcatttcagtacgatggcaggaagttcgataatttcggcttcgggacggataccggagtgacctcatctgccgacgtggactcaggcagcggccaccaccaaagcgccgaggagcaggaagtggcatcattgaccactctacatatagattcagagacctcctcccttaatcaacaagcattcagcgcggaagtggccacgatcaccggaagtgagtctgcttcgccggtgcattcaccactcggatctcgcagccagactccctcaccctccacactgaatatcgaccacatggaacagaaggatcttcaactcgatgagaagcttcaccacagtgtattacagactcccgacgatttagaaatctctgaattcccttcagaatgttgctccgtaatggcagggggtacattgactggctggcatgcggacgttgctaccgtaatgtggaggcggatgctcggcattctcggggatgtaaatagtataatggatccagagatccatgctcaagtgttcgactatttatgtgagctatggcagaacctagccaagattcgggacaacctggggatctcaacagataacctgactagtccctcacctcccgttttgattcctcctttgcggattctgacaccatggctctttaaagccaccatgctaaccgacaagtacaaacaggggaagcttcacgcatataagttgatctgcaacaccatgaaacgccgacaggacgtgtcccctaaccgcgacttcctgacacacttttataatattatgcactgcggcctgttgcacatcgaccaggacattgttaataccatcattaaacactgctctccacagtttttttccctcgggcttccgggagctaccatgctaataatggatttcattgtggcggctggcagagtcgcctccagcgccttccttaacgcccctagggtggaggcccaggtcctcctggggtcactggtgtgttttcctaatctttactgcgagctgccaagcctgcatcccaacatccctgacgttgcagttagtcagtttacagacgtgaaggaacttattatcaagacagtgctgtcaagcgcccgagacgagccatccggtcccgctcgttgtgttgctctgtgctcattaggcatctggatctgcgaagagctggtgcacgagagtcatcaccctcagattaaagaggccctgaatgtcatctgtgtcagcctcaaattcaccaataagacagtggctcatgtggcgtgcaacatgttgcatatgctggtgcactatgtgcccagactgcagatctaccaacccgattcacctctaaagattatacagatactgatcgctacaataactcatctgctgccatccaccgaggcaagctcttacgagatggataagaggctggtcgtgagcttgctgctgtgtcttcttgattggataatggccctccctcttaaaactttgctccagcctttccacgcgaccggggcagagagcgacaaaactgaaaaaagcgtactgaactgtatctacaaagttctgcacggctgtgtctacggggcacagtgtttcagtaatcccaggtatttcccgatgtctctaagtgacctggcctcagttgactacgacccattcatgcatctggagtcccttaaagagcccgaaccacttcactctcctgatagcgagcgaagcagcaaactgcagccagtcactgaagttaagacccagatgcagcatggcctcatctcaattgctgccagaaccgtgatcacacatctggtaaaccacctaggtcactaccctatgtcaggcggtcccgctatgctaacatctcaggtgtgcgagaatcacgataaccactactcagagtccactgagctgagccccgagttattcgagtcccccaatattcagtttttcgtactcaacaatacgaccctcgtatcgtgtattcagatccggtctgaagagaatatgccagggggtggcctgagcgcagggcttgcgtctgcgaactcgaacgtccgcattattgtcagggatctgtccggcaagtactcctgggatagcgccattctgtatggccctcctcccgtcagcgggctgagcgaacctactagttttatgctgtctttgagtcaccaggagaaaccagaggagccaccgacttctaatgaatgcctggaggacatcaccgtgaaggacggactgagcctgcagtttaaaaggttccgcgagactgtgcctacttgggacactatcagagatgaggaagacgttctagacgagctgttgcagtatctgggggtcacctctccagaatgtcttcaaaggacgggtattagtctgaatatacctgctcctcagccagtttgcatctccgagaaacaggaaaacgatgtgatcaatgcgattctcaaacagcatacagaggagaaggagtttgtagaaaaacacttcaacgatctgaatatgaaagccgtagaacaagacgagccaatacctcaaaaaccccagtccgcgttttattattgccgcttattactgtcgatcctgggcatgaacagttgggacaagagacgctcttttcatcttctcaagaaaaacgaaaagctgcttagagaactcagaaacctcgactcgcgccagtgtagggagacgcataagattgctgtcttttatgttgctgagggccaggaagacaagcacagtattctgactaataccggaggttcgcaagcgtatgaggatttcgtggcagggctgggatgggaagtcaacttgacgaatcactgtggtttcatggggggtctgcaaaaaaataagagcacagggttgaccacaccttacttcgcgacttctaccgtagaagtgatcttccatgttagtactagaatgcctagcgattccgacgattctctaaccaaaaaactgcggcatctggggaatgatgaggtacatatcgtatggagcgagcacacgagagactaccggcgaggaatcatcccaaccgagtttggggacgtgcttattgtgatatacccaatgaaaaatcacatgttctctattcagatcatgaaaaagcccgaggttccttttttcggacctctgtttgacggggctattgtcaatgggaaagtccttccaatcatggtgagagccactgccattaatgcgagtcgggcattgaagtcacttatacccttgtaccaaaacttctatgaagagagagcgcgttacctgcagaccatcgtgcagcaccacctggagccaactaccttcgaggatttcgctgcgcaggtgttttcacccgctccctatcatcacctgcctagtgacgcggatcatta

SEQ ID NO: 183614 - DNA, 7900 bp, Artificial Sequence
  derived and/or modified sequence
agggagagagttgtgctcctgccgccgagagctccaccttcgtggctctgggtccggggccccggcctgtggcggcgagcggcggccgctggagacgagcggcggcggcaggcggccagcccgggtctgcctcgctccgtgcagggccgggagagggatccgccatattggagctggggccgaaggtgccttggagccgcggcgcgaggcgggtggaggtggcggccctggcctggatcgggaaggagtcggctctgccctggcccgcaaggctggggagctaatgagcctctctggctagtctcctccccgtccactccctccactttctgccgccgggacccggctgggagccggctgtggcagtggcagtggcagtggcagcgacaggatgttctccaagaagccgcacggggacgtgaagaagtccacccagaaggtgctagacaccaagaaggacgcactgactcgcctcaagcacctgcgcatcgtcatcgagaatgcagaatctattgatcttaaacagtttttcgaccaacatttttcacatatatactatgtgttctttgaaaattttgtgactattgaagctagtcttaaacagaaaggtcacaagtctcaaagagaggaattggatgctatactttttatttttgagaaaattttacaacttcttccagaaagaattcatcagcgatggcagtttcatagtattggattgattttaaagaagctacttcacacaggaaactccttaaagattaggcgggaaggtgttcgtcttttcttactatggttgcaagctcttcagaataactgtagcaaagaacagctctggatgttttcatgcttaatccctggattttcagcaccacagtctgaacatggacctcgaactttagataatctcattaatcctccactcaaccttcaagaaactcaagtcactatagaagaaatcactcctcttgtccccccacaatcaggagataaagggcaagaagatctcacaagctattttcttgaagcacttctaaaatacatagtcattcaggtaaaaagtttagaatggaagaacaaagaaaaccaagaaaggggattttcatttttgttttcacattttaagaaatattacttgccttatatttttccaaacatctgtaaggaaaacagtttatatcatcctatacttgacatcccgcagatgagaccaaagccacattatgtcgtgataaagaaagatgctgaaaccaatgaagcaatctattgtacaaaggagcctttcattaaggctcgtgttattgtcattcgttggctggtttctttctggctggagccaaaaccacatacaggacctcatattcctgggatggaaggtgaagtcttgccaaagaatattcagagagcagctgctagtttagtatccagagaagaaagcaaaaatgataatgctgataaaacagacagaactacagaacccgaacagtctcattccaatacaagcactctcacggagcgagaacctagctcatctagtctctgtagtattgatgaagaacatctcacagacattgaaatagttcgcagagttttttcttctaaaaggagtaatgtaaactttgtgacagagatatttcgtcaggcatttttattaccaatttgtgaagcagcagctatgagaaaagtggtaaaagtatatcaagaatggatccaacaagaggaaaaacctttgttcatgcaagagcctgaagaaattgtgatcacttcttcagacctcccttgcattgaaaatgtcacagaccatgatatttcaatggaagaaggagaaaaaagagaagaggaaaatgggaccaatactgctgatcatgttcgaaattccagttgggcaaaaaacggctcctaccaaggtgctcttcataacgcctctgaagaagccacagaacaaaacatacgagctggtacccaggcagttttgcaggtgtttattataaactcatcaaatatatttcttcttgaacctgcaaatgaaataaaaaatcttctggatgaacacacagatatgtgtaaacgcattcttaacatttatcggtacatggttgtacaagtatcaatggacaaaaagacttgggaacagatgctgcttgtgttgctcagagtcacggaatctgtactgaagatgccatcacaagcttttctacagttccaagggaaaaaaaatatgaccttggcaggtcgacttgcaggaccacttttccagacccttatagttgcctggatcaaagcaaacctaaatgtgtacatctcccgagaactttgggatgacttactgtcagtattgtcatcgctgacctattgggaagagttggccactgagtggtcactgactatggagacattaactaaagttttagctaggaatttatatagtttggatctcagtgatttaccattggataagctgagtgaacagaaacaaaaaaagcacaaagggaaaggagttggacatgaatttcagaaagtttcagttgacaagtcattttctagaggatggagtcgtgatcagcctggccaagccccaatgagacagaggagtgcaacaaccactggttctccaggaaccgaaaaggcgaggagtatagtacggcaaaaaactgtcgatattgatgatgctcaaatacttccccgctcaactagagtcagacatttttcacaaagtgaagaaactggaaatgaagtttttggtgctttgaatgaggagcagccattgcctcgaagtagcagcacttctgacatcttggaaccattcactgttgaacgagccaaagtcaataaagaggacatgagccaaaaactgcctcctcttaatagtgatattggcggcagcagtgctaatgttcctgatctgatggatgagtttatagcagaacgacttcgaagtggtaatgcctcgactatgacaagaagaggaagtagtccaggcagcctggaaattcccaaagacctccctgatattctaaacaagcagaaccagatgcgccctattgatgacccaggtgtgccctcagaatggacttctcctgccagtgcagggagcagtgatcttatcagctcagatagtcattcggattctttcagcgctttccaatatgatggccgaaaatttgacaattttggctttggaaccgacactggggttacgtcctctgctgatgtggattcaggttctggccatcatcagagtgctgaagagcaggaagtggctagtctaactactcttcatatagattctgaaacaagcagtcttaatcagcaagctttctctgctgaagttgcaactattactggttcagaaagtgcttccccagtccactcacctctgggctccaggtcacagactccttccccttctacattgaatatagatcacatggaacagaaggatctgcagctcgacgagaagctccaccactctgttcttcagacaccagatgatctagaaattagtgaatttccatcagaatgttgtagtgtgatggcaggaggtactctgactggatggcatgctgatgttgctactgtaatgtggcgaagaatgctaggcattttgggagatgtaaattcaatcatggatcctgaaatacatgctcaagtttttgattacctctgtgaactttggcagaatctagctaagattagagataaccttggcatttcaactgataacctgacctccccttctccaccagttttaattcctccactgagaattcttacaccttggctttttaaggcaaccatgttgactgataaatataaacaaggtaaattacatgcatataaacttatttgtaatacaatgaaaagaagacaagatgtttctccaaatagagattttctaacacatttctacaatataatgcattgtggattacttcatattgaccaggatattgtcaatacaatcatcaaacactgctcacctcaatttttttcacttggtttgcctggtgccacaatgcttattatggattttattgtagcagctggtagagtggcttcttcagcttttctcaatgcaccaagagtagaagcacaagttcttctgggatctttggtttgctttcccaacttatattgtgaactgccttctcttcatcccaacattcctgatgttgctgtgtctcagtttacagatgttaaggaacttataatcaaaactgtattaagctcggcaagagatgagccctctggtcctgcacgatgtgtagcactttgtagtttaggtatttggatttgtgaagaactagtccatgagtctcatcatcctcaaattaaggaagctctgaatgtgatttgtgtttccttaaagtttactaataaaacagtagcccacgtagcttgtaacatgcttcacatgctggttcattatgtacctagacttcagatttaccagcctgattctcccttgaaaattattcaaatcctaatagctaccatcacccatcttttaccaagtacagaggcttcatcttatgaaatggacaagaggttggtagtatctttacttctctgccttctggactggatcatggccttacctctaaagacactgctccaaccatttcatgctacgggagcagaaagcgataaaacagaaaaatctgttctcaattgcatttataaggttttacatgggtgtgtttatggagctcagtgttttagcaatccaaggtattttcccatgagcctctctgatttggcatctgtagattatgatccttttatgcatttggaaagtctgaaagagcctgagcctctgcactctcctgactcagaacgatcttctaaactccagccagtaacagaagtgaaaactcaaatgcagcatggattaatctctatagcagcccgcactgttattacacatctggtaaatcacctgggccattatccaatgagcggtggtcctgctatgctaacaagtcaggtgtgtgaaaatcacgacaatcattacagtgaaagtactgaactttctcctgaactctttgagagtccaaatatccagttctttgtgttaaataatacaaccttagtgtcctgtatccagatcagatcagaagagaatatgcctggaggaggtttatctgctggccttgcatcagccaattcaaatgtcagaatcatagtacgtgatctctctggaaaatattcatgggattctgctatactgtatggcccacctcctgtaagtggcttgtcagaacctacatctttcatgctttcattgtctcaccaagagaagccagaagagcctccgacatctaatgaatgcttagaagatataaccgtaaaagatggactttctctccagtttaaaagatttagagaaactgtaccaacttgggatacaataagagatgaagaagatgttcttgatgagctcttgcagtatttgggtgttactagtcctgaatgcttacagagaactggaatctcacttaatattcctgctccacaacctgtgtgcatttctgaaaaacaagaaaatgatgttattaatgctatccttaagcaacatacagaagaaaaagaatttgttgagaagcactttaatgacttaaacatgaaagctgtggaacaagatgaaccaatacctcaaaaacctcagtcagcattttattattgcagattgcttcttagtatattgggaatgaattcctgggacaaacggaggagctttcatctcctgaagaaaaatgaaaagctacttagagaacttaggaacttggattcaaggcagtgccgagagacacacaagattgcagtattttatgttgctgaaggacaagaagacaaacactccattctcaccaatacaggaggaagtcaagcatatgaagattttgtagctggtcttggttgggaggtaaatcttacaaaccattgtggttttatgggaggactacaaaaaaacaaaagcactggattgaccactccatattttgctacctctacagtagaggtaatatttcacgtgtcaacaagaatgccttctgattctgatgattctttgaccaaaaaattgagacatttgggaaatgatgaagtgcacattgtttggtcagagcatactagagactacaggagaggaattattcccacagaatttggtgatgtccttattgtaatatatccaatgaaaaatcacatgttcagtattcagataatgaaaaaaccagaggttcccttctttggtcccctttttgatggtgctattgtgaatggaaaggttctacccattatggttagagcaacagctataaatgcaagccgtgctctgaaatctctgattccattgtatcaaaacttctatgaggagagagcacgatacctgcaaacaattgtccagcaccacttagaaccaacaacatttgaagattttgcagcacaggttttttctccagctccctaccaccatttaccatctgatgccgaagaaagaaatgcagtgatagttctcttcctcccaaaacctccgctagaaaacattggccatctcaaggctcctacccagagattctacccagtgaaactcccacagcaacgcaggtagatggggctgacctggcctctccaatgtctcctcgaactagcaaaagccgcatgtccatgaagctgcgtcgttcctctggctcagccaataaatcctaaggagacaagcagcccagcagtgatcagcagtagccaccttagcacgaacatagggttaaccctttcaggccttcatgtctgccataacatgcatgtttcttcctgtacatttatttgagaaaacactggatttaaataattttaaataatttgtagcttaatattaaagatttaagttatttattgtttcattttttttcccacaatccaagctgccatattttgagggcagggggagttttattctacaccctttaccttcctagataattatgtctaagtagttttatctttaatttcatggttaactgtgagccaaaatacaattggacaattagtctcattatttattgtgccccattgcaactttatggttcaataaatatataattttttacaaatgtaaaattttacatttaagcatttgtaaagttacagcaaaagatgtacctgttaatacacagaatgtgtacagattatttgttatgacaataaaacactcaaaataaatggtctttagcatctcaaattccaactgaaatcattttagtattaactcttcttcccaaagcaatgtctcatttcttggctgtgcaggtgatgccatgttatatccaataactagaaaaatcactgtgctgaacttttatgtttagcttccaagtatttttctaatgttttgcatttcaagtggtatcactgttaaatgccatttgttttcagattgtggccttttattattggctgctagatcctggtgtttctatgttcttttttaagcaccaaaaagaagatggggaagaaaagaaggaaaattttctgatataaatatgttgttcaaattatgagtattatttaaaaaagaaaaaggaacataacccaggagtctaagttaaatctaatattgttaatactgaacttgcaggtccaggttggtatacattccaccctctagaagtattttcttacagtagataagctgctcacattttgttttgaatgggcatctcctgaggaaatgtagcatgacattggtactaactgcatgtgtaaatacatcatactggcaaaccgtaaaatataaattatgtatcatcattcatgtagtatctataatttgtaacagtgggggggaaagatgacatggtatttaataatacaataaaaatattcttatcacttcctatcc

SEQ ID NO: 183615 - DNA, 7864 bp, Artificial Sequence
  derived and/or modified sequence
agggagagagttgtgctcctgccgccgagagctccaccttcgtggctctgggtccggggccccggcctgtggcggcgagcggcggccgctggagacgagcggcggcggcaggcggccagcccgggtctgcctcgctccgtgcagggccgggagagggatccgccatattggagctggggccgaaggtgccttggagccgcggcgcgaggcgggtggaggtggcggccctggcctggatcgggaaggagtcggctctgccctggcccgcaaggctggggagctaatgagcctctctggctagtctcctccccgtccactccctccactttctgccgccgggacccggctgggagccggctgtggcagtggcagtggcagtggcagcgacaggatgttctccaagaagccgcacggggacgtgaagaagtccacccagaaggtgctagacaccaagaaggacgcactgactcgcctcaagcacctgcgcatcgtcatcgagaatgcagaatctattgatcttaaacagtttttcgaccaacatttttcacatatatactatgtgttctttgaaaattttgtgactattgaagctagtcttaaacagaaaggtcacaagtctcaaagagaggaattggatgctatactttttatttttgagaaaattttacaacttcttccagaaagaattcatcagcgatggcagtttcatagtattggattgattttaaagaagctacttcacacaggaaactccttaaagattaggcgggaaggtgttcgtcttttcttactatggttgcaagctcttcagaataactgtagcaaagaacagctctggatgttttcatgcttaatccctggattttcagcaccacagtctgaacatggacctcgaactttagataatctcattaatcctccactcaaccttcaagaaactcaagtcactatagaagaaatcactcctcttgtccccccacaatcaggagataaagggcaagaagatctcacaagctattttcttgaagcacttctaaaatacatagtcattcaggtaaaaagtttagaatggaagaacaaagaaaaccaagaaaggggattttcatttttgttttcacattttaagaaatattacttgccttatatttttccaaacatctgtaaggaaaacagtttatatcatcctatacttgacatcccgcagatgagaccaaagccacattatgtcgtgataaagaaagatgctgaaaccaatgaagcaatctattgtacaaaggagcctttcattaaggctcgtgttattgtcattcgttggctggtttctttctggctggagccaaaaccacatacaggacctcatattcctgggatggaaggtgaagtcttgccaaagaatattcagagagcagctgctagtttagtatccagagaagaaagcaaaaatgataatgctgataaaacagacagaactacagaacccgaacagtctcattccaatacaagcactctcacggagcgagaacctagctcatctagtctctgtagtattgatgaagaacatctcacagacattgaaatagttcgcagagttttttcttctaaaaggagtaatgtaaactttgtgacagagatatttcgtcaggcatttttattaccaatttgtgaagcagcagctatgagaaaagtggtaaaagtatatcaagaatggatccaacaagaggaaaaacctttgttcatgcaagagcctgaagaaattgtgatcacttcttcagacctcccttgcattgaaaatgtcacagaccatgatatttcaatggaagaaggagaaaaaagagaagaggaaaatgggaccaatactgctgatcatgttcgaaattccagttgggcaaaaaacggctcctaccaaggtgctcttcataacgcctctgaagaagccacagaacaaaacatacgagctggtacccaggcagttttgcaggtgtttattataaactcatcaaatatatttcttcttgaacctgcaaatgaaataaaaaatcttctggatgaacacacagatatgtgtaaacgcattcttaacatttatcggtacatggttgtacaagtatcaatggacaaaaagacttgggaacagatgctgcttgtgttgctcagagtcacggaatctgtactgaagatgccatcacaagcttttctacagttccaagggaaaaaaaatatgaccttggcaggtcgacttgcaggaccacttttccagacccttatagttgcctggatcaaagcaaacctaaatgtgtacatctcccgagaactttgggatgacttactgtcagtattgtcatcgctgacctattgggaagagttggccactgagtggtcactgactatggagacattaactaaagttttagctaggaatttatatagtttggatctcagtgatttaccattggataagctgagtgaacagaaacaaaaaaagcacaaagggaaaggagttggacatgaatttcagaaagtttcagttgacaagtcattttctagaggatggagtcgtgatcagcctggccaagccccaatgagacagaggagtgcaacaaccactggttctccaggaaccgaaaaggcgaggagtatagtacggcaaaaaactgtcgatattgatgatgctcaaatacttccccgctcaactagagtcagacatttttcacaaagtgaagaaactggaaatgaagtttttggtgctttgaatgaggagcagccattgcctcgaagtagcagcacttctgacatcttggaaccattcactgttgaacgagccaaagtcaataaagaggacatgagccaaaaactgcctcctcttaatagtgatattggcggcagcagtgctaatgttcctgatctgatggatgagtttatagcagaacgacttcgaagtggtaatgcctcgactatgacaagaagaggaagtagtccaggcagcctggaaattcccaaagacctccctgatattctaaacaagcagaaccagatgcgccctattgatgacccaggtgtgccctcagaatggacttctcctgccagtgcagggagcagtgatcttatcagctcagatagtcattcggattctttcagcgctttccaatatgatggccgaaaatttgacaattttggctttggaaccgacactggggttacgtcctctgctgatgtggattcaggttctggccatcatcagagtgctgaagagcaggaagtggctagtctaactactcttcatatagattctgaaacaagcagtcttaatcagcaagctttctctgctgaagttgcaactattactggttcagaaagtgcttccccagtccactcacctctgggctccaggtcacagactccttccccttctacattgaatatagatcacatggaacagaaggatctgcagctcgacgagaagctccaccactctgttcttcagacaccagatgatctagaaattagtgaatttccatcagaatgttgtagtgtgatggcaggaggtactctgactggatggcatgctgatgttgctactgtaatgtggcgaagaatgctaggcattttgggagatgtaaattcaatcatggatcctgaaatacatgctcaagtttttgattacctctgtgaactttggcagaatctagctaagattagagataaccttggcatttcaactgataacctgacctccccttctccaccagttttaattcctccactgagaattcttacaccttggctttttaaggcaaccatgttgactgataaatataaacaaggtaaattacatgcatataaacttatttgtaatacaatgaaaagaagacaagatgtttctccaaatagagattttctaacacatttctacaatataatgcattgtggattacttcatattgaccaggatattgtcaatacaatcatcaaacactgctcacctcaatttttttcacttggtttgcctggtgccacaatgcttattatggattttattgtagcagctggtagagtggcttcttcagcttttctcaatgcaccaagagtagaagcacaagttcttctgggatctttggtttgctttcccaacttatattgtgaactgccttctcttcatcccaacattcctgatgttgctgtgtctcagtttacagatgttaaggaacttataatcaaaactgtattaagctcggcaagagatgagccctctggtcctgcacgatgtgtagcactttgtagtttaggtatttggatttgtgaagaactagtccatgagtctcatcatcctcaaattaaggaagctctgaatgtgatttgtgtttccttaaagtttactaataaaacagtagcccacgtagcttgtaacatgcttcacatgctggttcattatgtacctagacttcagatttaccagcctgattctcccttgaaaattattcaaatcctaatagctaccatcacccatcttttaccaagtacagaggcttcatcttatgaaatggacaagaggttggtagtatctttacttctctgccttctggactggatcatggccttacctctaaagacactgctccaaccatttcatgctacgggagcagaaagcgataaaacagaaaaatctgttctcaattgcatttataaggttttacatgggtgtgtttatggagctcagtgttttagcaatccaaggtattttcccatgagcctctctgatttggcatctgtagattatgatccttttatgcatttggaaagtctgaaagagcctgagcctctgcactctcctgactcagaacgatcttctaaactccagccagtaacagaagtgaaaactcaaatgcagcatggattaatctctatagcagcccgcactgttattacacatctggtaaatcacctgggccattatccaatgagcggtggtcctgctatgctaacaagtcaggtgtgtgaaaatcacgacaatcattacagtgaaagtactgaactttctcctgaactctttgagagtccaaatatccagttctttgtgttaaataatacaaccttagtgtcctgtatccagatcagatcagaagagaatatgcctggaggaggtttatctgctggccttgcatcagccaattcaaatgtcagaatcatagtacgtgatctctctggaaaatattcatgggattctgctatactgtatggcccacctcctgtaagtggcttgtcagaacctacatctttcatgctttcattgtctcaccaagagaagccagaagagcctccgacatctaatgaatgcttagaagatataaccgtaaaagatggactttctctccagtttaaaagatttagagaaactgtaccaacttgggatacaataagagatgaagaagatgttcttgatgagctcttgcagtatttgggtgttactagtcctgaatgcttacagagaactggaatctcacttaatattcctgctccacaacctgtgtgcatttctgaaaaacaagaaaatgatgttattaatgctatccttaagcaacatacagaagaaaaagaatttgttgagaagcactttaatgacttaaacatgaaagctgtggaacaagatgaaccaatacctcaaaaacctcagtcagcattttattattgcagattgcttcttagtatattgggaatgaattcctgggacaaacggaggagctttcatctcctgaagaaaaatgaaaagctacttagagaacttaggaacttggattcaaggcagtgccgagagacacacaagattgcagtattttatgttgctgaaggacaagaagacaaacactccattctcaccaatacaggaggaagtcaagcatatgaagattttgtagctggtcttggttgggaggtaaatcttacaaaccattgtggttttatgggaggactacaaaaaaacaaaagcactggattgaccactccatattttgctacctctacagtagaggtaatatttcacgtgtcaacaagaatgccttctgattctgatgattctttgaccaaaaaattgagacatttgggaaatgatgaagtgcacattgtttggtcagagcatactagagactacaggagaggaattattcccacagaatttggtgatgtccttattgtaatatatccaatgaaaaatcacatgttcagtattcagataatgaaaaaaccagaggttcccttctttggtcccctttttgatggtgctattgtgaatggaaaggttctacccattatggttagagcaacagctataaatgcaagccgtgctctgaaatctctgattccattgtatcaaaacttctatgaggagagagcacgatacctgcaaacaattgtccagcaccacttagaaccaacaacatttgaagattttgcagcacaggttttttctccagctccctaccaccatttaccatctgatgccgatcattaaatatcagttctgtttatctgaaggctcctacccagagattctacccagtgaaactcccacagcaacgcaggtagatggggctgacctggcctctccaatgtctcctcgaactagcaaaagccgcatgtccatgaagctgcgtcgttcctctggctcagccaataaatcctaaggagacaagcagcccagcagtgatcagcagtagccaccttagcacgaacatagggttaaccctttcaggccttcatgtctgccataacatgcatgtttcttcctgtacatttatttgagaaaacactggatttaaataattttaaataatttgtagcttaatattaaagatttaagttatttattgtttcattttttttcccacaatccaagctgccatattttgagggcagggggagttttattctacaccctttaccttcctagataattatgtctaagtagttttatctttaatttcatggttaactgtgagccaaaatacaattggacaattagtctcattatttattgtgccccattgcaactttatggttcaataaatatataattttttacaaatgtaaaattttacatttaagcatttgtaaagttacagcaaaagatgtacctgttaatacacagaatgtgtacagattatttgttatgacaataaaacactcaaaataaatggtctttagcatctcaaattccaactgaaatcattttagtattaactcttcttcccaaagcaatgtctcatttcttggctgtgcaggtgatgccatgttatatccaataactagaaaaatcactgtgctgaacttttatgtttagcttccaagtatttttctaatgttttgcatttcaagtggtatcactgttaaatgccatttgttttcagattgtggccttttattattggctgctagatcctggtgtttctatgttcttttttaagcaccaaaaagaagatggggaagaaaagaaggaaaattttctgatataaatatgttgttcaaattatgagtattatttaaaaaagaaaaaggaacataacccaggagtctaagttaaatctaatattgttaatactgaacttgcaggtccaggttggtatacattccaccctctagaagtattttcttacagtagataagctgctcacattttgttttgaatgggcatctcctgaggaaatgtagcatgacattggtactaactgcatgtgtaaatacatcatactggcaaaccgtaaaatataaattatgtatcatcattcatgtagtatctataatttgtaacagtgggggggaaagatgacatggtatttaataatacaataaaaatattcttatcacttcctatcca

SEQ ID NO: 183616 - DNA, 6222 bp, Artificial Sequence
  derived and/or modified sequence
atgttcagcaagaagccccacggcgacgtgaagaagagcacccagaaggtgctggacaccaagaaggacgccctgaccagactgaagcacctgagaatcgtgatcgagaacgccgagagcatcgacctgaagcagttcttcgaccagcacttcagccacatctactacgtgttcttcgagaacttcgtgaccatcgaggccagcctgaagcagaagggccacaagagccagagagaggagctggacgccatcctgttcatcttcgagaagatcctgcagctgctgcccgagagaatccaccagagatggcagttccacagcatcggcctgatcctgaagaagctgctgcacaccggcaacagcctgaagatcagaagagagggcgtgagactgttcctgctgtggctgcaggccctgcagaacaactgcagcaaggagcagctgtggatgttcagctgcctgatccccggcttcagcgccccccagagcgagcacggccccagaaccctggacaacctgatcaacccccccctgaacctgcaggagacccaggtgaccatcgaggagatcacccccctggtgcccccccagagcggcgacaagggccaggaggacctgaccagctacttcctggaggccctgctgaagtacatcgtgatccaggtgaagagcctggagtggaagaacaaggagaaccaggagagaggcttcagcttcctgttcagccacttcaagaagtactacctgccctacatcttccccaacatctgcaaggagaacagcctgtaccaccccatcctggacatcccccagatgagacccaagccccactacgtggtgatcaagaaggacgccgagaccaacgaggccatctactgcaccaaggagcccttcatcaaggccagagtgatcgtgatcagatggctggtgagcttctggctggagcccaagccccacaccggcccccacatccccggcatggagggcgaggtgctgcccaagaacatccagagagccgccgccagcctggtgagcagagaggagagcaagaacgacaacgccgacaagaccgacagaaccaccgagcccgagcagagccacagcaacaccagcaccctgaccgagagagagcccagcagcagcagcctgtgcagcatcgacgaggagcacctgaccgacatcgagatcgtgagaagagtgttcagcagcaagagaagcaacgtgaacttcgtgaccgagatcttcagacaggccttcctgctgcccatctgcgaggccgccgccatgagaaaggtggtgaaggtgtaccaggagtggatccagcaggaggagaagcccctgttcatgcaggagcccgaggagatcgtgatcaccagcagcgacctgccctgcatcgagaacgtgaccgaccacgacatcagcatggaggagggcgagaagagagaggaggagaacggcaccaacaccgccgaccacgtgagaaacagcagctgggccaagaacggcagctaccagggcgccctgcacaacgccagcgaggaggccaccgagcagaacatcagagccggcacccaggccgtgctgcaggtgttcatcatcaacagcagcaacatcttcctgctggagcccgccaacgagatcaagaacctgctggacgagcacaccgacatgtgcaagagaatcctgaacatctacagatacatggtggtgcaggtgagcatggacaagaagacctgggagcagatgctgctggtgctgctgagagtgaccgagagcgtgctgaagatgcccagccaggccttcctgcagttccagggcaagaagaacatgaccctggccggcagactggccggccccctgttccagaccctgatcgtggcctggatcaaggccaacctgaacgtgtacatcagcagagagctgtgggacgacctgctgagcgtgctgagcagcctgacctactgggaggagctggccaccgagtggagcctgaccatggagaccctgaccaaggtgctggccagaaacctgtacagcctggacctgagcgacctgcccctggacaagctgagcgagcagaagcagaagaagcacaagggcaagggcgtgggccacgagttccagaaggtgagcgtggacaagagcttcagcagaggctggagcagagaccagcccggccaggcccccatgagacagagaagcgccaccaccaccggcagccccggcaccgagaaggccagaagcatcgtgagacagaagaccgtggacatcgacgacgcccagatcctgcccagaagcaccagagtgagacacttcagccagagcgaggagaccggcaacgaggtgttcggcgccctgaacgaggagcagcccctgcccagaagcagcagcaccagcgacatcctggagcccttcaccgtggagagagccaaggtgaacaaggaggacatgagccagaagctgccccccctgaacagcgacatcggcggcagcagcgccaacgtgcccgacctgatggacgagttcatcgccgagagactgagaagcggcaacgccagcaccatgaccagaagaggcagcagccccggcagcctggagatccccaaggacctgcccgacatcctgaacaagcagaaccagatgagacccatcgacgaccccggcgtgcccagcgagtggaccagccccgccagcgccggcagcagcgacctgatcagcagcgacagccacagcgacagcttcagcgccttccagtacgacggcagaaagttcgacaacttcggcttcggcaccgacaccggcgtgaccagcagcgccgacgtggacagcggcagcggccaccaccagagcgccgaggagcaggaggtggccagcctgaccaccctgcacatcgacagcgagaccagcagcctgaaccagcaggccttcagcgccgaggtggccaccatcaccggcagcgagagcgccagccccgtgcacagccccctgggcagcagaagccagacccccagccccagcaccctgaacatcgaccacatggagcagaaggacctgcagctggacgagaagctgcaccacagcgtgctgcagacccccgacgacctggagatcagcgagttccccagcgagtgctgcagcgtgatggccggcggcaccctgaccggctggcacgccgacgtggccaccgtgatgtggagaagaatgctgggcatcctgggcgacgtgaacagcatcatggaccccgagatccacgcccaggtgttcgactacctgtgcgagctgtggcagaacctggccaagatcagagacaacctgggcatcagcaccgacaacctgaccagccccagcccccccgtgctgatcccccccctgagaatcctgaccccctggctgttcaaggccaccatgctgaccgacaagtacaagcagggcaagctgcacgcctacaagctgatctgcaacaccatgaagagaagacaggacgtgagccccaacagagacttcctgacccacttctacaacatcatgcactgcggcctgctgcacatcgaccaggacatcgtgaacaccatcatcaagcactgcagcccccagttcttcagcctgggcctgcccggcgccaccatgctgatcatggacttcatcgtggccgccggcagagtggccagcagcgccttcctgaacgcccccagagtggaggcccaggtgctgctgggcagcctggtgtgcttccccaacctgtactgcgagctgcccagcctgcaccccaacatccccgacgtggccgtgagccagttcaccgacgtgaaggagctgatcatcaagaccgtgctgagcagcgccagagacgagcccagcggccccgccagatgcgtggccctgtgcagcctgggcatctggatctgcgaggagctggtgcacgagagccaccacccccagatcaaggaggccctgaacgtgatctgcgtgagcctgaagttcaccaacaagaccgtggcccacgtggcctgcaacatgctgcacatgctggtgcactacgtgcccagactgcagatctaccagcccgacagccccctgaagatcatccagatcctgatcgccaccatcacccacctgctgcccagcaccgaggccagcagctacgagatggacaagagactggtggtgagcctgctgctgtgcctgctggactggatcatggccctgcccctgaagaccctgctgcagcccttccacgccaccggcgccgagagcgacaagaccgagaagagcgtgctgaactgcatctacaaggtgctgcacggctgcgtgtacggcgcccagtgcttcagcaaccccagatacttccccatgagcctgagcgacctggccagcgtggactacgaccccttcatgcacctggagagcctgaaggagcccgagcccctgcacagccccgacagcgagagaagcagcaagctgcagcccgtgaccgaggtgaagacccagatgcagcacggcctgatcagcatcgccgccagaaccgtgatcacccacctggtgaaccacctgggccactaccccatgagcggcggccccgccatgctgaccagccaggtgtgcgagaaccacgacaaccactacagcgagagcaccgagctgagccccgagctgttcgagagccccaacatccagttcttcgtgctgaacaacaccaccctggtgagctgcatccagatcagaagcgaggagaacatgcccggcggcggcctgagcgccggcctggccagcgccaacagcaacgtgagaatcatcgtgagagacctgagcggcaagtacagctgggacagcgccatcctgtacggccccccccccgtgagcggcctgagcgagcccaccagcttcatgctgagcctgagccaccaggagaagcccgaggagccccccaccagcaacgagtgcctggaggacatcaccgtgaaggacggcctgagcctgcagttcaagagattcagagagaccgtgcccacctgggacaccatcagagacgaggaggacgtgctggacgagctgctgcagtacctgggcgtgaccagccccgagtgcctgcagagaaccggcatcagcctgaacatccccgccccccagcccgtgtgcatcagcgagaagcaggagaacgacgtgatcaacgccatcctgaagcagcacaccgaggagaaggagttcgtggagaagcacttcaacgacctgaacatgaaggccgtggagcaggacgagcccatcccccagaagccccagagcgccttctactactgcagactgctgctgagcatcctgggcatgaacagctgggacaagagaagaagcttccacctgctgaagaagaacgagaagctgctgagagagctgagaaacctggacagcagacagtgcagagagacccacaagatcgccgtgttctacgtggccgagggccaggaggacaagcacagcatcctgaccaacaccggcggcagccaggcctacgaggacttcgtggccggcctgggctgggaggtgaacctgaccaaccactgcggcttcatgggcggcctgcagaagaacaagagcaccggcctgaccaccccctacttcgccaccagcaccgtggaggtgatcttccacgtgagcaccagaatgcccagcgacagcgacgacagcctgaccaagaagctgagacacctgggcaacgacgaggtgcacatcgtgtggagcgagcacaccagagactacagaagaggcatcatccccaccgagttcggcgacgtgctgatcgtgatctaccccatgaagaaccacatgttcagcatccagatcatgaagaagcccgaggtgcccttcttcggccccctgttcgacggcgccatcgtgaacggcaaggtgctgcccatcatggtgagagccaccgccatcaacgccagcagagccctgaagagcctgatccccctgtaccagaacttctacgaggagagagccagatacctgcagaccatcgtgcagcaccacctggagcccaccaccttcgaggacttcgccgcccaggtgttcagccccgccccctaccaccacctgcccagcgacgccgaggagagaaacgccgtgatcgtgctgttcctgcccaagccccccctggagaacatcggccacctgaaggcccccacccagagattctaccccgtgaagctgccccagcagagaagatag

SEQ ID NO: 183617 - DNA, 6111 bp, Artificial Sequence
  derived and/or modified sequence
atgttcagcaagaagccccacggcgacgtgaagaagagcacccagaaggtgctggacaccaagaaggacgccctgaccagactgaagcacctgagaatcgtgatcgagaacgccgagagcatcgacctgaagcagttcttcgaccagcacttcagccacatctactacgtgttcttcgagaacttcgtgaccatcgaggccagcctgaagcagaagggccacaagagccagagagaggagctggacgccatcctgttcatcttcgagaagatcctgcagctgctgcccgagagaatccaccagagatggcagttccacagcatcggcctgatcctgaagaagctgctgcacaccggcaacagcctgaagatcagaagagagggcgtgagactgttcctgctgtggctgcaggccctgcagaacaactgcagcaaggagcagctgtggatgttcagctgcctgatccccggcttcagcgccccccagagcgagcacggccccagaaccctggacaacctgatcaacccccccctgaacctgcaggagacccaggtgaccatcgaggagatcacccccctggtgcccccccagagcggcgacaagggccaggaggacctgaccagctacttcctggaggccctgctgaagtacatcgtgatccaggtgaagagcctggagtggaagaacaaggagaaccaggagagaggcttcagcttcctgttcagccacttcaagaagtactacctgccctacatcttccccaacatctgcaaggagaacagcctgtaccaccccatcctggacatcccccagatgagacccaagccccactacgtggtgatcaagaaggacgccgagaccaacgaggccatctactgcaccaaggagcccttcatcaaggccagagtgatcgtgatcagatggctggtgagcttctggctggagcccaagccccacaccggcccccacatccccggcatggagggcgaggtgctgcccaagaacatccagagagccgccgccagcctggtgagcagagaggagagcaagaacgacaacgccgacaagaccgacagaaccaccgagcccgagcagagccacagcaacaccagcaccctgaccgagagagagcccagcagcagcagcctgtgcagcatcgacgaggagcacctgaccgacatcgagatcgtgagaagagtgttcagcagcaagagaagcaacgtgaacttcgtgaccgagatcttcagacaggccttcctgctgcccatctgcgaggccgccgccatgagaaaggtggtgaaggtgtaccaggagtggatccagcaggaggagaagcccctgttcatgcaggagcccgaggagatcgtgatcaccagcagcgacctgccctgcatcgagaacgtgaccgaccacgacatcagcatggaggagggcgagaagagagaggaggagaacggcaccaacaccgccgaccacgtgagaaacagcagctgggccaagaacggcagctaccagggcgccctgcacaacgccagcgaggaggccaccgagcagaacatcagagccggcacccaggccgtgctgcaggtgttcatcatcaacagcagcaacatcttcctgctggagcccgccaacgagatcaagaacctgctggacgagcacaccgacatgtgcaagagaatcctgaacatctacagatacatggtggtgcaggtgagcatggacaagaagacctgggagcagatgctgctggtgctgctgagagtgaccgagagcgtgctgaagatgcccagccaggccttcctgcagttccagggcaagaagaacatgaccctggccggcagactggccggccccctgttccagaccctgatcgtggcctggatcaaggccaacctgaacgtgtacatcagcagagagctgtgggacgacctgctgagcgtgctgagcagcctgacctactgggaggagctggccaccgagtggagcctgaccatggagaccctgaccaaggtgctggccagaaacctgtacagcctggacctgagcgacctgcccctggacaagctgagcgagcagaagcagaagaagcacaagggcaagggcgtgggccacgagttccagaaggtgagcgtggacaagagcttcagcagaggctggagcagagaccagcccggccaggcccccatgagacagagaagcgccaccaccaccggcagccccggcaccgagaaggccagaagcatcgtgagacagaagaccgtggacatcgacgacgcccagatcctgcccagaagcaccagagtgagacacttcagccagagcgaggagaccggcaacgaggtgttcggcgccctgaacgaggagcagcccctgcccagaagcagcagcaccagcgacatcctggagcccttcaccgtggagagagccaaggtgaacaaggaggacatgagccagaagctgccccccctgaacagcgacatcggcggcagcagcgccaacgtgcccgacctgatggacgagttcatcgccgagagactgagaagcggcaacgccagcaccatgaccagaagaggcagcagccccggcagcctggagatccccaaggacctgcccgacatcctgaacaagcagaaccagatgagacccatcgacgaccccggcgtgcccagcgagtggaccagccccgccagcgccggcagcagcgacctgatcagcagcgacagccacagcgacagcttcagcgccttccagtacgacggcagaaagttcgacaacttcggcttcggcaccgacaccggcgtgaccagcagcgccgacgtggacagcggcagcggccaccaccagagcgccgaggagcaggaggtggccagcctgaccaccctgcacatcgacagcgagaccagcagcctgaaccagcaggccttcagcgccgaggtggccaccatcaccggcagcgagagcgccagccccgtgcacagccccctgggcagcagaagccagacccccagccccagcaccctgaacatcgaccacatggagcagaaggacctgcagctggacgagaagctgcaccacagcgtgctgcagacccccgacgacctggagatcagcgagttccccagcgagtgctgcagcgtgatggccggcggcaccctgaccggctggcacgccgacgtggccaccgtgatgtggagaagaatgctgggcatcctgggcgacgtgaacagcatcatggaccccgagatccacgcccaggtgttcgactacctgtgcgagctgtggcagaacctggccaagatcagagacaacctgggcatcagcaccgacaacctgaccagccccagcccccccgtgctgatcccccccctgagaatcctgaccccctggctgttcaaggccaccatgctgaccgacaagtacaagcagggcaagctgcacgcctacaagctgatctgcaacaccatgaagagaagacaggacgtgagccccaacagagacttcctgacccacttctacaacatcatgcactgcggcctgctgcacatcgaccaggacatcgtgaacaccatcatcaagcactgcagcccccagttcttcagcctgggcctgcccggcgccaccatgctgatcatggacttcatcgtggccgccggcagagtggccagcagcgccttcctgaacgcccccagagtggaggcccaggtgctgctgggcagcctggtgtgcttccccaacctgtactgcgagctgcccagcctgcaccccaacatccccgacgtggccgtgagccagttcaccgacgtgaaggagctgatcatcaagaccgtgctgagcagcgccagagacgagcccagcggccccgccagatgcgtggccctgtgcagcctgggcatctggatctgcgaggagctggtgcacgagagccaccacccccagatcaaggaggccctgaacgtgatctgcgtgagcctgaagttcaccaacaagaccgtggcccacgtggcctgcaacatgctgcacatgctggtgcactacgtgcccagactgcagatctaccagcccgacagccccctgaagatcatccagatcctgatcgccaccatcacccacctgctgcccagcaccgaggccagcagctacgagatggacaagagactggtggtgagcctgctgctgtgcctgctggactggatcatggccctgcccctgaagaccctgctgcagcccttccacgccaccggcgccgagagcgacaagaccgagaagagcgtgctgaactgcatctacaaggtgctgcacggctgcgtgtacggcgcccagtgcttcagcaaccccagatacttccccatgagcctgagcgacctggccagcgtggactacgaccccttcatgcacctggagagcctgaaggagcccgagcccctgcacagccccgacagcgagagaagcagcaagctgcagcccgtgaccgaggtgaagacccagatgcagcacggcctgatcagcatcgccgccagaaccgtgatcacccacctggtgaaccacctgggccactaccccatgagcggcggccccgccatgctgaccagccaggtgtgcgagaaccacgacaaccactacagcgagagcaccgagctgagccccgagctgttcgagagccccaacatccagttcttcgtgctgaacaacaccaccctggtgagctgcatccagatcagaagcgaggagaacatgcccggcggcggcctgagcgccggcctggccagcgccaacagcaacgtgagaatcatcgtgagagacctgagcggcaagtacagctgggacagcgccatcctgtacggccccccccccgtgagcggcctgagcgagcccaccagcttcatgctgagcctgagccaccaggagaagcccgaggagccccccaccagcaacgagtgcctggaggacatcaccgtgaaggacggcctgagcctgcagttcaagagattcagagagaccgtgcccacctgggacaccatcagagacgaggaggacgtgctggacgagctgctgcagtacctgggcgtgaccagccccgagtgcctgcagagaaccggcatcagcctgaacatccccgccccccagcccgtgtgcatcagcgagaagcaggagaacgacgtgatcaacgccatcctgaagcagcacaccgaggagaaggagttcgtggagaagcacttcaacgacctgaacatgaaggccgtggagcaggacgagcccatcccccagaagccccagagcgccttctactactgcagactgctgctgagcatcctgggcatgaacagctgggacaagagaagaagcttccacctgctgaagaagaacgagaagctgctgagagagctgagaaacctggacagcagacagtgcagagagacccacaagatcgccgtgttctacgtggccgagggccaggaggacaagcacagcatcctgaccaacaccggcggcagccaggcctacgaggacttcgtggccggcctgggctgggaggtgaacctgaccaaccactgcggcttcatgggcggcctgcagaagaacaagagcaccggcctgaccaccccctacttcgccaccagcaccgtggaggtgatcttccacgtgagcaccagaatgcccagcgacagcgacgacagcctgaccaagaagctgagacacctgggcaacgacgaggtgcacatcgtgtggagcgagcacaccagagactacagaagaggcatcatccccaccgagttcggcgacgtgctgatcgtgatctaccccatgaagaaccacatgttcagcatccagatcatgaagaagcccgaggtgcccttcttcggccccctgttcgacggcgccatcgtgaacggcaaggtgctgcccatcatggtgagagccaccgccatcaacgccagcagagccctgaagagcctgatccccctgtaccagaacttctacgaggagagagccagatacctgcagaccatcgtgcagcaccacctggagcccaccaccttcgaggacttcgccgcccaggtgttcagccccgccccctaccaccacctgcccagcgacgccgaccactag

SEQ ID NO: 183618 - protein, 1078 aa, Artificial Sequence
  derived and/or modified sequence
MAPRKRGGRGISFIFCCFRNNDHPEITYRLRNDSNFALQTMEPALPMPPVEELDVMFSELVDELDLTDKHREAMFALPAEKKWQIYCSKKKDQEENKGATSWPEFYIDQLNSMAARKSLLALEKEEEEERSKTIESLKTALRTKPMRFVTRFIDLDGLSCILNFLKTMDYETSESRIHTSLIGCIKALMNNSQGRAHVLAHSESINVIAQSLSTENIKTKVAVLEILGAVCLVPGGHKKVLQAMLHYQKYASERTRFQTLINDLDKSTGRYRDEVSLKTAIMSFINAVLSQGAGVESLDFRLHLRYEFLMLGIQPVIDKLREHENSTLDRHLDFFEMLRNEDELEFAKRFELVHIDTKSATQMFELTRKRLTHSEAYPHFMSILHHCLQMPYKRSGNTVQYWLLLDRIIQQIVIQNDKGQDPDSTPLENFNIKNVVRMLVNENEVKQWKEQAEKMRKEHNELQQKLEKKERECDAKTQEKEEMMQTLNKMKEKLEKETTEHKQVKQQVADLTAQLHELSRRAVCASIPGGPSPGAPGGPFPSSVPGSLLPPPPPPPLPGGMLPPPPPPLPPGGPPPPPGPPPLGAIMPPPGAPMGLALKKKSIPQPTNALKSFNWSKLPENKLEGTVWTEIDDTKVFKILDLEDLERTFSAYQRQQDFFVNSNSKQKEADAIDDTLSSKLKVKELSVIDGRRAQNCNILLSRLKLSNDEIKRAILTMDEQEDLPKDMLEQLLKFVPEKSDIDLLEEHKHELDRMAKADRFLFEMSRINHYQQRLQSLYFKKKFAERVAEVKPKVEAIRSGSEEVFRSGALKQLLEVVLAFGNYMNKGQRGNAYGFKISSLNKIADTKSSIDKNITLLHYLITIVENKYPSVLNLNEELRDIPQAAKVNMTELDKEISTLRSGLKAVETELEYQKSQPPQPGDKFVSVVSQFITVASFSFSDVEDLLAEAKDLFTKAVKHFGEEAGKIQPDEFFGIFDQFLQAVSEAKQENENMRKKKEEEERRARMEAQLKEQRERERKMRKAKENSEESGEFDDLVSALRSGEVFDKDLSKLKRNRKRITNQMTDSSRERPITKLNF

SEQ ID NO: 183619 - protein, 882 aa, Artificial Sequence
  derived and/or modified sequence
MAPRKRGGRGISFIFCCFRNNDHPEITYRLRNDSNFALQTMEPALPMPPVEELDVMFSELVDELDLTDKHREAMFALPAEKKWQIYCSKKKDQEENKGATSWPEFYIDQLNSMAARKSLLALEKEEEEERSKTIESLKTALRTKPMRFVTRFIDLDGLSCILNFLKTMDYETSESRIHTSLIGCIKALMNNSQGRAHVLAHSESINVIAQSLSTENIKTKVAVLEILGAVCLVPGGHKKVLQAMLHYQKYASERTRFQTLINDLDKSTGRYRDEVSLKTAIMSFINAVLSQGAGVESLDFRLHLRYEFLMLGIQPVIDKLREHENSTLDRHLDFFEMLRNEDELEFAKRFELVHIDTKSATQMFELTRKRLTHSEAYPHFMSILHHCLQMPYKRSGNTVQYWLLLDRIIQQIVIQNDKGQDPDSTPLENFNIKNVVRMLVNENEVKQWKEQAEKMRKEHNELQQKLEKKERECDAKTQEKEEMMQTLNKMKEKLEKETTEHKQVKQQVADLTAQLHELSRRAVCASIPGGPSPGAPGGPFPSSVPGSLLPPPPPPPLPGGMLPPPPPPLPPGGPPPPPGPPPLGAIMPPPGAPMGLALKKKSIPQPTNALKSFNWSKLPENKLEGTVWTEIDDTKVFKILDLEDLERTFSAYQRQQDFFVNSNSKQKEADAIDDTLSSKLKVKELSVIDGRRAQNCNILLSRLKLSNDEIKRAILTMDEQEDLPKDMLEQLLKFVPEKSDIDLLEEHKHELDRMAKADRFLFEMSRINHYQQRLQSLYFKKKFAERVAFGNYMNKGQRGNAYGFKISSLNKIADTKSSIDKNITLLHYLITIVENKYPSVLNLNEELRDIPQAAKVKSWNIRSLSPHSPEISLCLLSASSSQ

SEQ ID NO: 183620 - DNA, 3237 bp, Artificial Sequence
  derived and/or modified sequence
atggcacccaggaagcgcggtgggcgcggtatttctttcatcttctgttgctttcggaacaatgatcacccagaaatcacttatcgcctgcgcaatgactcgaatttcgcattacaaaccatggaacccgccctccctatgccccctgtagaagagctagacgtgatgttctcagaactggttgatgagttagacctgactgataagcaccgggaggcaatgttcgccttgcctgccgagaagaagtggcagatctattgctccaagaagaaggaccaagaagagaataagggtgctaccagctggcctgaattctacattgaccagttgaactccatggccgccagaaaatcgcttttagccctggagaaggaggaggaggaggaacggtcaaaaactattgagtcgttgaaaaccgcactgcgcactaagcccatgaggtttgttaccagattcatcgatctcgatggtctgagctgtattctgaactttctgaagactatggattacgagacgagcgagtcacgcatccatacctctttaatcgggtgtattaaagctctgatgaataattcccagggtagagcccacgttctggctcattccgagagtatcaatgttatcgcgcaatcactatctacagaaaatataaagactaaagtcgccgtactggaaatcctgggggcagtatgtctcgtcccaggtggacataagaaggttctccaggccatgcttcattatcagaaatacgcaagcgagagaactcggttccagacactgataaacgaccttgacaagtctaccggtcggtaccgcgatgaggtttctcttaaaactgctataatgtctttcatcaatgcagtcctctcccagggggctggcgtcgagagcttagacttcaggctgcacctgagatatgagtttctgatgttaggaattcagccagtgattgataagttgcgagagcacgaaaactctactcttgaccgacacttagatttcttcgagatgctgcggaatgaagacgaactcgagtttgccaagcgcttcgaactggtgcatattgatactaagagtgccactcagatgtttgaactgacccgcaaacggttaacgcactcggaggcatatccccacttcatgagcatactgcatcactgtttgcagatgccctacaaaaggtccggcaacacagtgcagtattggctccttctggataggattattcagcagatcgtaattcagaacgacaaaggacaggacccggacagcacccctctggaaaacttcaacataaaaaatgtggtgcggatgcttgtgaacgagaatgaagtcaagcagtggaaagagcaggctgagaagatgagaaaggagcacaacgagctacagcagaaactggaaaagaaggagagggagtgtgatgccaaaacccaggagaaggaggagatgatgcagacactaaataagatgaaagaaaagcttgagaaagagactacagaacacaagcaggtaaagcaacaagtggctgatctcacggcacagctccacgagctgagccggcgggctgtgtgtgcctcaatccccgggggaccatcccctggcgcacccggaggcccgtttcccagctccgtgccaggcagcctactgccacccccgcctcccccccctcttcctggcggtatgcttccacctccaccacctcccttgcctcctgggggtccacctcccccaccaggacctccaccgctcggcgccataatgccacctcctggcgctccgatggggcttgccttgaaaaagaaaagcatcccccagcccaccaacgcactgaagagctttaactggtctaaacttcctgagaataagctcgagggcaccgtgtggactgagatcgatgatacaaaagtatttaagatcttggatctcgaagaccttgagagaacctttagcgcttatcagagacaacaagatttctttgttaactccaattccaagcaaaaagaggcggatgccatcgacgacactctctcgtctaaactgaaagtcaaagaactgagcgtcatagatgggaggagggcacagaattgtaatatattgctgagccgattaaaattgtctaacgacgaaatcaagcgagccatactcacaatggacgaacaggaggatctcccaaaagatatgctcgaacagttactaaaattcgttccggagaagagtgacatcgatctgttggaagaacacaaacacgagctggatcgtatggccaaagccgaccggttcctgtttgagatgtcaaggattaaccattatcaacaacgactgcagagtctttactttaagaaaaagttcgccgaaagagttgccgaggtgaagccaaaggtagaagcaatccggagcggcagcgaagaagtcttccggtccggagctctcaaacagctcctggaggtggtgctagccttcgggaattacatgaataaagggcagcgcggcaacgcatacggcttcaaaatctcttctttgaacaaaatagccgataccaaatcatcaatcgacaagaatataaccctgctccactatttgattaccatcgtcgaaaataaatacccttccgtcctgaacttgaatgaagaattacgcgatattcctcaggcagccaaggtgaatatgacggagctggataaggagattagcactctgcggtctgggttgaaagcggtcgagaccgaactggaatatcaaaagtcccaacccccacagccaggggataagttcgtgagcgttgtctcccagttcatcacagttgcgagctttagcttctcagacgtggaggatcttctcgccgaagctaaagatttgtttacgaaagctgtgaaacactttggcgaggaagcggggaagatccaaccagatgagtttttcggaatcttcgaccaatttttacaggctgttagcgaagcaaaacaggagaatgaaaacatgagaaagaagaaggaggaagaagagcgccgtgcaaggatggaggcccagcttaaggaacagcgagagagggagcgtaaaatgcgaaaagccaaagagaattccgaggaatcgggtgagtttgacgatctagtctccgcactgcgatccggcgaagtgtttgacaaagacctcagtaagctgaagcgcaatcgaaagcggatcaccaatcaaatgacagattcctcccgtgagaggccaattactaagctgaatttttag

SEQ ID NO: 183621 - DNA, 2649 bp, Artificial Sequence
  derived and/or modified sequence
atggcacctcgtaaaaggggcggtcgggggattagcttcattttttgttgcttccgcaataacgatcatcctgagatcacctaccgtctgcggaacgatagcaatttcgccctgcagaccatggagcccgctctgccgatgcctcctgtagaagaacttgacgtgatgttttccgagctggtcgacgaattggaccttacagacaaacacagagaagccatgttcgccctaccagctgagaagaagtggcaaatatattgctctaaaaaaaaggaccaagaggaaaataaaggagctacaagctggcccgaattctacattgaccagttaaactcaatggccgctcggaagtctttgctcgccctggagaaggaggaagaggaggagcgttccaaaaccattgaatccctcaaaaccgcactgaggacaaagccgatgcgtttcgttacaagatttatcgatctggatggtctgtcatgtatattgaactttctgaagactatggattacgagacatcagaatctcgaatacataccagtcttatcggttgtattaaggctctaatgaacaatagccaggggagggcacatgtgttggctcattctgagtccatcaatgttatagcccagtcactgagcaccgagaacataaagaccaaagtggctgtgctcgagattctgggagctgtctgtttggtccccggaggccataaaaaagtgctgcaagctatgttacactatcagaagtatgccagcgagagaaccaggtttcagacactcataaacgacctggataagtccacggggcgttaccgcgatgaagtgtccttgaaaaccgctattatgtcgttcattaatgcagtactgagtcagggcgcgggtgtggaatctctggattttcgcttgcaccttcggtacgagtttcttatgctcggcattcagcctgtaattgacaagttacgggaacacgagaatagtactttagacagacacttggattttttcgagatgttacgcaacgaggacgagctagagttcgctaaaagatttgaattagtccacattgataccaaaagcgctacgcagatgtttgaactgacacgcaagaggctgacacactccgaagcctacccacacttcatgtcaatattacaccactgtttgcagatgccttacaaacgctcaggcaatacagtgcagtattggctgctgctcgaccggataatccagcaaatcgttatccagaatgacaagggacaagatcctgattctacccctttagaaaatttcaacataaaaaacgtggtacgaatgctggtgaatgagaacgaagtgaagcaatggaaagagcaagccgaaaaaatgcggaaagagcataacgaattacagcagaagctcgaaaagaaggaaagggagtgcgatgccaaaacccaggagaaggaagaaatgatgcagactctgaacaagatgaaggaaaagctggagaaggagacaacggagcataagcaggtgaagcagcaggtcgctgatctaacagcacagctgcacgagctgtcaaggagagcagtgtgtgcaagcatacccggcggaccaagcccaggtgcccccggagggcctttccctagcagcgtgcccggatccctgctaccccccccccccccccctccccttccaggcggcatgcttccccccccaccccccccattaccacccggcggcccgcctccgccaccaggcccccccccactcggcgcaataatgccccccccgggggcccccatgggattagctttgaagaagaaatcgatccctcagcccaccaatgcccttaagagctttaattggtctaagctgcctgagaacaagctggaaggcaccgtctggactgagatcgatgacaccaaggtcttcaagatcctggacctcgaggatttggagcgaacgttttctgcctaccagcggcagcaagattttttcgtaaactccaactcaaaacaaaaggaggctgacgctatcgatgatacactttcctcaaaactgaaggtgaaggagctctctgtcattgatggtcgacgggcccaaaactgcaacatcctgctgtcccggctcaagctgtcaaacgatgagatcaagagagccatcctcacgatggatgagcaggaagacctccccaaggatatgctggaacagctactcaagtttgtgcccgagaaatctgatattgatctcctcgaagagcataaacatgaattggatcgcatggccaaagctgatcggttcctgtttgagatgtcaagaattaaccactaccagcaaaggcttcaaagcctctacttcaagaaaaaatttgctgagcgagtggcctttggcaattacatgaacaagggtcaacgcggcaacgcctatggcttcaagatctcttctttaaataagatcgctgacacgaagtcttcgattgacaaaaatatcaccctgctgcactacctcattacgatcgtcgagaataagtatccatctgtcctgaatctcaacgaggaactgagggacatcccgcaggctgccaaggtaaagagttggaatatcagatcactcagccctcatagtcctgaaatcagcctctgcctcctgtcagcttcttccagtcaatag

SEQ ID NO: 183622 - DNA, 3207 bp, Artificial Sequence
  derived and/or modified sequence
atggctccccgcaaaagaggcggtagggggattagcttcatcttttgctgctttagaaacaacgaccacccagaaataacttaccgactgaggaacgactccaattttgccctgcagacaatggagcccgccttgcctatgcctcccgttgaagaactggacgtgatgttctctgaattagtcgatgagctggacctcacggataaacatcgagaagccatgttcgccctcccagccgaaaaaaagtggcagatctactgttctaagaagaaggaccaggaagaaaataaaggcgccacctcttggcctgagttctacatcgatcaactgaactctatggctgctcgaaagtccctactcgccctggaaaaagaagaagaagaggagaggtccaagacaattgagtccctgaaaactgccctccgcacaaagcccatgagatttgttacgcgcttcatcgatttagacgggctttcatgtatcctcaacttcctcaaaactatggactatgagacgtccgaaagtcgcattcacacatctctgatcggctgcataaaggcgctgatgaacaacagccaaggccgcgcacacgtactagcgcacagtgaatccatcaatgtaatcgctcaaagcctgagcacagagaacatcaagacaaaggtggctgtacttgaaattttgggcgccgtatgtctggtacccgggggccataaaaaggtcctgcaggcaatgttgcattatcagaaatacgcatccgagcgcacacgcttccagactcttataaatgatctcgataagtcaacaggtcgctacagggacgaggtatctctcaagaccgcaattatgagtttcatcaatgccgtcctgagccagggcgctggtgtcgagagcctcgacttccgtctccacttgaggtacgagtttctgatgctcggaattcaaccagtcatcgacaaactgcgtgaacacgaaaactccaccctcgatagacatctggacttcttcgaaatgctgagaaacgaagatgagttagagtttgctaaaaggtttgaattagttcacatcgataccaagtccgccactcagatgttcgagctgactaggaaaagactcacgcattccgaggcttacccacacttcatgtctatcttgcatcattgtctccagatgccatataagaggtccggcaataccgtgcagtactggctgctgctagatcgtattatacagcaaatagttattcagaacgataaaggacaggatccagactctactccattggagaactttaacattaaaaatgtggttcgtatgctcgtgaacgaaaatgaagtaaaacagtggaaggagcaggcggagaagatgcggaaggaacacaatgaactacagcagaaactcgagaagaaagaacgcgaatgcgacgcaaaaactcaggagaaagaagagatgatgcagactttaaacaaaatgaaggaaaagctggagaaggagactactgagcataagcaggttaagcagcaagtcgctgacctgactgcccagctccacgaattgtcccggcgagctgtgtgcgcaagcatccccggcgggccttcccctggtgctcctggcggcccgttccccagctccgtcccaggaagtctgctgcctccccctcccccccctcctctgcccggaggcatgcttcccccacccccccccccccttccccccggcgggcccccgccaccacctgggccccccccactgggagccatcatgccacctcctggggcaccgatgggactggccctgaagaaaaaatccattccacagcccaccaacgctttgaaaagcttcaattggtctaaactgcctgaaaataaattagagggcacagtgtggactgagattgacgacactaaggtctttaagatccttgatcttgaagacctggagagaacattctcagcctatcagcgccaacagaaagaggcggacgcaatagacgacaccctgtcatccaaacttaaggtgaaggagttgagcgttatagatgggaggagggcacagaattgtaatattttgctctccaggctgaagttgtccaacgatgagatcaagcgggccatcctgaccatggatgaacaggaggacctgcccaaggatatgttggagcagctcctaaagtttgtgcctgagaagagcgacatcgacttgctggaggagcataaacacgagttagataggatggctaaggccgacagattcctgttcgagatgagtagaattaaccactaccagcagcggctgcagtcgctgtattttaaaaagaagtttgccgaacgtgtagccgaagtgaaacccaaggttgaggctatccgaagcgggtcagaagaagtatttcgttccggcgccctcaaacagcttctcgaggtcgtactggctttcggcaactacatgaataaagggcagcggggaaatgcctatggcttcaaaattagcagcctcaacaagatcgcagatacaaagagtagtatagataagaatattactttgctgcattacctcattacaatagtggagaacaagtacccctccgtgttgaatctcaatgaagagctgcgcgacatccctcaggcagctaaagtaaacatgactgagctggacaaggaaatcagcacgctcaggagcggactgaaggcagtcgagaccgagctggagtatcaaaaatcccagcccccacagcctggcgataagttcgtatctgtggtgtcacaattcataacagttgcttctttcagcttcagcgacgtcgaagacctcctggcggaggccaaggatcttttcactaaggccgtcaagcattttggcgaagaagcaggaaaaatccaaccagacgagttcttcgggattttcgaccaattcctgcaagcggtcagcgaagctaagcaagagaacgagaacatgagaaagaagaaagaggaggaagaacgcagagcccgtatggaggcccaactcaaagagcagcgggagcgagaaaggaaaatgaggaaagccaaggagaactccgaggagtctggcgagtttgatgatcttgtctctgctctccggtccggcgaagtgtttgacaaggacctgagtaaactgaagagaaacaggaagaggatcactaatcaaatgacagatagctcaagagagcgacctatcacgaagcttaatttctag

SEQ ID NO: 183623 - DNA, 3237 bp, Artificial Sequence
  derived and/or modified sequence
atggctccccgcaaaaggggaggtcgtggaatcagtttcattttttgttgcttccgcaacaacgatcaccctgagatcacttacaggctccgtaatgattccaatttcgcattgcagacaatggaaccagccctgccaatgccacctgtagaggagctcgatgtcatgttctcagaactcgttgacgaactggacctgaccgataaacatcgggaagccatgttcgctctgcctgctgaaaagaagtggcagatctactgcagcaagaagaaggatcaggaagaaaataagggggcaacctcctggcctgaattctacattgatcagctcaattccatggccgcacgcaaaagtcttcttgcgttagagaaagaggaagaagaggaaagatccaaaacaattgaaagcctcaagaccgctctgagaacgaagccaatgagattcgtgaccaggtttatcgatcttgacgggctgtcgtgcattttaaacttcctcaagacaatggactacgaaacatcagaaagtagaatccataccagtcttattgggtgtattaaggccctgatgaacaacagccaaggaagagcacacgtgcttgcgcatagcgagtctatcaatgtgatcgcacagtcactcagtaccgagaacattaaaactaaagtggcagtgctggaaatcctcggcgccgtgtgtttggtgccggggggccacaaaaaggttctacaggccatgcttcattatcagaagtacgcctctgagaggacacgtttccagaccctgattaatgacctggacaagtctactgggcgttatcgggatgaggtgagcctgaagacagcaattatgagcttcatcaatgccgtgctgtcccaaggagcgggggtggaatcactcgatttcaggctacacctgcgctatgaattcctcatgttgggtatacagcccgtcattgataagttgagagaacacgagaactcgactctggatagacatctggatttctttgaaatgctcaggaacgaggacgagctcgagtttgccaaacggttcgagctggtccatatagacacgaaatcggcaacacagatgtttgaactcactcgtaagcggcttacacattctgaagcctatccacacttcatgagcattctacaccattgcctgcaaatgccttacaaaaggagtggaaacactgtgcaatactggttactgctcgatcgcatcattcagcagattgtcatacagaacgataaaggccaggaccctgactctacgcctctcgaaaactttaacattaaaaatgtagtgagaatgcttgttaatgagaatgaggttaaacagtggaaggaacaggccgagaaaatgcggaaggagcacaatgaattacaacaaaagctggaaaaaaaggaacgggagtgcgatgctaagacacaggaaaaagaggagatgatgcaaaccctgaataaaatgaaggaaaagttagagaaagagaccaccgagcataaacaggttaagcagcaagtggcggatctgactgcccagctccacgagctgtcgcgaagagcagtgtgcgcctctataccaggcggcccatcccctggagccccagggggcccctttccctcttccgtgcccgggagtctgctgccgcctccccctcccccacctctgcccgggggcatgctccctcccccaccaccccccctccccccggggggccctcctcccccccctgggcccccccccttgggagccatcatgcctcctccaggcgcccccatgggtctggcactgaagaagaagagtattccccaaccgacaaatgccctcaagtcattcaactggtcaaaactccccgaaaacaagttagaaggcacagtatggacagagatagacgacacaaaagtatttaagatcttggaccttgaggacctagaaagaacattctctgcttatcagaggcagcaggacttcttcgtcaattctaattctaagcagaaggaggcggacgcaatcgatgacaccttatccagtaagttgaaagtaaaggagttgagcgtgattgatggccggcgcgcgcagaattgtaatatattgttatcccggctgaagctttctaatgatgaaataaaacgggccatactcaccatggacgagcaggaggacctccccaaagacatgctagaacagttgctcaaattcgtgccggaaaagtcggacatcgaccttttggaggaacacaaacacgaattagataggatggctaaagctgatagatttttgttcgaaatgtcacgaattaaccattaccagcagaggctgcaatccctttacttcaagaaaaaattcgcggagagagtggcagaagtgaagcctaaagtggaagctattcgctctggcagcgaagaagtcttccgctccggcgccttgaagcagctgctggaggttgttttggccttcggtaattatatgaacaaaggacagagggggaatgcctacggttttaagatcagcagtcttaataaaatagccgataccaagtcatcaatcgacaagaacatcacactcctccattaccttataaccatcgtggagaataagtaccccagtgtccttaatttgaacgaggaactgcgcgatatcccccaggctgccaaggttaacatgacggagctagacaaggagatttcaaccttgcgctcgggactgaaggcagttgagaccgaactagaataccagaagtcacaaccaccacaaccaggcgataaatttgtttccgtggtctcgcagtttatcactgtggctagctttagcttcagtgacgtcgaagatctgttggccgaggcaaaggatttgttcaccaaggccgtaaaacacttcggcgaggaagccggcaagatccagccggatgagtttttcgggatcttcgaccagttccttcaagcagtgagcgaggccaagcaggagaatgagaacatgcggaagaagaaagaagaggaggaaagacgggcgaggatggaggcccagttgaaagagcagagagagcgcgagcgcaaaatgcgtaaggccaaggagaactcagaagagagcggcgagttcgacgaccttgtgagcgctcttcggtctggagaggtatttgataaggacttgtcgaaactgaagcggaataggaagcggatcacaaatcaaatgaccgatagtagccgtgagcgcccaatcactaagcttaatttctag

SEQ ID NO: 183624 - DNA, 3237 bp, Artificial Sequence
  derived and/or modified sequence
atggcccccaggaagagaggaggccggggcatctccttcatcttctgctgcttcagaaataatgaccaccctgagatcacctaccgcctgagaaatgacagcaactttgccctgcagaccatggagcccgccctgcccatgcctcctgtggaggagctggatgtgatgttcagcgagctggtggatgagctggacctgacagacaagcaccgggaggccatgtttgccctgcctgctgagaagaagtggcagatctactgcagcaagaagaaggaccaggaggagaacaagggggccacctcctggccagagttctacatcgaccagctgaacagcatggccgccaggaagagcctgctggccctggagaaggaggaggaggaggagaggagcaagaccatcgagagcctgaagacagccctgcggaccaagcccatgagatttgtgacccgcttcatcgacctggatggcctgagctgcatcctgaacttcctgaagaccatggactatgagaccagcgagagccgcatccacaccagcctcatcggctgcatcaaggccctgatgaacaacagccagggccgggcccacgtgctggcccacagcgagagcatcaacgtcatcgcccagagcctgagcacagagaacatcaagaccaaggtggccgtgctggagatcctgggcgctgtgtgcctggtgcctgggggccacaagaaggtgctgcaggccatgctgcactaccagaagtatgccagcgagaggacccgcttccagaccctcatcaatgacctggacaagagcacaggccgctacagagatgaggtgtccctgaagacagccatcatgtccttcatcaatgctgtgctgagccagggcgccggcgtggagagcctggacttccggctgcacctgcgctatgagttcctgatgctgggcatccagcctgtgattgacaagctgcgggagcacgagaacagcaccctggacagacacctggacttctttgagatgctgagaaatgaagatgagctggagtttgccaagagatttgagctggtgcacatcgacaccaagagcgccacccagatgtttgagctgaccaggaagaggctgacccacagcgaggcctacccccacttcatgagcatcctgcaccactgcctgcagatgccctacaagaggagcggcaacacagtgcagtactggctgctgctggaccgcatcatccagcagatcgtcatccagaatgacaagggccaggaccctgacagcacccccctggagaacttcaacatcaagaatgtggtgaggatgctggtgaatgaaaatgaggtgaagcagtggaaggagcaggccgagaagatgaggaaggagcacaatgagctgcagcagaagctggagaagaaggagcgggagtgtgatgccaagacccaggagaaggaggagatgatgcagaccctgaacaagatgaaggagaagctggagaaggagaccacagagcacaagcaggtgaagcagcaggtggccgacctgacagcccagctgcacgagctgagccggcgggctgtgtgtgccagcatccctgggggccccagccctggggcccctgggggccccttccccagctctgtgcccggcagcctgctgcccccacctcctcctccacccctgcccggcggcatgctgcccccacctcctccacccctgcccccaggcggccccccacctcctcctggccccccacccctgggcgccatcatgcctcctcctggggcccccatgggcctggccctgaagaagaagagcatcccccagcccaccaatgccctgaagagcttcaactggagcaagctgcctgagaacaagctggagggcaccgtgtggacagaaattgatgacaccaaggtgttcaagatcctggacctggaggacctggagaggaccttcagcgcctaccagaggcagcaggacttctttgtgaacagcaacagcaagcagaaggaggctgatgccattgatgacaccctgagcagcaagctgaaggtgaaggagctgtctgtgattgatggaagaagagcccagaactgcaacatcctgctgagccggctgaagctgagcaatgatgagatcaagagggccatcctgaccatggatgagcaggaggacctgcccaaggacatgctggagcagctgctgaagtttgtgcctgagaagagtgacatcgacctgctggaggagcacaagcatgagctggacaggatggccaaggctgaccgcttcctgtttgagatgagccgcatcaaccactaccagcagaggctgcagagcctgtacttcaagaagaagtttgctgagcgggtggccgaggtgaagcccaaggtggaggccatccgcagcggcagcgaggaggtgttccgcagcggggccctgaagcagctgctggaggtggtgctggccttcggcaactacatgaacaagggccagagaggaaatgcctacggcttcaagatcagcagcctgaacaagattgctgacaccaagagcagcattgacaagaacatcaccctgctgcactacctgatcaccatcgtggagaacaagtaccccagcgtgctgaacctgaatgaggagctgcgggacatcccccaggccgccaaggtgaacatgacagagctggacaaggagatcagcaccctgcggagcggcctgaaggctgtggagacagagctggagtaccagaagagccagcccccccagcccggggacaagtttgtgtctgtggtgtcccagttcatcaccgtggccagcttctccttcagtgatgtggaggacctgctggccgaggccaaggacctcttcaccaaggctgtgaagcactttggagaggaggccggcaagatccagccagatgagttcttcggcatctttgaccagttcctgcaggccgtgtctgaggccaagcaggagaatgaaaacatgaggaagaagaaggaggaggaggagcggcgggccaggatggaggcccagctgaaggagcagcgggagcgggagaggaagatgaggaaggccaaggaaaattctgaggagagcggggagtttgatgacctggtgtctgccctgcggagcggggaggtgtttgacaaggacctgagcaagctgaagaggaacaggaagaggatcaccaaccagatgacagacagcagccgggagcggcccatcaccaagctgaacttctag

SEQ ID NO: 183625 - DNA, 2649 bp, Artificial Sequence
  derived and/or modified sequence
atggcccccaggaagagaggaggccggggcatctccttcatcttctgctgcttcagaaataatgaccaccctgagatcacctaccgcctgagaaatgacagcaactttgccctgcagaccatggagcccgccctgcccatgcctcctgtggaggagctggatgtgatgttcagcgagctggtggatgagctggacctgacagacaagcaccgggaggccatgtttgccctgcctgctgagaagaagtggcagatctactgcagcaagaagaaggaccaggaggagaacaagggggccacctcctggccagagttctacatcgaccagctgaacagcatggccgccaggaagagcctgctggccctggagaaggaggaggaggaggagaggagcaagaccatcgagagcctgaagacagccctgcggaccaagcccatgagatttgtgacccgcttcatcgacctggatggcctgagctgcatcctgaacttcctgaagaccatggactatgagaccagcgagagccgcatccacaccagcctcatcggctgcatcaaggccctgatgaacaacagccagggccgggcccacgtgctggcccacagcgagagcatcaacgtcatcgcccagagcctgagcacagagaacatcaagaccaaggtggccgtgctggagatcctgggcgctgtgtgcctggtgcctgggggccacaagaaggtgctgcaggccatgctgcactaccagaagtatgccagcgagaggacccgcttccagaccctcatcaatgacctggacaagagcacaggccgctacagagatgaggtgtccctgaagacagccatcatgtccttcatcaatgctgtgctgagccagggcgccggcgtggagagcctggacttccggctgcacctgcgctatgagttcctgatgctgggcatccagcctgtgattgacaagctgcgggagcacgagaacagcaccctggacagacacctggacttctttgagatgctgagaaatgaagatgagctggagtttgccaagagatttgagctggtgcacatcgacaccaagagcgccacccagatgtttgagctgaccaggaagaggctgacccacagcgaggcctacccccacttcatgagcatcctgcaccactgcctgcagatgccctacaagaggagcggcaacacagtgcagtactggctgctgctggaccgcatcatccagcagatcgtcatccagaatgacaagggccaggaccctgacagcacccccctggagaacttcaacatcaagaatgtggtgaggatgctggtgaatgaaaatgaggtgaagcagtggaaggagcaggccgagaagatgaggaaggagcacaatgagctgcagcagaagctggagaagaaggagcgggagtgtgatgccaagacccaggagaaggaggagatgatgcagaccctgaacaagatgaaggagaagctggagaaggagaccacagagcacaagcaggtgaagcagcaggtggccgacctgacagcccagctgcacgagctgagccggcgggctgtgtgtgccagcatccctgggggccccagccctggggcccctgggggccccttccccagctctgtgcccggcagcctgctgcccccacctcctcctccacccctgcccggcggcatgctgcccccacctcctccacccctgcccccaggcggccccccacctcctcctggccccccacccctgggcgccatcatgcctcctcctggggcccccatgggcctggccctgaagaagaagagcatcccccagcccaccaatgccctgaagagcttcaactggagcaagctgcctgagaacaagctggagggcaccgtgtggacagaaattgatgacaccaaggtgttcaagatcctggacctggaggacctggagaggaccttcagcgcctaccagaggcagcaggacttctttgtgaacagcaacagcaagcagaaggaggctgatgccattgatgacaccctgagcagcaagctgaaggtgaaggagctgtctgtgattgatggaagaagagcccagaactgcaacatcctgctgagccggctgaagctgagcaatgatgagatcaagagggccatcctgaccatggatgagcaggaggacctgcccaaggacatgctggagcagctgctgaagtttgtgcctgagaagagtgacatcgacctgctggaggagcacaagcatgagctggacaggatggccaaggctgaccgcttcctgtttgagatgagccgcatcaaccactaccagcagaggctgcagagcctgtacttcaagaagaagtttgctgagcgggtggcctttggaaactacatgaacaagggccagagaggaaatgcctacggcttcaagatcagcagcctgaacaagattgctgacaccaagagcagcattgacaagaacatcaccctgctgcactacctgatcaccatcgtggagaacaagtaccccagcgtgctgaacctgaatgaggagctgcgggacatcccccaggccgccaaggtgaagtcctggaacatccgcagcctgagcccccacagccctgagatcagcctgtgcctgctgagcgccagcagcagccagtag

SEQ ID NO: 183626 - DNA, 3207 bp, Artificial Sequence
  derived and/or modified sequence
atggcccccaggaagagaggaggccggggcatctccttcatcttctgctgcttcagaaataatgaccaccctgagatcacctaccgcctgagaaatgacagcaactttgccctgcagaccatggagcccgccctgcccatgcctcctgtggaggagctggatgtgatgttcagcgagctggtggatgagctggacctgacagacaagcaccgggaggccatgtttgccctgcctgctgagaagaagtggcagatctactgcagcaagaagaaggaccaggaggagaacaagggggccacctcctggccagagttctacatcgaccagctgaacagcatggccgccaggaagagcctgctggccctggagaaggaggaggaggaggagaggagcaagaccatcgagagcctgaagacagccctgcggaccaagcccatgagatttgtgacccgcttcatcgacctggatggcctgagctgcatcctgaacttcctgaagaccatggactatgagaccagcgagagccgcatccacaccagcctcatcggctgcatcaaggccctgatgaacaacagccagggccgggcccacgtgctggcccacagcgagagcatcaacgtcatcgcccagagcctgagcacagagaacatcaagaccaaggtggccgtgctggagatcctgggcgctgtgtgcctggtgcctgggggccacaagaaggtgctgcaggccatgctgcactaccagaagtatgccagcgagaggacccgcttccagaccctcatcaatgacctggacaagagcacaggccgctacagagatgaggtgtccctgaagacagccatcatgtccttcatcaatgctgtgctgagccagggcgccggcgtggagagcctggacttccggctgcacctgcgctatgagttcctgatgctgggcatccagcctgtgattgacaagctgcgggagcacgagaacagcaccctggacagacacctggacttctttgagatgctgagaaatgaagatgagctggagtttgccaagagatttgagctggtgcacatcgacaccaagagcgccacccagatgtttgagctgaccaggaagaggctgacccacagcgaggcctacccccacttcatgagcatcctgcaccactgcctgcagatgccctacaagaggagcggcaacacagtgcagtactggctgctgctggaccgcatcatccagcagatcgtcatccagaatgacaagggccaggaccctgacagcacccccctggagaacttcaacatcaagaatgtggtgaggatgctggtgaatgaaaatgaggtgaagcagtggaaggagcaggccgagaagatgaggaaggagcacaatgagctgcagcagaagctggagaagaaggagcgggagtgtgatgccaagacccaggagaaggaggagatgatgcagaccctgaacaagatgaaggagaagctggagaaggagaccacagagcacaagcaggtgaagcagcaggtggccgacctgacagcccagctgcacgagctgagccggcgggctgtgtgtgccagcatccctgggggccccagccctggggcccctgggggccccttccccagctctgtgcccggcagcctgctgcccccacctcctcctccacccctgcccggcggcatgctgcccccacctcctccacccctgcccccaggcggccccccacctcctcctggccccccacccctgggcgccatcatgcctcctcctggggcccccatgggcctggccctgaagaagaagagcatcccccagcccaccaatgccctgaagagcttcaactggagcaagctgcctgagaacaagctggagggcaccgtgtggacagaaattgatgacaccaaggtgttcaagatcctggacctggaggacctggagaggaccttcagcgcctaccagaggcagcagaaggaggctgatgccattgatgacaccctgagcagcaagctgaaggtgaaggagctgtctgtgattgatggaagaagagcccagaactgcaacatcctgctgagccggctgaagctgagcaatgatgagatcaagagggccatcctgaccatggatgagcaggaggacctgcccaaggacatgctggagcagctgctgaagtttgtgcctgagaagagtgacatcgacctgctggaggagcacaagcatgagctggacaggatggccaaggctgaccgcttcctgtttgagatgagccgcatcaaccactaccagcagaggctgcagagcctgtacttcaagaagaagtttgctgagcgggtggccgaggtgaagcccaaggtggaggccatccgcagcggcagcgaggaggtgttccgcagcggggccctgaagcagctgctggaggtggtgctggccttcggcaactacatgaacaagggccagagaggaaatgcctacggcttcaagatcagcagcctgaacaagattgctgacaccaagagcagcattgacaagaacatcaccctgctgcactacctgatcaccatcgtggagaacaagtaccccagcgtgctgaacctgaatgaggagctgcgggacatcccccaggccgccaaggtgaacatgacagagctggacaaggagatcagcaccctgcggagcggcctgaaggctgtggagacagagctggagtaccagaagagccagcccccccagcccggggacaagtttgtgtctgtggtgtcccagttcatcaccgtggccagcttctccttcagtgatgtggaggacctgctggccgaggccaaggacctcttcaccaaggctgtgaagcactttggagaggaggccggcaagatccagccagatgagttcttcggcatctttgaccagttcctgcaggccgtgtctgaggccaagcaggagaatgaaaacatgaggaagaagaaggaggaggaggagcggcgggccaggatggaggcccagctgaaggagcagcgggagcgggagaggaagatgaggaaggccaaggaaaattctgaggagagcggggagtttgatgacctggtgtctgccctgcggagcggggaggtgtttgacaaggacctgagcaagctgaagaggaacaggaagaggatcaccaaccagatgacagacagcagccgggagcggcccatcaccaagctgaacttctag

SEQ ID NO: 183627 - DNA, 3237 bp, Artificial Sequence
  derived and/or modified sequence
atggccccccggaagcggggcggccggggcatcagcttcatcttctgctgcttccggaacaacgaccatccggagattacttatagactgaggaatgactcgaatttcgcgcttcagacaatggaaccagccctcccaatgcctccagttgaagagttggatgtaatgttttctgagctggtggacgagctggacctgaccgacaaacaccgtgaggccatgttcgcgctcccagccgaaaagaaatggcaaatttattgcagcaagaaaaaagatcaggaagaaaacaagggagctacttcctggccagagttttacattgaccagcttaatagtatggctgcgagaaagtccttgctcgccctagaaaaagaggaggaagaggagaggtcaaagaccattgagagcttgaagacagcactcaggacaaagcctatgcggtttgtgacgcgcttcatcgaccttgacgggttatcctgtattctgaactttctaaagacaatggactacgagacgtcagaaagtcgtatccatacgtccctgattgggtgtattaaagctctcatgaacaatagccaggggcgggcacacgttctggcccattcggaatcaataaacgtgatcgcacagagtctgtcaacggaaaacattaaaactaaggtggcagttttagaaatactaggagccgtttgcttggttcctggaggtcataagaaagtgctgcaagcaatgctccactaccagaaatacgcaagtgagagaactcgctttcagacacttataaacgatctggacaaaagcaccggacgctaccgtgatgaggtgtccctgaagaccgccatcatgagcttcattaacgccgtgctgtctcagggggccggcgtggagagccttgactttcgactgcaccttcgctatgagtttctgatgctgggcatccagccggtcattgataagctgcgcgagcacgaaaattccactctggatcgacacctcgacttcttcgagatgctgaggaacgaggatgaactggaattcgctaaacgcttcgaactggttcacattgacactaagtcagcgacacagatgttcgagctcactagaaagaggctgacccactcagaagcgtatcctcactttatgtctattctgcaccactgtctacaaatgccatacaagcgttctggtaacactgtgcagtattggttgctgctagaccgtatcatacagcagatagtaatccagaatgacaaaggtcaagatcccgatagcaccccccttgaaaactttaacatcaagaatgtggtgcgcatgctcgtgaatgaaaacgaggtaaaacagtggaaagagcaggccgagaagatgcgcaaagagcataacgagctgcagcagaagctggagaaaaaggaacgagaatgtgatgccaagacccaggagaaagaggagatgatgcagactctgaacaagatgaaagagaagctggagaaggaaacaaccgagcataagcaagttaagcagcaggtggcggatctgaccgctcagttgcatgaattatctaggcgggccgtctgtgcctctattcctggtggccctagtcccggggctcccggcgggccgttccccagcagcgtgcccgggtccttactgcccccccctcccccacctcctctccccggcggaatgcttccaccgcctcctccgccactgccacccggcgggccacctcccccccctggccctccgccattgggggcaataatgcctcctccgggagcgcccatgggtttggcattaaagaaaaagagcatcccacagccaaccaacgcccttaagtcattcaactggtccaagctgcccgagaataagcttgaagggactgtgtggactgaaattgacgacactaaagtcttcaagattcttgatctggaagatttggaaagaaccttttctgcgtatcagcggcaacaggacttcttcgtgaattcaaattccaagcagaaggaagctgatgccatcgatgacacactctcctctaaactcaaggtgaaggagctctccgtcattgacgggcgtcgggcgcagaactgtaatatcttattatcccggctgaagctgtcaaacgatgaaatcaagcgagccattctcaccatggacgaacaggaggatctgcccaaagacatgctcgagcagctactcaagttcgtgccggaaaaatcagatatcgacttgctggaggagcacaaacacgaactcgatagaatggctaaggcagacaggtttctgttcgagatgtcacgaatcaatcattaccaacagcggctgcaaagcctgtactttaagaaaaagttcgctgagcgggtggccgaggtaaagcctaaggtggaagcaattagaagcggaagtgaagaggttttccggagcggcgcattgaaacaactcctcgaggtggtcttggcttttggaaattacatgaataaagggcagaggggcaacgcctacggattcaaaattagcagtctgaataagatcgcagatacaaagtcttccattgacaaaaacattacgctcttacactacctgattaccattgtggagaacaagtaccccagtgtgctgaatctcaacgaagagttgcgggacattcctcaggccgctaaagtaaatatgacagagctcgataaggagattagtacactgaggagcggattgaaagcagttgagaccgaactggagtaccagaagtcccagcctccacaaccaggagacaagttcgtgtctgttgtgtctcagttcatcactgtcgcctctttctccttctccgacgtggaggatttgttggccgaggcgaaagatctcttcaccaaggctgtgaaacacttcggggaggaggccggcaagatccagccggatgaatttttcggcatcttcgaccagtttctgcaggcagtgtcagaggctaagcaagagaatgaaaatatgaggaagaagaaagaagaggaagaacggagggctcgcatggaggcccaattaaaagagcagagagaacgagaacgtaaaatgaggaaggccaaagagaatagcgaagaaagcggtgagttcgatgaccttgtgtctgctttgaggtctggggaagtctttgacaaagacctgtccaagcttaaacggaatcgcaagcgaatcactaatcaaatgacagattcctcccgcgaaagacccatcaccaagctcaacttctag

SEQ ID NO: 183628 - DNA, 2649 bp, Artificial Sequence
  derived and/or modified sequence
atggccccccggaagcggggcggccggggcatcagcttcatcttctgttgtttccgtaacaatgatcaccctgaaatcacctatcgacttaggaatgactccaatttcgcgctgcagaccatggagcccgccttaccaatgccacccgttgaagagctggacgtaatgttttctgagcttgtcgacgaattggaccttaccgataagcaccgcgaggccatgttcgccttacccgcagaaaagaagtggcagatctattgctctaaaaaaaaggaccaggaggagaacaagggagccacatcctggcccgaattttatatcgatcagctgaacagcatggccgcccgcaaaagcttgctggccctggagaaagaagaggaggaggagcgcagcaagacaatagaatctctcaaaacagccctcagaaccaagcccatgcgctttgttacacggtttatagacctagacggccttagttgtatacttaatttcctaaagaccatggattacgagacttctgaatcacggatccatacgtcactcatcggatgtatcaaggcactgatgaataattcacaagggagggcacatgtcctggcccacagtgaatccatcaacgtgatagcccagtccctcagtactgaaaacatcaaaactaaagtggcagttctggaaatcctgggtgccgtgtgtttggttcccggaggtcataaaaaagtgttgcaagctatgcttcattatcaaaaatacgcaagcgagcggacacgcttccaaactctgattaacgacttggataagagtaccgggagatatcgggatgaggtttctttgaagacggccatcatgagctttattaacgcggtattgtcacagggggccggagtggagtctctggacttcaggttgcatctgcgttacgaatttctcatgctaggaattcagcccgttatcgataagcttcgtgaacatgagaactcaacacttgatagacacttggacttttttgagatgctgcgtaacgaggacgaacttgaattcgccaagcggtttgaactagtgcacattgacacaaagtccgcgacacaaatgttcgagctgacacgcaagcgcctgacccactccgaagcctacccccacttcatgagcatcctgcatcactgtctccagatgccttacaagagatcaggcaacacagttcaatattggttgctcctcgaccgtattatccagcagatcgtgatccaaaatgacaaaggtcaggaccctgactccactcctcttgaaaattttaatattaagaacgtagtaagaatgctcgtgaacgagaacgaggtcaagcaatggaaggaacaggccgagaagatgcggaaggaacataacgaactgcagcagaaactagaaaagaaagaacgagaatgcgatgccaaaacgcaagagaaggaagagatgatgcaaacactaaacaaaatgaaggaaaaactcgagaaagaaacaacagaacacaagcaggtcaaacagcaagtcgcggacctgacagcccagctccacgagctatcacgcagggctgtttgcgcgtctattcccggtggtcccagccccggtgctcctggcggcccgtttccttccagcgtccccggtagcttattgcctccaccccccccccctccactgcctgggggaatgctgcctccccctccacccccattgcccccaggcggacctcctccaccgccggggccacccccactgggcgcaatcatgccgccccccggagccccaatggggcttgccctaaaaaagaaaagcattccccagcccactaatgctcttaagtcgtttaattggtcaaaactaccggagaataaactggaaggcacggtgtggaccgaaatagatgatactaaagtattcaagatcctcgatttagaggacctggaacgcactttcagcgcctaccagcgtcagcaagacttctttgttaatagcaatagtaagcagaaggaggcggatgccattgacgatactctctcttcaaaattgaaagtgaaagagctgagcgtgatcgacggccggcgagcccagaactgcaatatcctgttgagccgacttaagctgagcaatgatgagatcaagcgggctatcctcaccatggacgagcaggaggacttacccaaggatatgctcgagcagctgttgaaattcgtgccagaaaagtctgacatcgacctcctcgaggagcacaaacacgagctcgatcgaatggcaaaggcagataggttcctatttgaaatgagtaggatcaaccactatcaacagagactgcaatccctgtacttcaagaagaagtttgctgagagggtggcattcggtaattatatgaataaaggccagcgcgggaacgcatatggtttcaagatcagcagcctgaataaaattgctgacaccaaatcatcaatcgacaagaatattacactcctgcactatctgatcaccatcgtggaaaataagtacccgagcgtactgaacttgaatgaggagctacgggacatcccccaggcggctaaagttaagtcatggaatatcagatcactgtcgccacactcacccgagatctctctttgcctgctcagcgcaagctcctctcagtag

SEQ ID NO: 183629 - DNA, 3207 bp, Artificial Sequence
  derived and/or modified sequence
atggccccccggaagcggggcggccggggcatcagcttcatcttctgctgcttccgcaacaatgatcacccggaaattacctacaggctgcggaacgatagcaactttgcccttcaaactatggaaccagctctgcctatgcccccagtggaggagctggacgtgatgttttcagagttagtggacgagctggatctgacagataagcaccgcgaggccatgtttgcactgcctgcagaaaaaaaatggcaaatctactgttccaagaagaaagaccaggaggagaataagggcgctacaagttggccggagttctatatcgatcagttgaattcaatggccgcacgtaaaagtctgctggccctagaaaaggaagaggaggaggaacggtcgaaaaccatagaaagtctgaagacggctcttaggaccaaacctatgaggtttgtcacacgcttcattgaccttgatggcttgagttgcattctgaattttctgaagacaatggattacgagacttctgaaagcagaattcacaccagccttattggttgcattaaggctctcatgaataatagtcagggcagggcccacgtactcgctcattctgagtcaattaacgtgattgcccaaagcctgtctacggaaaacatcaaaaccaaagtcgccgtcttggagattctgggggccgtgtgtttggtacccggcggacataaaaaggtgctccaggctatgctgcactaccagaagtacgcctccgaaagaacaaggttccagacgctgatcaatgaccttgacaagtccactggccgctaccgcgatgaagtttccctgaagacagccatcatgagctttataaacgcagttctttcacagggggctggtgtcgagtccttagactttcgcttgcacctaaggtacgagtttttgatgttggggatccagcctgtgattgataagcttagagaacacgagaacagcacattggaccgacatttagacttctttgagatgctcaggaacgaggatgaattggaatttgccaagcggttcgaattggtgcatatagacaccaaatcggctacccaaatgtttgagctgacgaggaagcgcttgacccatagtgaggcgtaccctcactttatgtcaatactgcatcactgcttacagatgccatataaacgctctgggaacactgtgcagtactggctccttttggataggatcatccagcaaattgtcattcagaatgataaggggcaggatcctgactctactcccctggaaaatttcaatataaagaacgtggtcaggatgctcgtcaacgagaacgaggtgaaacaatggaaagagcaagcagagaagatgcgtaaagagcataacgaactgcagcagaaactggagaagaaggagcgcgagtgcgatgcaaagactcaggagaaggaagaaatgatgcagaccctgaataagatgaaagagaagctggagaaagaaactaccgagcataagcaggtcaaacagcaggttgcagacttaactgctcagctccatgagctgagtaggcgagctgtgtgcgcttctataccaggtggacctagcccaggagctcctggggggccctttccttcttccgtacccggtagcttactgcctccaccaccccctccccccctgcctggaggcatgcttccccctcctccccctcccctgcctcctggcggtcccccaccaccgcccggccctccccctctgggcgccatcatgccccccccaggcgccccaatggggctggcattgaagaagaagagcatccctcagccaacgaatgccctgaagagcttcaattggagcaagctgcccgaaaataaactggaaggaacagtgtggactgagatcgatgacacaaaagtttttaaaatcctcgacctcgaggacttggagagaaccttctcggcttaccaaaggcagcaaaaggaagcagatgccatcgacgataccttgagcagtaaactcaaggtgaaggaattgagtgttatcgatgggcgacgagcacagaactgtaatatattactgagcaggctgaaactgtctaacgacgagattaaacgggctatcctcaccatggacgagcaagaggatctgcctaaggacatgctagaacaacttcttaaattcgtcccagaaaaaagcgacattgatttattagaggaacacaagcatgaactggaccgcatggccaaagccgatagatttctgttcgagatgagtaggatcaatcactaccagcagcgcctccagtccctatacttcaaaaaaaaatttgccgagagggtagcggaggtgaagcccaaggtggaggcaatacgatcaggctccgaggaggtattccggagcggcgcgctgaagcagctccttgaggttgtgttagctttcggaaactatatgaacaaaggacagagaggcaacgcatacggtttcaagatctcgtctctcaataagattgctgatacgaagagttccatagacaaaaacattaccctgctccactacctgattacgattgttgagaacaagtacccatccgtgcttaatctcaacgaggaactgcgcgatataccccaggcagctaaagtgaacatgacagagctagataaggaaatttctaccctgagatcgggacttaaggctgtggaaaccgagctggaataccaaaagtctcagccaccccagcccggggacaaatttgtatctgtggtgtcccaattcattacagtggccagcttctcgtttagtgacgtggaagacctgctcgccgaagctaaggatctgttcactaaggctgttaagcattttggagaggaggcagggaagattcagcctgacgagtttttcggaatctttgatcagtttctccaggctgtgtctgaggccaaacaagaaaatgagaacatgaggaaaaagaaggaggaagaggaacgcagagcacgcatggaggcacagctgaaagagcagagagaaagagagagaaagatgaggaaggcaaaagagaattcggaagagtcgggggagttcgacgatctcgtttctgccctgagaagcggagaagtctttgacaaagatctgtccaaactgaagaggaataggaaaagaataacaaaccagatgacggattcgtcacgcgagcgccccatcaccaagctcaatttctag

SEQ ID NO: 183630 - DNA, 3237 bp, Artificial Sequence
  derived and/or modified sequence
atggccccccggaagcggggcggccggggcatcagcttcatcttctgctgtttccgcaacaatgatcaccccgaaatcacctaccggctgcggaacgattctaactttgcattacagaccatggagcctgcccttcccatgcctcccgtagaagagcttgacgtgatgttttctgagttggtggatgagttagacttaaccgacaagcacagggaggcgatgttcgcattgccagccgagaaaaaatggcaaatctactgttcaaaaaaaaaggaccaagaagaaaataaaggggcaacttcatggcctgagttttatatcgatcaattgaattcaatggccgctagaaagtctctgctggctctcgaaaaagaggaagaggaagagcgttctaaaacaatcgaatcactcaagacggcactgaggactaagccaatgagatttgtgaccaggttcattgaccttgacggcctgagctgcatcctgaatttcctgaaaacaatggattatgagacatccgagtcacgaattcacaccagtctcatcggttgtattaaggcattgatgaacaactcccagggccgggcccacgttctggcacacagcgagagcataaatgtgatcgcccaaagccttagtacggaaaacatcaagactaaagtggccgtgctcgagatcctgggcgccgtctgcctggtgccaggcggccacaaaaaagtgctacaggccatgctccactatcagaaatatgcatctgagcgaaccaggttccagaccctcattaacgacctcgataaaagtacaggaagatacagagatgaagtctctttgaaaacagcaataatgtccttcatcaacgccgttttgtcacaaggagcaggggtggagtctctcgattttaggcttcacttacgctatgaatttttgatgctcggtatacaacccgtcattgacaagctacgtgagcacgaaaacagtacccttgacaggcacttagatttctttgagatgcttaggaatgaggatgaactggagtttgccaagcggttcgagctggttcacattgacaccaagtctgctactcagatgttcgagttgacacgtaagcgactcacccattcggaggcatatcctcactttatgtctatattgcatcactgcttgcagatgccttataagagaagcgggaatactgtccaatactggctgctgctggatcgcatcatccagcagatcgtcatccagaatgataagggccaggatcccgacagtacgcccctggaaaacttcaatattaagaatgtggtacggatgcttgtcaatgaaaatgaggtaaagcaatggaaagagcaagcagagaagatgaggaaggaacacaacgagctgcagcaaaagcttgagaagaaggagcgggagtgtgacgccaagacacaggagaaagaagaaatgatgcagacactcaacaaaatgaaagagaaactcgaaaaggagaccactgagcacaagcaagtgaagcaacaggttgcagacctgacagcccagttgcacgagctctcgaggcgcgcagtgtgcgcatccattcctgggggcccttctccaggcgcacctggaggacctttcccctcttcagtgcccggctctttacttcccccaccacctccgccccccttgcctggtggtatgctgcccccccctcccccccctctaccccccggaggcccacccccacctccgggacctccccccctgggggcaatcatgccccctcccggcgcccccatgggcctggcactgaagaagaagtcaatccctcagccaacgaatgcactgaagagcttcaattggtcaaagctacccgagaacaagctggaaggtaccgtgtggactgaaatcgatgacactaaggtcttcaaaattcttgacctggaggacctggagcgcaccttctcggcgtatcagcggcagcaggacttcttcgtaaattcgaatagcaagcagaaagaggcggacgcgattgatgacaccctctccagcaagctgaaggttaaggaactctcagttatcgacgggagacgtgcccagaactgcaacatcctcctgagccgactcaagctcagtaatgatgagataaagcgcgctatcttgactatggacgaacaggaagatttgccaaaagacatgctggagcaactactgaagttcgtgcctgagaaatcagatattgacttgctcgaggaacacaagcacgagctggacagaatggctaaggccgatagatttttgttcgaaatgtcacgaataaatcattaccaacagcgcctgcagtcactgtattttaagaagaaattcgccgaacgggtagcagaagtgaaacccaaggtggaagctatccggagcggatcagaggaggtctttagaagcggtgcgcttaagcagttgctcgaagtcgtccttgccttcggaaattacatgaacaaggggcagcgggggaacgcgtacggattcaagatctcaagccttaataaaattgcagatactaagtccagtatcgataaaaatattacactgctccattatctgatcaccatagtagagaataaatatcccagtgtgcttaacctgaacgaagagttgcgcgatataccacaggctgctaaggtcaacatgactgagctggacaaggagatatctaccctgcgatcgggccttaaagctgtggagacggaactcgagtaccagaagtcacagcctccccagcccggggacaaattcgtgtccgtcgtctctcagttcattaccgtcgccagtttcagtttttccgatgtcgaagacctgctggctgaggctaaggacttgtttaccaaagcagttaaacatttcggcgaggaggccggcaagatccagccagatgaatttttcggaattttcgaccagttcctgcaggccgtctctgaggccaaacaggagaatgagaatatgcgcaagaaaaaagaagaagaggagagaagggcgcgaatggaggctcagctgaaagagcagcgagaacgcgaacgcaaaatgcgcaaagcaaaagaaaacagtgaggagtcaggcgagtttgacgaccttgtgtcagcacttcggagtggtgaggtgttcgacaaggacctgagtaaactcaagaggaaccggaagcggatcaccaaccaaatgacagattcatcaagagagcggcccatcacaaaattgaacttctag

SEQ ID NO: 183631 - DNA, 3237 bp, Artificial Sequence
  derived and/or modified sequence
atggccccacggaagcggggaggtagggggatctcctttatcttttgctgctttcgcaataacgaccatcctgagataacctatagattgaggaacgattccaacttcgctctgcagaccatggagccggctctccctatgccccctgtcgaagagctggacgtgatgttctctgagcttgttgacgaattggatctaacggacaaacatagagaggctatgttcgcgctccctgccgagaaaaagtggcagatctactgtagcaagaaaaaagatcaggaggaaaacaagggggctacttcttggccagagttctatattgatcagctgaacagtatggccgcaaggaagtctctcctcgctcttgaaaaggaagaagaggaggagcgatctaaaacgatcgagtcgctgaagaccgcgctcagaaccaagcccatgagatttgtgacgaggtttatcgacctagatggactgagctgcatactcaacttcctcaagacgatggattacgaaacctccgaatctcggatacacacctctcttatcggttgtatcaaagccctcatgaataacagccaggggagggcccacgtgctcgcccacagcgaaagtatcaacgtcattgcccaatctctgtccacagagaacatcaaaacgaaggtggctgttttggagatcctgggcgcagtttgcttggtgcccggagggcacaaaaaggtgctgcaggcaatgctgcactaccagaagtacgcttctgagcgcactcgcttccaaacactgatcaacgatctagacaaatctactgggaggtaccgggacgaggtgtcactgaaaactgcgattatgagcttcatcaacgcagttctgagccagggggcaggggtggaatcactggacttccgcttgcaccttagatacgaattcctgatgcttggcattcaacccgtgattgacaagcttagagagcacgaaaattcgacactggataggcacctcgacttctttgagatgcttcggaacgaggatgagctggaattcgcaaagcgctttgagcttgttcacattgatacaaagtcagctacacagatgtttgagctgactcggaagcgcttaacccatagcgaggcctatccccattttatgtctattctgcatcactgcctgcagatgccctataaaagaagtgggaataccgtacagtattggctcctgctggatagaatcatacagcaaattgtcatacaaaacgataaggggcaagatccagacagtacgccactggagaatttcaacatcaaaaacgtcgtgagaatgctggtgaatgagaacgaggtaaagcagtggaaggaacaggcagaaaagatgcgcaaagaacataatgaactacaacagaagctcgaaaagaaagagcgggaatgtgatgcgaaaacacaggagaaagaagaaatgatgcaaaccctcaacaagatgaaggagaagctggaaaaggagacaacagagcataagcaggttaagcagcaggtggcagatctcaccgctcagctgcacgaactgtctcgtagagccgtgtgcgcaagcattcccggaggacctagtcccggagccccagggggaccattcccttcttctgttcctgggagtctcttaccacctcccccaccccctccattgcccggtggaatgttgcctcctccaccccctcccctaccaccagggggtcccccaccccctcccggtccccctcccctgggagccatcatgccaccaccaggcgctcccatgggactggctctgaagaagaagagcatcccacaacctacaaacgcactaaagtccttcaactggagcaaactgcctgagaataagctggagggaacagtgtggacagaaatcgatgacacaaaagtctttaagatattagatcttgaagatttagagcgcacattttctgcataccaacggcagcaggactttttcgtgaacagcaactcaaaacagaaggaagccgacgccatcgacgacaccctttccagtaaactcaaagtgaaagaactgagtgtgatagatggccgacgagcacagaactgtaacattctgttgtcccggttgaaacttagcaatgatgaaatcaagcgggctatattaactatggacgaacaggaagatcttccgaaagacatgcttgagcaattgctcaaattcgtgccagagaagagcgacattgatctcctcgaggagcacaaacatgagttagaccggatggctaaggcagatagatttctgtttgagatgagtaggatcaatcactatcagcagcggctgcagagcctttattttaagaagaagttcgctgaacgggtggcagaagtgaagcccaaagtggaggcaatccgaagtggctccgaggaggtcttcagatccggagcgctcaagcagctcctggaggttgtgttggcgtttggcaattacatgaacaaaggccaacggggtaatgcgtatggttttaagatttctagcctgaataagatcgcggacacgaagtcatcaatagataagaatatcacgcttttgcactacttgattaccattgtggagaacaaatacccgagcgtcctaaatctgaacgaggagctccgcgatattccgcaggcagccaaagttaatatgaccgagttagacaaagagatctcgacactccgctcaggtctgaaggcggtcgaaacggagctggagtaccaaaaatctcagccccctcagcccggtgataaatttgtgagcgtggtcagccagttcattactgttgcgagcttctcgttcagcgacgttgaggacctcctggctgaggcaaaggatctatttactaaggcggtcaaacattttggcgaagaggcgggaaagatccagcccgacgagttcttcggcatcttcgaccagtttcttcaggcagtgtccgaggcaaaacaggaaaatgagaacatgaggaagaagaaagaggaggaggaacgcagggcccgtatggaagcccagctgaaggagcagcgcgagcgcgagcggaaaatgcgtaaggccaaggagaacagcgaggagtccggagaattcgacgacctcgtgagtgcattgaggtctggcgaggtgttcgacaaggacctctccaaactgaagaggaaccggaaacggatcaccaaccaaatgaccgattcaagccgtgaacgcccaataaccaaacttaacttttag

SEQ ID NO: 183632 - DNA, 2649 bp, Artificial Sequence
  derived and/or modified sequence
atggctcctcgcaaacgaggcggtcgcggtatatccttcatcttttgctgctttcggaataacgaccacccagaaatcacctacagactgcggaacgactccaacttcgccctgcagactatggaacccgcattgcccatgcccccagtggaggaactggatgtgatgttttcagagctagtcgatgaattagacctcaccgacaagcaccgcgaggccatgttcgcactcccggcagagaagaaatggcagatatattgctctaagaagaaggaccaggaggaaaataagggcgctacctcttggcccgagttttacatcgaccagctcaactccatggccgctagaaagtcattactcgccctcgagaaagaagaggaagaagagcgatcgaagactatcgagtctctgaaaaccgcactgaggactaaacctatgaggttcgttacaaggttcatagacctggatggactttcctgcattctcaactttctcaaaaccatggactatgagactagcgaatctcgcatccatacttcccttatcggatgcattaaggctctgatgaacaactctcaaggtagggcacatgtgctggctcacagcgaaagcatcaatgtgattgcccagtcactgtctacggaaaatattaagactaaggtcgcagtgctagagattctcggagctgtttgtctggtacccggaggccataagaaggtgttgcaggctatgctccattaccagaagtacgcaagtgagcgcactcgctttcagaccctgatcaacgacctggacaagagtacggggaggtaccgggacgaggtcagcttgaagactgctatcatgagtttcatcaacgctgtgctgtcacagggcgcaggcgtggagtccctcgactttcgcctgcacttacgttatgagtttctaatgctgggaattcaaccggttattgacaaactccgggagcatgagaacagcaccctggaccgccaccttgacttcttcgaaatgctgcggaacgaggacgaactggaattcgcgaaacgatttgagctcgtccatatcgatacaaaatctgctacgcaaatgtttgagctgacacggaaacgtctgactcactccgaggcctaccctcattttatgagcatattacaccactgtctccagatgccctataagcgcagtggtaataccgttcagtactggcttttgctagataggatcatacaacaaattgtcattcagaatgacaagggtcaggacccagattctacccctctcgaaaattttaacatcaagaacgtggttaggatgttggtgaatgagaacgaggttaagcaatggaaggaacaagccgaaaagatgcggaaggagcacaatgagctgcagcaaaaactcgagaagaaggaacgggaatgtgatgccaaaacacaagaaaaagaggagatgatgcagacactcaataagatgaaggaaaaactcgaaaaagagactactgaacataaacaggtgaaacagcaggtagccgaccttactgcacaactgcacgagttatcaaggagagccgtctgtgcctctattccaggcggaccttcaccaggggctcccggtggaccattcccatcaagtgtgcctggtagcttgctacctccaccccctcccccaccgctgcccggaggcatgctcccaccccctcctccccctttgccccctggcggaccccctcctcccccagggcctccaccactgggagcaatcatgccccctccaggtgccccaatggggctcgcattgaagaaaaagtccataccccagcccactaatgcgctgaaatcatttaattggagcaagctgcccgagaataagttggaggggacagtttggaccgagattgacgatactaaggtgttcaagattcttgatctggaggacttagagcgtacattttccgcttatcagcgtcagcaggatttcttcgtaaatagcaactcaaagcagaaggaagccgacgccatcgacgatacattatcgtccaagctcaaagttaaggagctctcagtcattgatggtaggcgggctcagaattgcaacattctgctgtcacggttgaaactctccaacgatgagatcaaacgagccatcctcactatggacgaacaggaagacctgcctaaagacatgctcgagcagctgcttaaatttgtgcctgagaaatcagatatagacctcttagaagagcataagcacgaactggacagaatggctaaggcagataggttcctgttcgagatgtctcggatcaatcactaccagcagagattacagagtctgtactttaaaaagaaatttgccgaacgagtggcttttgggaactatatgaataaaggtcagcggggtaacgcatacgggttcaagatatcttctcttaacaagatcgcagatacaaagtcttctattgataaaaacattaccctcctccactacctcatcacaatcgtcgagaacaaataccccagcgtcttaaatctgaatgaagagcttagggatattcctcaagccgctaaagtgaagtcttggaatatccgttctctgtctccccatagtcctgaaatttccctgtgcctgctcagcgcttcctcttcacaatag

SEQ ID NO: 183633 - DNA, 3207 bp, Artificial Sequence
  derived and/or modified sequence
atggctcctcgcaagagaggcggtcgcggtatttcattcatcttctgttgtttccgcaataacgaccatcccgaaatcacatacagactgcggaacgattctaactttgcgcttcaaaccatggaacccgctttacctatgccaccggtcgaagaactggatgtcatgtttagcgaacttgtggatgagttagacctcacggataagcatagagaagcgatgttcgctctccccgctgagaagaagtggcagatttattgctctaaaaagaaggatcaggaagaaaacaagggagccacctcctggccggaattttacatcgaccagctgaatagcatggcggcacgaaagagcttgctggccttggaaaaagaggaagaggaggaaaggtccaagactatcgagtccctcaagacagcattgcgcactaaacctatgagatttgtcactagatttattgacctcgacggcctgtcctgtattctaaactttctgaagacaatggactacgaaacgagtgaatcccggattcatacttcactgataggttgcattaaagccctgatgaacaactcacagggtagagctcacgttctggctcactccgagtcaatcaatgtgattgcccagagtctgtccaccgaaaacatcaaaaccaaggtcgctgtcctcgagatccttggagccgtctgtttggttccaggaggacataaaaaggttttgcaggcaatgcttcactatcaaaaatacgcgtcagaacggactcggttccagactctcattaatgatttggacaaatccactgggaggtaccgtgacgaagtatctcttaagactgctattatgagcttcattaatgccgttcttagtcagggcgctggcgtggaaagtctggacttccggcttcacctccgctacgagttcctgatgctgggcatacagccagtcatcgataagctccgagagcacgagaacagcactcttgatcgacacctcgacttctttgaaatgctgaggaacgaagatgagctggagtttgccaagaggtttgagctcgttcacatcgatacaaagagcgctacacagatgtttgagctcacacgcaagagactgacccattccgaggcctatcctcattttatgtccattttacaccactgtttacagatgccatataagcgcagcggtaatacagtgcagtactggctgttactggatcgtataatccagcagattgtcattcaaaacgacaaaggacaggaccccgactccacacccctggaaaacttcaacatcaaaaatgttgtgcgcatgctcgtaaacgaaaacgaagtcaaacaatggaaagaacaggcagaaaagatgcgtaaagaacataacgaacttcaacagaagttggagaagaaagagcgagaatgcgatgccaagactcaagaaaaggaggagatgatgcagacactgaataaaatgaaggagaaacttgagaaggagaccaccgagcacaaacaagtgaagcaacaggtggctgacctgaccgcacagctgcacgagctaagtagaagagccgtgtgcgcttctatcccaggaggcccatcaccaggtgcaccgggaggaccgttcccaagtagtgttcccggatccttactgcctccccctcctcccccacccctaccagggggtatgctgcctccgccacctcctccgctgcctccgggaggccctcctccccctcccggaccgccaccattgggagccattatgcccccaccaggggcaccgatggggctggccctgaagaaaaagtcgatcccacagcccacaaacgccctcaaatctttcaactggtcaaagttgcccgagaacaaactggaaggaactgtctggacggaaatcgacgatactaaggttttcaagatcttggacctcgaagacttggagcgtaccttcagtgcctaccagcggcagcagaaggaggccgacgcaatcgatgatacgctcagcagcaaattgaaagtgaaggagcttagcgtgatcgacggcagacgagctcagaattgcaacattttgctgtcccgactcaagctgagcaacgacgaaatcaagcgggctatcttgaccatggatgagcaggaggacttgcccaaggacatgttggagcagttactcaaatttgtgccagaaaagagcgacattgacctgctggaggaacacaagcacgaactggatagaatggctaaggcagatagattcctctttgagatgtcccgaattaatcattaccagcaacgccttcagtcactttactttaagaaaaaattcgccgagagagtcgctgaagtgaaacctaaggttgaagcaattcggtccgggtctgaggaagtgttcaggtcaggtgctctcaagcagttattagaagttgtgttggcctttggcaactacatgaacaagggccaaagaggaaacgcctacggatttaaaatcagcagtctgaacaaaattgcagataccaaatcgagtatagacaagaatattaccctgctgcactacctgatcacaattgtcgagaacaagtacccctccgtgcttaatctgaatgaggaattgcgcgatattccccaggccgcaaaggttaacatgaccgagctggacaaggagataagcacacttaggtccggactgaaagccgtggaaacagaactagagtaccagaagtcccaacctcctcaaccaggcgataagtttgtcagcgtggtctcacaattcatcacagtagcctccttctcgttcagcgacgtggaagatctgctcgccgaggcaaaggatctgttcaccaaagccgttaaacatttcggcgaggaagcaggaaagattcagccggacgaatttttcggcatctttgatcagtttctgcaggcagtaagcgaggcaaagcaggagaacgagaacatgcgaaagaagaaggaggaggaggagcgccgtgcccgtatggaagcacagcttaaggaacaaagggaacgagagcggaagatgagaaaggccaaggagaactctgaagaatctggggagttcgatgacctggtgagtgctctgagaagcggagaggtgttcgacaaggatctgagcaagctgaagcggaaccggaaaagaatcacaaaccaaatgactgactcatctcgggaacgcccaattactaaactcaacttctag

SEQ ID NO: 183634 - DNA, 3237 bp, Artificial Sequence
  derived and/or modified sequence
atggcgcctagaaaacgcggtggcagggggatatcttttatcttctgttgctttaggaacaacgatcacccagagattacataccgccttagaaacgactccaacttcgcgctgcagaccatggagccagccttgccgatgccgccagtggaggaactggacgtgatgtttagtgagttagtggacgagctggacctgactgacaagcatcgggaagcaatgttcgccctcccagccgagaaaaagtggcaaatatactgctctaagaagaaagatcaggaagaaaataaaggcgctactagctggcccgagttctatatcgatcagttgaatagcatggctgcacgtaagagtctcttggctcttgagaaagaagaggaagaagaacggagtaagacaattgagtctctgaaaactgccttgagaacaaaacctatgaggttcgtaactcgtttcattgacctcgacggcctcagttgtattctaaattttttgaaaaccatggattatgaaacgagcgagtcacggatccacacgtctctcattggatgcatcaaagccctgatgaacaattcccaggggagagctcacgtgctagcccacagcgaaagcatcaacgttatagcgcagagcctgtctacagagaatataaaaactaaggtagcggtactagagattctaggagctgtgtgtctcgtccctggtggacacaagaaagtgctccaagcgatgctgcactatcagaaatatgcgtcagaaagaacaagattccaaacattaatcaacgatctcgacaagtccacaggtaggtaccgggacgaggtgtcattaaaaaccgcgatcatgagttttatcaacgcggttctgtcacaaggggcaggtgttgagtcactggattttcggctgcacctgagatatgaattcttaatgctgggcatccagcctgtgatcgacaagctgagagagcacgagaattctacgctggatcgtcatctcgattttttcgaaatgttaagaaacgaggacgagttggagttcgccaaacgattcgagctggtgcacatagacactaagtccgccactcagatgttcgagcttacaagaaaaaggctgacacactctgaggcctatcctcacttcatgtctatcttacaccattgcctccagatgccctacaaacgttcggggaacaccgtgcagtactggctgttgctggatcgcattattcagcaaatagtgattcaaaatgacaaaggccaagacccagactctacccccctcgagaattttaacattaaaaatgttgtgcgaatgttggtgaatgagaatgaggtcaaacagtggaaggagcaggcagaaaaaatgcggaaggaacacaacgagttgcagcagaaactggagaagaaggagcgagaatgcgacgccaagacccaagagaaggaggagatgatgcagacattaaataagatgaaggaaaagctggaaaaagagactactgagcacaagcaagtgaagcagcaagtggccgacctgactgctcagttacatgagctctctcggagagccgtttgcgcaagcatccctgggggacccagcccaggcgctcccggtggaccttttccgagctcagtcccagggtctctgctccctcctcctcccccaccccctctaccgggtgggatgcttccaccgccaccacccccactgcctcccggaggacctcctccaccgcctgggcctccaccactgggcgcaatcatgcccccaccaggggcacctatggggctggccctcaagaaaaaatcaattcctcagcctaccaacgcattaaagagctttaactggagtaaattgccagagaacaaattagagggtacagtttggacagaaattgatgatactaaagttttcaaaatattagacctggaagacctcgaacgtaccttctcggcctaccagcgacagcaagacttcttcgtcaatagcaactcaaagcaaaaggaggccgacgcgatagacgatacattgagcagcaagctgaaggtcaaagagctcagtgttatcgatgggagacgtgcacagaattgtaacattctgctgtcccgacttaagctgtctaatgatgagattaagcgggctatactgactatggacgaacaagaggaccttccaaaagatatgctggaacagctccttaagttcgttccggagaaatcggacatcgacctgctggaagagcacaaacacgaactggataggatggcaaaagccgaccgtttcctgtttgaaatgagcaggatcaatcactaccagcaaagattgcagagtctctacttcaagaaaaagttcgcagagagagtggctgaggtcaagccgaaagtggaagctatcaggtccggatctgaagaagtgttcaggtctggtgctctgaagcagctgctcgaggtggtgctcgccttcggcaactacatgaacaagggacagcgtggcaacgcctatggctttaaaatttcaagcctaaacaagatcgccgatacaaagagctccattgataaaaacataacactcctacactatctgattacgattgtggagaacaagtatccctcagtgctaaacctaaacgaagagctgagagacattccccaagcagccaaggtcaacatgaccgagcttgataaggaaattagcactcttcgtagtggcctgaaggcagtggagaccgagctggagtatcagaagtcacagcctcctcaacctggagacaaattcgtttctgtcgtctcccagttcattactgtagcatccttcagtttctccgacgtggaagaccttctggcagaggctaaggatctgtttaccaaggcagttaagcattttggcgaagaggctggaaagattcagcccgatgagttttttggcatttttgatcagtttctacaggcggtcagtgaagccaaacaggagaatgagaatatgcgcaagaaaaaagaagaagaagagaggagagcaagaatggaggcccagcttaaggagcaacgggagcgcgagcgcaagatgcgtaaagcgaaagaaaactccgaggagtccggcgaattcgatgatttggtatctgccttgagaagtggcgaggtctttgataaggatctgagtaaactaaagcgcaaccgcaagaggataaccaatcaaatgaccgacagcagccgggagaggcctattacgaagctcaatttctag

SEQ ID NO: 183635 - DNA, 3237 bp, Artificial Sequence
  derived and/or modified sequence
atggcccccagaaagagaggcggcagaggcatcagcttcatcttctgctgcttcagaaacaacgaccaccccgagatcacctacagactgagaaacgacagcaacttcgccctgcagaccatggagcccgccctgcccatgccccccgtggaggagctggacgtgatgttcagcgagctggtggacgagctggacctgaccgacaagcacagagaggccatgttcgccctgcccgccgagaagaagtggcagatctactgcagcaagaagaaggaccaggaggagaacaagggcgccaccagctggcccgagttctacatcgaccagctgaacagcatggccgccagaaagagcctgctggccctggagaaggaggaggaggaggagagaagcaagaccatcgagagcctgaagaccgccctgagaaccaagcccatgagattcgtgaccagattcatcgacctggacggcctgagctgcatcctgaacttcctgaagaccatggactacgagaccagcgagagcagaatccacaccagcctgatcggctgcatcaaggccctgatgaacaacagccagggcagagcccacgtgctggcccacagcgagagcatcaacgtgatcgcccagagcctgagcaccgagaacatcaagaccaaggtggccgtgctggagatcctgggcgccgtgtgcctggtgcccggcggccacaagaaggtgctgcaggccatgctgcactaccagaagtacgccagcgagagaaccagattccagaccctgatcaacgacctggacaagagcaccggcagatacagagacgaggtgagcctgaagaccgccatcatgagcttcatcaacgccgtgctgagccagggcgccggcgtggagagcctggacttcagactgcacctgagatacgagttcctgatgctgggcatccagcccgtgatcgacaagctgagagagcacgagaacagcaccctggacagacacctggacttcttcgagatgctgagaaacgaggacgagctggagttcgccaagagattcgagctggtgcacatcgacaccaagagcgccacccagatgttcgagctgaccagaaagagactgacccacagcgaggcctacccccacttcatgagcatcctgcaccactgcctgcagatgccctacaagagaagcggcaacaccgtgcagtactggctgctgctggacagaatcatccagcagatcgtgatccagaacgacaagggccaggaccccgacagcacccccctggagaacttcaacatcaagaacgtggtgagaatgctggtgaacgagaacgaggtgaagcagtggaaggagcaggccgagaagatgagaaaggagcacaacgagctgcagcagaagctggagaagaaggagagagagtgcgacgccaagacccaggagaaggaggagatgatgcagaccctgaacaagatgaaggagaagctggagaaggagaccaccgagcacaagcaggtgaagcagcaggtggccgacctgaccgcccagctgcacgagctgagcagaagagccgtgtgcgccagcatccccggcggccccagccccggcgcccccggcggccccttccccagcagcgtgcccggcagcctgctgcccccccccccccccccccccctgcccggcggcatgctgccccccccccccccccccctgccccccggcggccccccccccccccccggccccccccccctgggcgccatcatgcccccccccggcgcccccatgggcctggccctgaagaagaagagcatcccccagcccaccaacgccctgaagagcttcaactggagcaagctgcccgagaacaagctggagggcaccgtgtggaccgagatcgacgacaccaaggtgttcaagatcctggacctggaggacctggagagaaccttcagcgcctaccagagacagcaggacttcttcgtgaacagcaacagcaagcagaaggaggccgacgccatcgacgacaccctgagcagcaagctgaaggtgaaggagctgagcgtgatcgacggcagaagagcccagaactgcaacatcctgctgagcagactgaagctgagcaacgacgagatcaagagagccatcctgaccatggacgagcaggaggacctgcccaaggacatgctggagcagctgctgaagttcgtgcccgagaagagcgacatcgacctgctggaggagcacaagcacgagctggacagaatggccaaggccgacagattcctgttcgagatgagcagaatcaaccactaccagcagagactgcagagcctgtacttcaagaagaagttcgccgagagagtggccgaggtgaagcccaaggtggaggccatcagaagcggcagcgaggaggtgttcagaagcggcgccctgaagcagctgctggaggtggtgctggccttcggcaactacatgaacaagggccagagaggcaacgcctacggcttcaagatcagcagcctgaacaagatcgccgacaccaagagcagcatcgacaagaacatcaccctgctgcactacctgatcaccatcgtggagaacaagtaccccagcgtgctgaacctgaacgaggagctgagagacatcccccaggccgccaaggtgaacatgaccgagctggacaaggagatcagcaccctgagaagcggcctgaaggccgtggagaccgagctggagtaccagaagagccagcccccccagcccggcgacaagttcgtgagcgtggtgagccagttcatcaccgtggccagcttcagcttcagcgacgtggaggacctgctggccgaggccaaggacctgttcaccaaggccgtgaagcacttcggcgaggaggccggcaagatccagcccgacgagttcttcggcatcttcgaccagttcctgcaggccgtgagcgaggccaagcaggagaacgagaacatgagaaagaagaaggaggaggaggagagaagagccagaatggaggcccagctgaaggagcagagagagagagagagaaagatgagaaaggccaaggagaacagcgaggagagcggcgagttcgacgacctggtgagcgccctgagaagcggcgaggtgttcgacaaggacctgagcaagctgaagagaaacagaaagagaatcaccaaccagatgaccgacagcagcagagagagacccatcaccaagctgaacttctag

SEQ ID NO: 183636 - DNA, 2649 bp, Artificial Sequence
  derived and/or modified sequence
atggcccccagaaagagaggcggcagaggcatcagcttcatcttctgctgcttcagaaacaacgaccaccccgagatcacctacagactgagaaacgacagcaacttcgccctgcagaccatggagcccgccctgcccatgccccccgtggaggagctggacgtgatgttcagcgagctggtggacgagctggacctgaccgacaagcacagagaggccatgttcgccctgcccgccgagaagaagtggcagatctactgcagcaagaagaaggaccaggaggagaacaagggcgccaccagctggcccgagttctacatcgaccagctgaacagcatggccgccagaaagagcctgctggccctggagaaggaggaggaggaggagagaagcaagaccatcgagagcctgaagaccgccctgagaaccaagcccatgagattcgtgaccagattcatcgacctggacggcctgagctgcatcctgaacttcctgaagaccatggactacgagaccagcgagagcagaatccacaccagcctgatcggctgcatcaaggccctgatgaacaacagccagggcagagcccacgtgctggcccacagcgagagcatcaacgtgatcgcccagagcctgagcaccgagaacatcaagaccaaggtggccgtgctggagatcctgggcgccgtgtgcctggtgcccggcggccacaagaaggtgctgcaggccatgctgcactaccagaagtacgccagcgagagaaccagattccagaccctgatcaacgacctggacaagagcaccggcagatacagagacgaggtgagcctgaagaccgccatcatgagcttcatcaacgccgtgctgagccagggcgccggcgtggagagcctggacttcagactgcacctgagatacgagttcctgatgctgggcatccagcccgtgatcgacaagctgagagagcacgagaacagcaccctggacagacacctggacttcttcgagatgctgagaaacgaggacgagctggagttcgccaagagattcgagctggtgcacatcgacaccaagagcgccacccagatgttcgagctgaccagaaagagactgacccacagcgaggcctacccccacttcatgagcatcctgcaccactgcctgcagatgccctacaagagaagcggcaacaccgtgcagtactggctgctgctggacagaatcatccagcagatcgtgatccagaacgacaagggccaggaccccgacagcacccccctggagaacttcaacatcaagaacgtggtgagaatgctggtgaacgagaacgaggtgaagcagtggaaggagcaggccgagaagatgagaaaggagcacaacgagctgcagcagaagctggagaagaaggagagagagtgcgacgccaagacccaggagaaggaggagatgatgcagaccctgaacaagatgaaggagaagctggagaaggagaccaccgagcacaagcaggtgaagcagcaggtggccgacctgaccgcccagctgcacgagctgagcagaagagccgtgtgcgccagcatccccggcggccccagccccggcgcccccggcggccccttccccagcagcgtgcccggcagcctgctgcccccccccccccccccccccctgcccggcggcatgctgccccccccccccccccccctgccccccggcggccccccccccccccccggccccccccccctgggcgccatcatgcccccccccggcgcccccatgggcctggccctgaagaagaagagcatcccccagcccaccaacgccctgaagagcttcaactggagcaagctgcccgagaacaagctggagggcaccgtgtggaccgagatcgacgacaccaaggtgttcaagatcctggacctggaggacctggagagaaccttcagcgcctaccagagacagcaggacttcttcgtgaacagcaacagcaagcagaaggaggccgacgccatcgacgacaccctgagcagcaagctgaaggtgaaggagctgagcgtgatcgacggcagaagagcccagaactgcaacatcctgctgagcagactgaagctgagcaacgacgagatcaagagagccatcctgaccatggacgagcaggaggacctgcccaaggacatgctggagcagctgctgaagttcgtgcccgagaagagcgacatcgacctgctggaggagcacaagcacgagctggacagaatggccaaggccgacagattcctgttcgagatgagcagaatcaaccactaccagcagagactgcagagcctgtacttcaagaagaagttcgccgagagagtggccttcggcaactacatgaacaagggccagagaggcaacgcctacggcttcaagatcagcagcctgaacaagatcgccgacaccaagagcagcatcgacaagaacatcaccctgctgcactacctgatcaccatcgtggagaacaagtaccccagcgtgctgaacctgaacgaggagctgagagacatcccccaggccgccaaggtgaagagctggaacatcagaagcctgagcccccacagccccgagatcagcctgtgcctgctgagcgccagcagcagccagtag

SEQ ID NO: 183637 - DNA, 3207 bp, Artificial Sequence
  derived and/or modified sequence
atggcccccagaaagagaggcggcagaggcatcagcttcatcttctgctgcttcagaaacaacgaccaccccgagatcacctacagactgagaaacgacagcaacttcgccctgcagaccatggagcccgccctgcccatgccccccgtggaggagctggacgtgatgttcagcgagctggtggacgagctggacctgaccgacaagcacagagaggccatgttcgccctgcccgccgagaagaagtggcagatctactgcagcaagaagaaggaccaggaggagaacaagggcgccaccagctggcccgagttctacatcgaccagctgaacagcatggccgccagaaagagcctgctggccctggagaaggaggaggaggaggagagaagcaagaccatcgagagcctgaagaccgccctgagaaccaagcccatgagattcgtgaccagattcatcgacctggacggcctgagctgcatcctgaacttcctgaagaccatggactacgagaccagcgagagcagaatccacaccagcctgatcggctgcatcaaggccctgatgaacaacagccagggcagagcccacgtgctggcccacagcgagagcatcaacgtgatcgcccagagcctgagcaccgagaacatcaagaccaaggtggccgtgctggagatcctgggcgccgtgtgcctggtgcccggcggccacaagaaggtgctgcaggccatgctgcactaccagaagtacgccagcgagagaaccagattccagaccctgatcaacgacctggacaagagcaccggcagatacagagacgaggtgagcctgaagaccgccatcatgagcttcatcaacgccgtgctgagccagggcgccggcgtggagagcctggacttcagactgcacctgagatacgagttcctgatgctgggcatccagcccgtgatcgacaagctgagagagcacgagaacagcaccctggacagacacctggacttcttcgagatgctgagaaacgaggacgagctggagttcgccaagagattcgagctggtgcacatcgacaccaagagcgccacccagatgttcgagctgaccagaaagagactgacccacagcgaggcctacccccacttcatgagcatcctgcaccactgcctgcagatgccctacaagagaagcggcaacaccgtgcagtactggctgctgctggacagaatcatccagcagatcgtgatccagaacgacaagggccaggaccccgacagcacccccctggagaacttcaacatcaagaacgtggtgagaatgctggtgaacgagaacgaggtgaagcagtggaaggagcaggccgagaagatgagaaaggagcacaacgagctgcagcagaagctggagaagaaggagagagagtgcgacgccaagacccaggagaaggaggagatgatgcagaccctgaacaagatgaaggagaagctggagaaggagaccaccgagcacaagcaggtgaagcagcaggtggccgacctgaccgcccagctgcacgagctgagcagaagagccgtgtgcgccagcatccccggcggccccagccccggcgcccccggcggccccttccccagcagcgtgcccggcagcctgctgcccccccccccccccccccccctgcccggcggcatgctgccccccccccccccccccctgccccccggcggccccccccccccccccggccccccccccctgggcgccatcatgcccccccccggcgcccccatgggcctggccctgaagaagaagagcatcccccagcccaccaacgccctgaagagcttcaactggagcaagctgcccgagaacaagctggagggcaccgtgtggaccgagatcgacgacaccaaggtgttcaagatcctggacctggaggacctggagagaaccttcagcgcctaccagagacagcagaaggaggccgacgccatcgacgacaccctgagcagcaagctgaaggtgaaggagctgagcgtgatcgacggcagaagagcccagaactgcaacatcctgctgagcagactgaagctgagcaacgacgagatcaagagagccatcctgaccatggacgagcaggaggacctgcccaaggacatgctggagcagctgctgaagttcgtgcccgagaagagcgacatcgacctgctggaggagcacaagcacgagctggacagaatggccaaggccgacagattcctgttcgagatgagcagaatcaaccactaccagcagagactgcagagcctgtacttcaagaagaagttcgccgagagagtggccgaggtgaagcccaaggtggaggccatcagaagcggcagcgaggaggtgttcagaagcggcgccctgaagcagctgctggaggtggtgctggccttcggcaactacatgaacaagggccagagaggcaacgcctacggcttcaagatcagcagcctgaacaagatcgccgacaccaagagcagcatcgacaagaacatcaccctgctgcactacctgatcaccatcgtggagaacaagtaccccagcgtgctgaacctgaacgaggagctgagagacatcccccaggccgccaaggtgaacatgaccgagctggacaaggagatcagcaccctgagaagcggcctgaaggccgtggagaccgagctggagtaccagaagagccagcccccccagcccggcgacaagttcgtgagcgtggtgagccagttcatcaccgtggccagcttcagcttcagcgacgtggaggacctgctggccgaggccaaggacctgttcaccaaggccgtgaagcacttcggcgaggaggccggcaagatccagcccgacgagttcttcggcatcttcgaccagttcctgcaggccgtgagcgaggccaagcaggagaacgagaacatgagaaagaagaaggaggaggaggagagaagagccagaatggaggcccagctgaaggagcagagagagagagagagaaagatgagaaaggccaaggagaacagcgaggagagcggcgagttcgacgacctggtgagcgccctgagaagcggcgaggtgttcgacaaggacctgagcaagctgaagagaaacagaaagagaatcaccaaccagatgaccgacagcagcagagagagacccatcaccaagctgaacttctag

SEQ ID NO: 183638 - DNA, 4256 bp, Artificial Sequence
  derived and/or modified sequence
tacgagcggctgtgaaggaaactgtttaaccggatcccattgtacccagagtgcagagccgcctttccagcatgcaggggctgctcagcgtttagtcacatcaagaaatagaacagaattcagccatggccccaagaaagagaggtggacgaggtatttcattcatcttttgctgtttccgaaataatgatcacccagaaatcacgtatcggctgcgaaatgatagcaactttgcgcttcagaccatggaaccagcattgcccatgccccctgtggaggagctggatgtcatgttcagtgaactggtggatgaactggacctcacagacaaacacagagaagccatgtttgcacttccagctgagaaaaaatggcaaatatactgtagcaagaaaaaggaccaggaagaaaacaagggagctacaagttggcctgaattctacattgatcagctcaattccatggctgctagaaaatctctgctggctttagagaaggaagaagaagaagaaagaagtaaaactatagagagtttaaagacagcactgaggacaaaaccaatgaggtttgtaaccagattcatcgacttggatggcctatcatgtatcctcaactttctaaagaccatggactacgagacctcagagtctcgaatacatacttctctcattggctgtataaaggcgttaatgaacaactctcaaggccgggctcacgtcctggctcattctgagagtattaatgtaattgctcagagtctgagcacagagaacattaaaacgaaggtggccgtgctggaaatcttgggcgccgtgtgcctggttcccgggggccacaagaaggttctgcaggccatgctgcactaccagaagtatgccagcgaaaggacccgctttcagacattaattaacgacttggataaaagcactgggcggtatcgagatgaagtgagtctcaagactgccatcatgtccttcattaatgcagtgctcagccaaggtgcaggagtggagagtttggactttagacttcatcttcgctatgaatttctgatgttaggaattcaacctgtaatagataaattaagggaacacgaaaattcaacattagataggcatttagacttttttgaaatgctccgaaatgaagatgaactagaatttgccaaaagatttgaactggttcacatagacacaaaaagtgcaactcagatgtttgagctgaccaggaagaggctgacacatagtgaagcttacccgcatttcatgtccatcctgcaccactgcctccaaatgccttacaagaggagtggcaacactgttcagtactggctactactagatagaattatacagcagatagttatccagaatgacaaaggacaggaccctgactccacacctttggaaaactttaatattaagaatgtcgtacgaatgttggttaatgaaaatgaagttaagcagtggaaagaacaagcggaaaaaatgagaaaagagcacaatgagctacaacagaaactggaaaagaaagaacgagaatgtgatgctaagactcaagagaaggaagagatgatgcagaccttaaataaaatgaaagagaaacttgaaaaggagactactgagcataagcaagtcaagcagcaggtggcggacctcacagcacagctccatgagctcagcaggagggccgtctgtgcttcaatcccaggtggaccctcgcctggagcaccaggagggccctttccttcctctgtgcctggatctctccttcctcccccaccacccccacctctaccaggtgggatgcttccccctccaccgcctcccctccctccaggtggccctcctcctcccccagggcctcctcccttaggggcaatcatgccacctcctggtgctccaatgggcctagcactgaagaagaaaagcattcctcagcccacaaatgccctgaaatccttcaactggtctaaactgcccgagaacaaactggaaggaacagtatggaccgaaattgatgatacaaaagtcttcaaaattctagatcttgaagacctggaaagaaccttctctgcctatcaaagacagcaggatttctttgtgaacagtaactccaagcagaaagaagcagatgccattgatgacactctgagttccaaacttaaagttaaagagctttcggtgattgatggtcggagagctcagaattgcaacatccttctatcgaggttgaaattatccaatgacgaaatcaaacgggcaattctaacaatggacgaacaggaagatctgcccaaggacatgttggaacagctcttgaaatttgttcctgaaaaaagtgacattgacctattggaggaacataaacacgaactggatcggatggccaaggctgataggttcctttttgagatgagccgaattaatcactatcagcaaaggttgcaatcgctgtacttcaaaaagaagtttgcagagcgtgtggcagaagtgaaacctaaagtggaagcaattcgttctggctcagaagaggtgtttaggagtggtgccctcaagcagttgctggaggtggttttggcatttggaaattatatgaataaaggtcaaagagggaatgcatatggattcaagatatctagcctaaacaaaattgctgacacaaaatccagcatcgacaaaaacattacccttttgcactatctcatcactattgtggaaaataagtaccccagtgttctcaatctaaatgaagaattgcgagatattcctcaagctgcgaaagtaaacatgactgagctggacaaagaaataagtaccttgagaagtggcttgaaagcagtagagacagagctggaatatcagaagtctcagcccccacagcccggagataagtttgtgtctgttgtcagccagttcatcacagtagccagcttcagcttctctgatgttgaagaccttctagcagaagctaaagacctgtttactaaagcagtgaagcactttggggaagaggctggcaaaatacaaccagatgagttctttggcatttttgatcaatttcttcaagctgtgtcagaagccaaacaagaaaacgaaaatatgagaaagaaaaaggaggaagaagaacgtcgagctcgcatggaagctcagctcaaagaacaacgtgaaagggaacgtaaaatgagaaaagctaaagagaatagtgaagaaagcggagagtttgatgaccttgtttcagctttacgctcaggagaagtgtttgacaaagacctttctaaattgaaacggaatcgcaaacgtattaccaaccagatgactgacagcagcagagagagaccaatcacaaaacttaatttctaattttccatgaatacttttttttagaaagctcattagcagccctctaaagtgactagaacgtttcattacactgccttgcaatccaaacagtggcaattttttccttcatctgtgagtgaatgtgtgaacgtgtgtatgtaaatgtatgtgtgtatatattaaaaaatgtatatagatgtctgagtgttgtctggagacctatacgtatggttaaaaagatttatgttaatgtatgtgctccaaaacctttcgtgtatgcattcacattgagtgtggctcattttctttccccgaacgccatgactgttcagaagcacaatactatctcctgaaagagataagagacattccctagattcaaaggcaaaacagaagaaacaaacaaacaaacaaaaaaagcttgcaaaatattttatggtttccaagcttgatatcctttaaaattattttcattgatggaactggagttgttggaaaaacatagatttaaaatgatttttgatagctgacattgtgatgttgatgtatcacatcagtaataggaccagctttgaatttctgacattggtgtggggatacagtctgtaaatgtttattgagaacatcttgcacacaatttgaattatgtagaatgtcaatcaagtttttgtatatttaaaagttggacatcaattttttcccctgatttcatcaagttatctctgccaagtgctcttgataatttcttcagatttttggaaaaaaacactatataaatgcaatccatgctttttttaaagaacaacattgccagagtatgcttgttctaacaatatagatatataaaccttaaaaataataaaatatctcacccaagacttaaaggaagaattctctgaagggataaagattact

SEQ ID NO: 183639 - DNA, 4102 bp, Artificial Sequence
  derived and/or modified sequence
tacgagcggctgtgaaggaaactgtttaaccggatcccattgtacccagagtgcagagccgcctttccagcatgcaggggctgctcagcgtttagtcacatcaagaaatagaacagaattcagccatggccccaagaaagagaggtggacgaggtatttcattcatcttttgctgtttccgaaataatgatcacccagaaatcacgtatcggctgcgaaatgatagcaactttgcgcttcagaccatggaaccagcattgcccatgccccctgtggaggagctggatgtcatgttcagtgaactggtggatgaactggacctcacagacaaacacagagaagccatgtttgcacttccagctgagaaaaaatggcaaatatactgtagcaagaaaaaggaccaggaagaaaacaagggagctacaagttggcctgaattctacattgatcagctcaattccatggctgctagaaaatctctgctggctttagagaaggaagaagaagaagaaagaagtaaaactatagagagtttaaagacagcactgaggacaaaaccaatgaggtttgtaaccagattcatcgacttggatggcctatcatgtatcctcaactttctaaagaccatggactacgagacctcagagtctcgaatacatacttctctcattggctgtataaaggcgttaatgaacaactctcaaggccgggctcacgtcctggctcattctgagagtattaatgtaattgctcagagtctgagcacagagaacattaaaacgaaggtggccgtgctggaaatcttgggcgccgtgtgcctggttcccgggggccacaagaaggttctgcaggccatgctgcactaccagaagtatgccagcgaaaggacccgctttcagacattaattaacgacttggataaaagcactgggcggtatcgagatgaagtgagtctcaagactgccatcatgtccttcattaatgcagtgctcagccaaggtgcaggagtggagagtttggactttagacttcatcttcgctatgaatttctgatgttaggaattcaacctgtaatagataaattaagggaacacgaaaattcaacattagataggcatttagacttttttgaaatgctccgaaatgaagatgaactagaatttgccaaaagatttgaactggttcacatagacacaaaaagtgcaactcagatgtttgagctgaccaggaagaggctgacacatagtgaagcttacccgcatttcatgtccatcctgcaccactgcctccaaatgccttacaagaggagtggcaacactgttcagtactggctactactagatagaattatacagcagatagttatccagaatgacaaaggacaggaccctgactccacacctttggaaaactttaatattaagaatgtcgtacgaatgttggttaatgaaaatgaagttaagcagtggaaagaacaagcggaaaaaatgagaaaagagcacaatgagctacaacagaaactggaaaagaaagaacgagaatgtgatgctaagactcaagagaaggaagagatgatgcagaccttaaataaaatgaaagagaaacttgaaaaggagactactgagcataagcaagtcaagcagcaggtggcggacctcacagcacagctccatgagctcagcaggagggccgtctgtgcttcaatcccaggtggaccctcgcctggagcaccaggagggccctttccttcctctgtgcctggatctctccttcctcccccaccacccccacctctaccaggtgggatgcttccccctccaccgcctcccctccctccaggtggccctcctcctcccccagggcctcctcccttaggggcaatcatgccacctcctggtgctccaatgggcctagcactgaagaagaaaagcattcctcagcccacaaatgccctgaaatccttcaactggtctaaactgcccgagaacaaactggaaggaacagtatggaccgaaattgatgatacaaaagtcttcaaaattctagatcttgaagacctggaaagaaccttctctgcctatcaaagacagcaggatttctttgtgaacagtaactccaagcagaaagaagcagatgccattgatgacactctgagttccaaacttaaagttaaagagctttcggtgattgatggtcggagagctcagaattgcaacatccttctatcgaggttgaaattatccaatgacgaaatcaaacgggcaattctaacaatggacgaacaggaagatctgcccaaggacatgttggaacagctcttgaaatttgttcctgaaaaaagtgacattgacctattggaggaacataaacacgaactggatcggatggccaaggctgataggttcctttttgagatgagccgaattaatcactatcagcaaaggttgcaatcgctgtacttcaaaaagaagtttgcagagcgtgtggcatttggaaattatatgaataaaggtcaaagagggaatgcatatggattcaagatatctagcctaaacaaaattgctgacacaaaatccagcatcgacaaaaacattacccttttgcactatctcatcactattgtggaaaataagtaccccagtgttctcaatctaaatgaagaattgcgagatattcctcaagctgcgaaagtaaagagctggaatatcagaagtctcagcccccacagcccggagataagtttgtgtctgttgtcagccagttcatcacagtagccagcttcagcttctctgatgttgaagaccttctagcagaagctaaagacctgtttactaaagcagtgaagcactttggggaagaggctggcaaaatacaaccagatgagttctttggcatttttgatcaatttcttcaagctgtgtcagaagccaaacaagaaaacgaaaatatgagaaagaaaaaggaggaagaagaacgtcgagctcgcatggaagctcagctcaaagaacaacgtgaaagggaacgtaaaatgagaaaagctaaagagaatagtgaagaaagcggagagtttgatgaccttgtttcagctttacgctcaggagaagtgtttgacaaagacctttctaaattgaaacggaatcgcaaacgtattaccaaccagatgactgacagcagcagagagagaccaatcacaaaacttaatttctaattttccatgaatacttttttttagaaagctcattagcagccctctaaagtgactagaacgtttcattacactgccttgcaatccaaacagtggcaattttttccttcatctgtgagtgaatgtgtgaacgtgtgtatgtaaatgtatgtgtgtatatattaaaaaatgtatatagatgtctgagtgttgtctggagacctatacgtatggttaaaaagatttatgttaatgtatgtgctccaaaacctttcgtgtatgcattcacattgagtgtggctcattttctttccccgaacgccatgactgttcagaagcacaatactatctcctgaaagagataagagacattccctagattcaaaggcaaaacagaagaaacaaacaaacaaacaaaaaaagcttgcaaaatattttatggtttccaagcttgatatcctttaaaattattttcattgatggaactggagttgttggaaaaacatagatttaaaatgatttttgatagctgacattgtgatgttgatgtatcacatcagtaataggaccagctttgaatttctgacattggtgtggggatacagtctgtaaatgtttattgagaacatcttgcacacaatttgaattatgtagaatgtcaatcaagtttttgtatatttaaaagttggacatcaattttttcccctgatttcatcaagttatctctgccaagtgctcttgataatttcttcagatttttggaaaaaaacactatataaatgcaatccatgctttttttaaagaacaacattgccagagtatgcttgttctaacaatatagatatataaaccttaaaaataataaaatatctcacccaagacttaaaggaagaattctctgaagggataaagattact

SEQ ID NO: 183640 - DNA, 4227 bp, Artificial Sequence
  derived and/or modified sequence
ctacgagcggctgtgaaggaaactgtttaaccggatcccattgtacccagagtgcagagccgcctttccagcatgcaggggctgctcagcgtttagtcacatcaagaaatagaacagaattcagccatggccccaagaaagagaggtggacgaggtatttcattcatcttttgctgtttccgaaataatgatcacccagaaatcacgtatcggctgcgaaatgatagcaactttgcgcttcagaccatggaaccagcattgcccatgccccctgtggaggagctggatgtcatgttcagtgaactggtggatgaactggacctcacagacaaacacagagaagccatgtttgcacttccagctgagaaaaaatggcaaatatactgtagcaagaaaaaggaccaggaagaaaacaagggagctacaagttggcctgaattctacattgatcagctcaattccatggctgctagaaaatctctgctggctttagagaaggaagaagaagaagaaagaagtaaaactatagagagtttaaagacagcactgaggacaaaaccaatgaggtttgtaaccagattcatcgacttggatggcctatcatgtatcctcaactttctaaagaccatggactacgagacctcagagtctcgaatacatacttctctcattggctgtataaaggcgttaatgaacaactctcaaggccgggctcacgtcctggctcattctgagagtattaatgtaattgctcagagtctgagcacagagaacattaaaacgaaggtggccgtgctggaaatcttgggcgccgtgtgcctggttcccgggggccacaagaaggttctgcaggccatgctgcactaccagaagtatgccagcgaaaggacccgctttcagacattaattaacgacttggataaaagcactgggcggtatcgagatgaagtgagtctcaagactgccatcatgtccttcattaatgcagtgctcagccaaggtgcaggagtggagagtttggactttagacttcatcttcgctatgaatttctgatgttaggaattcaacctgtaatagataaattaagggaacacgaaaattcaacattagataggcatttagacttttttgaaatgctccgaaatgaagatgaactagaatttgccaaaagatttgaactggttcacatagacacaaaaagtgcaactcagatgtttgagctgaccaggaagaggctgacacatagtgaagcttacccgcatttcatgtccatcctgcaccactgcctccaaatgccttacaagaggagtggcaacactgttcagtactggctactactagatagaattatacagcagatagttatccagaatgacaaaggacaggaccctgactccacacctttggaaaactttaatattaagaatgtcgtacgaatgttggttaatgaaaatgaagttaagcagtggaaagaacaagcggaaaaaatgagaaaagagcacaatgagctacaacagaaactggaaaagaaagaacgagaatgtgatgctaagactcaagagaaggaagagatgatgcagaccttaaataaaatgaaagagaaacttgaaaaggagactactgagcataagcaagtcaagcagcaggtggcggacctcacagcacagctccatgagctcagcaggagggccgtctgtgcttcaatcccaggtggaccctcgcctggagcaccaggagggccctttccttcctctgtgcctggatctctccttcctcccccaccacccccacctctaccaggtgggatgcttccccctccaccgcctcccctccctccaggtggccctcctcctcccccagggcctcctcccttaggggcaatcatgccacctcctggtgctccaatgggcctagcactgaagaagaaaagcattcctcagcccacaaatgccctgaaatccttcaactggtctaaactgcccgagaacaaactggaaggaacagtatggaccgaaattgatgatacaaaagtcttcaaaattctagatcttgaagacctggaaagaaccttctctgcctatcaaagacagcagaaagaagcagatgccattgatgacactctgagttccaaacttaaagttaaagagctttcggtgattgatggtcggagagctcagaattgcaacatccttctatcgaggttgaaattatccaatgacgaaatcaaacgggcaattctaacaatggacgaacaggaagatctgcccaaggacatgttggaacagctcttgaaatttgttcctgaaaaaagtgacattgacctattggaggaacataaacacgaactggatcggatggccaaggctgataggttcctttttgagatgagccgaattaatcactatcagcaaaggttgcaatcgctgtacttcaaaaagaagtttgcagagcgtgtggcagaagtgaaacctaaagtggaagcaattcgttctggctcagaagaggtgtttaggagtggtgccctcaagcagttgctggaggtggttttggcatttggaaattatatgaataaaggtcaaagagggaatgcatatggattcaagatatctagcctaaacaaaattgctgacacaaaatccagcatcgacaaaaacattacccttttgcactatctcatcactattgtggaaaataagtaccccagtgttctcaatctaaatgaagaattgcgagatattcctcaagctgcgaaagtaaacatgactgagctggacaaagaaataagtaccttgagaagtggcttgaaagcagtagagacagagctggaatatcagaagtctcagcccccacagcccggagataagtttgtgtctgttgtcagccagttcatcacagtagccagcttcagcttctctgatgttgaagaccttctagcagaagctaaagacctgtttactaaagcagtgaagcactttggggaagaggctggcaaaatacaaccagatgagttctttggcatttttgatcaatttcttcaagctgtgtcagaagccaaacaagaaaacgaaaatatgagaaagaaaaaggaggaagaagaacgtcgagctcgcatggaagctcagctcaaagaacaacgtgaaagggaacgtaaaatgagaaaagctaaagagaatagtgaagaaagcggagagtttgatgaccttgtttcagctttacgctcaggagaagtgtttgacaaagacctttctaaattgaaacggaatcgcaaacgtattaccaaccagatgactgacagcagcagagagagaccaatcacaaaacttaatttctaattttccatgaatacttttttttagaaagctcattagcagccctctaaagtgactagaacgtttcattacactgccttgcaatccaaacagtggcaattttttccttcatctgtgagtgaatgtgtgaacgtgtgtatgtaaatgtatgtgtgtatatattaaaaaatgtatatagatgtctgagtgttgtctggagacctatacgtatggttaaaaagatttatgttaatgtatgtgctccaaaacctttcgtgtatgcattcacattgagtgtggctcattttctttccccgaacgccatgactgttcagaagcacaatactatctcctgaaagagataagagacattccctagattcaaaggcaaaacagaagaaacaaacaaacaaacaaaaaaagcttgcaaaatattttatggtttccaagcttgatatcctttaaaattattttcattgatggaactggagttgttggaaaaacatagatttaaaatgatttttgatagctgacattgtgatgttgatgtatcacatcagtaataggaccagctttgaatttctgacattggtgtggggatacagtctgtaaatgtttattgagaacatcttgcacacaatttgaattatgtagaatgtcaatcaagtttttgtatatttaaaagttggacatcaattttttcccctgatttcatcaagttatctctgccaagtgctcttgataatttcttcagatttttggaaaaaaacactatataaatgcaatccatgctttttttaaagaacaacattgccagagtatgcttgttctaacaatatagatatataaaccttaaaaataataaaatatctcacccaagacttaaaggaagaattctctgaagggataaagattact

SEQ ID NO: 183641 - DNA, 5806 bp, Artificial Sequence
  derived and/or modified sequence
aagaaatagaacagaattcagccatggccccaagaaagagaggtggacgaggtatttcattcatcttttgctgtttccgaaataatgatcacccagaaatcacgtatcggctgcgaaatgatagcaactttgcgcttcagaccatggaaccagcattgcccatgccccctgtggaggagctggatgtcatgttcagtgaactggtggatgaactggacctcacagacaaacacagagaagccatgtttgcacttccagctgagaaaaaatggcaaatatactgtagcaagaaaaaggaccaggaagaaaacaagggagctacaagttggcctgaattctacattgatcagctcaattccatggctgctagaaaatctctgctggctttagagaaggaagaagaagaagaaagaagtaaaactatagagagtttaaagacagcactgaggacaaaaccaatgaggtttgtaaccagattcatcgacttggatggcctatcatgtatcctcaactttctaaagaccatggactacgagacctcagagtctcgaatacatacttctctcattggctgtataaaggcgttaatgaacaactctcaaggccgggctcacgtcctggctcattctgagagtattaatgtaattgctcagagtctgagcacagagaacattaaaacgaaggtggccgtgctggaaatcttgggcgccgtgtgcctggttcccgggggccacaagaaggttctgcaggccatgctgcactaccagaagtatgccagcgaaaggacccgctttcagacattaattaacgacttggataaaagcactgggcggtatcgagatgaagtgagtctcaagactgccatcatgtccttcattaatgcagtgctcagccaaggtgcaggagtggagagtttggactttagacttcatcttcgctatgaatttctgatgttaggaattcaacctgtaatagataaattaagggaacacgaaaattcaacattagataggcatttagacttttttgaaatgctccgaaatgaagatgaactagaatttgccaaaagatttgaactggttcacatagacacaaaaagtgcaactcagatgtttgagctgaccaggaagaggctgacacatagtgaagcttacccgcatttcatgtccatcctgcaccactgcctccaaatgccttacaagaggagtggcaacactgttcagtactggctactactagatagaattatacagcagatagttatccagaatgacaaaggacaggaccctgactccacacctttggaaaactttaatattaagaatgtcgtacgaatgttggttaatgaaaatgaagttaagcagtggaaagaacaagcggaaaaaatgagaaaagagcacaatgagctacaacagaaactggaaaagaaagaacgagaatgtgatgctaagactcaagagaaggaagagatgatgcagaccttaaataaaatgaaagagaaacttgaaaaggagactactgagcataagcaagtcaagcagcaggtggcggacctcacagcacagctccatgagctcagcaggagggccgtctgtgcttcaatcccaggtggaccctcgcctggagcaccaggagggccctttccttcctctgtgcctggatctctccttcctcccccaccacccccacctctaccaggtgggatgcttccccctccaccgcctcccctccctccaggtggccctcctcctcccccagggcctcctcccttaggggcaatcatgccacctcctggtgctccaatgggcctagcactgaagaagaaaagcattcctcagcccacaaatgccctgaaatccttcaactggtctaaactgcccgagaacaaactggaaggaacagtatggaccgaaattgatgatacaaaagtcttcaaaattctagatcttgaagacctggaaagaaccttctctgcctatcaaagacagcaggatttctttgtgaacagtaactccaagcagaaagaagcagatgccattgatgacactctgagttccaaacttaaagttaaagagctttcggtgattgatggtcggagagctcagaattgcaacatccttctatcgaggttgaaattatccaatgacgaaatcaaacgggcaattctaacaatggacgaacaggaagatctgcccaaggacatgttggaacagctcttgaaatttgttcctgaaaaaagtgacattgacctattggaggaacataaacacgaactggatcggatggccaaggctgataggttcctttttgagatgagccgaattaatcactatcagcaaaggttgcaatcgctgtacttcaaaaagaagtttgcagagcgtgtggcagaagtgaaacctaaagtggaagcaattcgttctggctcagaagaggtgtttaggagtggtgccctcaagcagttgctggaggtggttttggcatttggaaattatatgaataaaggtcaaagagggaatgcatatggattcaagatatctagcctaaacaaaattgctgacacaaaatccagcatcgacaaaaacattacccttttgcactatctcatcactattgtggaaaataagtaccccagtgttctcaatctaaatgaagaattgcgagatattcctcaagctgcgaaagtaaacatgactgagctggacaaagaaataagtaccttgagaagtggcttgaaagcagtagagacagagctggaatatcagaagtctcagcccccacagcccggagataagtttgtgtctgttgtcagccagttcatcacagtagccagcttcagcttctctgatgttgaagaccttctagcagaagctaaagacctgtttactaaagcagtgaagcactttggggaagaggctggcaaaatacaaccagatgagttctttggcatttttgatcaatttcttcaagctgtgtcagaagccaaacaagaaaacgaaaatatgagaaagaaaaaggaggaagaagaacgtcgagctcgcatggaagctcagctcaaagaacaacgtgaaagggaacgtaaaatgagaaaagctaaagagaatagtgaagaaagcggagagtttgatgaccttgtttcagctttacgctcaggagaagtgtttgacaaagacctttctaaattgaaacggaatcgcaaacgtattaccaaccagatgactgacagcagcagagagagaccaatcacaaaacttaatttctaattttccatgaatacttttttttagaaagctcattagcagccctctaaagtgactagaacgtttcattacactgccttgcaatccaaacagtggcaattttttccttcatctgtgagtgaatgtgtgaacgtgtgtatgtaaatgtatgtgtgtatatattaaaaaatgtatatagatgtctgagtgttgtctggagacctatacgtatggttaaaaagatttatgttaatgtatgtgctccaaaacctttcgtgtatgcattcacattgagtgtggctcattttctttccccgaacgccatgactgttcagaagcacaatactatctcctgaaagagataagagacattccctagattcaaaggcaaaacagaagaaacaaacaaacaaacaaaaaaagcttgcaaaatattttatggtttccaagcttgatatcctttaaaattattttcattgatggaactggagttgttggaaaaacatagatttaaaatgatttttgatagctgacattgtgatgttgatgtatcacatcagtaataggaccagctttgaatttctgacattggtgtggggatacagtctgtaaatgtttattgagaacatcttgcacacaatttgaattatgtagaatgtcaatcaagtttttgtatatttaaaagttggacatcaattttttcccctgatttcatcaagttatctctgccaagtgctcttgataatttcttcagatttttggaaaaaaacactatataaatgcaatccatgctttttttaaagaacaacattgccagagtatgcttgttctaacaatatagatatataaaccttaaaaataataaaatatctcacccaagacttaaaggaagaattctctgaagggataaagattactaaaaaaaaaaaaaaaaaaaaaaaattaatggggtgcctttttgttatagtttctattttctgttttgtaggacaagctgcattttctgtaaatataggtctggactaaaggatacataaagaatgcacaaaatgtcaacatcagcagagatgcccagatctatttatctctaagtatatttgaagtgattgctgtttatatgttgtcattttaaaattgtgtgtcagtaaagctacctgtaaaatttcagtccaaaaaaataaagctctcagggagacatgaataaaatcaatgaacattagaaaataaaatatagatgcttaccattaacctaccaactcttaatatccttaaattatgtgatatataaagaggactgttacttttttacttttttttttttttttttttttttttggctttgctttatttatttgtagttgggggctaacgttttctcttttctttctattgatcctgttgtggttgggtttcctgtggagagagtagtttgtcctgttgcactagaacattatttactcactaaattgagtttttcagtcaattaacaaatatttattaagttcctactatgtaccaggcatagtagggctacaatggtaagcaagacagagtccctgcccccaaagagcttatattctaatggggatattaagggatgaatagaataccaatgtgtgcactgtacaggaatcatactatttaaaaataatttgtataaactataatgcttagcacagatggcgagttatctgtgctatgtgaaagctgtgaaatagtgctctaagagttgtcaagagctgtggttttacatcttttcctcattgcaaatttagtgactttctacacactatatggaaataaatgactagcaaataaaacagtcataaatacaaagcagaggttgcactcccccaatcccgagttaacccaggtctgcaataacaccatgttaaaggtgcagatagagacttggctcaaaaaggcttggagatgaggaagattggaatataatgatggttttgtctgttccttaactaaagtgcctctatgtatattcttttctatttgtagcaggataaatttggtctggctcagttttggaactgtattttgaaaatggctttgtcttacagtttaaggaatagacaggtggagggaaagtcacataaaggagcaagtttgtgtagctgtccctcttgccccttttaatcatcctcctttgatatggccatcctggtgggcctcctttgccatttccatttttggtttctttccctgaaaactgtgtgcaggtaattccatgtgccattgttgaaaagaaaaaaaaaaaacaaaaaaaaaacctactttttagattggtgctggtgtaagtagccacttttctctcttgggtgtgtattttaaactttttttgtttttttaaattaatgccaaaaagaaaatgcataatttgtaaacttaattatatgtcttatatcttattagcttagtagttggaaccacttagtctttaggtgcaagactgttgttagatagtactgagaaaaaaaaagtatgtgttatgagactgtacatgtttttttaaaaatagcaatatgcaataaagagatgaattcattgggtgtaca

SEQ ID NO: 183642 - protein, 1508 aa, Artificial Sequence
  derived and/or modified sequence
MAVEGSTITSRIKNLLRSPSIKLRRSKAGNRREDLSSKVTLEKVLGITVSGGRGLACDPRSGLVAYPAGCVVVLFNPRKHKQHHILNSSRKTITALAFSPDGKYLVTGESGHMPAVRVWDVAEHSQVAELQEHKYGVACVAFSPSAKYIVSVGYQHDMIVNVWAWKKNIVVASNKVSSRVTAVSFSEDCSYFVTAGNRHIKFWYLDDSKTSKVNATVPLLGRSGLLGELRNNLFTDVACGRGKKADSTFCITSSGLLCEFSDRRLLDKWVELRTTVAHCISVSQDYIFCGCADGTVRLFNPSNLHFLSTLPRPHALGTDIASVTEASRLFSGVANARYPDTIALTFDPTNQWLSCVYNDHSIYVWDVRDPKKVGKVYSALYHSSCVWSVEVYPEVKDSNQACLPPSSFITCSSDNTIRLWNTESSGVHGSTLHRNILSSDLIKIIYVDGNTQALLDTELPGGDKADASLLDPRVGIRSVCVSPNGQHLASGDRMGTLRVHELQSLSEMLKVEAHDSEILCLEYSKPDTGLKLLASASRDRLIHVLDAGREYSLQQTLDEHSSSITAVKFAASDGQVRMISCGADKSIYFRTAQKSGDGVQFTRTHHVVRKTTLYDMDVEPSWKYTAIGCQDRNIRIFNISSGKQKKLFKGSQGEDGTLIKVQTDPSGIYIATSCSDKNLSIFDFSSGECVATMFGHSEIVTGMKFSNDCKHLISVSGDSCIFVWRLSSEMTISMRQRLAELRQRQRGGKQQGPSSPQRASGPNRHQAPSMLSPGPALSSDSDKEGEDEGTEEELPALPVLAKSTKKALASVPSPALPRSLSHWEMSRAQESVGFLDPAPAANPGPRRRGRWVQPGVELSVRSMLDLRQLETLAPSLQDPSQDSLAIIPSGPRKHGQEALETSLTSQNEKPPRPQASQPCSYPHIIRLLSQEEGVFAQDLEPAPIEDGIVYPEPSDNPTMDTSEFQVQAPARGTLGRVYPGSRSSEKHSPDSACSVDYSSSCLSSPEHPTEDSESTEPLSVDGISSDLEEPAEGDEEEEEEEGGMGPYGLQEGSPQTPDQEQFLKQHFETLASGAAPGAPVQVPERSESRSISSRFLLQVQTRPLREPSPSSSSLALMSRPAQVPQASGEQPRGNGANPPGAPPEVEPSSGNPSPQQAASVLLPRCRLNPDSSWAPKRVATASPFSGLQKAQSVHSLVPQERHEASLQAPSPGALLSREIEAQDGLGSLPPADGRPSRPHSYQNPTTSSMAKISRSISVGENLGLVAEPQAHAPIRVSPLSKLALPSRAHLVLDIPKPLPDRPTLAAFSPVTKGRAPGEAEKPGFPVGLGKAHSTTERWACLGEGTTPKPRTECQAHPGPSSPCAQQLPVSSLFQGPENLQPPPPEKTPNPMECTKPGAALSQDSEPAVSLEQCEQLVAELRGSVRQAVRLYHSVAGCKMPSAEQSRIAQLLRDTFSSVRQELEAVAGAVLSSPGSSPGAVGAEQTQALLEQYSELLLRAVERRMERKL

SEQ ID NO: 183643 - DNA, 4527 bp, Artificial Sequence
  derived and/or modified sequence
atggccgtggagggcagcaccatcaccagcagaatcaagaacctgctgagaagccccagcatcaagctgagaagaagcaaggccggcaacagaagagaggacctgagcagcaaggtgaccctggagaaggtgctgggcatcaccgtgagcggcggcagaggcctggcctgcgaccccagaagcggcctggtggcctaccccgccggctgcgtggtggtgctgttcaaccccagaaagcacaagcagcaccacatcctgaacagcagcagaaagaccatcaccgccctggccttcagccccgacggcaagtacctggtgaccggcgagagcggccacatgcccgccgtgagagtgtgggacgtggccgagcacagccaggtggccgagctgcaggagcacaagtacggcgtggcctgcgtggccttcagccccagcgccaagtacatcgtgagcgtgggctaccagcacgacatgatcgtgaacgtgtgggcctggaagaagaacatcgtggtggccagcaacaaggtgagcagcagagtgaccgccgtgagcttcagcgaggactgcagctacttcgtgaccgccggcaacagacacatcaagttctggtacctggacgacagcaagaccagcaaggtgaacgccaccgtgcccctgctgggcagaagcggcctgctgggcgagctgagaaacaacctgttcaccgacgtggcctgcggcagaggcaagaaggccgacagcaccttctgcatcaccagcagcggcctgctgtgcgagttcagcgacagaagactgctggacaagtgggtggagctgagaaccaccgtggcccactgcatcagcgtgagccaggactacatcttctgcggctgcgccgacggcaccgtgagactgttcaaccccagcaacctgcacttcctgagcaccctgcccagaccccacgccctgggcaccgacatcgccagcgtgaccgaggccagcagactgttcagcggcgtggccaacgccagataccccgacaccatcgccctgaccttcgaccccaccaaccagtggctgagctgcgtgtacaacgaccacagcatctacgtgtgggacgtgagagaccccaagaaggtgggcaaggtgtacagcgccctgtaccacagcagctgcgtgtggagcgtggaggtgtaccccgaggtgaaggacagcaaccaggcctgcctgccccccagcagcttcatcacctgcagcagcgacaacaccatcagactgtggaacaccgagagcagcggcgtgcacggcagcaccctgcacagaaacatcctgagcagcgacctgatcaagatcatctacgtggacggcaacacccaggccctgctggacaccgagctgcccggcggcgacaaggccgacgccagcctgctggaccccagagtgggcatcagaagcgtgtgcgtgagccccaacggccagcacctggccagcggcgacagaatgggcaccctgagagtgcacgagctgcagagcctgagcgagatgctgaaggtggaggcccacgacagcgagatcctgtgcctggagtacagcaagcccgacaccggcctgaagctgctggccagcgccagcagagacagactgatccacgtgctggacgccggcagagagtacagcctgcagcagaccctggacgagcacagcagcagcatcaccgccgtgaagttcgccgccagcgacggccaggtgagaatgatcagctgcggcgccgacaagagcatctacttcagaaccgcccagaagagcggcgacggcgtgcagttcaccagaacccaccacgtggtgagaaagaccaccctgtacgacatggacgtggagcccagctggaagtacaccgccatcggctgccaggacagaaacatcagaatcttcaacatcagcagcggcaagcagaagaagctgttcaagggcagccagggcgaggacggcaccctgatcaaggtgcagaccgaccccagcggcatctacatcgccaccagctgcagcgacaagaacctgagcatcttcgacttcagcagcggcgagtgcgtggccaccatgttcggccacagcgagatcgtgaccggcatgaagttcagcaacgactgcaagcacctgatcagcgtgagcggcgacagctgcatcttcgtgtggagactgagcagcgagatgaccatcagcatgagacagagactggccgagctgagacagagacagagaggcggcaagcagcagggccccagcagcccccagagagccagcggccccaacagacaccaggcccccagcatgctgagccccggccccgccctgagcagcgacagcgacaaggagggcgaggacgagggcaccgaggaggagctgcccgccctgcccgtgctggccaagagcaccaagaaggccctggccagcgtgcccagccccgccctgcccagaagcctgagccactgggagatgagcagagcccaggagagcgtgggcttcctggaccccgcccccgccgccaaccccggccccagaagaagaggcagatgggtgcagcccggcgtggagctgagcgtgagaagcatgctggacctgagacagctggagaccctggcccccagcctgcaggaccccagccaggacagcctggccatcatccccagcggccccagaaagcacggccaggaggccctggagaccagcctgaccagccagaacgagaagccccccagaccccaggccagccagccctgcagctacccccacatcatcagactgctgagccaggaggagggcgtgttcgcccaggacctggagcccgcccccatcgaggacggcatcgtgtaccccgagcccagcgacaaccccaccatggacaccagcgagttccaggtgcaggcccccgccagaggcaccctgggcagagtgtaccccggcagcagaagcagcgagaagcacagccccgacagcgcctgcagcgtggactacagcagcagctgcctgagcagccccgagcaccccaccgaggacagcgagagcaccgagcccctgagcgtggacggcatcagcagcgacctggaggagcccgccgagggcgacgaggaggaggaggaggaggagggcggcatgggcccctacggcctgcaggagggcagcccccagacccccgaccaggagcagttcctgaagcagcacttcgagaccctggccagcggcgccgcccccggcgcccccgtgcaggtgcccgagagaagcgagagcagaagcatcagcagcagattcctgctgcaggtgcagaccagacccctgagagagcccagccccagcagcagcagcctggccctgatgagcagacccgcccaggtgccccaggccagcggcgagcagcccagaggcaacggcgccaacccccccggcgccccccccgaggtggagcccagcagcggcaaccccagcccccagcaggccgccagcgtgctgctgcccagatgcagactgaaccccgacagcagctgggcccccaagagagtggccaccgccagccccttcagcggcctgcagaaggcccagagcgtgcacagcctggtgccccaggagagacacgaggccagcctgcaggcccccagccccggcgccctgctgagcagagagatcgaggcccaggacggcctgggcagcctgccccccgccgacggcagacccagcagaccccacagctaccagaaccccaccaccagcagcatggccaagatcagcagaagcatcagcgtgggcgagaacctgggcctggtggccgagccccaggcccacgcccccatcagagtgagccccctgagcaagctggccctgcccagcagagcccacctggtgctggacatccccaagcccctgcccgacagacccaccctggccgccttcagccccgtgaccaagggcagagcccccggcgaggccgagaagcccggcttccccgtgggcctgggcaaggcccacagcaccaccgagagatgggcctgcctgggcgagggcaccacccccaagcccagaaccgagtgccaggcccaccccggccccagcagcccctgcgcccagcagctgcccgtgagcagcctgttccagggccccgagaacctgcagccccccccccccgagaagacccccaaccccatggagtgcaccaagcccggcgccgccctgagccaggacagcgagcccgccgtgagcctggagcagtgcgagcagctggtggccgagctgagaggcagcgtgagacaggccgtgagactgtaccacagcgtggccggctgcaagatgcccagcgccgagcagagcagaatcgcccagctgctgagagacaccttcagcagcgtgagacaggagctggaggccgtggccggcgccgtgctgagcagccccggcagcagccccggcgccgtgggcgccgagcagacccaggccctgctggagcagtacagcgagctgctgctgagagccgtggagagaagaatggagagaaagctgtag

SEQ ID NO: 183644 - DNA, 4527 bp, Artificial Sequence
  derived and/or modified sequence
atggccgtcgaaggcagtaccattacatctcgcatcaaaaatctactcaggagtccttctattaaactgagacgtagtaaggctggcaaccgtcgagaggatctctccagtaaggtgacactggaaaaggtccttggtatcaccgtgtccggcggcagggggcttgcatgtgatcccagaagcgggctggtagcatatccagccggatgtgtggtagtgctgttcaaccctaggaagcacaagcagcatcatattctgaacagcagccggaagactatcacagctctcgccttttcacccgatgggaaatatctggtgactggagagagtggacatatgcccgccgtgagggtgtgggatgtcgccgaacatagccaggtggcagaactacaggagcacaaatatggggtggcttgtgtggctttcagcccatcagccaagtacatcgtatcggtgggatatcaacacgacatgattgttaacgtgtgggcgtggaagaagaacatcgtggtggctagcaacaaagtgtcatcccgtgtgactgccgtcagcttttcagaagactgctcttacttcgttaccgccggaaacagacacataaagttttggtacctcgatgactctaagacgtccaaagtgaacgccactgtgccactgctgggcagaagcgggctcctgggagaactgaggaataacctgttcactgatgtcgcatgcggcaggggtaagaaggctgactccacgttttgtattacaagcagcggattgctctgtgagtttagcgatcgccgcctgctcgacaagtgggtggagctgcgcactacagtagcccactgtatctccgtgtctcaggattacatcttctgcgggtgcgctgacggcacagttagattgttcaacccatcaaaccttcacttcctcagtacattgcctcgaccccacgcactcggcactgatattgctagcgtgaccgaggctagccggctattttctggggtagccaacgctcggtaccctgatacaatagcactgacttttgatcctaccaatcagtggctgtcctgtgtgtacaacgaccatagtatttatgtttgggatgtcagagaccccaagaaggtgggtaaagtctactccgcgctctatcacagtagttgcgtgtggtcagtcgaagtctatcccgaagtcaaggattctaatcaggcatgtctcccgccatcctcctttataacctgtagcagtgacaacaccatacggctgtggaatacagagtctagtggcgtgcacggctctaccttgcacaggaatatcctgtcatctgacctgatcaagattatctacgtagatgggaatactcaggcacttttggatacagagctgcccgggggcgacaaggccgacgccagccttttggacccacgggtcggaattaggtccgtttgcgtaagcccaaatggtcagcaccttgcgagcggcgatcgaatgggcactcttagggtgcatgagttgcagagcctttcagaaatgttgaaagtggaagcgcatgactcggagatcctttgcctggagtatagcaagcccgataccggtctgaagctgttggcctcggcatctcgggaccggctaattcatgttctcgatgcgggtcgtgagtactcacttcagcagacactcgacgaacattccagcagtatcactgcagttaaattcgctgctagcgatggacaggtgagaatgatttcttgtggggccgacaagtccatatactttagaacggctcagaaatccggggatggagtgcagttcacaagaactcaccatgtcgtcaggaagaccactctctacgatatggatgtggaaccaagctggaagtacaccgctatcgggtgccaagaccggaacattaggatatttaacatctccagtgggaaacagaagaagctcttcaagggttctcagggagaggacggtacactgatcaaggtacagaccgatccatctggaatctatatcgccacaagttgctcagacaaaaatctgtctattttcgacttttccagtggagagtgtgtggccaccatgtttggacacagcgagatcgttactggcatgaaattttcaaacgactgcaaacatctgatatcggtctccggagactcgtgcattttcgtgtggagactgtcgagcgagatgaccataagcatgcgccagcgcttggctgagctccgacagaggcagaggggcggcaagcaacagggtccatccagtccccagcgcgcctctgggcccaatcggcatcaggctcccagcatgctttcccccggacccgccttgtctagtgactccgacaaagagggcgaggatgaaggcactgaagaagagttgccggcattgccagtgctggctaaatcaaccaagaaggcactagcttctgtgccatctcccgccctaccaaggtcgctatctcactgggaaatgtccagagcgcaggagtccgtgggtttccttgaccccgcacctgccgccaatcccggtccacgtaggcgtgggcgttgggtgcagccgggcgtagaactcagcgtgcggtccatgctagatcttcgacagcttgagaccctagccccgtcactgcaggacccctctcaggacagcctcgcgatcattccctcaggacccaggaaacacggccaggaggccctggagacaagtcttacaagccagaatgagaaaccccctaggccacaggctagtcagccttgtagctatccgcacattataagactgctcagccaggaagagggtgtcttcgcacaagaccttgagcctgctccaatcgaagacggtatcgtgtaccctgagcccagcgacaaccccacgatggacacaagcgagtttcaggtccaagcacccgcacgcggcaccctggggagagtatatccaggatctaggtcaagcgagaagcactcacccgacagtgcttgtagcgtcgactattcttccagttgtctctctagcccggagcatcccaccgaggattcagaatctaccgaaccactgtcagttgatggcatctcaagcgatctggaggaacccgccgagggggatgaggaggaggaagaggaagaggggggcatgggtccgtacggtttgcaagagggatctcctcagacgcccgaccaggagcagttcctcaaacagcacttcgagacactggcctcaggcgcagcgcccggtgctcctgtccaggtgccggaacgcagtgaatctcgatcaatctcttcgcgtttcctgctccaagtacaaacgaggcccttgagggagccgtcaccaagttcctcaagtctggctctgatgagtcggcccgcacaagtgccccaggccagtggggagcaacccagaggcaatggcgctaacccacctggggccccgccagaagttgagccgagcagcggaaacccatcaccccagcaggcggccagtgtcctgctgccacgctgccgtctcaatccggattccagctgggcccctaaacgcgtggcaacagcgagcccgtttagtggattgcaaaaagcccagtccgttcatagcctggttccccaggagaggcacgaagccagtttgcaagctccctcccctggcgctttgttgtccagagaaattgaggcccaggatggcctgggtagtctaccccctgccgatggaaggccctccagaccacattcctaccagaatcctacgacctcatcgatggctaaaatctcccgaagtatctcagtcggagagaacctcggcctcgtagcagagccgcaggcccacgcacccattagagtgagtcctctcagtaaactggctctcccaagtagggcgcaccttgtgcttgatatacctaagccactgcccgatcgacccacactggcggccttttctccagttaccaaaggtcgggctccaggcgaagcggagaaaccggggttccccgttggacttgggaaagctcactctactacagagcgttgggcatgcctgggggagggcacaactcctaaacctagaactgaatgccaggctcatcccggaccttcaagcccttgcgcccaacagctgccggtgagcagcttgtttcagggccccgaaaacctgcagcccccacctccagaaaaaacgccaaacccgatggagtgcacgaagccgggcgctgccctctcccaagactcggagcccgctgtttcactagaacagtgtgagcagttagtggccgaactgcgagggtccgtgaggcaggccgttcgcctgtaccactctgtggccggatgtaagatgccttctgcagagcagagtagaatcgcccaattactaagagatacgttcagctcggtgagacaggagctggaagctgtcgccggcgctgtcttatcttctcccgggagctctcccggggctgtgggtgctgagcagactcaggcccttttggaacagtactcagagctcctactacgggctgttgaacggagaatggaacgcaagctttag

SEQ ID NO: 183645 - DNA, 4527 bp, Artificial Sequence
  derived and/or modified sequence
atggctgtggagggcagcaccatcaccagccgcatcaagaacctgctgcggagccccagcatcaagctgcggcgcagcaaggccggcaacagaagagaggacctgagcagcaaggtgaccctggagaaggtgctgggcatcaccgtgtctgggggccggggcctggcctgtgaccccaggagcggcctggtggcctacccagctggctgtgtggtggtgctcttcaaccccaggaagcacaagcagcaccacatcctgaacagcagcaggaagaccatcacagccctggccttctccccagatggcaagtacctggtgactggagagagcggccacatgcctgctgtgcgggtgtgggatgtggccgagcacagccaggtggccgagctgcaggagcacaagtatggagtggcctgtgtggccttcagccccagcgccaagtacatcgtgtctgtgggctaccagcacgacatgattgtgaatgtgtgggcctggaagaagaacatcgtggtggccagcaacaaggtgagcagccgggtgacagctgtgtccttcagcgaggactgcagctactttgtgacagctggcaacagacacatcaagttctggtacctggatgacagcaagaccagcaaggtgaatgccaccgtgcccctgctgggccgcagcggcctgctgggggagctgaggaacaacctcttcacagatgtggcctgtggccggggcaagaaggctgacagcaccttctgcatcaccagcagcggcctgctgtgtgagttcagtgaccggcggctgctggacaagtgggtggagctgcggaccaccgtggcccactgcatctctgtgtcccaggactacatcttctgtggctgtgctgatggcaccgtgcggctcttcaaccccagcaacctgcacttcctgagcaccctgccccggccccacgccctgggcacagacatcgcctctgtgacagaggccagccgcctcttctctggagtggccaatgcccgctacccagacaccatcgccctgacctttgaccccaccaaccagtggctgagctgtgtgtacaatgaccacagcatctacgtgtgggatgtgcgggaccccaagaaggtgggcaaggtgtacagcgccctgtaccacagcagctgtgtgtggagcgtggaggtgtacccagaggtgaaggacagcaaccaggcctgcctgccccccagcagcttcatcacctgcagcagtgacaacaccatccggctgtggaacacagagagcagtggagtgcacggcagcaccctgcacaggaacatcctgagcagtgacctgatcaagatcatctacgtggatggcaacacccaggccctgctggacacagagctgcccggcggggacaaggcagatgccagcctgctggacccccgggtgggcatccgctctgtgtgtgtgagccccaacggccagcacctggccagcggggacaggatgggcaccctgcgggtgcatgagctgcagagcctgtctgagatgctgaaggtggaggcccatgacagcgagatcctgtgcctggagtacagcaagccagacaccggcctgaagctgctggccagcgccagccgggacaggctcatccacgtgctggatgctggccgggagtacagcctgcagcagaccctggatgagcacagcagcagcatcacagctgtgaagtttgctgccagtgatggccaggtgaggatgatcagctgtggggctgacaagagcatctacttcagaacagcccagaagtctggagatggagtgcagttcaccaggacccaccacgtggtgaggaagaccaccctgtatgacatggatgtggagcccagctggaagtacacagccatcggctgccaggacaggaacatccgcatcttcaacatcagcagcggcaagcagaagaagctgttcaagggcagccagggagaagatggcaccctcatcaaggtgcagacagaccccagcggcatctacatcgccaccagctgcagcgacaagaacctgagcatctttgacttcagcagcggggagtgtgtggccaccatgtttggccacagcgagatcgtgacaggcatgaagttcagcaatgactgcaagcacctgatctctgtgtctggggacagctgcatctttgtgtggaggctgagcagcgagatgaccatctccatgaggcagaggctggccgagctgcggcagaggcagagaggaggcaagcagcagggccccagcagcccccagagggccagcggccccaacagacaccaggcccccagcatgctgagccctggccctgccctgagcagtgacagcgacaaggagggggaggatgagggcacagaggaggagctgcctgccctgcctgtgctggccaagagcaccaagaaggccctggcctctgtgcccagccctgccctgcccaggagcctgagccactgggagatgagccgggcccaggagagcgtgggcttcctggaccctgccccagctgccaaccctggccccaggagaagaggccgctgggtgcagcccggggtggagctgtctgtgcgctccatgctggacctgcggcagctggagaccctggcccccagcctgcaggaccccagccaggacagcctggccatcatccccagcggccccaggaagcacggccaggaggccctggagaccagcctgaccagccagaatgagaagccaccccggccccaggccagccagccctgcagctacccccacatcatccggctgctgagccaggaggagggcgtgtttgcccaggacctggagcccgcccccattgaagatggcatcgtgtacccagagcccagcgacaaccccaccatggacaccagcgagttccaggtgcaggccccagcccggggcaccctgggccgggtgtacccaggcagccgcagcagcgagaagcacagcccagattctgcctgcagcgtggactacagcagcagctgcctgagcagccctgagcaccccacagaggacagcgagagcacagagcccctgtctgtggatggcatcagcagtgacctggaggagccagcagaaggagatgaggaggaggaggaggaggagggcggcatgggcccctacggcctgcaggagggcagcccccagaccccagaccaggagcagttcctgaagcagcactttgagaccctggccagcggggccgcccctggggcccctgtgcaggtgcctgagaggtctgagagccgcagcatcagcagccgcttcctgctgcaggtgcagacccggcccctgcgggagcccagccccagcagcagcagcctggccctgatgagcaggcctgcccaggtgccccaggccagcggggagcagcccagaggaaatggagccaaccccccaggggcccctcctgaggtggagcccagcagcggcaaccccagcccccagcaggccgcctctgtgctgctgccccgctgccgcctgaacccagacagctcctgggcccccaagagggtggccacagccagccccttcagcggcctgcagaaggcccagagcgtgcacagcctggtgccccaggagagacatgaggccagcctgcaggcccccagccctggggccctgctgagccgggagattgaggcccaggacggcctgggcagcctgcccccagcagatggccggcccagccggccccacagctaccagaaccccaccaccagctccatggccaagatcagccgcagcatctctgtgggggagaacctgggcctggtggccgagccccaggcccacgcccccatccgggtgagccccctgagcaagctggccctgcccagccgggcccacctggtgctggacatccccaagcccctgcctgaccggcccaccctggccgccttcagccctgtgaccaagggccgggcccctggagaggccgagaagccaggcttccctgtgggcctgggcaaggcccacagcaccacagagcgctgggcctgcctgggggagggcaccacccccaagcccaggacagagtgccaggcccaccctggccccagcagcccctgtgcccagcagctgcctgtgagcagcctcttccagggccctgagaacctgcagcccccacctcctgagaagacccccaaccccatggagtgcaccaagccaggggccgccctgagccaggacagcgagcctgctgtgtccctggagcagtgtgagcagctggtggccgagctgcggggctctgtgcggcaggccgtgcggctgtaccacagcgtggccggctgcaagatgcccagcgctgagcagagcagaattgcccagctgctgcgggacaccttcagctctgtgcggcaggagctggaggccgtggccggggctgtgctgagcagccctggcagcagccctggagctgtgggcgctgagcagacccaggccctgctggagcagtacagcgagctgctgctgcgggctgtggagaggaggatggagaggaagctgtag

SEQ ID NO: 183646 - DNA, 4527 bp, Artificial Sequence
  derived and/or modified sequence
atggccgtggagggcagcaccatcaccagccggatcaagaacctgctgagaagcccatcgattaagcttagaagaagtaaggccggcaatcgccgagaagacttgagctccaaggtcactctggaaaaggtgctcggcatcaccgtatcgggtggtcggggtctagcctgtgacccccggagcggcctcgtagcctacccggcagggtgtgtcgtggtcctattcaatccacgaaagcacaagcaacaccatatcctgaactcttccaggaaaactattacagcacttgctttcagccctgatggcaaatatcttgtaacaggtgagagcggacatatgcccgccgtccgggtatgggatgtagctgagcattcacaggtggccgagctacaggaacataaatacggggtggcgtgtgtggcattctctcctagcgccaaatatatcgtttcggtgggctaccagcatgatatgatagtcaatgtgtgggcctggaagaagaatatcgtcgtggctagtaataaggtaagcagtagggtgacggccgtttctttctccgaggattgctcctattttgtcaccgccggaaatcgccacattaagttctggtatctcgatgactcaaagacatcaaaggttaacgccacggtgcctctcttggggcggtctggcctgctgggagaacttcgaaataatctttttacagatgtagcttgtggcagaggcaaaaaagccgattccaccttttgcataacctcatctggattgctttgcgaattttctgaccggcggctcttggacaagtgggtggaactgagaacgacagtggcacactgtatcagtgtcagccaagattacatattctgcggctgtgctgatggcaccgtacgtttgtttaatccctctaacctgcacttcctttctactctgccccggcctcatgcccttggtaccgacattgcaagcgtcacggaagctagccggctgttttccggagtggccaacgctcgctatcccgatacaatcgcgttgactttcgaccctaccaaccagtggctgagttgtgtgtataatgatcactcaatctacgtgtgggacgtgcgagacccaaagaaggttggcaaggtttactccgcactgtaccattcttcttgtgtgtggagcgtggaggtgtatcctgaggtgaaggacagtaaccaggcctgtctcccaccatcctcatttattacctgcagctccgataataccatcagactctggaacacggaaagtagtggcgtacacgggagtaccttgcacagaaatatattgagctccgatttaatcaagataatctatgtggacggtaacacccaagccctgctggacactgaactgccagggggcgacaaagccgatgcctctctcctcgatcctagggtgggaatcaggtccgtgtgtgtctcccccaatgggcagcacttggcaagcggagataggatgggaaccctaagggtgcacgaacttcagtccctgtctgaaatgcttaaggtagaagctcacgattccgagatactgtgcctagaatactccaaacctgatacaggactgaagctgctggcatcggcatcccgcgatcggctcattcacgtgctcgatgccgggcgtgaatattctctccagcagacactggatgaacatagctcctccataaccgctgtaaagtttgctgccagcgatggccaggtcagaatgattagttgcggtgccgacaaatctatttatttccggacggcacaaaagtccggagatggcgtgcagttcactcggactcatcatgtcgttcgaaagacaaccctgtacgatatggacgtagaaccttcttggaagtacacggcgatcggctgccaggatagaaatatccgaatcttcaatatctcttccggtaagcagaagaaattgttcaagggtagtcagggggaagacgggaccttgattaaagtgcagacagaccctagcgggatttacattgcgaccagttgttctgataaaaatctgtctatctttgacttttcaagcggagaatgcgtggccacaatgttcggtcactccgagatcgtgactgggatgaagttcagtaatgattgtaagcacctgatcagcgtttcaggcgatagctgtattttcgtctggcgtctgtctagtgagatgaccatcagtatgagacagagactggctgagcttcgccagaggcagaggggcggtaaacagcagggcccaagtagccctcagagggcctctggccctaacagacaccaggcaccatctatgctgtctccaggtcctgctctatcgtccgattctgacaaggaaggcgaagacgaaggcaccgaagaagagttgcccgctctgccagtactggctaaatcaacaaaaaaggcattggcgtcagtcccctcacccgccctgcctaggagcttgagtcactgggaaatgtcccgggcccaagagagtgtgggcttcctagatcctgctcctgccgccaatcccggcccacggcgtcggggcaggtgggtccagccaggagtggagctttcagtgcggagcatgctcgatctgaggcagttggaaactctggccccaagcctgcaggaccctagccaagacagccttgccattatcccctcaggaccccgtaaacacgggcaagaggcccttgaaacttctctgacatcacaaaacgagaaaccaccaagaccacaggccagccagccctgttcatacccgcatattatccggttgctctcccaggaagaaggggtgtttgctcaggacctcgagccagcacctatcgaagatgggatagtgtaccccgaacccagtgataatcccactatggatacatctgagtttcaggttcaggctccagcacggggcactttaggacgggtttaccctggctcacgctctagcgaaaaacattcccccgattctgcctgctccgttgactattcatcttcgtgtctctcctcccctgaacacccaacagaggacagtgagtcgaccgagcccctttccgtggacggcatttcgtccgacttggaagagcctgccgaaggcgacgaggaagaagaagaagaggagggcggcatgggcccttacggcttgcaggagggatccccacagactccagatcaggagcagtttttaaagcagcatttcgaaacattggccagtggcgctgcccccggcgcccccgtgcaggtcccagagcggtcagagtcacgtagcatttcgtcacggttccttctgcaagtccagactaggccattacgggagccgtccccttcttcttccagcttagccttgatgagtcggccagcacaagtgccacaggccagcggcgagcaacctcggggaaatggcgccaatccccctggcgccccccccgaagtcgaaccgagctcggggaatccatctccccagcaggccgctagcgtcttattaccaagatgcagattgaacccagacagtagctgggcgccaaagagagtggctacagcgtcaccatttagtggcctgcaaaaagcccaatctgtccatagccttgtcccccaggaaagacacgaagcgtcattacaggccccctcccccggggcattactctcaagagagatcgaagctcaagacggtctcgggtccctccctccagccgatgggcggcccagtaggcctcacagctatcagaaccctacaacctcctccatggccaagatctctagaagtatctcagtgggcgaaaatttaggattggtagctgaaccgcaggcacacgccccaatacgagtatcccctctgagcaagctcgctctgccctcccgagcccacttggtccttgacatcccaaagccactgcccgatcgacctaccctcgcagcattttcgcccgtgactaagggacgcgcccccggcgaagcagagaaacccggattccccgtcggcctggggaaggcccattccaccacagaacgctgggcctgcttaggcgagggcactactcctaagcctcgcaccgaatgtcaggcacaccccggtccgagttcaccttgtgcccaacagttgcccgtttcatctctgtttcaaggccccgaaaaccttcagcccccccctcctgaaaaaacccctaaccccatggaatgtaccaaacctggagccgccctctctcaggactcagagcccgcagtgagtctcgagcagtgcgaacagctggtcgccgaacttcggggttctgttagacaggcagtgagactataccactcagtcgcagggtgtaaaatgccttccgccgaacaatcacggatagcccagctgttaagagacacctttagtagcgtgcgtcaggaattggaagctgttgcaggggcggtgctctcaagccctggcagcagcccgggagctgtgggggctgagcagacgcaagcgctgctggagcagtacagtgaactgctcctgcgagccgtcgagcggaggatggaacgcaagctctag

SEQ ID NO: 183647 - DNA, 6879 bp, Artificial Sequence
  derived and/or modified sequence
ggctccgcccacccagcccgcggcttggcccaggcggtagttcgcgttttgagccgatcgtgccaccatagctcctgctgctgcctctaccgctgcggctaccgcggcggagctgaaattgccgaacgcgatgcccgagggcgctgtgagcggggtggccttagctcgccgaggctggtcagtgagagggcatactgggaagccctctggagtgggaagacagtgccgctgttgagacaagacccaggactgggccggggactgtcccaaagggtttctcgtcataatggctgtggaagggtcaaccattaccagccggatcaagaatctgttgagatctccatccatcaaactgcgcaggagtaaggcaggaaaccgacgagaggacctcagctccaaggtgaccttggagaaggtgctgggaattacagtgtctggaggcagaggacttgcctgtgacccccgatcaggtttagttgcttacccagcagggtgtgtggttgtgttgttcaatccccggaaacacaaacagcaccacatcctcaacagttccaggaaaaccatcactgcccttgccttctcccctgatggcaagtacttggtcactggagagagtgggcacatgcctgccgtgcgggtttgggacgtggcagagcacagccaggtggccgagctgcaggagcacaagtatggtgtggcttgtgtggccttctctcctagcgccaagtacattgtctctgtgggctaccagcatgacatgatcgtcaacgtgtgggcctggaagaaaaacattgtggtggcctccaacaaggtgtccagtcgggtgacagcagtgtccttctctgaggattgcagctactttgtcactgcaggcaaccgacacatcaaattctggtatctcgatgacagcaagacctcaaaggtgaatgccactgtgcccttgctgggccgctcagggctgctgggagagctacggaacaacctattcactgatgtggcctgtggcagaggaaaaaaggcggacagtaccttctgcatcacgtcctcagggctgctgtgcgagttcagtgatcgaaggcttttggacaagtgggtggagctgagggtctaccccgaggtgaaggatagtaaccaggcctgcctgccccccagttcctttattacctgctcctcagacaacaccatccgcctgtggaacacagagagctccggggtgcatggctccaccctccaccgaaacatcctcagcagtgacctcattaaaatcatctatgtggatgggaacacccaggccctgctggacacagagctgcctggaggagacaaagctgatgcatccctgttggatccccgcgtgggcatccgctcggtgtgtgtcagccccaatggacagcatctagcatcaggggaccgtatgggcacacttagggtgcacgaacttcagtccctgagtgagatgctgaaggtggaggcccatgactctgagattctgtgcctggagtattctaagccagacacaggtctgaaactgctagcatcggcgagccgggaccggctgatccatgtgctggatgccgggcgggagtacagcctacagcagacgctggacgaacactcatcctccatcactgctgttaagtttgcagccagtgatgggcaagtccgcatgatcagctgtggagcagacaagagcatctacttccgcactgcgcagaagtctggagatggagtgcagttcacacggacacaccacgtggtgcggaagacgaccctctatgacatggatgtggagcccagctggaagtacacggctatcggctgccaggaccgaaatattcggatatttaacatcagcagtggaaagcagaagaagctgtttaaagggtcacagggtgaggacggcacactcattaaggtgcagacagacccctcagggatctacattgccaccagctgttctgacaagaatctctccatttttgacttctcctcaggcgagtgcgtggccaccatgtttggccactcagagattgtcactggcatgaaatttagtaatgattgtaaacatctcatctctgtgtctggggacagctgcatatttgtgtggcgcctgagctctgagatgaccatcagcatgaggcagcgtctggccgagttgcgccagcgtcagcggggcggcaagcagcaaggaccatcctctccccaaagggcttctggacccaaccggcaccaggccccatcaatgctgtctcctggaccggctctctcatcagacagtgacaaggagggagaagatgaggggactgaagaagaacttccagcactgcccgtccttgccaagagtaccaagaaggcactggcctcggtccccagcccagctttgccccgaagcctgtcccactgggagatgagtcgggcacaggagtccgtggggttcctggacccagctcctgcagccaacccaggacccagaagaagagggcgctgggttcagccaggtgtggaactgagcgttagatccatgctggatctgcggcagctggaaacactggccccaagcctgcaggaccctagccaggactcgctggccatcatcccatctggtcccaggaagcatgggcaggaggcccttgagacttcactcactagccagaatgaaaagccccctcggcctcaggcttcccaaccttgttcctatccccatattatccgattattgtcacaagaggaaggggtctttgcccaagatctggaacctgcacccattgaagatggtattgtctacccggagccgagtgacaaccccaccatggataccagtgagttccaagtgcaggctccagcccggggaactctgggaagagtgtacccaggcagcaggagctcagaaaagcacagccctgacagtgcctgctctgtggattacagcagcagctgcctttccagcccggagcaccccactgaagactctgagagcacggagcccctcagtgtggatggcatctcctcagaccttgaagagccagctgagggtgatgaagaagaggaagaagaggagggaggcatgggcccctatgggctacaggagggcagcccccagactccagaccaggagcagtttctaaaacagcactttgagactctggccagtggagctgctccaggggccccagtgcaggtcccagagaggtcagagtctcggagtatctcttcacgattcctgttgcaagtacagacccgcccactcagggaaccatccccatcctcctcaagcctggcactgatgtcgagaccagcccaggtgccacaggcatctggtgagcagccgagaggcaatggtgccaatccccctggagcacccccggaggtggaaccgtcctctggcaaccccagcccccagcaggcagcctctgtgctgttgccacgatgccgtctcaaccctgacagcagctgggctcccaagagagtggccacagccagccccttttctggactccagaaggcccagtctgtgcacagtctggtgccacaggaaagacatgaggccagtctgcaggccccttcaccaggcgcactgctgtctcgggagatcgaagctcaggatggtctgggctccctgcccccagctgatggccgtccgtctcggcctcactcctatcagaaccccaccaccagttccatggccaagatatcccgcagtatctctgttggggagaacctgggcctggtggctgaacctcaagctcatgcccccatccgagtctcaccactcagcaagctggccctgcccagccgggctcacctggtcctggacatccccaaaccactgcctgaccgtcctaccctggctgcattctctcctgtcaccaaaggccgggcccctggcgaggcagaaaagcctggcttcccggtgggcctaggaaaagctcacagtacaactgagagatgggcctgtttgggggagggcaccactcccaagcctaggacagagtgccaggctcatcctgggcccagcagcccctgtgcccagcaactgccagtcagcagcctcttccaaggccctgaaaacttgcagcccccaccccctgagaagactcccaaccccatggaatgcaccaagccaggggcagccctgagccaggactcagagccagcggtgagcctggagcagtgtgagcagctggtggcagagctccgcggcagcgtgcgccaggcagtgcggctctaccactcggtggctggctgcaagatgccctcagcagagcaaagtcggattgcccagctcctcagagacaccttctcttcagtgcgacaggagctggaagctgtggctggggcagtgctgtccagcccaggcagcagccctggggctgtgggagccgagcagacacaggccctgctggagcaatactcagaactgttgcttcgagccgtggaacggcgtatggaacgcaaactctgagttctggaagcctgtcccaagtgaatgaatgctccagcgattccaaactgcagcccctctgcccctcaccaaaacctgcggggctgcttggagtggaaagcagggagcagtgttcagaggcaaagcagccttcccagccgctcctcgtggggggcctgtatttattaatttatttccctgactgttgcctcacttccttggaactcctgcctccacagcccctccagtggcagggacaggtcttgggtctttgtcatcttggtgctgtgagaggtaggagggcagcctgccccatctaggaatctgggaagggctggccctctcttagaagccatttgaaattactgcagggattagctccctgtggtggagcatacacagggtactctggggtcgaggtgagaggtgatgtggtattcagtgcccgtcagccaactgtgggccttcacctctacctgcacttcccctctcacaccagctgcactcccgtggctgccagagcagggtggttttccccaatacctggagctcagaaaggcagagccatctggccctccagggtgtccccagccatcaggagacttgagttggtatttggacctgagcccgcacattccactcccattctccctccaagaggggcccagcattgtatttccctgtgaccccttactctcctggccagaacttgagccagctgtgggatgttgctgcaggacagtaagccctcacctgggcaaacatgaagctctggcctcctttcctcagccccttgttcttccctgtcctccaccctggaccccagccggctgctggagcccagaggccaccttctccctgcatcctgaatgatgcttagtcagaagcctgtgttggaacatccctcgtttacggggcgctggcctacctcctgaggacctcagccacagatgagatcacacgcatgcacgtgcacacatgtacacacacacacctacctgcacagcacgctgttgagtgttggttgctagagtatctggctggctgctgtgtgcctggtttcctcacatcctgcctcagcttcaccaccctggcttatgtggaacacctatcagggagcagaaaaggggtgcagtacactaagtgaacccagattctggattcttggtgtccacagcctagctgatacgagatagcccataggacacctggtttaggtagaaggagcctcctcaaaggcagtgctgggcacccacgggtgtgctggatactggagtttgagaggagggaggtgctggggccaaaggagacactagaaaagtggtagatgggacaggtaagtggcagaggtgaggggataagttagaatgtaaaagggcagtaattaggggtgagggaaaggagataggggaccctaggaggtagagtgggaccatgtcgtgaggcagttgaagagttgaggaaaggtttttctgggccctactgctcccctctgctgcaggtaagtcagagcagctttaccacagcttcaggccacgagagccccttcacccgccctgctgcgccataggcagaggcttataaagaaatgggttctgggccaggtgtggtggctcaagcctgtaatcccagcactttgggaggccgaggcgggtggatcacctgaggttaggagttcgagatcagcctggccaacatggtgaaaccctgtctactaaaaataaaaaaattagctgggcgtggtggtgggcgcctgtaatcccagctactcgggaggtttaggcaggagaatcgcttgaaccctggaggtggaggtggaggttgcagtgagccgagatcgcgccattgcactccaacctaggtgacaaagctacacgccatctcaaaaaaaaaaaagaaaaagggttacaaaaggttcccagctccggggcatcagcctgagtgcgcttgagctgctccaaacctggcccttccccactcctctagcatcgccacccgcatggccctggaactcccgcggcggcgggggcgggcccgtgcctgctgtgccccgacttcccacaccagccgcgcccaccgcaggtgggactcaggttcgccctctgggccaggtccttcacgaggagggagctacccttcgccagaagtttgtgagaatgtggccgcccttttcctgccctctgccccatgtgggtggggggcctcgtggcccggccggcgccccgtccccttctgcatgtctgaggccaccggcaaccgccgccccactccagatttgcccccgccttgttttgaaagccccttatttataacttttatactttgtgcaggtcgcggcgcttcctgcctcatcctcggctgcatggggcgggggcgctgtttttaacgtgcccgtttgtactgatgtatgaacttgtcaataaacacaattgtttgtt

SEQ ID NO: 183648 - DNA, 7232 bp, Artificial Sequence
  derived and/or modified sequence
ggctccgcccacccagcccgcggcttggcccaggcggtagttcgcgttttgagccgatcgtgccaccatagctcctgctgctgcctctaccgctgcggctaccgcggcggagctgaaattgccgaacgcgatgcccgagggcgctgtgagcggggtggccttagctcgccgaggctggtcagtgagagggcatactgggaagccctctggagtgggaagacagtgccgctgttgagacaagacccaggactgggccggggactgtcccaaagggtttctcgtcataatggctgtggaagggtcaaccattaccagccggatcaagaatctgttgagatctccatccatcaaactgcgcaggagtaaggcaggaaaccgacgagaggacctcagctccaaggtgaccttggagaaggtgctgggaattacagtgtctggaggcagaggacttgcctgtgacccccgatcaggtttagttgcttacccagcagggtgtgtggttgtgttgttcaatccccggaaacacaaacagcaccacatcctcaacagttccaggaaaaccatcactgcccttgccttctcccctgatggcaagtacttggtcactggagagagtgggcacatgcctgccgtgcgggtttgggacgtggcagagcacagccaggtggccgagctgcaggagcacaagtatggtgtggcttgtgtggccttctctcctagcgccaagtacattgtctctgtgggctaccagcatgacatgatcgtcaacgtgtgggcctggaagaaaaacattgtggtggcctccaacaaggtgtccagtcgggtgacagcagtgtccttctctgaggattgcagctactttgtcactgcaggcaaccgacacatcaaattctggtatctcgatgacagcaagacctcaaaggtgaatgccactgtgcccttgctgggccgctcagggctgctgggagagctacggaacaacctattcactgatgtggcctgtggcagaggaaaaaaggcggacagtaccttctgcatcacgtcctcagggctgctgtgcgagttcagtgatcgaaggcttttggacaagtgggtggagctgaggaccacagtggcccactgcatctctgtgagccaagactacatcttctgtggctgtgctgatggcaccgtgcgccttttcaacccctctaacctgcacttccttagcaccttgccccgaccccatgctctggggacagacattgctagcgtcaccgaggccagtcgcctcttctctggagtggcgaatgccaggtatccagacaccattgccttgacctttgatcctactaatcagtggctgtcttgtgtgtacaacgatcatagcatttatgtttgggatgtgagggaccccaagaaagtgggcaaggtgtactcggctctgtatcattcttcctgcgtctggagtgtggaggtctaccccgaggtgaaggatagtaaccaggcctgcctgccccccagttcctttattacctgctcctcagacaacaccatccgcctgtggaacacagagagctccggggtgcatggctccaccctccaccgaaacatcctcagcagtgacctcattaaaatcatctatgtggatgggaacacccaggccctgctggacacagagctgcctggaggagacaaagctgatgcatccctgttggatccccgcgtgggcatccgctcggtgtgtgtcagccccaatggacagcatctagcatcaggggaccgtatgggcacacttagggtgcacgaacttcagtccctgagtgagatgctgaaggtggaggcccatgactctgagattctgtgcctggagtattctaagccagacacaggtctgaaactgctagcatcggcgagccgggaccggctgatccatgtgctggatgccgggcgggagtacagcctacagcagacgctggacgaacactcatcctccatcactgctgttaagtttgcagccagtgatgggcaagtccgcatgatcagctgtggagcagacaagagcatctacttccgcactgcgcagaagtctggagatggagtgcagttcacacggacacaccacgtggtgcggaagacgaccctctatgacatggatgtggagcccagctggaagtacacggctatcggctgccaggaccgaaatattcggatatttaacatcagcagtggaaagcagaagaagctgtttaaagggtcacagggtgaggacggcacactcattaaggtgcagacagacccctcagggatctacattgccaccagctgttctgacaagaatctctccatttttgacttctcctcaggcgagtgcgtggccaccatgtttggccactcagagattgtcactggcatgaaatttagtaatgattgtaaacatctcatctctgtgtctggggacagctgcatatttgtgtggcgcctgagctctgagatgaccatcagcatgaggcagcgtctggccgagttgcgccagcgtcagcggggcggcaagcagcaaggaccatcctctccccaaagggcttctggacccaaccggcaccaggccccatcaatgctgtctcctggaccggctctctcatcagacagtgacaaggagggagaagatgaggggactgaagaagaacttccagcactgcccgtccttgccaagagtaccaagaaggcactggcctcggtccccagcccagctttgccccgaagcctgtcccactgggagatgagtcgggcacaggagtccgtggggttcctggacccagctcctgcagccaacccaggacccagaagaagagggcgctgggttcagccaggtgtggaactgagcgttagatccatgctggatctgcggcagctggaaacactggccccaagcctgcaggaccctagccaggactcgctggccatcatcccatctggtcccaggaagcatgggcaggaggcccttgagacttcactcactagccagaatgaaaagccccctcggcctcaggcttcccaaccttgttcctatccccatattatccgattattgtcacaagaggaaggggtctttgcccaagatctggaacctgcacccattgaagatggtattgtctacccggagccgagtgacaaccccaccatggataccagtgagttccaagtgcaggctccagcccggggaactctgggaagagtgtacccaggcagcaggagctcagaaaagcacagccctgacagtgcctgctctgtggattacagcagcagctgcctttccagcccggagcaccccactgaagactctgagagcacggagcccctcagtgtggatggcatctcctcagaccttgaagagccagctgagggtgatgaagaagaggaagaagaggagggaggcatgggcccctatgggctacaggagggcagcccccagactccagaccaggagcagtttctaaaacagcactttgagactctggccagtggagctgctccaggggccccagtgcaggtcccagagaggtcagagtctcggagtatctcttcacgattcctgttgcaagtacagacccgcccactcagggaaccatccccatcctcctcaagcctggcactgatgtcgagaccagcccaggtgccacaggcatctggtgagcagccgagaggcaatggtgccaatccccctggagcacccccggaggtggaaccgtcctctggcaaccccagcccccagcaggcagcctctgtgctgttgccacgatgccgtctcaaccctgacagcagctgggctcccaagagagtggccacagccagccccttttctggactccagaaggcccagtctgtgcacagtctggtgccacaggaaagacatgaggccagtctgcaggccccttcaccaggcgcactgctgtctcgggagatcgaagctcaggatggtctgggctccctgcccccagctgatggccgtccgtctcggcctcactcctatcagaaccccaccaccagttccatggccaagatatcccgcagtatctctgttggggagaacctgggcctggtggctgaacctcaagctcatgcccccatccgagtctcaccactcagcaagctggccctgcccagccgggctcacctggtcctggacatccccaaaccactgcctgaccgtcctaccctggctgcattctctcctgtcaccaaaggccgggcccctggcgaggcagaaaagcctggcttcccggtgggcctaggaaaagctcacagtacaactgagagatgggcctgtttgggggagggcaccactcccaagcctaggacagagtgccaggctcatcctgggcccagcagcccctgtgcccagcaactgccagtcagcagcctcttccaaggccctgaaaacttgcagcccccaccccctgagaagactcccaaccccatggaatgcaccaagccaggggcagccctgagccaggactcagagccagcggtgagcctggagcagtgtgagcagctggtggcagagctccgcggcagcgtgcgccaggcagtgcggctctaccactcggtggctggctgcaagatgccctcagcagagcaaagtcggattgcccagctcctcagagacaccttctcttcagtgcgacaggagctggaagctgtggctggggcagtgctgtccagcccaggcagcagccctggggctgtgggagccgagcagacacaggccctgctggagcaatactcagaactgttgcttcgagccgtggaacggcgtatggaacgcaaactctgagttctggaagcctgtcccaagtgaatgaatgctccagcgattccaaactgcagcccctctgcccctcaccaaaacctgcggggctgcttggagtggaaagcagggagcagtgttcagaggcaaagcagccttcccagccgctcctcgtggggggcctgtatttattaatttatttccctgactgttgcctcacttccttggaactcctgcctccacagcccctccagtggcagggacaggtcttgggtctttgtcatcttggtgctgtgagaggtaggagggcagcctgccccatctaggaatctgggaagggctggccctctcttagaagccatttgaaattactgcagggattagctccctgtggtggagcatacacagggtactctggggtcgaggtgagaggtgatgtggtattcagtgcccgtcagccaactgtgggccttcacctctacctgcacttcccctctcacaccagctgcactcccgtggctgccagagcagggtggttttccccaatacctggagctcagaaaggcagagccatctggccctccagggtgtccccagccatcaggagacttgagttggtatttggacctgagcccgcacattccactcccattctccctccaagaggggcccagcattgtatttccctgtgaccccttactctcctggccagaacttgagccagctgtgggatgttgctgcaggacagtaagccctcacctgggcaaacatgaagctctggcctcctttcctcagccccttgttcttccctgtcctccaccctggaccccagccggctgctggagcccagaggccaccttctccctgcatcctgaatgatgcttagtcagaagcctgtgttggaacatccctcgtttacggggcgctggcctacctcctgaggacctcagccacagatgagatcacacgcatgcacgtgcacacatgtacacacacacacctacctgcacagcacgctgttgagtgttggttgctagagtatctggctggctgctgtgtgcctggtttcctcacatcctgcctcagcttcaccaccctggcttatgtggaacacctatcagggagcagaaaaggggtgcagtacactaagtgaacccagattctggattcttggtgtccacagcctagctgatacgagatagcccataggacacctggtttaggtagaaggagcctcctcaaaggcagtgctgggcacccacgggtgtgctggatactggagtttgagaggagggaggtgctggggccaaaggagacactagaaaagtggtagatgggacaggtaagtggcagaggtgaggggataagttagaatgtaaaagggcagtaattaggggtgagggaaaggagataggggaccctaggaggtagagtgggaccatgtcgtgaggcagttgaagagttgaggaaaggtttttctgggccctactgctcccctctgctgcaggtaagtcagagcagctttaccacagcttcaggccacgagagccccttcacccgccctgctgcgccataggcagaggcttataaagaaatgggttctgggccaggtgtggtggctcaagcctgtaatcccagcactttgggaggccgaggcgggtggatcacctgaggttaggagttcgagatcagcctggccaacatggtgaaaccctgtctactaaaaataaaaaaattagctgggcgtggtggtgggcgcctgtaatcccagctactcgggaggtttaggcaggagaatcgcttgaaccctggaggtggaggtggaggttgcagtgagccgagatcgcgccattgcactccaacctaggtgacaaagctacacgccatctcaaaaaaaaaaaagaaaaagggttacaaaaggttcccagctccggggcatcagcctgagtgcgcttgagctgctccaaacctggcccttccccactcctctagcatcgccacccgcatggccctggaactcccgcggcggcgggggcgggcccgtgcctgctgtgccccgacttcccacaccagccgcgcccaccgcaggtgggactcaggttcgccctctgggccaggtccttcacgaggagggagctacccttcgccagaagtttgtgagaatgtggccgcccttttcctgccctctgccccatgtgggtggggggcctcgtggcccggccggcgccccgtccccttctgcatgtctgaggccaccggcaaccgccgccccactccagatttgcccccgccttgttttgaaagccccttatttataacttttatactttgtgcaggtcgcggcgcttcctgcctcatcctcggctgcatggggcgggggcgctgtttttaacgtgcccgtttgtactgatgtatgaacttgtcaataaacacaattgtttgttaa

SEQ ID NO: 183649 - DNA, 4527 bp, Artificial Sequence
  derived and/or modified sequence
atggcggtagaggggtccaccattacctccagaatcaagaatctgctacgctctccctcgattaaactgcgcagaagtaaggcgggtaaccggcgtgaggacctgtcttcgaaggtaacccttgagaaagtgctcggtattactgtgagcgggggtcgaggtttagcatgtgatcccagatccggactagtggcctaccctgccggatgtgttgtggtccttttcaacccaaggaagcacaaacagcatcacattctgaacagttcccgcaagacgattaccgccctagccttctcgccagacggtaaataccttgtgaccggagaaagcggccatatgcctgctgtaagggtgtgggacgttgcagagcactcccaagttgctgagctgcaggagcacaaatatggggtggcctgtgttgccttcagcccctcagccaagtatattgtatcggtggggtaccagcacgatatgatcgtaaatgtgtgggcttggaagaagaacattgtcgtcgcgtccaataaggttagtagtagagttacggcagtgtcctttagcgaggactgcagttacttcgttacagcaggaaaccgccacatcaaattttggtatttggacgacagcaaaacttccaaggtgaatgcaacagtccctttactgggtcgtagcggccttctgggggagctgcgtaataatctgttcaccgatgtcgcttgtggccgtgggaaaaaagcagattctaccttctgcatcactagcagcggcctgctctgtgagttcagcgatcggaggcttctggacaaatgggtggaacttcgaactactgtggctcactgcatcagcgtgtctcaggattatatcttctgtgggtgtgctgacggcaccgtgagactctttaatccgtctaaccttcatttcttgtcaaccctgcccagaccgcacgccctcgggaccgatattgcctctgtgactgaggcatcacggctgttctctggcgtggccaatgccaggtaccccgatacaattgcccttacttttgaccccacaaaccaatggctgtcctgcgtgtataatgatcattccatttatgtttgggatgttcgcgaccctaaaaaggtggggaaggtctattcagccctttatcactcaagctgcgtttggtccgtcgaggtttaccccgaggtcaaagacagtaaccaagcctgcttacccccttcctcctttataacatgttcctccgataacacaatcagactgtggaacacggaaagtagcggcgtccatggctctaccctacatagaaatattctcagctccgacctcatcaagatcatatacgtggatggcaacacccaagctctgctggacaccgagctacctgggggagacaaggccgacgctagcctcctcgacccgagagttggcatccgctccgtctgcgtctccccaaatggccagcacctggccagtggggacaggatgggcacgctgcgtgtgcacgaactgcagtcactatcagaaatgctgaaagttgaggcccatgattcagagattctctgcttagagtacagcaaacccgacactggactcaaactgttggcatcagctagtcgcgataggttgattcacgtgctggacgctggtcgggagtactccctccagcagacgttggacgagcactccagttccatcactgctgtcaaattcgccgcttccgatgggcaggtacggatgatctcgtgcggcgctgacaagagcatctattttcgaaccgcacagaagtcaggggacggcgtccagttcactagaacccaccacgttgtccggaagacaactttgtacgacatggatgtggagccaagctggaagtacactgcaattggctgccaagataggaacataagaattttcaacatatctagtggcaagcagaagaaacttttcaaaggctcccagggggaggacggtaccctcattaaggtccagacagatccatcgggtatctatatcgccaccagttgcagcgacaaaaatctgagcatcttcgattttagcagcggtgagtgcgtcgcaactatgtttggccactccgaaattgtgaccgggatgaagttctcaaacgactgcaagcacctcatctcagtttcaggggacagttgcatctttgtttggcgcctttcttcagagatgacaatctccatgcgccagcgtcttgcggagctccgccagagacagagaggagggaaacaacaggggccatctagcccccagcgtgctagtggcccaaacaggcaccaggcgccaagcatgctctcacctggccctgctcttagtagcgacagcgacaaagagggggaggacgaggggacggaagaagagcttccagctctccccgtacttgccaagtcaacaaaaaaggcactagccagcgtcccgtctcctgccttaccccgttccctgtctcattgggagatgtccagagctcaggaatcagtgggattcctcgatccagccccagctgcaaacccagggcctaggagaaggggtcgatgggtgcagcctggtgttgagctttccgttaggagcatgctcgatctgcgccagttggagacattggccccttcgctgcaggacccatcccaggattccctggccatcattcctagtggaccacgaaagcatggacaagaagcactcgagacttctctgacaagtcagaatgagaaacctccgcgaccacaagcatcccagccatgtagctacccccacatcattcgtttactgtcccaggaagaaggagtctttgcacaggaccttgaacccgcaccaatcgaggacggcattgtgtacccggagcccagtgacaatcccaccatggacacttcggagtttcaggtgcaggctcccgcacgtgggaccctgggtagagtctaccccggtagccgcagttccgaaaaacacagccccgactctgcatgctctgttgactactcatcttcttgtctctcctccccagaacaccccaccgaggacagcgaatctacagagcccctcagtgtcgatggcatcagcagcgatttggaagaacccgcagaaggtgatgaagaagaggaggaggaggaggggggtatgggaccatatgggctacaagagggatccccccagacacctgatcaagagcagtttctcaagcagcattttgaaaccttggcaagtggcgcagcccctggggcacccgtgcaagtccctgagcggtcagaatctcgcagcattagtagtcgttttcttctccaggtgcagacacgccctctgagggaacccagcccatcttcaagctcccttgcacttatgagtcgacctgcccaggttcctcaggcctctggagagcagccccgagggaacggcgcaaatccccctggcgcaccccctgaagtggagcctagcagtggcaacccatcaccacaacaagccgcatccgtactgctgccacgctgtagactgaacccagactcctcttgggcacccaaaagagtcgcaactgccagcccgtttagcggtctgcagaaggcacagtctgtccactccctcgtccctcaggaaagacacgaagccagcctccaggccccatctcccggagccctgttatcaagggagattgaagcccaagacggactgggctcattacctcccgctgatggacggcctagtcggccacactcctatcagaaccccaccacctcatccatggcaaagatttcccggtccatctcagtcggggaaaaccttggcctagttgctgagccacaggcccacgcgcctattagggtgtcacccttgagcaagctagcactgccgtcgcgcgctcaccttgtcttggacattccaaagcccctgccagatcgaccaacccttgccgcatttagcccggttaccaaaggacgcgcacctggagaggcagaaaagccagggtttccagtaggcctgggaaaggcccattcaaccactgagcggtgggcatgcctcggcgaaggcacaaccccgaaaccacgcaccgagtgccaggctcatccgggtccgtcctccccatgtgcccagcagttacccgtttctagcctgttccaggggcctgagaatctgcagcctcctccccctgagaaaactcctaatccaatggagtgcacgaagccaggggcagctctgagccaagacagtgaaccggcagtttccctggagcagtgtgagcagcttgtggctgagctgcgcggatccgtccgtcaagccgtgaggctctaccatagcgtagctggctgcaaaatgccatctgcagagcaatcccgcatagctcagctgctcagggatacattttcgtccgtaaggcaggaactggaagctgtggctggggctgtgttgagttcgcccggttcctcacctggcgctgtcggtgctgaacagacccaagccctcttggagcagtactcagagctgctcttgcgggcagttgaaagaagaatggaacgcaagctttag

SEQ ID NO: 183650 - DNA, 4176 bp, Artificial Sequence
  derived and/or modified sequence
atggccgttgagggcagtactatcacttcccggataaagaatttactgcgatcgccttccatcaagctacggagatccaaggcggggaaccgccgggaagacctgtctagcaaggtcaccctggagaaggtactgggaatcactgtttctgggggtcgtggccttgcatgtgatccccggtctgggttagtcgcatatcctgctggctgcgtggtggtgctcttcaatccgcgcaagcacaaacagcatcacatcctaaactcatcgcggaaaactattacagcactggccttttctccagacgggaaatatctggtcaccggtgaaagtgggcacatgcccgcagtgagggtctgggacgtggccgaacactctcaggtcgcggagctgcaggagcataagtacggcgtcgcatgcgtagcgttctcacctagcgcaaagtatatcgttagcgtaggttaccagcacgacatgatcgtgaacgtctgggcatggaaaaaaaatattgtggttgcaagcaacaaggtttctagtagagtgacagctgtgtcattctccgaggactgttcttacttcgtgacggctggcaaccgccatattaagttctggtaccttgacgactcaaagaccagtaaggtcaatgccacggtaccactactgggccgcagcggcttgctaggcgaactgaggaataatctctttacagacgtggcatgcggtagaggtaaaaaagcagactccacattttgcataacatcttcgggactcctgtgcgaattctctgaccgacggttgctagacaaatgggtggagctacgcgtgtatcctgaggtgaaggactccaaccaggcctgcctgcccccctcctctttcattacctgtagctccgacaacaccatccgcctctggaatactgaaagctctggcgtgcatggctccaccctgcaccggaatattctttcttcagatctgataaagatcatctacgttgacggcaacacccaagccctcctcgatactgagctgcccggaggggacaaagctgacgcaagtctgctcgaccccagagttggcataaggagtgtttgtgtgagtccaaatggccagcatctggcctcaggtgacagaatgggcaccttgcgcgtccacgaacttcagtcactgagtgaaatgctgaaagtagaagctcatgactccgagatcttatgcttagaatattctaagcccgatacaggtctgaaactcctcgcctccgctagccgcgacagactgatccatgtgctggatgcagggagagaatactcactgcagcagacactggatgagcacagctccagcattacagccgtgaaattcgccgcgtcagatggtcaggttcgcatgatcagctgtggtgcagacaagagtatttacttcagaacagcccaaaagagtggcgacggtgttcagtttacccgcactcatcacgtagttaggaagacaacactctacgacatggacgtagagccatcttggaagtatactgcgatcggctgccaggatcgaaatattcgaattttcaacatcagctcagggaagcagaaaaaattattcaaaggcagtcagggcgaagatgggaccttgattaaggtccagactgatcctagtgggatctacattgctacaagttgtagcgacaagaacctgtcgatctttgacttttcctcgggagagtgtgtggcaactatgttcgggcattctgaaatcgtaactggtatgaaattcagtaatgattgcaaacatctgattagcgtgtcaggcgattcatgcatctttgtgtggcgcctgtcttctgaaatgacgattagtatgcgtcagagactggctgagctcagacagagacagaggggagggaagcaacagggtcctagctcaccccagagagcttctggacccaatcgtcatcaagccccttcaatgctgtcacctgggcccgctttatcttccgactcagacaaggaaggggaagacgagggtaccgaagaggagcttcccgccctgccggttcttgccaaaagtactaaaaaagctttggcttcagttccctctcccgccctccctcggagtctgtcgcactgggagatgtcacgcgcacaggaaagcgtggggttccttgaccccgctcctgccgcgaatcccggccctcggaggagaggccgatgggtgcagcccggtgtagagctgagcgtccggagtatgctggatctgagacaactggagactctagcaccctcgctccaggatccctctcaggactcccttgcaattattccctctgggccaagaaagcatggacaggaggccctggaaacttcactaacatcacagaatgagaagccccctcgcccacaagcctctcagccttgtagctaccctcacattatccggctcctgagccaggaagaaggggttttcgcacaggatctcgagcctgcgcccatcgaggacggcattgtttatccagagccctctgataatccgaccatggacacctccgaattccaggtgcaagcccccgccaggggtaccctgggtcgtgtgtacccaggatctaggagctcagagaaacattcaccggacagcgcctgcagtgtggattatagttctagctgtctgagttcgcccgaacatcccactgaggattctgagtctaccgagccactgtctgtggatgggatcagttccgacctggaggagccagcagagggagatgaagaggaagaagaagaggaaggtggcatggggccttatggcttacaagagggctcgccacagacccccgatcaggagcagtttctgaaacagcacttcgagacgcttgcaagcggcgctgccccgggagctcccgtccaggtcccagagcgatccgagtcgcggtcaatttctagtagattcttattgcaggtacagactcgcccccttcgagagccatcccctagttcttcttcgctcgccctgatgtcgcggccagcgcaggtcccccaggcctctggtgagcagcctcgcggcaatggggcaaacccccccggggcaccacctgaagtggagcctagctccggcaacccctctccccaacaggctgcatcagtcctgctgccccggtgcaggctgaaccctgacagcagttgggcgccgaagagagtagccacagccagcccctttagtggtctgcagaaggcccagtcagtgcatagcctggtgcctcaagaaaggcacgaggctagtctgcaggcaccaagccccggggccctcctgagccgtgaaatcgaggcccaggatgggctgggtagtctgccacccgcagatggacgcccttcacggcctcactcataccagaatcccaccacctcgtccatggccaaaattagtcgctccattagtgtgggcgaaaacctgggacttgtcgctgaaccacaggcacacgcgcccatccgtgtgtcccccttgtctaaattagctcttccatccagagcccacctagtgctagatattcctaaacctctgcccgatagaccaacactggctgctttctctccggtaacaaagggccgtgctcccggcgaggcggaaaagcccggattcccggtcggcctggggaaggcccacagtaccactgagcgctgggcttgtcttggggagggcactacccccaagccaaggactgaatgccaggcccatcctggtccgagttctccttgtgcccagcaactgcctgtgagctctctgtttcagggccccgagaacctgcagcctccacctccagaaaaaacccctaatcctatggagtgcaccaagcccggcgcggccctttctcaagactctgaacctgccgtgtcccttgaacaatgcgaacagctggtagctgagctcagaggctctgtgcgccaggcggtgagattgtatcattctgtagccggctgtaaaatgccaagcgctgagcaaagccgaatcgctcaacttttgcgggacaccttttcatcagttcggcaggaactggaggccgtggcaggagccgtactgtccagccctggtagcagtcccggcgccgttggcgctgagcagacccaggccctgttggaacagtatagcgagttgttgctgcgcgcggtcgagcggcgtatggaaagaaagttatag

SEQ ID NO: 183651 - DNA, 4176 bp, Artificial Sequence
  derived and/or modified sequence
atggctgtggagggcagcaccatcaccagccgcatcaagaacctgctgcggagccccagcatcaagctgcggcgcagcaaggccggcaacagaagagaggacctgagcagcaaggtgaccctggagaaggtgctgggcatcaccgtgtctgggggccggggcctggcctgtgaccccaggagcggcctggtggcctacccagctggctgtgtggtggtgctcttcaaccccaggaagcacaagcagcaccacatcctgaacagcagcaggaagaccatcacagccctggccttctccccagatggcaagtacctggtgactggagagagcggccacatgcctgctgtgcgggtgtgggatgtggccgagcacagccaggtggccgagctgcaggagcacaagtatggagtggcctgtgtggccttcagccccagcgccaagtacatcgtgtctgtgggctaccagcacgacatgattgtgaatgtgtgggcctggaagaagaacatcgtggtggccagcaacaaggtgagcagccgggtgacagctgtgtccttcagcgaggactgcagctactttgtgacagctggcaacagacacatcaagttctggtacctggatgacagcaagaccagcaaggtgaatgccaccgtgcccctgctgggccgcagcggcctgctgggggagctgaggaacaacctcttcacagatgtggcctgtggccggggcaagaaggctgacagcaccttctgcatcaccagcagcggcctgctgtgtgagttcagtgaccggcggctgctggacaagtgggtggagctgcgggtgtacccagaggtgaaggacagcaaccaggcctgcctgccccccagcagcttcatcacctgcagcagtgacaacaccatccggctgtggaacacagagagcagcggcgtgcacggcagcaccctgcacaggaacatcctgagcagtgacctgatcaagatcatctacgtggatggcaacacccaggccctgctggacacagagctgcctggaggagacaaggcagatgccagcctgctggacccccgggtgggcatccgctctgtgtgtgtgagccccaacggccagcacctggccagcggggacaggatgggcaccctgcgggtgcatgagctgcagagcctgtctgagatgctgaaggtggaggcccatgattctgagatcctgtgcctggagtacagcaagccagacaccggcctgaagctgctggccagcgccagccgggacaggctcatccacgtgctggatgctggccgggagtacagcctgcagcagaccctggatgagcacagcagcagcatcacagctgtgaagtttgctgccagtgatggccaggtgaggatgatcagctgtggggctgacaagagcatctacttcagaacagcccagaagtctggagatggagtgcagttcaccaggacccaccacgtggtgaggaagaccaccctgtatgacatggatgtggagcccagctggaagtacacagccatcggctgccaggacaggaacatccgcatcttcaacatcagcagcggcaagcagaagaagctgttcaagggcagccagggagaagatggcaccctcatcaaggtgcagacagaccccagcggcatctacatcgccaccagctgcagcgacaagaacctgagcatctttgacttcagcagtggagaatgtgtggccaccatgtttggccacagcgagatcgtgacaggcatgaagttcagcaatgactgcaagcacctgatctctgtgtctggggacagctgcatctttgtgtggaggctgagcagcgagatgaccatctccatgaggcagaggctggccgagctgcggcagaggcagaggggcggcaagcagcagggccccagcagcccccagagggccagcggccccaacagacaccaggcccccagcatgctgagccctggccctgccctgagcagtgacagcgacaaggagggagaagatgagggcacagaggaggagctgcctgccctgcctgtgctggccaagagcaccaagaaggccctggcctctgtgcccagccctgccctgcccaggagcctgagccactgggagatgagccgggcccaggagagcgtgggcttcctggaccctgccccagctgccaaccctggcccccggcggcggggccgctgggtgcagcccggggtggagctgtctgtgcgctccatgctggacctgcggcagctggagaccctggcccccagcctgcaggaccccagccaggacagcctggccatcatccccagcggccccaggaagcacggccaggaggccctggagaccagcctgaccagccagaatgagaagccaccccggccccaggccagccagccctgcagctacccccacatcatccggctgctgagccaggaggagggcgtgtttgcccaggacctggagcccgcccccattgaagatggcatcgtgtacccagagcccagcgacaaccccaccatggacaccagcgagttccaggtgcaggccccagcccggggcaccctgggccgggtgtacccaggcagccgcagcagcgagaagcacagcccagacagcgcctgcagcgtggactacagcagcagctgcctgagcagccctgagcaccccacagaagattctgagagcacagagcccctgtctgtggatggcatcagcagtgacctggaggagccagcagaaggagatgaggaggaggaggaggaggagggcggcatgggcccctacggcctgcaggagggcagcccccagaccccagaccaggagcagttcctgaagcagcactttgagaccctggccagcggggccgcccctggggcccctgtgcaggtgcctgagaggtctgagagccgcagcatcagcagccgcttcctgctgcaggtgcagacccggcccctgcgggagcccagccccagcagcagcagcctggccctgatgagcaggcctgcccaggtgccccaggccagcggggagcagcccagaggaaatggagccaaccccccaggggcccctcctgaggtggagcccagcagcggcaaccccagcccccagcaggccgcctctgtgctgctgccccgctgccgcctgaacccagacagctcctgggcccccaagagggtggccacagccagccccttcagcggcctgcagaaggcccagagcgtgcacagcctggtgccccaggagagacatgaggccagcctgcaggcccccagccctggggccctgctgagccgggagattgaggcccaggacggcctgggcagcctgcccccagcagatggccggcccagccggccccacagctaccagaaccccaccaccagctccatggccaagatcagccgcagcatctctgtgggggagaacctgggcctggtggccgagccccaggcccacgcccccatccgggtgagccccctgagcaagctggccctgcccagccgggcccacctggtgctggacatccccaagcccctgcctgaccggcccaccctggccgccttcagccctgtgaccaagggccgggcccctggagaggccgagaagccaggcttccctgtgggcctgggcaaggcccacagcaccacagagcgctgggcctgcctgggggagggcaccacccccaagcccaggacagagtgccaggcccaccctggccccagcagcccctgtgcccagcagctgcctgtgagcagcctcttccagggccctgagaacctgcagcccccacctcctgagaagacccccaaccccatggagtgcaccaagccaggagctgccctgagccaggacagcgagcctgctgtgtccctggagcagtgtgagcagctggtggccgagctgcggggctctgtgcggcaggccgtgcggctgtaccacagcgtggccggctgcaagatgcccagcgctgagcagagccgcatcgcccagctgctgcgggacaccttcagctctgtgcggcaggagctggaggccgtggccggggctgtgctgagcagccctggcagcagccctggagctgtgggcgctgagcagacccaggccctgctggagcagtacagcgagctgctgctgcgggctgtggagaggaggatggagaggaagctgtag

SEQ ID NO: 183652 - DNA, 4176 bp, Artificial Sequence
  derived and/or modified sequence
atggccgtggagggcagcaccatcaccagccggatcaagaacctgctgaggtcaccttcgatcaaattgcggaggtccaaagcaggcaacaggcgcgaagacctgtccagtaaagttacattggagaaggtgctcggaattacggtgagtggcggccgggggctcgcctgcgatcctaggtctggcctggtggcttacccagccgggtgtgtagttgtgctgtttaatccaaggaagcataaacagcatcacatcctgaattcgtctcggaagaccattacggcactggcgttcagtcccgacggcaagtatctggtgaccggcgagtctggtcatatgcccgccgttcgggtgtgggacgtggcagagcatagccaggttgctgaactacaggagcataagtatggagtcgcctgtgtcgccttctcacctagcgccaaatatatcgtatcagtgggctaccagcacgacatgatcgtgaatgtgtgggcctggaagaagaatatcgttgttgccagtaataaagtttcctctagagtgaccgccgtgtctttttcagaagactgctcttatttcgtgaccgccggtaaccgccatattaagttctggtacttagacgactccaagacgagtaaagttaatgcaactgtgccacttcttggtcgaagtggtctgctcggcgagctgaggaataacctgttcaccgacgtagcctgcggacgaggcaaaaaggccgattctacattctgtatcacctcaagtgggctgctatgtgagttctctgatcgcagactgctagacaagtgggtcgaacttcgtgtctatccagaggtaaaagactctaaccaggcctgcctgcccccatcctctttcattacgtgttcctctgataacaccatcaggctatggaatactgaatccagcggcgtgcacggttcaacattacatcgaaatatcctgtcctcagatctgataaaaatcatctatgtggacggcaacacgcaagcccttctcgatactgaactgccaggaggagataaagcggatgcgtccctgttggatcctcgcgtggggatcaggtccgtttgtgtgtctcctaatgggcaacacctggcctccggtgataggatgggtacactgcgggtccacgagctgcaaagcctgtccgagatgttgaaggtcgaagcccatgattccgagatcctgtgtcttgagtacagcaagcccgataccgggctgaagctgctagctagcgccagtcgcgataggctgatccatgtcctggacgccggccgggaatactctctgcagcagacccttgacgagcattctagtagcatcaccgcggtcaagttcgctgccagcgacggacaggttagaatgattagctgcggcgctgataagtctatctatttccggacagcccagaagtcaggggacggcgtccagttcacccggactcaccacgtggttcggaaaacgacactttatgacatggacgtggagccatcctggaaatataccgccatcggctgccaggatcgcaacattcggatcttcaatatttcaagcgggaagcaaaaaaagttattcaaaggaagtcagggggaggatggaacccttatcaaagttcagactgaccccagcggcatttacattgccacatcatgctcagataagaacttatctatcttcgacttttcatccggtgagtgcgtggctaccatgtttgggcacagcgagattgtcacagggatgaaattttcgaacgactgtaagcatctcattagcgtgtccggcgatagctgcatattcgtatggagactatccagtgaaatgactatcagtatgcggcagcgtctcgccgagcttcggcagcgtcagaggggaggcaaacagcagggcccatcatctcctcagcgcgcttcaggcccaaatcgacaccaggctccctctatgctcagccccgggccggcactgagctcagattctgacaaggagggcgaggacgagggcaccgaggaggagctgccagccctgcccgtcctcgcgaaatctaccaaaaaggccttagcgtctgttccgtcacccgctctcccacgttcactgtcacactgggagatgtcacgcgctcaagagagtgtcgggttcttagatccagctccggcagcgaaccctgggccaagacggcggggcaggtgggtccaacctggcgtggaactaagcgtgaggagcatgcttgacctacgacaactggaaaccttggccccaagcttgcaggacccctcccaggattccttagcaatcataccatctggcccgaggaagcacggccaggaagctcttgagacgagcctcacttcgcagaacgaaaaacctccccgtccccaggcttcacagccttgtagttacccccacattataagactgttatctcaggaagaaggagtgttcgcccaggatttagagccagctcccatcgaggatggcatagtgtaccccgagccgtcagataaccctactatggacacgtccgaatttcaggtgcaagccccggctagaggcaccctgggccgggtatatcccggatcgcggtcctcggaaaagcactcacccgactcggcctgttcagttgattactccagctcttgtcttagctctcccgagcatccaaccgaagacagcgaaagcaccgaaccactgagcgtagacggcatatcttctgacttggaggagcctgccgaaggcgacgaagaagaagaggaggaggagggggggatggggccctatgggttacaagaagggagcccccagacccctgaccaggaacagttcctgaaacagcactttgagacactagcatcaggtgctgctccaggtgcccccgtgcaggtccccgagcgatcagagagtcgatcgattagcagccggttcctgctgcaggtgcagaccagacctcttcgagagccttctcctagctcttcatcacttgccctgatgtctcgaccagcccaagttccgcaagcctctggagagcaaccaagaggtaacggtgcaaatccacccggcgccccaccagaagtggagccctcttccggcaatccatctcctcagcaagccgcaagcgtcctacttcctcgatgcagattgaatccagatagctcttgggcaccaaagcgggtggctacagccagcccattctccggcctgcagaaggctcagagtgtgcactccctggtcccacaggagaggcatgaagcgtctttgcaggcaccaagccctggcgccctgctcagccgtgagatcgaggctcaggatggtctgggaagtctcccccccgcagacggccggccatctagaccgcactcctaccagaacccaacaacatcttcaatggcgaagatctccaggtctatttccgtgggggagaacctcgggcttgtggcagaaccacaagcacacgcccccattagggtctcacccttaagcaaactggctctaccatcaagagcccaccttgttcttgacatacctaaaccactgcctgacagaccaaccttggccgcgttcagtcctgtgacgaaaggaagagcccctggggaggctgagaaacccggctttcctgttgggctgggaaaggcccacagcactactgagcgctgggcttgtctaggggagggaaccactccaaaacccaggaccgagtgccaggcccatcctggaccctcctctccatgtgcacagcaactgcccgtgtcttccctgttccagggccccgaaaatctgcagcctcctccacctgaaaagacccccaaccccatggaatgcactaagcccggggccgccctcagtcaggacagcgagcctgccgtgagtctcgaacagtgcgagcagctggtggcagagctccgcggctccgtgcgccaggcggttcgtctctaccattcggtggccgggtgtaagatgcccagcgccgagcagagtcgcatcgctcagctcctccgcgataccttttcctccgttagacaagaacttgaggccgtcgctggagctgtcctctcaagccccggctcctcgcctggagcagtcggggctgagcaaactcaggccctgctcgaacagtatagcgagcttctgctccgggcagtagagcggaggatggagcgcaagctatag

SEQ ID NO: 183653 - DNA, 4176 bp, Artificial Sequence
  derived and/or modified sequence
atggcggttgagggatctactatcacaagtaggatcaaaaatttgctgaggagtccctctattaagctgcggagaagcaaggcgggtaacagaagggaagacctgtcgtccaaagtcaccctggagaaggtcctgggaatcactgtgtccggcggaagaggactagcttgcgacccgcgtagcggactcgttgcttacccagccggatgcgtggtggtgctcttcaatcctcggaagcataagcagcatcacattttaaactccagtcgcaagaccattactgccctcgcattctcacccgacggaaagtacttagtcaccggagaatctggacatatgccagccgttagggtgtgggacgtcgcggaacattctcaggtggccgagcttcaggagcacaagtatggagttgcatgcgtcgcattctcaccgagcgccaagtacatcgtgtccgtaggctatcagcatgatatgatcgtgaacgtgtgggcctggaagaagaacatcgtggttgcgtcaaacaaagtttcttcccgtgttaccgccgtcagctttagcgaggactgcagttatttcgtgacagcgggtaaccggcacatcaaattctggtacctcgacgattccaagacttcgaaagtgaatgctacagtgcccttgttgggacgcagcggactgctcggcgaattgcgcaacaacttgttcactgacgtggcttgtggtcggggaaaaaaggccgattctaccttctgcatcacctcatcaggcctgctctgtgagttctccgaccggaggctactcgataaatgggtggaactgcgggtgtatcccgaagttaaagattctaatcaggcatgcctccctccttcaagcttcatcacttgttccagcgataacaccatacgactatggaacaccgaaagcagcggagttcacggctctaccctgcacagaaatattctgtcctccgatctcattaagatcatttatgttgacgggaatacccaggctctgctcgataccgagctgcctggaggtgataaagctgacgccagtcttctggatccacgtgtgggtatccggtcagtgtgcgtgtcaccgaatggccagcatctggcatccggtgaccgtatgggaactctccgggtccacgagctgcagtctctgagcgagatgttgaaagtggaggctcatgacagcgagatcttgtgcctcgaatatagtaaacccgacacagggcttaagctgctcgcctcagcctccagggacagactcatccacgttcttgatgcaggccgagaatactctctgcagcagacgttggatgaacactcatcatctatcacagccgtgaagttcgccgcatccgacgggcaggtgagaatgatttcttgtggcgctgataagtccatctatttcagaacagctcagaagagcggcgacggggtccaatttactaggacacatcatgtcgtgcggaagacgactctgtatgacatggatgtcgagcctagctggaagtacactgctatcggatgccaggacagaaatatacgcatcttcaacatatcatctggcaaacagaagaagcttttcaaaggcagccagggggaagatggcactctcattaaggtccagacagacccatctggcatatacatcgccacttcctgttcagacaaaaatctttctatttttgacttttcctcaggcgagtgcgtagctaccatgttcggccattccgagattgtgacaggcatgaagttctccaatgattgtaagcacctgatatctgtgtcgggggactcttgcatttttgtatggcggctaagtagtgagatgactatttctatgaggcaaaggctggccgagctgcggcagcgacagcggggtgggaagcagcagggaccctcttcacctcaaagagccagcggcccaaaccgccaccaagctccatcgatgctgagcccaggacctgctttgagcagcgactcagacaaagaaggcgaggatgaaggcacagaggaagaattgcctgcccttcccgtcttagcaaaatcgacaaaaaaagcattggccagtgtgccctcccctgctcttcctagaagccttagccactgggagatgagccgggcacaggagtcagttggctttctcgacccagcgccagccgctaatccaggccctagacggagaggacgctgggtccagcccggagtggaactatcggtgcggtctatgctagacctgcgacagttagaaaccctggctccctcattacaagacccgagtcaggactcattggctataatccctagtggtccacgcaaacacggccaggaggcccttgaaacatctcttacttcccaaaacgagaaaccaccccgtccccaggcatcccaaccctgctcctatccccatattatccgtctattaagtcaagaagaaggggtttttgctcaggaccttgaacccgctccaatagaggacgggatcgtgtatccagaaccctccgataatcccaccatggataccagcgagtttcaggttcaggctccggctcgcggaacattgggacgtgtttaccccggttcaaggtctagtgaaaaacactcccctgattccgcctgtagtgttgactattcgtcttcttgcctgagctcccctgaacacccaacagaagattcagagagtactgagcctttatccgtggacggcatctctagcgatttggaggaacctgctgagggagacgaagaggaagaggaggaggagggaggcatggggccttatggactgcaggagggcagtcctcagacccccgatcaggagcagttcctcaagcagcatttcgagactctggccagtggggcagctcccggagccccagtgcaggtgccagaacgttcggagtccaggtccatctcctcccggtttctgttgcaggtgcagacgagaccccttcgtgagcctagtcctagcagttcttccttggcactgatgtctaggcccgctcaggtccctcaagcatccggcgaacaacctcggggaaacggagccaatccacccggtgcccctcctgaagtggaaccctccagcggtaatcctagcccccagcaggcagcctcagtgctactgcccagatgcagactcaatccagactctagctgggctccaaagagggtggccacagcgagtcccttttctggtttgcagaaagcccagagtgtccactccctggtgccgcaggagaggcatgaagcgtccctccaagccccttcaccaggcgctctcctaagccgcgagatagaagcccaggacggtcttgggagcctgccaccagccgacggaagaccaagcaggccccacagttaccagaatccaacaacgagtagcatggctaagattagcaggagcattagcgtcggagagaatttaggactggtggctgagccacaggcccatgctcccatcagggtctcgcccctgagcaaactcgcgttacccagcagggcccacctcgtgttggatatacctaagcccctgcctgacaggccaactctcgccgcattctcacctgtcacaaaggggcgtgcccctggagaagccgaaaaacccggatttccagtggggttaggcaaagcccactccaccacggaacgttgggcttgcttaggagagggcacgacgcccaagcctagaactgaatgccaggcccaccctggtccttcaagcccctgtgcccaacagttaccggtttctagtctcttccaaggcccagaaaatctacagcctccccctccggagaagacccctaaccccatggagtgcacaaagcccggtgcagcattatcacaggactccgaacctgccgtgtccctcgaacaatgcgaacagttggtcgccgagctacgaggatctgtaagacaagcagttaggttgtaccatagtgttgccggatgtaagatgccaagcgccgagcagagcagaatagcgcaacttcttcgagacaccttcagttctgttcgccaggagctggaagctgttgcgggagccgtgttgtccagccccggttcatcgcctggggcagtaggcgctgaacagacccaggccttgcttgagcagtacagtgagctgcttttaagagcggtggaacggcgtatggaacggaaattgtag

SEQ ID NO: 183654 - DNA, 4176 bp, Artificial Sequence
  derived and/or modified sequence
atggccgtggagggcagcaccatcaccagcagaatcaagaacctgctgagaagccccagcatcaagctgagaagaagcaaggccggcaacagaagagaggacctgagcagcaaggtgaccctggagaaggtgctgggcatcaccgtgagcggcggcagaggcctggcctgcgaccccagaagcggcctggtggcctaccccgccggctgcgtggtggtgctgttcaaccccagaaagcacaagcagcaccacatcctgaacagcagcagaaagaccatcaccgccctggccttcagccccgacggcaagtacctggtgaccggcgagagcggccacatgcccgccgtgagagtgtgggacgtggccgagcacagccaggtggccgagctgcaggagcacaagtacggcgtggcctgcgtggccttcagccccagcgccaagtacatcgtgagcgtgggctaccagcacgacatgatcgtgaacgtgtgggcctggaagaagaacatcgtggtggccagcaacaaggtgagcagcagagtgaccgccgtgagcttcagcgaggactgcagctacttcgtgaccgccggcaacagacacatcaagttctggtacctggacgacagcaagaccagcaaggtgaacgccaccgtgcccctgctgggcagaagcggcctgctgggcgagctgagaaacaacctgttcaccgacgtggcctgcggcagaggcaagaaggccgacagcaccttctgcatcaccagcagcggcctgctgtgcgagttcagcgacagaagactgctggacaagtgggtggagctgagagtgtaccccgaggtgaaggacagcaaccaggcctgcctgccccccagcagcttcatcacctgcagcagcgacaacaccatcagactgtggaacaccgagagcagcggcgtgcacggcagcaccctgcacagaaacatcctgagcagcgacctgatcaagatcatctacgtggacggcaacacccaggccctgctggacaccgagctgcccggcggcgacaaggccgacgccagcctgctggaccccagagtgggcatcagaagcgtgtgcgtgagccccaacggccagcacctggccagcggcgacagaatgggcaccctgagagtgcacgagctgcagagcctgagcgagatgctgaaggtggaggcccacgacagcgagatcctgtgcctggagtacagcaagcccgacaccggcctgaagctgctggccagcgccagcagagacagactgatccacgtgctggacgccggcagagagtacagcctgcagcagaccctggacgagcacagcagcagcatcaccgccgtgaagttcgccgccagcgacggccaggtgagaatgatcagctgcggcgccgacaagagcatctacttcagaaccgcccagaagagcggcgacggcgtgcagttcaccagaacccaccacgtggtgagaaagaccaccctgtacgacatggacgtggagcccagctggaagtacaccgccatcggctgccaggacagaaacatcagaatcttcaacatcagcagcggcaagcagaagaagctgttcaagggcagccagggcgaggacggcaccctgatcaaggtgcagaccgaccccagcggcatctacatcgccaccagctgcagcgacaagaacctgagcatcttcgacttcagcagcggcgagtgcgtggccaccatgttcggccacagcgagatcgtgaccggcatgaagttcagcaacgactgcaagcacctgatcagcgtgagcggcgacagctgcatcttcgtgtggagactgagcagcgagatgaccatcagcatgagacagagactggccgagctgagacagagacagagaggcggcaagcagcagggccccagcagcccccagagagccagcggccccaacagacaccaggcccccagcatgctgagccccggccccgccctgagcagcgacagcgacaaggagggcgaggacgagggcaccgaggaggagctgcccgccctgcccgtgctggccaagagcaccaagaaggccctggccagcgtgcccagccccgccctgcccagaagcctgagccactgggagatgagcagagcccaggagagcgtgggcttcctggaccccgcccccgccgccaaccccggccccagaagaagaggcagatgggtgcagcccggcgtggagctgagcgtgagaagcatgctggacctgagacagctggagaccctggcccccagcctgcaggaccccagccaggacagcctggccatcatccccagcggccccagaaagcacggccaggaggccctggagaccagcctgaccagccagaacgagaagccccccagaccccaggccagccagccctgcagctacccccacatcatcagactgctgagccaggaggagggcgtgttcgcccaggacctggagcccgcccccatcgaggacggcatcgtgtaccccgagcccagcgacaaccccaccatggacaccagcgagttccaggtgcaggcccccgccagaggcaccctgggcagagtgtaccccggcagcagaagcagcgagaagcacagccccgacagcgcctgcagcgtggactacagcagcagctgcctgagcagccccgagcaccccaccgaggacagcgagagcaccgagcccctgagcgtggacggcatcagcagcgacctggaggagcccgccgagggcgacgaggaggaggaggaggaggagggcggcatgggcccctacggcctgcaggagggcagcccccagacccccgaccaggagcagttcctgaagcagcacttcgagaccctggccagcggcgccgcccccggcgcccccgtgcaggtgcccgagagaagcgagagcagaagcatcagcagcagattcctgctgcaggtgcagaccagacccctgagagagcccagccccagcagcagcagcctggccctgatgagcagacccgcccaggtgccccaggccagcggcgagcagcccagaggcaacggcgccaacccccccggcgccccccccgaggtggagcccagcagcggcaaccccagcccccagcaggccgccagcgtgctgctgcccagatgcagactgaaccccgacagcagctgggcccccaagagagtggccaccgccagccccttcagcggcctgcagaaggcccagagcgtgcacagcctggtgccccaggagagacacgaggccagcctgcaggcccccagccccggcgccctgctgagcagagagatcgaggcccaggacggcctgggcagcctgccccccgccgacggcagacccagcagaccccacagctaccagaaccccaccaccagcagcatggccaagatcagcagaagcatcagcgtgggcgagaacctgggcctggtggccgagccccaggcccacgcccccatcagagtgagccccctgagcaagctggccctgcccagcagagcccacctggtgctggacatccccaagcccctgcccgacagacccaccctggccgccttcagccccgtgaccaagggcagagcccccggcgaggccgagaagcccggcttccccgtgggcctgggcaaggcccacagcaccaccgagagatgggcctgcctgggcgagggcaccacccccaagcccagaaccgagtgccaggcccaccccggccccagcagcccctgcgcccagcagctgcccgtgagcagcctgttccagggccccgagaacctgcagccccccccccccgagaagacccccaaccccatggagtgcaccaagcccggcgccgccctgagccaggacagcgagcccgccgtgagcctggagcagtgcgagcagctggtggccgagctgagaggcagcgtgagacaggccgtgagactgtaccacagcgtggccggctgcaagatgcccagcgccgagcagagcagaatcgcccagctgctgagagacaccttcagcagcgtgagacaggagctggaggccgtggccggcgccgtgctgagcagccccggcagcagccccggcgccgtgggcgccgagcagacccaggccctgctggagcagtacagcgagctgctgctgagagccgtggagagaagaatggagagaaagctgtag

SEQ ID NO: 183655 - protein, 1655 aa, Artificial Sequence
  derived and/or modified sequence
MSVMQSGTQMIKLKRGTKGLVRLFYLDEHRTRLRWRPSRKSEKAKILIDSIYKVTEGRQSEIFHRQAEGNFDPSCCFTIYHGNHMESLDLITSNPEEARTWITGLKYLMAGISDEDSLAKRQRTHDQWVKQTFEEADKNGDGLLNIEEIHQLMHKLNVNLPRRKVRQMFQEADTDENQGTLTFEEFCVFYKMMSLRRDLYLLLLSYSDKKDHLTVEELAQFLKVEQKMNNVTTDYCLDIIKKFEVSEENKVKNVLGIEGFTNFMRSPACDIFNPLHHEVYQDMDQPLCNYYIASSHNTYLTGDQLLSQSKVDMYARVLQEGCRCVEVDCWDGPDGEPVVHHGYTLTSKILFRDVVETINKHAFVKNEFPVILSIENHCSIQQQRKIAQYLKGIFGDKLDLSSVDTGECKQLPSPQSLKGKILVKGKKLPYHLGDDAEEGEVSDEDSADEIEDECKFKLHYSNGTTEHQVESFIRKKLESLLKESQIRDKEDPDSFTVRALLKATHEGLNAHLKQSPDVKESGKKSHGRSLMTNFGKHKKTTKSRSKSYSTDDEEDTQQSTGKEGGQLYRLGRRRKTMKLCRELSDLVVYTNSVAAQDIVDDGTTGNVLSFSETRAHQVVQQKSEQFMIYNQKQLTRIYPSAYRIDSSNFNPLPYWNAGCQLVALNYQSEGRMMQLNRAKFKANGNCGYVLKPQQMCKGTFNPFSGDPLPANPKKQLILKVISGQQLPKPPDSMFGDRGEIIDPFVEVEIIGLPVDCCKDQTRVVDDNGFNPVWEETLTFTVHMPEIALVRFLVWDHDPIGRDFVGQRTVTFSSLVPGYRHVYLEGLTEASIFVHITINEIYGKNRQLQGLKGLFNKNPRHSSSENNSHYVRKRSIGDRILRRTASAPAKGRKKSKMGFQEMVEIKDSVSEATRDQDGVLRRTTRSLQARPVSMPVDRNLLGALSLPVSETAKDIEGKENSLAEDKDGRRKGKASIKDPHFLNFNKKLSSSSSALLHKDTSQGDTIVSTAHMSVTGEQLGMSSPRGGRTTSNATSNCQENPCPSKSLSPKQHLAPDPVVNPTQDLHGVKIKEKGNPEDFVEGKSILSGSVLSHSNLEIKNLEGNRGKGRAATSFSLSDVSMLCSDIPDLHSTAILQESVISHLIDNVTLTNENEPGSSISALIGQFDETNNQALTVVSHLHNTSVMSGHCPLPSLGLKMPIKHGFCKGKSKSSFLCSSPELIALSSSETTKHATNTVYETTCTPISKTKPDDDLSSKAKTAALESNLPGSPNTSRGWLPKSPTKGEDWETLKSCSPASSPDLTLEDVIADPTLCFNSGESSLVEIDGESENLSLTTCEYRREGTSQLASPLKLKYNQGVVEHFQRGLRNGYCKETLRPSVPEIFNNIQDVKTQSISYLAYQGAGFVHNHFSDSDAKMFQTCVPQQSSAQDMHVPVPKQLAHLPLPALKLPSPCKSKSLGDLTSEDIACNFESKYQCISKSFVTTGIRDKKGVTVKTKSLEPIDALTEQLRKLVSFDQEDNCQVLYSKQDANQLPRALVRKLSSRSQSRVRNIASRAKEKQEANKQKVPNPSNGAGVVLRNKPSAPTPAVNRHSTGSYIAGYLKNTKGGGLEGRGIPEGACTALHYGHVDQFCSDNSVLQTEPSSDDKPEIYFLLRL

SEQ ID NO: 183656 - DNA, 4968 bp, Artificial Sequence
  derived and/or modified sequence
atgtccgtgatgcaatcaggtacacagatgatcaagttaaaacggggcaccaaaggtctggtgaggctgttctaccttgacgagcatcggacgcgcctgcggtggcgcccttcccgtaagagcgaaaaagctaagatcctcatagattccatttataaagtcaccgaaggtcgtcagtctgagatttttcacagacaagccgaaggaaacttcgaccctagctgttgtttcacaatataccatggcaaccacatggagtctttagacctgattacttccaaccccgaggaggcccgcacctggattacaggcctcaagtatcttatggccgggattagtgatgaggactctctcgcaaaacgtcagcgcacccatgatcagtgggtcaaacagaccttcgaggaggccgacaaaaatggcgacggcttgctgaatatcgaggagatccaccagttaatgcataaactgaatgtgaacctcccaagacgaaaggtgcgtcaaatgttccaagaagcggacacggatgagaaccaagggaccctgacttttgaagaattttgtgtgttctataaaatgatgtctctgaggagggatctctaccttctcctgctcagttactctgataagaaagatcatttgacggtggaagagcttgcccaatttcttaaggtggaacagaaaatgaataatgttaccacagattattgcctggacattatcaaaaaattcgaagtgtccgaagagaacaaagtgaaaaacgtgctgggcatcgagggattcacgaatttcatgagatcaccggcctgtgacatctttaaccctctgcaccacgaggtctaccaggacatggaccagcctttgtgtaactactacattgcgtccagccataatacgtacctgacaggagatcagctgctgagtcaatctaaggtcgacatgtatgcccgcgtgctccaggagggatgtaggtgtgtagaggtagactgctgggacggccccgatggcgaacccgtggtgcaccacggctacacactcaccagcaaaatactttttcgcgatgtcgtcgaaactatcaataaacatgctttcgtaaagaatgaatttcctgtgattctgtcgatcgagaatcattgcagcatccagcagcaaaggaaaattgcccagtatttgaaaggaatttttggagacaagctcgacctgagttctgtggataccggagaatgcaagcagctgccttcaccccaatctctgaagggtaagatacttgtgaagggcaagaagctcccatatcatcttggcgatgacgccgaggaaggggaggtcagcgacgaagatagcgccgatgagatcgaggacgagtgcaagtttaaactgcactactctaacgggaccacagaacatcaggtggaatcctttatcagaaaaaagttagagagtctgcttaaggagtcccaaattcgtgacaaagaagatcctgattcctttactgtgagagcgctgcttaaagctacccatgaaggcctaaatgctcatcttaaacaatcacccgacgtcaaagagtccggcaagaaatcacatggtaggtctctgatgactaactttggtaagcacaagaaaactaccaaatctcggagcaaaagttacagcaccgacgatgaagaggacactcaacagagcacagggaaggaaggcggacagctttaccgcctagggcggcgtagaaagaccatgaaactttgtagagaactgagtgatctggtggtatatacgaactcagttgccgcccaggatatagtggatgacggtactacaggcaatgtgctgagcttttccgagacccgcgcacaccaggtggtacaacagaagtcagaacagtttatgatttataaccaaaaacaactcacacgtatctacccttctgcctatagaattgacagtagcaattttaatcctctgccatattggaatgcggggtgccagctcgttgcccttaactaccagtcagaagggcgaatgatgcagctcaacagggctaagtttaaggcgaacgggaactgcgggtacgttctgaagccgcagcagatgtgcaaaggcacgtttaatccttttagcggggacccactgcccgcaaatcccaaaaagcagctgatcctcaaagtgatttccggccagcagctgcccaagccacctgattccatgttcggcgaccggggagaaattattgaccctttcgtggaagttgagattatcggcctgcctgtcgattgttgcaaggaccagactcgggtggtggatgataatggattcaatcctgtctgggaagagacattaactttcacggtgcatatgccagaaatcgcactggtcaggtttttagtctgggaccacgatcccattggcagagatttcgtgggtcagagaaccgttacattcagctcattagtacctggctaccgccatgtgtaccttgagggtctaacggaagcaagcattttcgtccacattacaataaacgagatttatggaaaaaaccggcagcttcaaggactgaaggggctgtttaataaaaaccctcgccattcaagctctgagaataacagtcattacgtgcgaaaaaggtcaatcggagataggatcctaaggaggactgcctcggccccagctaaaggaaggaaaaagtccaaaatgggctttcaagaaatggtggaaatcaaagattccgtatccgaagctaccagagaccaggacggcgtgctccgacgcactacgcgaagccttcaggctaggcccgtgagtatgcccgtagaccgcaacttgctaggagcattgtcccttcccgtctccgaaacagcaaaggatatagaggggaaggaaaattcgctcgccgaagacaaggatggccgtcggaaggggaaggctagtataaaagatccgcattttctgaatttcaataaaaagctgtcatcctcgagcagcgccctgctccacaaggacacttcccagggggacaccatagtttcaactgctcacatgagtgtgaccggcgaacagctaggcatgagcagcccgaggggtggaaggaccacgtctaacgccacttctaactgccaggagaatccctgtccaagtaagtcgctgtccccgaaacagcatctggccccagatcccgttgtaaatcctacacaggacctgcatggggtcaagatcaaggagaaaggaaatcctgaagattttgttgaaggtaaatctatcctatccggctcggtgctgtctcacagtaatttagaaattaagaatctcgagggcaatcggggaaagggtcgtgcagccacttctttctcgctgtccgatgtttctatgttatgttccgacattccggacctgcacagcaccgccatcttgcaggagagcgtgattagccaccttattgacaatgtgacgctgaccaacgagaacgaacccgggtcctcaatctctgctcttattggccagttcgacgaaactaacaaccaggccttgaccgttgtctcacatctccataacacgagcgtgatgtctgggcattgtcccctgccgagtctgggactgaaaatgcctattaagcacgggttttgtaaaggaaaatctaaatcttccttcctatgttcttcacccgagcttattgcactctccagctcagaaaccacaaagcatgccaccaacaccgtgtatgagacgacatgcaccccaattagcaaaaccaaaccagatgacgatctctctagcaaggccaaaaccgcagccctcgagagtaatcttccaggaagtccgaatacctcacgcggctggctgcctaagagcccaacaaagggagaggactgggagacgctgaaatcctgttcccccgcatcctctccagacctgacgcttgaagacgtgatcgctgacccaactctgtgttttaattcgggtgagtcttccctggttgaaattgatggcgaatccgaaaatctgtctctgacgacgtgcgaatacaggagggagggaacttcacagctggcatcgccattaaaacttaaatacaaccagggtgtcgtggagcattttcaacgaggacttagaaacggctactgtaaagaaacccttcggccttctgtgccagaaatcttcaacaatattcaggacgtgaaaacccagagtattagttacctagcatatcagggtgcaggttttgtccacaatcacttcagtgattctgatgccaagatgttccaaacttgcgtacctcagcagtctagtgcccaggatatgcacgtgccagtgccaaagcagctagcccatctgccgttgccagctttgaaactaccttctccttgtaagtccaagtctttgggagaccttacctccgaggatatcgcttgcaactttgaaagcaagtatcaatgcatcagcaaatcttttgtcaccacaggaatccgcgacaaaaaaggcgtcacagtcaagactaagtcacttgagccaattgatgctcttactgagcagcttcgaaagctagtctctttcgatcaagaagacaattgccaagttctctactcaaagcaggatgctaaccaactgcctcgtgcgctcgtccgcaaactctctagtaggtcccaaagcagagtgcggaatatagcctcaagggccaaagaaaaacaggaggctaataagcagaaggttcctaaccccagcaacggagcgggggtggtgctgcggaacaaacctagtgcaccaacccccgctgtgaacagacattccacaggctcttacattgctggataccttaagaatacgaagggtggcgggttggagggtagagggattcctgagggagcctgtaccgccctgcattacggccacgtagaccaattttgcagtgacaatagcgtgctgcagacagaaccttcatccgatgacaagcccgaaatctacttcttgctgaggttgtag

SEQ ID NO: 183657 - DNA, 4968 bp, Artificial Sequence
  derived and/or modified sequence
atgagcgtgatgcagagcggaacacagatgattaagctgaagaggggcaccaagggcctggtgaggctcttctacctggacgaacaccgtactcgattgcggtggagacccagccgaaagagcgagaaggctaaaatcttaatcgacagcatctataaagtcaccgagggtcgccagtcagagatctttcacagacaggctgagggcaacttcgatccttcatgctgcttcaccatttaccatggaaaccacatggagagcctggatctgatcacgtccaatcccgaagaggctcgaacttggattacgggtttgaagtacttaatggccggtatttctgacgaggatagtttagcgaagcggcagcgaactcatgaccagtgggtcaagcagacattcgaggaggctgataaaaatggcgacggtctacttaatatagaagaaattcaccagttgatgcataaactgaatgtaaacctcccaagacgtaaggtcaggcagatgttccaggaggcggacaccgatgagaatcagggcactctgacctttgaggaattctgcgttttctacaaaatgatgtccttaaggagagacctgtacctgttgctcttgtcttattctgataagaaagaccatctgactgtggaagaactagctcaatttcttaaggtggaacagaagatgaataatgtgactacggattactgcctggacataataaaaaagtttgaagtcagtgaggaaaataaggtgaaaaatgtgctgggcattgaggggttcacgaattttatgaggtcccctgcatgtgatatcttcaatccactgcatcacgaggtgtaccaggacatggaccagccactatgcaattattatattgctagctctcataatacttacttgacaggcgaccagctgttatcccagtctaaggtcgatatgtatgcaagagtactacaggaaggctgtcggtgcgtggaagtagactgctgggatgggcctgatggtgagcccgtcgtccaccatggttacaccttaactagcaagatcctttttcgagatgtcgttgaaacaatcaacaagcacgcgtttgttaagaatgagtttcccgttatactatctatcgagaaccactgcagtattcagcagcagaggaagatagcccagtatctaaagggcattttcggggacaaactagatctcagttccgtcgatactggagaatgtaagcagctgccgagtccacagagtttgaaggggaagatactggttaaaggaaaaaagctgccatatcatctgggagacgatgcagaggaaggggaagtgtccgatgaagattcggcagatgaaatagaggacgagtgtaagtttaagttgcattactcaaacggaacaacagagcaccaggtcgagtcatttattcggaagaagctcgagtctctcctgaaagaatctcagattcgggataaggaagatcctgacagtttcacagtaagagctctgttgaaggcaacccacgagggactgaatgcacacctcaagcaatccccagacgttaaggagagtgggaaaaagagccatggcaggtcactaatgactaacttcggcaagcacaaaaaaacaaccaaatcaagatccaagagttactccaccgatgatgaggaggacacccaacaaagcaccggtaaagagggcggacagctctatagactgggtcgtaggcgaaaaacgatgaagttatgcagagaactgagtgatttagtcgtctataccaacagcgtggctgcacaagacatagtcgacgatggtactactgggaatgtgctttcattctccgagactagggcacatcaggtggtgcaacaaaaatctgaacagttcatgatctacaaccagaagcagcttactcgcatctatcctagtgcatacagaattgatagttcgaacttcaatcctctcccttactggaatgccggctgtcagctcgtagcattaaactatcagtctgaaggaagaatgatgcagttgaatcgtgctaagttcaaagccaacggcaactgcggatatgtcttgaagccccaacagatgtgcaaaggcacctttaacccattcagtggggacccccttcccgccaaccctaaaaagcagctgattctgaaagtgatttctggccaacagttgccgaaaccccctgactcaatgttcggcgatcggggcgagatcattgatcccttcgtggaggtcgaaattatcggcctgcctgtggactgttgcaaggatcaaactagagttgtcgacgacaatggattcaacccagtgtgggaagaaacacttaccttcactgtgcacatgcctgaaatagccctggttaggtttttggtatgggaccacgacccgatcggaagagactttgtgggccagcgcacagtgacctttagtagcctcgtccctggctaccggcacgtgtacctcgagggccttacagaagctagcatcttcgtccatatcaccatcaatgagatatacgggaaaaaccggcagctgcagggtctgaaagggttgttcaacaagaatcctagacacagctcttccgagaataattcacattatgtccgcaagcgtagtataggagaccggatactcaggaggaccgcctccgcccctgccaaaggacggaaaaaatcaaaaatgggcttccaggagatggtggaaataaaagacagcgtctccgaagctacacgggatcaagatggggtgttgcggagaacaacccggtccttgcaggcccgacccgtttcgatgccggtggatcgcaacctgcttggagccttgtcactgcccgtgtccgagactgcaaaggatatcgaggggaaggagaactctctggctgaagacaaagatggcaggcggaagggtaaggcttcgatcaaggacccgcactttttgaacttcaataagaagttgagctcctccagttccgcccttctgcacaaagacacgagccagggcgacaccatcgttagcacagctcatatgtcagttacaggtgagcagctcggcatgagctcaccccgaggagggcgcacgacctcaaacgctacctcaaactgtcaggagaacccttgccccagcaagagtctgtcacctaagcagcacctagcacctgatccagtggtaaatcctactcaggatctgcacggggtcaagatcaaagagaagggcaacccggaggatttcgtggaaggcaagtcaatcctatccggctccgtcttatcacactccaatctcgagattaaaaacctcgaaggcaaccggggcaaaggcagagcagcaacatccttctccctgtcggatgtgagcatgctttgctccgatatcccagatctccattctaccgcaatactccaggagtcagtcatttcccatttgatcgataacgtcacactgactaacgaaaacgagccggggagttcgattagtgctctgattggacagttcgatgaaacaaataaccaggctctgaccgtggtgagtcacctgcacaacaccagcgtgatgagcggccactgcccgctgcccagcctgggtctcaaaatgcccatcaaacatgggttttgtaagggtaagagcaagagttcattcctgtgttcttccccggagctcatcgccctctcctcctctgagaccactaagcatgcgactaataccgtgtatgagactacatgcacccccatcagcaaaacaaagcctgacgacgacctgtcaagcaaggcaaagactgccgccctggagagcaacctcccaggctctcccaatacctcccgcggttggctcccaaaaagcccaaccaagggagaggactgggagacgctcaaatcctgttcgcctgcttcctcaccagatctgaccctggaggatgtcattgcagaccctactctttgttttaactccggagagtcttcactagtggagattgacggcgagagtgaaaacctgtccctcaccacttgtgaataccgtagagaagggactagccagttggcctccccactgaagctgaaatataaccagggtgtggtcgagcattttcagcgcggtctgcgcaatggatattgtaaagaaaccctaaggccttcagtacccgagattttcaataacatccaggacgtgaaaacccaatccattagctatctcgcttaccagggcgcggggtttgtacacaatcacttcagtgattctgatgctaagatgtttcaaacatgtgtaccccaacagtcgtccgcgcaggacatgcacgttccagtgccaaaacagctagcccacctacctctccccgcactgaaactaccaagcccttgcaaatccaagagtctaggagacctaacctccgaggatatcgcatgcaactttgagagcaagtaccagtgtatcagcaagagcttcgtcaccacaggtattcgcgataagaaaggggtgaccgtgaagacaaagtccttggaaccaatcgacgctctgactgagcagctgcggaagctggtgtcctttgatcaggaagacaactgccaggtgctatatagcaaacaagacgccaaccaactgcccagagccctggtcagaaaactgtcctccagatctcaaagtcgcgttcgcaacatcgctagccgagcaaaagagaagcaagaagctaacaaacagaaagtgcctaatccttcaaatggcgctggagtcgtgctgcggaacaaaccttctgctcccacaccagctgtaaatcgacatagcactggtagttacattgcaggctacttgaagaacacaaagggcggcgggttggaaggacgaggcataccagaaggcgcctgtactgctctacattatggacatgtagaccaattctgtagcgataactctgtgctgcagacggagcccagcagtgatgacaaacctgagatctacttcctgctcagactgtag

SEQ ID NO: 183658 - DNA, 4968 bp, Artificial Sequence
  derived and/or modified sequence
atgtcagttatgcagagcggaacccagatgattaagctgaagagaggaactaaaggccttgtgcggttattctatttggatgagcacaggactcgcttaaggtggcggccgtcccgtaagtcggaaaaggctaaaattctgattgacagcatctataaagtaactgaaggcagacagtccgaaatcttccatagacaagcggaaggaaacttcgatcccagctgctgcttcacgatctatcacggaaatcatatggagtctctcgatctgattacctctaatcctgaggaagcccgcacatggattacgggtttaaaatacttgatggcgggaatcagcgatgaggactctcttgctaaacggcagagaacccacgaccagtgggtgaaacagaccttcgaggaagccgacaaaaatggtgacggattgttaaacatcgaagaaattcaccagctcatgcacaagctgaatgtgaacctgccccggcgtaaagttcgacagatgttccaggaggctgacaccgatgagaatcagggcacactgacctttgaagagttctgtgtgttctacaaaatgatgtcgctgaggcgcgatttgtacctcctgctcctctcttactccgacaagaaggatcacttaacggtcgaagaactggcccagttcctcaaggtcgagcagaagatgaataacgtgaccactgattattgcctggatataatcaaaaaatttgaggtgagcgaagagaataaagttaagaatgtcttaggtattgagggattcacgaattttatgcggtcgccggcctgcgacatctttaatccgcttcatcacgaggtataccaggacatggaccagcctttgtgtaattattacatagccagctcccacaatacatacctcacaggcgatcagttgctcagccagagcaaagtcgacatgtatgctcgcgtgctgcaagaggggtgtcgctgcgtcgaagtcgactgctgggatgggccagacggcgaaccagttgtgcatcatggctacactctgacatctaaaatcctgttccgggacgtcgtagagacgattaataaacatgccttcgtcaagaacgagttcccagtcatactaagcatcgaaaatcattgctcgatccagcaacagagaaagattgcccagtacctgaagggcattttcggagacaagctggatctgagcagcgtcgatacaggcgaatgcaagcaactgccgagtcctcagtcacttaagggcaaaatccttgttaagggcaaaaagctaccttaccacttgggagatgacgccgaggagggtgaggtgtcggacgaggactccgccgacgaaattgaggacgaatgcaaattcaagttacactattcgaacggtaccactgagcatcaagttgaatctttcatcagaaaaaagcttgagtctttgctcaaggaaagccagattcgtgacaaggaggatcctgattcgttcacagtccgggctctactgaaagcgactcatgagggcctaaatgctcacctgaagcagtcccctgacgtgaaggaaagcggcaagaagtctcacggacgttcgctcatgacaaacttcgggaaacacaagaagacaactaagtccaggtccaagtcctactctaccgacgatgaagaggatactcagcagagcaccggaaaggaagggggacaactgtatcgcctaggccgaagaagaaagaccatgaaactttgtcgagaactgagcgacctagtggtttacaccaactccgtcgctgctcaagatatcgtagatgatgggacaactggaaacgtcctcagcttttccgagaccagggctcatcaggtcgttcagcagaagagtgaacagtttatgatctacaatcagaagcagctgacccgcatttacccttccgcctatagaatcgacagctcgaacttcaatcccctgccatactggaacgcaggttgtcagcttgtcgctctgaattaccagagcgaaggacgcatgatgcagctgaaccgcgccaaattcaaagctaacggaaattgtggctacgtgttaaagccacaacagatgtgcaaaggtaccttcaaccctttcagcggcgatcctctacctgcaaacccaaaaaaacagctgattctaaaggtcattagtgggcagcagttaccgaagccaccagatagcatgttcggcgaccgtggagaaatcatcgaccccttcgtagaagtcgaaatcatcggcctgcctgtggactgttgtaaagaccagactagggtcgtagatgacaacgggttcaacccagtttgggaggagaccctgacctttactgtccacatgccggagattgctctcgttaggttcctggtgtgggaccacgatcccattggcagagacttcgttggccagcgcactgtgacctttagttcgctggttccaggctatcggcacgtctacctcgaaggcctgaccgaggcatctatcttcgttcatattaccattaatgaaatctacgggaagaatcgacaactgcaaggattgaaaggcctgttcaacaagaatccgcgacattcctcttctgaaaacaattcccactatgtgaggaaacgctctatcggagaccgaatcttaaggagaacagccagcgctcccgctaaaggaagaaagaaatcaaaaatgggctttcaggaaatggtagagattaaggattcagtcagcgaggcaacccgtgatcaagatggggtcctgcggaggacgacacggtcgctgcaagcacggcccgttagcatgccagtggacaggaatttgttgggcgccttgagcctgcccgtgagcgagacagctaaagacatagaaggcaaggagaattccctggccgaagacaaggacgggcggaggaaaggaaaagcaagcattaaagacccccacttcctcaactttaacaagaagctgtcatcaagcagctccgccctgctgcacaaagacacaagtcagggtgacacgatcgtcagcacggctcacatgtccgtgacaggtgaacagcttggaatgagcagcccccggggtggcaggaccacaagcaacgccacctctaactgtcaggagaacccttgcccttcaaagagcctctcacctaaacagcatcttgcacccgatcccgttgtcaaccctacccaggacctacatggagtgaaaatcaaggagaagggcaatcccgaggattttgtcgagggaaagtctattctgtctggctccgtgctgagccactctaatctggagatcaaaaatctcgaggggaatagagggaagggtcgcgcagctacctctttttccctgtcagatgtgtccatgctgtgttcagacatccccgaccttcacagtaccgccatcctgcaggagtccgtgataagccacctgatcgataatgtgaccctgactaacgagaacgagcctggctcttcgatttccgctctgatcggacagtttgacgaaactaataatcaggcactgacagtcgttagtcatctacacaatacttctgtgatgtctggacactgtccattgccctcattaggtttgaaaatgcctatcaagcatgggttctgtaaggggaagtctaaatcatcgtttctctgtagcagccctgaactgattgctctgagctccagtgaaactacaaagcatgccacgaatacggtatatgagacaacatgcactccaatatcaaagactaaaccggacgatgatctcagttcaaaagcaaagaccgcggcactggagagtaacttaccaggtagcccgaatacatcacgtggttggctccccaagagcccgacgaagggcgaggactgggagacactgaagtcctgctctcccgcctcctcaccagacctgacactcgaagacgtgatcgccgaccctaccctgtgctttaacagcggagagtcctccctggtcgagattgatggtgagtctgaaaatttgagcctgaccacttgcgagtacaggcgcgagggcaccagccagttagcgtcccccctgaagctgaagtataatcaaggcgtggtcgaacattttcagcgcggtttgagaaatggatattgcaaggagacactcagaccctcagtgcccgagatcttcaacaacatccaggacgtgaagacgcaaagcatcagctacctggcatatcagggcgcagggttcgttcacaatcatttttccgattctgacgccaaaatgttccaaacttgtgttccacagcagtccagcgcccaggacatgcatgtccccgttcccaaacaactcgcacaccttcccctgcctgcgctaaagctgcctagcccctgcaagagcaagagtctcggcgacctgacatccgaagatattgcttgcaatttcgagtcgaagtaccagtgtatttccaagagcttcgtcacaactggcatacgagataaaaaaggcgtgacagtgaagaccaagtcactcgaaccaatcgatgcactcaccgaacagctgagaaaattagttagctttgaccaagaagacaactgtcaagtcctttattccaagcaagatgctaatcagctcccaagggcgttggtgaggaagctgtccagtcggagccagagtcgcgttcggaatattgcatcccgggcgaaagaaaaacaagaagccaacaaacagaaagtaccaaacccgtcaaatggcgccggtgtagtcctgcgcaacaagccatccgcccccacacccgcggttaatcggcattccacgggctcctatatcgccgggtatttgaaaaacactaagggcggcggactcgaagggcggggcattcctgagggagcctgtaccgccctgcactatgggcatgttgaccagttctgttcagacaattccgtgcttcaaacagagcccagctccgacgacaagcctgagatctacttcctgctacgtctctag

SEQ ID NO: 183659 - DNA, 4968 bp, Artificial Sequence
  derived and/or modified sequence
atgtctgtgatgcagagcggcacccagatgatcaagctgaagaggggcaccaagggcctggtgcggctcttctacctggatgagcacaggacccggctgcgctggaggcccagcaggaagtctgagaaggccaagatcctgattgacagcatctacaaggtgacagagggccggcagagcgagatcttccaccggcaggccgagggcaactttgaccccagctgctgcttcaccatctaccacggcaaccacatggagagcctggacctgatcaccagcaaccctgaggaggcccggacctggatcaccggcctgaagtacctgatggccggcatcagtgatgaggacagcctggccaagaggcagaggacccatgaccagtgggtgaagcagacctttgaggaggccgacaagaatggagatggcctgctgaacatcgaggagatccaccagctgatgcacaagctgaatgtgaacctgcccaggaggaaggtgcggcagatgttccaggaggccgacacagatgagaaccagggcaccctgacctttgaggagttctgtgtgttctacaagatgatgagcctgcggcgggacctgtacctgctgctgctgagctacagcgacaagaaggaccacctgactgtggaggagctggcccagttcctgaaggtggagcagaagatgaacaacgtgaccacagactactgcctggacatcatcaagaagtttgaggtgtctgaggagaacaaggtgaagaatgtgctgggcatcgagggcttcaccaacttcatgaggagccctgcctgtgacatcttcaaccccctgcaccacgaggtgtaccaggacatggaccagcccctgtgcaactactacatcgccagcagccacaacacctacctgactggagaccagctgctgagccagagcaaggtggacatgtatgcccgggtgctgcaggagggctgccgctgtgtggaggtggactgctgggatggcccagatggagagcctgtggtgcaccacggctacaccctgaccagcaagatcctcttcagagatgtggtggagaccatcaacaagcacgcctttgtgaagaatgagttccctgtgatcctgagcattgagaaccactgcagcatccagcagcagaggaagatcgcccagtacctgaagggcatctttggagacaagctggacctgagctctgtggacacaggagagtgcaagcagctgcccagcccccagagcctgaagggcaagatcctggtgaagggcaagaagctgccctaccacctgggagatgatgctgaggagggggaggtgtctgatgaggacagcgcagatgaaattgaagatgagtgcaagttcaagctgcactacagcaatggcaccacagagcaccaggtggagagcttcatcaggaagaagctggagagcctgctgaaggagagccagatccgggacaaggaggaccctgacagcttcaccgtgcgggccctgctgaaggccacccatgagggcctgaatgcccacctgaagcagagcccagatgtgaaggagagcggcaagaagagccacggccgcagcctgatgaccaactttgggaagcacaagaagaccaccaagagccgcagcaagagctacagcacagatgatgaggaggacacccagcagagcacaggcaaggagggcggccagctgtaccgcctgggcagaagaaggaagaccatgaagctgtgccgggagctgagtgacctggtggtgtacaccaacagcgtggccgcccaggacatcgtggatgatggcaccactggaaatgtgctgtccttcagcgagacccgggcccaccaggtggtgcagcagaagtctgagcagttcatgatctacaaccagaagcagctgacccgcatctaccccagcgcctacagaattgacagcagcaacttcaaccccctgccctactggaatgccggctgccagctggtggccctgaactaccagagcgagggccgcatgatgcagctgaacagagccaagttcaaggccaatggaaactgtggctacgtgctgaagccccagcagatgtgcaagggcaccttcaaccccttcagcggggaccccctgcctgccaaccccaagaagcagctgatcctgaaggtgatcagcggccagcagctgcccaagcccccagacagcatgtttggagacagaggagagatcatcgacccctttgtggaggtggagatcatcggcctgcctgtggactgctgcaaggaccagaccagggtggtggatgacaatggcttcaaccctgtgtgggaggagaccctgaccttcaccgtgcacatgcctgagatcgccctggtgcgcttcctggtgtgggaccatgaccccatcggccgggactttgtgggccagaggacagtgaccttcagcagcctggtgcccggctaccgccacgtgtacctggagggcctgacagaggccagcatctttgtgcacatcaccatcaatgagatctacggcaagaaccggcagctgcagggcctgaagggcctcttcaacaagaaccccaggcacagcagcagcgagaacaacagccactacgtgaggaagaggagcattggagaccgcatcctgcggaggacagccagcgccccagccaagggcaggaagaagagcaagatgggcttccaggagatggtggagatcaaggacagcgtgtctgaggccacccgggaccaggatggagtgctgcggaggaccaccaggagcctgcaggcccggcctgtgtccatgcctgtggacaggaacctgctgggcgccctgagcctgcctgtgtctgaaacagccaaggacatcgagggcaaggagaacagcctggccgaggacaaggatggccgcaggaagggcaaggccagcatcaaggacccccacttcctgaacttcaacaagaagctgagcagcagcagcagcgccctgctgcacaaggacaccagccagggcgacaccatcgtgtccacagcccacatgtctgtgactggagagcagctgggcatgagcagcccccggggcggccgcaccaccagcaatgccaccagcaactgccaggagaacccctgccccagcaagagcctgagccccaagcagcacctggccccagaccctgtggtgaaccccacccaggacctgcatggagtgaagatcaaggagaagggcaaccctgaggactttgtggagggcaagagcatcctgagcggctctgtgctgagccacagcaacctggagatcaagaacctggagggcaacagaggcaagggccgggccgccaccagcttcagcctgagtgatgtgtccatgctgtgcagcgacatcccagacctgcacagcacagccatcctgcaggagagcgtcatcagccacctgattgacaacgtgaccctgaccaatgaaaatgagcccggcagcagcatcagcgccctgattggccagtttgatgagaccaacaaccaggccctgactgtggtgagccacctgcacaacacctctgtgatgagcggccactgccccctgcccagcctgggcctgaagatgcccatcaagcacggcttctgcaagggcaagagcaagagcagcttcctgtgcagcagccctgagctgattgccctgagcagcagcgagaccaccaagcacgccaccaacacagtgtatgagaccacctgcacccccatcagcaagaccaagccagatgatgacctgagcagcaaggccaagacagctgccctggagagcaacctgcccggcagccccaacaccagccggggctggctgcccaagagccccaccaagggggaggactgggagaccctgaagagctgcagccctgccagcagcccagacctgaccctggaggatgtgattgctgaccccaccctgtgcttcaacagcggggagagcagcctggtggagattgatggagagagcgagaacctgagcctgaccacctgtgagtacagaagagagggcaccagccagctggccagccccctgaagctgaagtacaaccagggcgtggtggagcacttccagaggggcctgagaaatggctactgcaaggagaccctgcggcccagcgtgcctgagatcttcaacaacatccaggatgtgaagacccagagcatctcctacctggcctaccagggcgccggctttgtgcacaaccacttcagtgacagtgatgccaagatgttccagacctgtgtgccccagcagagcagcgcccaggacatgcacgtgcctgtgcccaagcagctggcccacctgcccctgcctgccctgaagctgcccagcccctgcaagagcaagagcctgggggacctgaccagtgaagatattgcctgcaactttgagagcaagtaccagtgcatcagcaagagctttgtgaccaccggcatccgggacaagaagggcgtgacagtgaagaccaagagcctggagcccattgatgccctgacagagcagctgaggaagctggtgtcctttgaccaggaggacaactgccaggtgctgtacagcaagcaggatgccaaccagctgccccgggccctggtgaggaagctgagcagccgcagccagagccgggtgagaaatattgccagccgggccaaggagaagcaggaggccaacaagcagaaggtgcccaaccccagcaatggagctggggtggtgctgaggaacaagcccagcgcccccaccccagctgtgaacagacacagcacaggcagctacatcgccggctacctgaagaacaccaagggcggcggcctggagggccggggcatccctgagggcgcctgcacagccctgcactacggccacgtggaccagttctgcagcgacaacagcgtgctgcagacagagcccagcagtgatgacaagccagagatctacttcctgctgcggctgtag

SEQ ID NO: 183660 - DNA, 4968 bp, Artificial Sequence
  derived and/or modified sequence
atgagcgtgatgcagagcggcacccagatgatcaagctgaagcggggcactaaggggctggtcaggctgttttacttagatgaacaccgaacccgactcaggtggcgcccaagccgtaagtcagagaaggcaaaaattttaatcgactccatctataaggtgactgagggccgccaaagtgaaatcttccatcgacaggccgaaggcaactttgatccttcctgctgctttactatatatcacggcaaccacatggagagtttggatctgattacgtctaaccctgaggaagcccgcacctggatcaccggtcttaagtaccttatggccgggatcagtgacgaggactcacttgcaaaacgtcagcgcactcacgatcagtgggtgaagcagacattcgaagaggcagacaagaatggggacggtttgctgaatattgaggagattcaccagctgatgcacaaactaaatgttaatttgccaaggaggaaagtgcgccaaatgtttcaggaagctgacactgatgagaatcagggcacccttacattcgaagaattttgtgtgttttacaaaatgatgtcccttcggcgtgatttatacctgctgctactgtcctactctgacaaaaaagaccatctgaccgttgaggaactcgctcagtttttaaaggtcgagcaaaaaatgaataatgtcacgaccgattactgtctggacattatcaagaaattcgaggtcagcgaggagaacaaagtgaaaaacgtgctgggcattgagggcttcactaactttatgagatcaccagcatgtgatatctttaacccgctacaccacgaagtctaccaggacatggatcagccactgtgtaactactacattgccagttctcataatacttatctgaccggtgatcaactattgagccaatctaaggtggacatgtatgcccgcgtcctgcaggaaggatgtcgatgtgtcgaagtggactgctgggatggccccgatggcgaacctgtggtgcaccatggctacaccctcacctctaaaatcctctttcgcgacgtcgtagaaactatcaataaacacgcctttgtgaagaatgaatttcccgtcattttgtctatcgaaaaccactgctccattcaacagcagaggaaaatcgcacaatacctgaaagggatctttggagacaagttggacctgtcttccgtggatacgggtgaatgtaaacaactgcccagcccacaaagcttgaaaggcaagatcctggtgaagggaaagaaactgccctatcatctgggagatgatgccgaggaaggtgaagtatccgatgaggactccgctgatgagatcgaggacgagtgcaaattcaagttacattactcgaacggcactactgagcatcaagtcgagagtttcattagaaaaaaacttgagagcttgctgaaagagagtcagattcgggataaagaagatccagactcgttcacagtgagagccctgctgaaggctacacacgaaggtttgaatgcgcatttgaagcagagccctgacgtgaaggaatccgggaaaaaatctcacgggcggagccttatgacaaatttcggcaaacataagaagacgaccaagagtcgaagtaagagttattctacggatgatgaagaagatacacagcagtctactggcaaggaaggtggacagctctaccgtctcggtcggagacggaaaacaatgaagctttgtagagagctgtctgatctggtggtgtatacaaactccgttgcagcccaggatattgtagatgacggcacaaccggcaatgttctctccttctctgaaaccagagcccatcaggtggtgcaacagaagtctgaacaattcatgatatataatcagaaacagctgacaagaatctatccaagcgcatatcggatcgactcttctaacttcaatcctctgccatattggaatgctggctgccagttagttgccctcaactatcaaagcgagggaaggatgatgcagcttaaccgggctaaattcaaggccaatgggaattgtggctatgtactgaaacctcaacagatgtgtaagggaactttcaatccattttccggagatcctctccctgctaatcctaagaagcagttgattctgaaggttatttccggacagcagttgcccaaaccgcctgatagtatgtttggcgaccgcggggagatcattgatcccttcgtcgaggttgagatcattggcttacccgtggactgttgcaaagatcaaacacgtgtagtggacgataatgggtttaatcccgtgtgggaggaaacactgacatttaccgtccatatgccggagattgccctcgttagattcctggtttgggatcatgaccctataggaagagatttcgtggggcagaggaccgtcacattttcctcattggttccaggttaccgtcacgtgtatctggagggactgacagaggcgagcatcttcgtccacattacgattaatgagatttacgggaagaataggcagctgcaggggttgaagggcctcttcaataagaaccctcgtcactccagcagcgaaaacaactcacactacgtccgcaagaggagtattggcgacagaatacttcggcggacagcaagcgctcccgcaaaggggaggaagaagtcaaaaatggggttccaagagatggtggagatcaaagacagtgtctcggaggcaacccgtgatcaagacggcgtcctacggcggacgaccaggtccctccaagcaagacccgtatccatgcccgttgatagaaatctgctaggagcccttagcctaccagttagcgaaacagccaaggacatcgaaggaaaggagaacagtctcgccgaagacaaagacggtcgcaggaaaggcaaggcctccatcaaagaccctcatttcctgaactttaataagaagctgtcaagctcctcgtcagcccttcttcataaagatacctctcagggagacacaatagtgtcaacggctcacatgagtgtaaccggtgagcagctcgggatgtcgtcacccagaggcgggcggaccacttccaacgccacctcaaactgccaagagaatccctgtccctccaaatctctttctccgaagcagcatctcgcacctgaccccgtggttaatcctacacaagatctgcacggagttaagatcaaagagaagggaaaccctgaggatttcgtggagggcaagagcatcctgtcaggcagcgtgctgtcccactctaatctcgagattaagaatctagaaggaaaccgcggaaagggtcgcgctgctacatccttttctctgtctgacgtttctatgctctgctcagacattcctgatctacattcaacagctatactccaagaaagtgtcatatcccacttaattgataacgtaactctgactaacgagaatgagccgggatccagcattagcgctctaattggacaatttgacgaaactaataaccaggccttgaccgtggttagtcacctccacaatacgagcgtaatgagcgggcactgtcctctgccttcactcggcttaaagatgcccattaaacacggtttctgcaagggtaagagcaagtcttccttcctgtgtagctcaccagagttaattgcgctgagcagtagtgagaccactaaacacgccactaataccgtctacgagaccacgtgcacaccaatatcaaaaaccaagcccgatgacgacctctcatcaaaagcaaagaccgccgctctggagtccaacctgcccggatccccaaacacgtcacgcgggtggcttccaaagagtccaacgaagggagaggattgggagactctgaagagttgctcacctgcatctagcccagatctgaccctggaggacgttatcgccgaccccacactttgctttaacagcggcgagagtagcctagtcgaaattgatggcgagagtgagaacctcagcctgacaacatgcgaataccgcagggagggcacttcccaactcgcttcccctctcaagctgaaatataatcaaggtgtggtggaacacttccagcgcggcctgcgaaatgggtattgcaaggaaactttacggccctccgtgcctgagatctttaataatatccaggacgttaaaactcagtccatctcatacttagcttaccagggcgccggcttcgtacacaatcacttctccgattccgacgccaaaatgttccagacatgtgtgccacagcagtcaagcgcgcaggatatgcatgttcctgtgccaaaacaactagcccatctgcccctgcctgctcttaagcttccatctccttgtaagtcaaagtccctgggcgaccttaccagcgaggacatcgcatgcaacttcgagtctaaataccagtgtatatctaagagcttcgttaccaccggaatcagggacaaaaaaggcgtgactgtgaaaaccaagtcattagagccaatcgacgctctcacagaacagctccgcaagctggtcagctttgatcaggaggataattgccaggtcctttacagtaagcaagacgctaaccagcttcctagggcactggtgcggaaactctcatccagaagtcagtcacgtgtccggaacatcgcatcacgggcaaaggaaaaacaagaagcgaacaaacagaaagttcccaacccctccaatggtgctggcgtcgtcctacggaacaaaccaagcgcccctacacctgccgtgaatcggcatagcacgggatcgtacattgccggctacctcaagaatactaaaggagggggtctcgaggggagaggcatccctgaaggtgcctgcaccgcactacattacgggcacgtggatcagttttgctcagataattcggttctccagacagaaccatccagcgatgataaacccgagatttacttcttgctgagattgtag

SEQ ID NO: 183661 - DNA, 4968 bp, Artificial Sequence
  derived and/or modified sequence
atgagcgtgatgcagagcggcacccagatgatcaagctgaagcggggaaccaaaggtctggtccggctcttctacctcgacgagcatagaacacggctgagatggcgaccgagtcgtaagtctgaaaaggctaaaatcctgattgactcaatctacaaggtcactgagggcaggcagtctgagatcttccataggcaagccgagggaaactttgaccccagttgctgcttcactatttatcacgggaatcatatggagagccttgatctgattactagtaacccggaagaggcaagaacctggatcactggcctgaaatatctaatggccggcattagcgacgaagactcacttgcaaaacggcagaggacccacgaccagtgggtaaaacaaacattcgaagaggccgataagaacggcgacggactgctcaatatagaggaaattcatcagctgatgcataagctcaacgtgaacctgccaagacggaaggtcagacagatgttccaggaagcagacaccgatgaaaaccagggaacactgacattcgaggaattctgcgtgttctacaaaatgatgagcctgagacgcgacttgtacctgctactcctgtcttattcagacaaaaaagatcacttaaccgtggaagaactggcccagtttctgaaggtggaacagaaaatgaacaatgtgacaactgattactgtttggacattatcaagaagttcgaagtgtcagaagaaaataaagtgaagaatgtcctgggtatcgagggctttactaactttatgagatcacccgcctgtgatatattcaacccgctacatcacgaggtgtatcaggatatggaccagcctctctgcaactactacatcgctagcagccataacacttatctgacaggggaccagcttctgagtcagagcaaggtcgatatgtatgctagggtattgcaagaaggttgccggtgtgtggaagtcgactgctgggacggacctgatggcgaacccgtggtgcaccacggttatactctcacttccaagattctgttccgcgatgtagtagagaccatcaataagcacgctttcgtgaaaaatgagttccccgtgatcctgagcatcgagaaccattgttctatccagcagcagcggaagatagctcagtatttgaagggcatcttcggggataagctcgatctgagttctgtggacaccggggagtgcaaacagcttccatcgcctcagagcctcaagggcaaaatccttgttaaggggaagaaattaccatatcatctgggcgacgacgctgaggaaggagaagtgagtgacgaagattccgctgatgaaatcgaggacgagtgcaagtttaagttgcactacagcaatggcacaacagagcaccaagttgagtcgttcattcgaaagaagctagagtcactgctgaaagagtcacagattagggataaagaggacccagattctttcaccgtgagagccctgttgaaagctactcacgagggcttaaacgcacacctgaaacagtctcccgatgtgaaggaatccgggaaaaaatcccacggtcgcagtctgatgaccaatttcggtaagcacaagaagactactaagtcccgcagcaagagctatagcactgacgacgaagaagacacgcagcagtctacaggaaaggaaggaggccaactgtataggctgggccgccgacgaaagaccatgaaattatgtcgtgaactcagcgatctagtggtctacacaaactctgtcgcagcacaggacattgtggacgatgggactacgggaaacgtgctatccttctcggaaactcgcgctcatcaggtcgtgcagcagaagagcgagcagtttatgatatataatcagaaacagttgacacgcatctaccctagcgcatatagaattgactcatccaatttcaaccctctcccctattggaacgccgggtgtcagctggtcgcactaaattaccagtccgaggggcggatgatgcagctgaatcgcgctaagtttaaggccaacgggaactgcggatacgtgctcaagccacagcagatgtgcaaaggcaccttcaatccgttcagcggagatcctctcccggctaacccgaagaaacagctgattttgaaggttatttccggacagcaactaccgaagccacctgatagtatgttcggtgatagaggagagattatagatccatttgtagaggtggaaatcatcggactccctgtcgactgctgtaaggatcagacgcgggtggtggacgataatggttttaatcccgtttgggaggagactctcactttcactgtgcatatgcccgagattgcactggtccgttttctggtgtgggaccatgatccaatcgggagggactttgttggacagcgcacagtcactttcagttcactcgttcccgggtatagacatgtctatctggagggtctgactgaagcctccatattcgtccacattacaatcaacgaaatttacggaaaaaaccgccagttgcagggactgaaaggcctgtttaataaaaatccaaggcattcatcctcagagaataattctcattacgttcgcaagcgatcaataggcgatagaattctccgtaggacagcctctgctccggctaagggtcggaaaaaaagcaaaatgggattccaagagatggtggagataaaagatagtgtatccgaagccacccgcgaccaagatggggtgctgcggcgcaccacccgaagccttcaggctcgtccggtgagcatgcccgttgatcggaacttactgggggcactaagcctgcctgtatccgaaacagcaaaagatattgagggaaaggagaactccctggccgaggacaaagacggccggaggaagggaaaagcgagcatcaaagacccccattttctcaatttcaacaagaaactgagctcatcatcatccgccctgctccataaagataccagtcagggggacactatcgtgtccacggcccatatgtccgtcaccggagagcaactggggatgagctctcccaggggtggaaggactaccagcaatgccacaagtaactgccaagaaaatccatgcccgtccaagagcttgagcccaaaacagcatctagcccccgacccagtcgttaatcctacacaggaccttcacggagtcaagatcaaagagaagggcaatccagaggattttgtggagggaaagtccatcctgtctgggtccgtactgtcccactctaaccttgagattaagaacctggaggggaatcgcggcaaaggaagggcggcaacgagttttagtttgtctgatgtttctatgctgtgctccgacatcccggacctccactccaccgctattctccaagaaagtgtaatcagccatttgattgataacgtgacactgactaacgaaaacgaaccaggtagctcaatcagtgctctaattgggcagttcgatgagactaataaccaggctttaaccgtagtgagccacctacataatacatccgtgatgtctggacactgccccctcccatctctaggtttaaaaatgcccataaagcacggtttctgcaaagggaaatcaaagtcttcgttcctatgttcttcccctgagctgattgctctgagttccagtgagactaccaagcacgccacaaatactgtctatgagacgacgtgtacacctatcagtaagacaaagccagacgacgacttaagttcgaaggccaagaccgctgctctggagtctaacctacccgggagtcccaacacctctcgcgggtggttgcccaaatccccgacaaaaggcgaggactgggagacgctgaagtcctgctcgccagcttcatctcccgacctgacactggaggatgtgatcgcggaccccactctttgtttcaattcaggcgaatcgtcactggtggaaattgacggggagtccgagaatctgtcgctgacaacatgtgagtataggcgagaaggaacgtcccagttggcaagtccgttgaaattaaagtacaaccagggggtggttgagcacttccagcggggactccgcaacggttattgcaaagaaacacttcgaccgtcggtgcccgagatatttaataacatccaagacgttaaaacacagagtatatcctatttggcataccagggcgccggttttgttcataaccactttagcgactccgatgctaagatgttccagacttgcgtgccacagcagagttctgcgcaggacatgcacgtgcctgtgccaaagcagctggcacatctgcccttacccgccttaaaactacccagcccgtgcaagtctaaatctctaggagatctgacatcagaggacattgcctgcaattttgagtccaagtatcagtgtatcagcaagagcttcgtcaccactgggatccgcgacaagaaaggggttactgtaaagacgaaatccctcgagccgatcgatgcgctgaccgagcagctgcggaaactagtgtcgttcgatcaggaggacaattgccaggtcctctactccaaacaggacgccaatcaacttccgcgtgctctcgtccggaagttgtcatcgaggtcacagtcacgggtgcggaatatcgccagccgggccaaggagaaacaggaagccaacaagcagaaagtacccaatccctctaacggcgcaggcgtggtactacggaataaaccaagcgcccctactccagctgtgaatagacactccacgggaagctacatagctggctacctgaaaaataccaaggggggcggtctggaagggcgaggcatacccgaaggtgcgtgtactgcattgcactacggtcatgtggaccagttttgcagcgataactccgtgttgcagaccgagccttcttctgacgacaaacccgaaatctattttttgctcaggttgtag

SEQ ID NO: 183662 - DNA, 4968 bp, Artificial Sequence
  derived and/or modified sequence
atgagcgtgatgcagagcggcacccagatgatcaagctgaagcggggcactaagggtttagtcaggcttttttacctggatgaacataggacacgactgagatggaggccaagcagaaaaagtgaaaaagcgaaaattctgatcgactccatttacaaggtcacagagggccggcaatccgagattttccaccgacaggctgaagggaactttgatcccagctgctgtttcactatttaccatgggaaccatatggaatctctcgacctcataacatctaaccccgaagaagcccggacatggatcacaggcttgaaatacttgatggctgggatttcggacgaagactctttggccaagaggcagcgtacccatgaccaatgggttaagcaaaccttcgaagaggccgataagaacggagatggcctgctgaacatcgaggaaattcaccagttaatgcacaaattaaatgtgaatctcccacggcggaaagtgcgccaaatgtttcaggaggccgataccgatgagaatcaaggcaccctgaccttcgaagaattctgcgtgttttacaagatgatgtctctgcggagggacctatacctactcctgctgtcctactcagataaaaaggatcacctcactgttgaagaactggcccaattcttgaaagtggagcagaaaatgaacaatgtgactacggactattgtcttgatattatcaaaaaatttgaggtgtcagaagaaaataaagtcaaaaatgtactcggaatcgaagggttcactaattttatgcggagccctgcttgcgatattttcaatcctctgcatcacgaagtgtaccaggatatggaccagcccctgtgcaattactatatcgcgtcatcacataacacgtacctgaccggcgatcagctgctctcccagagtaaggttgatatgtacgcccgcgtcctccaagagggatgcagatgtgtggaggtagattgttgggacggcccagatggggaaccggttgttcaccatggatacaccttaacttccaaaatcttgtttagagacgtggtggagaccatcaataaacatgcctttgtaaagaatgaatttccagttatcctcagcattgaaaatcattgtagcattcaacaacagaggaaaattgctcagtacttgaagggaatttttggagataaactggacctctccagtgttgacaccggagagtgtaaacagctcccaagcccccagtcactgaaggggaagatcctagtgaaggggaaaaagctgccctaccacctgggagatgatgcagaggagggagaggtgagcgatgaagacagcgctgatgaaatcgaggatgaatgcaagttcaaactccactacagcaatggcaccacagaacaccaggtggagagttttattcggaaaaaactggagtcactcctcaaggaatcccagatacgggataaggaagatccagattctttcaccgtgcgcgccctcttgaaagccacacacgagggcttgaatgcacatttgaagcagagccccgacgtcaaggaatccggaaagaaatcccacgggcgcagcctcatgaccaattttgggaagcataaaaaaaccacaaaatccagaagcaagtcctactcaaccgacgatgaggaggatacacaacagtccacaggtaaagagggcggccagttgtacagactcggacggagacggaagacaatgaaattatgtcgagagctgtcagacctggttgtttacacaaactccgtggccgcccaggacatcgtcgacgatggaacaacaggcaatgttctttctttctcagaaactcgagctcaccaagtggttcagcaaaagtcagagcagttcatgatatataatcagaagcagctcactcgaatctatccgtctgcttatcgaatcgatagctcaaatttcaatcctctcccttattggaatgctgggtgtcagctggtggcactcaattaccagtcagaaggtaggatgatgcagctaaaccgcgcaaagttcaaggccaatggtaattgcggctacgtgcttaaaccccaacagatgtgtaaaggtaccttcaatcccttcagcggagacccgctgcccgcaaacccaaagaagcaactgattcttaaggtgatttcaggtcagcagttacctaaaccccctgatagtatgtttggcgacagaggggaaataattgacccctttgttgaggtggagattatagggcttcctgtggattgttgtaaggaccaaacgagagtagtcgatgataatggatttaacccagtatgggaagagactttgaccttcaccgtccacatgcccgagatcgccttggtgcgcttcctcgtctgggaccacgacccaattggtagggattttgtcggtcagagaactgtcactttctcatcactggtgccaggataccggcatgtgtacctggagggcctcacagaggcttccatctttgttcatatcacaataaatgagatctacggcaaaaatcgacaactccaaggactgaagggtttgttcaataaaaaccctcgccacagttcctcagaaaacaatagccactatgtgcgcaaaagatctattggggacaggattcttaggaggacagctagcgccccagctaaagggagaaaaaaaagcaaaatgggatttcaggagatggtcgaaataaaggattccgtgagtgaagccacgagagaccaagacggagttctgcggcgaacgacgaggtcccttcaggcccgacctgtgagcatgccagtcgatcggaatctactcggagccctttccctgcccgtctcggagaccgccaaggacatagaggggaaggagaactcactggcagaagacaaagacggccgtagaaaggggaaggcaagcatcaaagatccccatttccttaactttaacaagaagctgagttcgagctcaagcgctctgcttcacaaagacacttctcagggagacacaatcgtcagtacagcccacatgagcgtgaccggtgagcagctgggaatgtctagcccacgtggaggccgtacaacgtcaaacgctacatctaattgtcaggagaacccttgtccaagcaagagtttatcccccaagcaacatcttgcccctgatcctgtggtgaaccccacccaggatttgcatggagtcaaaattaaagaaaaaggcaaccccgaggacttcgtggaggggaagagcattctgtccggttcagtgttgagtcactcaaatctcgaaataaagaaccttgaaggaaaccggggtaaaggtcgggcggcaacgagtttctcactgagtgacgtgagcatgctatgtagtgatatcccagatctgcactctacagccatactgcaagaaagcgttattagtcatctcatcgataatgtgacactaacaaacgagaacgaacctgggagcagcatttctgctttgataggacagtttgatgagacgaacaatcaggctttgacagtggtgtcacacttacataatacttccgtgatgagtgggcattgtcctctcccctcacttggtctcaaaatgccaataaaacatggcttctgtaagggcaagtccaagtcttcctttctgtgcagtagccccgaactgatcgctctctctagctctgaaacaaccaagcacgccacaaacaccgtctacgagacaacctgtactcctatctcaaaaactaaacctgatgacgatctgtccagtaaggctaaaaccgccgccctggagtctaatctcccaggctcacctaacacgtctaggggctggctgcctaaaagccccactaagggtgaagattgggaaaccctgaagagttgtagccctgcaagctcaccggatcttaccctggaagatgtcattgccgatccaacattgtgctttaattcaggggagtcaagtctcgttgaaatagacggcgaatctgagaatctgtccctgactacttgcgagtaccgcagggaaggcacgtcacagttggccagtccactaaagctgaaatacaaccaaggcgtggtcgaacacttccagagaggattgcgtaacggctattgcaaggagaccctcagacccagcgtcccggagatatttaacaacattcaagatgtaaaaacccagtctatatcttacctggcatatcagggcgcaggatttgtccataaccacttctccgactccgatgcaaaaatgttccagacatgtgtaccccagcagtcatctgctcaggatatgcatgtgcctgtgcctaaacaactggcacacctccctcttcctgcattgaagctgccatcaccatgcaaaagtaagtctctaggagatcttacctcagaagatattgcctgcaactttgagtcgaaataccagtgcatctcgaagtcgttcgtgacaacaggcattcgggacaaaaagggggtgactgtgaagaccaagtccctggaacctatagatgccctgacagagcagttgagaaagctggtgtcattcgaccaagaagacaattgccaagtgttgtatagcaagcaggacgccaaccaacttcctagggcactggtaagaaagctgtcctcacggagtcagtctcgagttcggaatattgcatcacgtgccaaggaaaaacaagaggccaataaacagaaagtccccaacccgtcaaacggagccggggttgtgctgcgaaacaaaccctccgctcctactcctgccgtcaaccgtcacagcaccggaagttatatcgcggggtatctcaaaaacaccaagggcggcggcctggaaggaagaggcattcccgaaggagcatgtacggccctgcactacggccacgtggaccagttctgttcagacaattcagttctacagaccgagccttcctctgacgacaagcctgagatttatttcctgctcaggctttag

SEQ ID NO: 183663 - DNA, 4968 bp, Artificial Sequence
  derived and/or modified sequence
atgtctgttatgcagagcggaacgcagatgatcaagcttaaacggggtacgaaggggctggtcagattgttctacctagatgagcacagaactcggctacgttggcggccatcacgaaaatctgaaaaagctaaaattcttattgacagcatctataaggtgacggaggggcgtcagtcagaaatatttcaccgtcaggccgaaggcaattttgatccatcgtgttgtttcactatataccacgggaatcatatggagtccctggacctaattacatccaatccagaggaagcacgaacctggatcacgggtttaaagtatttaatggctggcatcagcgatgaggattccttagccaagaggcagcgaactcacgaccagtgggttaagcagactttcgaagaagccgataaaaatggcgacggtcttctgaacatcgaggaaattcaccagttgatgcacaagctaaacgttaacctacccagaaggaaggtccgtcagatgtttcaggaggcagatactgatgagaaccagggaactctgacttttgaagagttctgtgtcttttacaaaatgatgtctttgagacgcgacctgtatctgctccttctgtcttacagcgacaagaaggaccatcttacggtcgaagagctggcccagtttcttaaagtcgagcaaaagatgaataatgtgactacagactactgtctcgacattattaagaagttcgaggtgtcagaggagaacaaggtcaagaatgtactgggtatcgaagggttcaccaacttcatgaggagtccagcctgtgacatatttaacccacttcatcacgaggtataccaagacatggatcaacctctctgcaattactacatcgcttcttcgcacaacacatacctgacgggggaccagctgctaagccagtccaaagttgatatgtacgctcgagtcctccaagaaggttgcaggtgcgttgaggttgactgctgggatgggcctgacggggagccggtggttcaccacggatatactctaaccagtaagattctgtttagagatgtggtggaaacaattaacaagcacgcattcgttaagaatgagtttccagttatactgagtattgaaaaccattgctccatccagcagcagcgcaagatcgcccaatatctgaaagggatcttcggcgacaagttggatctgagctcggtggacacgggagagtgtaagcaactcccatcgccgcagtctctgaaggggaaaatcctggtgaaaggcaagaaattgccttaccaccttggcgacgatgctgaggagggtgaagtttcagatgaggattccgctgatgagattgaggacgagtgcaaattcaaactacattacagcaacggcacgaccgagcaccaagtggagagcttcattcggaagaagctcgaatcattactgaaggaatcacaaatccgtgacaaggaggaccccgactcatttactgtgagagccctcttaaaggctacacatgaaggactgaatgctcacctcaaacagtctccagatgtgaaagagagcggcaaaaaatcccatggcagatctttaatgactaatttcggtaagcacaaaaaaacaactaaatcaaggagcaaatcttattctacagacgacgaggaggatacccagcagtcaacgggtaaggaaggcggtcagctgtaccggctgggacgacggaggaaaaccatgaaattgtgtagggaactgtccgatttagtcgtgtataccaattccgtggctgctcaagacattgtggatgatgggaccacaggaaatgtgctctccttttcagagacaagggctcatcaggtggtgcagcagaagtcagagcagttcatgatctataatcagaagcagctcactaggatttatccttcagcataccggattgatagctctaactttaacccacttccctactggaacgctggatgccagctggtggcgttgaattatcagagcgaagggagaatgatgcaacttaaccgagctaagttcaaggctaatgggaattgcggctacgtgttgaagccccaacagatgtgtaaaggcaccttcaatcccttcagcggcgaccccctgcctgctaatcctaagaagcaacttatactgaaagtgatatccggccaacaactgcctaagccaccagattctatgttcggcgaccgaggtgagattatcgatccattcgtcgaggttgaaattattggactgccagtggactgttgcaaagatcagacacgagtcgtggacgataatggctttaatcctgtctgggaggagaccttgacattcacagtgcatatgcccgagatcgcgcttgtccgctttttagtgtgggaccatgaccccataggcagggactttgtaggacagaggactgttacattctccagtctcgttccagggtatagacatgtgtacttggaaggcttaaccgaggcgtccatctttgtgcacatcacaattaacgagatatacggcaaaaatcgacagttacagggcctgaaaggactgtttaacaagaacccaaggcactctagctcggagaataatagccattatgttaggaagcgctctatcggcgatagaattctgaggaggactgccagtgcacccgctaaggggcgaaagaagtccaagatgggattccaggagatggtggaaattaaggacagtgtgtctgaggccacccgagatcaggacggtgtcctgagacgtactacaaggtccttgcaggcccgacccgtttcaatgcctgtggataggaacctcctaggtgccttgagtctgccagtgagtgagaccgcaaaggacatcgaaggcaaggaaaattcattggctgaagataaggacggaaggagaaaaggcaaagcgtccatcaaggaccctcattttttgaacttcaataaaaaattatcctcctcatcaagcgccctgttacacaaggacaccagccagggcgataccattgtttcgactgcccacatgagcgtaacgggggaacagctgggcatgtcttcgccaagaggtggcagaactacgtccaacgcaaccagcaattgccaagagaatccttgccctagcaagagtttgagccctaagcaacatttggcgcctgaccccgtggtgaacccaacccaggatttgcatggcgtaaagattaaggaaaaaggcaatcctgaagattttgtggaagggaaatctatactcagtggctcagtgttgtcacattctaacctggagataaaaaacctggaggggaatagaggcaagggtagggccgcaacgtcgttctccctgagtgatgtctcgatgctgtgtagtgatattccagatctgcattctactgccattttgcaggagtcggttattagccaccttattgataatgttaccctcaccaacgagaacgaaccaggatcctctatttcggcgctcataggacagttcgatgagaccaataatcaagcactgactgtggtgtcccatttacataacacaagtgtcatgtctggacattgtcctctgccctccctggggttgaagatgcctatcaagcatggcttctgcaaaggtaagtccaagtcctcatttctctgtagctctccagagctgatcgctctgagctcttcggagaccactaagcatgcaaccaacacggtgtacgagacgacatgcacacctatcagcaagaccaagccagatgacgatctttcctccaaagccaagactgcggctctcgagtcaaaccttccgggttccccaaacacctcacgcggttggttgcccaaaagccctactaaaggcgaagactgggagaccctcaaatcttgcagccccgcaagcagtcccgacctgaccttggaggatgtgattgccgatccaaccctctgtttcaattctggggagtcgtctctcgtcgagattgatggggagtccgaaaacttgtccctcaccacctgcgagtatcggagagaaggaaccagccagctggctagtccattaaaactgaagtacaatcaaggagtcgtggaacactttcagcgaggtctccgtaacggatattgcaaggagacattacgcccaagtgtgcccgagatcttcaataatatccaggacgttaaaacacaaagcatttcctacctcgcatatcagggggctggcttcgtgcacaaccatttcagcgattccgacgctaaaatgtttcagacctgtgtgcctcagcagtcatctgcacaggacatgcatgtgcccgtaccaaaacaactcgcacacctgcccctgcccgcattaaagctgcccagcccgtgcaagtctaaaagcctgggtgacctgactagcgaggatattgcatgcaactttgaaagtaaataccagtgtatttccaaatcattcgtgacaacaggcattagagacaagaaaggcgtcaccgtgaagactaaatcactagagcccattgatgctttgacggagcagttgcgcaaattggtgagttttgaccaagaggataattgtcaggtgctctattcgaagcaagacgcgaaccaattacccagggccctggtccggaaattgtccagcagatcacaatcacgagtgcgtaatattgcatcacgcgctaaggaaaaacaggaggcgaacaaacaaaaggtccctaacccaagcaatggtgcgggagtcgtcctgcgtaataagccgagtgccccaactcctgctgtaaatagacacagcacgggatcctatatagccggatacttgaagaataccaagggcggaggattagaaggacggggtattcccgaaggtgcttgcacagcattgcattatggtcatgtcgatcagttttgcagcgataattctgttcttcagacagaacctagctcagacgacaagccggagatatacttcttattgcgcctgtag

SEQ ID NO: 183664 - DNA, 4967 bp, Artificial Sequence
  derived and/or modified sequence
atgtcggtcatgcagagcgggacgcagatgatcaagttaaagcggggaaccaagggactcgtacggctgttctaccttgacgaacatcggactagactgcgatggcggcctagtcggaaaagtgagaaggcaaaaatcctcatcgatagcatctacaaagtgacagaaggcaggcaatcggaaattttccaccgacaggccgagggtaacttcgacccgagctgctgctttacgatctaccacgggaatcacatggagtcgctggatctcattacctcgaatcctgaggaagctcggacctggatcaccggtttgaaatacctgatggcgggtatatccgacgaagacagcctcgcaaagagacagcgaacgcacgaccagtgggtgaagcagacattcgaggaggctgataagaatggggacggcctcctgaacattgaggaaatacaccaactgatgcataagctgaacgttaacttacctaggagaaaggtgaggcaaatgttccaggaagccgacacggacgaaaaccagggaacacttacgttcgaagaattctgtgtgttttataaaatgatgagtctgcggagggacctgtacttgctgctgctgtcctacagcgacaaaaaagatcacctgaccgtggaggaactcgcccaattcctgaaggtggagcaaaagatgaacaacgtcaccacagattattgccttgacatcatcaaaaaatttgaggtgagtgaagaaaacaaggtgaagaacgtgttgggcatcgagggcttcaccaatttcatgcgatctccagcctgcgacattttcaaccccctgcaccacgaggtgtaccaggatatggatcaacccttgtgcaattactacattgccagtagccataacacatatctgacaggcgatcagctgctctctcagagcaaagtggacatgtacgcgagagtccttcaggaaggatgtagatgcgtcgaagtggactgctgggatggacccgatggcgaacctgtggttcatcacggttacacactgacttcaaaaatcctattcagggacgtggtcgagacaataaataagcatgctttcgtcaagaatgaattccctgtcattcttagcatagaaaatcactgttctatccagcagcagagaaaaattgcgcagtatttgaaaggcattttcggcgacaagctagacctgtcgtccgtggataccggagagtgcaagcaattgcccagcccgcagtccctgaagggcaaaattctggtcaagggcaagaagctgccctatcatttaggtgacgacgcggaggaaggcgaggtgtcagacgaggactctgctgacgagatagaggacgagtgtaaattcaaactacactactctaacggaaccaccgagcatcaggtcgaatcttttatcagaaagaaacttgagtccttgctgaaggagagtcagatcagagacaaagaagacccggattcattcacagtgagagcgttgctcaaagctactcatgagggtctcaacgctcatttgaagcagagcccggacgtcaaggaatcaggaaaaaagagccacgggaggagtcttatgaccaatttcggaaagcacaagaagactaccaagagccgcagcaaaagctattccaccgatgacgaagaggacacccaacagtctacaggaaaggaaggaggccagctgtacaggctgggtcggagacgtaagacgatgaagctttgccgcgaactgtccgatctggtcgtttacacgaacagcgtcgcagctcaggacatcgtagatgatggcactacggggaatgtgctgagcttttccgaaacgcgggcacatcaggtcgttcagcagaaatcagaacaattcatgatttacaatcagaagcagcttacaagaatttaccctagcgcctaccgaattgactcctccaacttcaaccccctaccctactggaacgcaggatgccagctggtcgccctgaactaccagtctgaaggcagaatgatgcaactgaaccgggcaaagttcaaggcaaacggtaactgtggatatgttctgaagcctcagcagatgtgtaagggaacctttaacccattttctggagatcctctcccagccaacccaaaaaagcaattaatattgaaagtgatctccggccagcagttgcctaagccaccggattctatgtttggagatcgaggggagatcattgatccttttgtggaggttgagattatcgggctacccgtggactgttgtaaggatcagactcgcgttgtcgacgataatgggtttaacccggtatgggaagagacactgacttttacagttcacatgcccgagattgctttagtgcggttcctagtgtgggatcacgacccgatcggaagagatttcgtgggccaaagaaccgtgactttctctagtctggttccaggttacagacacgtctatctggaaggcctgactgaagcgagcatctttgttcacatcaccatcaatgagatctacgggaagaacaggcagttacaggggctgaaaggactcttcaacaagaacccgcgacattccagttccgaaaataactcccactatgtgaggaagcggtccattggcgacaggattcttcgaagaaccgctagtgcccctgctaagggccgtaaaaaatccaagatgggtttccaagagatggtggaaataaaggatagtgtatccgaggcaacaagggaccaggacggggttctcagacgtactacacggtccctgcaggctcggcctgtttccatgcctgtcgacagaaatctgttgggggctctctcattacctgtgtcggagacagcgaaggacattgaaggaaaggaaaactccctggcagaggataaagatggacggcgtaagggcaaagcctctattaaggacccacatttccttaatttcaataagaaactgtcttccagttctagcgccctgttgcacaaggacacctcccaaggcgacacaatcgttagtaccgctcacatgtctgtaacaggcgagcaacttggcatgtcctctcctagggggggacggaccacgtcaaacgctaccagtaactgccaggagaacccgtgtccaagtaaaagcctctcacctaagcagcatctggcgccagatccagtcgtgaatcccacccaggacctgcacggtgtcaagatcaaagagaagggtaacccagaggactttgtcgagggcaagagtatccttagtggctccgttctttctcactcaaatctagagatcaagaacctggaaggaaaccgcggtaaaggacgggcagccacgagcttttctctgtccgatgtgtctatgttgtgttctgacattcctgatctgcactccaccgccatcctgcaggagagtgtcatctcacatctgattgataatgttacattaacaaatgaaaatgagcccggtagctctatcagcgcactaatcggtcagtttgacgagacgaacaaccaggcgttaactgtcgtatctcatctccacaacaccagcgtcatgtccggccattgtccgctccccagtctggggcttaagatgcccattaaacacgggttttgcaagggaaagtccaagtcctcgtttctgtgtagcagtcctgaacttattgcactgtcctcctctgagacgaccaagcacgccacaaacactgtatatgaaacaacttgtactcctatctctaagactaagcccgacgacgacctgtcctccaaagctaaaactgccgcattggaaagcaacctacctggtagccccaatacgagccgaggctggctgcctaaaagccccaccaagggcgaggattgggaaacactcaagtcatgtagcccagcatctagtccagacttaacactagaggacgtcattgctgatccaactctttgtttcaattccggggagagcagtctcgtggaaattgatggcgaaagtgaaaacctttcactcactacatgcgaatataggagggaggggaccagccaattagctagccctttgaaactaaaatacaatcagggcgtcgtggagcacttccagcgagggctcagaaatggctattgcaaagagacgctcagacctagtgtaccagagatttttaacaatatccaagacgtcaaaactcagtccataagctacctcgcgtaccaaggagctggttttgtgcataaccactttagcgacagcgatgcaaaaatgttccagacttgtgtccctcaacagtcctccgctcaggacatgcatgtgcctgtaccgaaacagctcgcccacctgcctctgccagctctcaagctcccatctccctgtaagtcaaaatccttaggagaccttactagcgaggatatcgcttgcaacttcgagagcaaatatcaatgtatctcaaaatcatttgtcacaaccggaatccgtgataaaaaaggggtcacggtgaagactaagtcgcttgaaccaatcgatgccctcactgagcagctgcggaaattggtgagttttgaccaggaggacaattgccaggttttgtactcaaaacaggacgcgaaccagctgccaagagccctggtgcggaagttgtcatcccgctctcagtcccgggttcgcaacattgcatcacgggctaaggagaagcaggaggctaacaagcagaaggtgccaaacccgagcaatggggctggcgtggtcctgcggaataaacctagcgcacctacacctgcagttaatcggcacagtacagggtcatatatagcgggttaccttaagaatactaaaggtgggggtctggagggtaggggtatccccgagggcgcttgtactgcactgcactatggtcacgtggatcagttctgctccgacaattctgtcctccagaccgaacccagtagtgatgacaagcctgagatttactttctgcttcggctgta

SEQ ID NO: 183665 - DNA, 4967 bp, Artificial Sequence
  derived and/or modified sequence
atgagcgtgatgcagtctggaacacaaatgattaagttgaaacgaggcacgaagggacttgttaggctgttttacctcgacgagcaccggactaggctgcgatggcgcccatcacgaaagagcgagaaagctaagattctgatcgatagtatttataaggttacagaaggccgacagagtgaaatattccaccgccaggctgaggggaattttgatcctagctgttgtttcactatctatcacggaaatcacatggagtccttggatctgatcacctcaaatcccgaagaggctaggacctggattaccggcctgaaatacctgatggccggaatttctgacgaggattcattagccaaaaggcagaggacccacgatcagtgggttaagcagaccttcgaagaagctgataaaaacggcgacggcctgcttaacattgaagagatccatcagctcatgcataagcttaatgttaacctccctagacggaaggtgaggcagatgttccaggaagcggacaccgacgagaaccagggaaccctgaccttcgaggaattttgcgtgttttacaagatgatgtccctccgtagagacctgtacctgctccttctttcctattcagataagaaagaccacctgacagtagaggagttagcccagtttctgaaagtggagcagaagatgaataacgtgaccactgattattgcctagacatcatcaaaaagtttgaggtgtctgaagaaaacaaggtgaaaaatgttctcgggattgaaggattcacaaacttcatgaggagccctgcttgcgatatcttcaacccactccaccacgaagtgtaccaggatatggatcagcctttatgtaactattacattgcatcatcgcataatacttacctgactggcgatcagctgctctcccagtccaaggttgacatgtacgccagggtgctccaggaaggatgtcgctgcgtggaagtggactgttgggacggccctgatggggagcccgtggtacatcacggatacacgctgacttcaaaaatactttttagggacgtcgtggagacaataaataaacacgccttcgtcaagaatgagttcccagtgatactttctatcgagaaccactgctccatccaacagcagagaaagatcgcccaatatctgaagggcatcttcggtgataagctcgacctgtcgtcagtcgacaccggagaatgtaagcagctcccaagtccccaaagtctgaagggtaagattctggtgaaagggaaaaaactgccctaccacctgggcgacgacgccgaagaaggagaagtttctgatgaggatagtgcagatgagatcgaggatgagtgcaaatttaagctccactatagtaacggcaccacggagcatcaagtagaaagctttatccgaaaaaaattggaaagccttctgaaggagtcccagatacgtgataaagaggaccctgactcttttacagttagggcactgcttaaggccactcatgaaggactgaatgcacacttgaagcagagcccagacgtgaaggagtctggtaaaaaatcacatgggcgttcactgatgacaaacttcggcaagcacaagaagaccacaaaatctaggtcaaaatcttactctaccgatgatgaggaggatacccagcagtccacaggtaaagagggtggccagctgtaccggttggggagacgtcgcaaaaccatgaagctgtgtcgtgagttgtctgacctggtcgtgtataccaactccgtcgcagctcaggatattgtggacgacggaacgacgggaaatgtgctctcattctcggagacccgggcacaccaagtagttcaacaaaaatctgagcagttcatgatctacaaccaaaagcaactgacaaggatttacccatcggcataccggatcgacagttccaacttcaatccattgccctactggaacgcgggatgccaactggtggcacttaattaccaatcagaagggcgaatgatgcagctgaaccgagccaagttcaaggccaatggaaattgcggctacgtgttgaagccccagcagatgtgtaagggcacgtttaaccccttctctggggaccccctgcccgctaaccccaagaaacagcttatcctgaaagtgatttcaggtcagcagctgccaaaacctccggattctatgttcggcgacagaggtgagatcattgatcccttcgtggaggtggaaatcattggactgcccgtggattgctgcaaagaccagacacgagtggtggatgacaacggtttcaaccccgtctgggaagaaacactgacgtttacggtgcacatgcccgagattgcacttgtgagattcctcgtatgggaccacgacccaattggacgggactttgttggccagcgaaccgttacattctcctcattggtgccgggttatcgccatgtttacctcgaggggctaaccgaagcatctatcttcgtgcacatcaccattaatgaaatttacggcaagaatcgccagctgcaaggacttaaaggtctgttcaacaaaaacccccgtcattcttcttctgaaaataactcacactacgtacgcaaacgatcaattggcgatcggatcctgcggcgaactgcttctgcacctgccaagggaaggaagaaatcaaagatgggatttcaggaaatggtggagattaaagacagtgtcagtgaagccactagagatcaggacggtgtgctgcgcagaactactcgatctctgcaggcacgccctgtctccatgccagtggacagaaacctactcggcgcattaagtctccctgtcagcgagaccgccaaggacatcgaaggtaaggagaactccctcgctgaggacaaagacggtaggagaaaggggaaggcctccattaaagacccacacttcctaaattttaataagaagctgtccagttcttcaagtgccctgctgcacaaagatacatcacagggagacaccattgtgagcaccgctcatatgtccgtcacaggggagcagctgggtatgagttcacccagaggcggacggaccacgagcaatgccacgagcaactgtcaagaaaacccctgtccctccaaaagtctctctccgaaacagcacctagcgcctgaccccgtggtaaacccgactcaggatctgcacggggttaagatcaaggaaaagggaaaccccgaggacttcgtggaagggaagtccattctgtcaggctccgttttgtcacatagtaacctggagatcaagaacctggagggtaacagaggtaaaggacgcgctgctacctccttttcgctgtccgatgtctccatgctgtgttccgatatccccgatttacacagcaccgctatcctccaggagagtgttatttcccatttgatagacaatgttactctgaccaatgagaatgagcccggatcttctatctccgccctgattggccaattcgacgagacaaacaaccaggcactgactgtggtgtcgcacctgcataatacctccgtgatgagtggtcactgcccattgccttcactgggcctcaagatgcccattaaacacggcttctgtaaggggaaaagtaaatcctctttcctttgctcatcacctgagctgatagctctttcttctagtgagacgaccaaacacgccactaataccgtttacgaaaccacctgtacgccaatctcaaaaacaaagccggatgacgacctgagctccaaggccaagactgcagccctggaatctaacctgcccggatctccaaatacgtctcgaggttggctcccaaagtctccaaccaagggagaggactgggaaaccctcaagagttgttcgccagcctcaagccccgacctgactctggaggacgtgatcgccgatcccacattatgtttcaattccggtgagagctccctggtggaaattgatggagagtcagagaacctatcgctgaccacgtgtgaataccggcgtgagggcacctcccagctcgcctctcctctgaagctcaaatacaatcagggagtggtggagcactttcagagaggcctacggaatgggtattgtaaagagaccctgagacccagtgtgccggagatcttcaataatatacaggatgtcaaaactcagtcaatcagttatctggcctatcagggggctggcttcgtacataaccacttttccgatagcgacgctaagatgtttcagacctgtgtcccccaacaatcctcagcccaggatatgcatgtgcccgtgcccaagcagttggcacatctgcccctaccagcccttaagctaccttctccatgcaagtcgaaatctttaggggatcttacgtccgaggacattgcatgcaattttgagagcaagtatcagtgtattagcaaatcttttgtgactactggaatacgcgataagaagggggtcacagttaagactaagtcactggagccaatcgatgccctgacagagcagctgagaaaactggtctcgttcgaccaagaagataactgccaggtactgtattccaagcaggacgctaaccaactgccaagggcactggtcagaaaactgtcctcaaggtcacagagccgggtaaggaatattgcttctagagcaaaggagaagcaagaggccaataagcagaaggtgccgaatccaagcaatggtgccggtgttgtgctgagaaataagccttctgcgcctacaccagctgtgaataggcactctaccggcagctacattgcgggatatttgaaaaacactaaaggaggcggtctggaaggtcgcggtataccagagggcgcatgtacggctttacattatggccacgtggaccaattttgtagcgacaattccgttctgcagacagagccctcttcggacgacaagccagagatatatttcctgctaagactgta

SEQ ID NO: 183666 - DNA, 4968 bp, Artificial Sequence
  derived and/or modified sequence
atgagcgtgatgcagagcggcacccagatgatcaagctgaagagaggcaccaagggcctggtgagactgttctacctggacgagcacagaaccagactgagatggagacccagcagaaagagcgagaaggccaagatcctgatcgacagcatctacaaggtgaccgagggcagacagagcgagatcttccacagacaggccgagggcaacttcgaccccagctgctgcttcaccatctaccacggcaaccacatggagagcctggacctgatcaccagcaaccccgaggaggccagaacctggatcaccggcctgaagtacctgatggccggcatcagcgacgaggacagcctggccaagagacagagaacccacgaccagtgggtgaagcagaccttcgaggaggccgacaagaacggcgacggcctgctgaacatcgaggagatccaccagctgatgcacaagctgaacgtgaacctgcccagaagaaaggtgagacagatgttccaggaggccgacaccgacgagaaccagggcaccctgaccttcgaggagttctgcgtgttctacaagatgatgagcctgagaagagacctgtacctgctgctgctgagctacagcgacaagaaggaccacctgaccgtggaggagctggcccagttcctgaaggtggagcagaagatgaacaacgtgaccaccgactactgcctggacatcatcaagaagttcgaggtgagcgaggagaacaaggtgaagaacgtgctgggcatcgagggcttcaccaacttcatgagaagccccgcctgcgacatcttcaaccccctgcaccacgaggtgtaccaggacatggaccagcccctgtgcaactactacatcgccagcagccacaacacctacctgaccggcgaccagctgctgagccagagcaaggtggacatgtacgccagagtgctgcaggagggctgcagatgcgtggaggtggactgctgggacggccccgacggcgagcccgtggtgcaccacggctacaccctgaccagcaagatcctgttcagagacgtggtggagaccatcaacaagcacgccttcgtgaagaacgagttccccgtgatcctgagcatcgagaaccactgcagcatccagcagcagagaaagatcgcccagtacctgaagggcatcttcggcgacaagctggacctgagcagcgtggacaccggcgagtgcaagcagctgcccagcccccagagcctgaagggcaagatcctggtgaagggcaagaagctgccctaccacctgggcgacgacgccgaggagggcgaggtgagcgacgaggacagcgccgacgagatcgaggacgagtgcaagttcaagctgcactacagcaacggcaccaccgagcaccaggtggagagcttcatcagaaagaagctggagagcctgctgaaggagagccagatcagagacaaggaggaccccgacagcttcaccgtgagagccctgctgaaggccacccacgagggcctgaacgcccacctgaagcagagccccgacgtgaaggagagcggcaagaagagccacggcagaagcctgatgaccaacttcggcaagcacaagaagaccaccaagagcagaagcaagagctacagcaccgacgacgaggaggacacccagcagagcaccggcaaggagggcggccagctgtacagactgggcagaagaagaaagaccatgaagctgtgcagagagctgagcgacctggtggtgtacaccaacagcgtggccgcccaggacatcgtggacgacggcaccaccggcaacgtgctgagcttcagcgagaccagagcccaccaggtggtgcagcagaagagcgagcagttcatgatctacaaccagaagcagctgaccagaatctaccccagcgcctacagaatcgacagcagcaacttcaaccccctgccctactggaacgccggctgccagctggtggccctgaactaccagagcgagggcagaatgatgcagctgaacagagccaagttcaaggccaacggcaactgcggctacgtgctgaagccccagcagatgtgcaagggcaccttcaaccccttcagcggcgaccccctgcccgccaaccccaagaagcagctgatcctgaaggtgatcagcggccagcagctgcccaagccccccgacagcatgttcggcgacagaggcgagatcatcgaccccttcgtggaggtggagatcatcggcctgcccgtggactgctgcaaggaccagaccagagtggtggacgacaacggcttcaaccccgtgtgggaggagaccctgaccttcaccgtgcacatgcccgagatcgccctggtgagattcctggtgtgggaccacgaccccatcggcagagacttcgtgggccagagaaccgtgaccttcagcagcctggtgcccggctacagacacgtgtacctggagggcctgaccgaggccagcatcttcgtgcacatcaccatcaacgagatctacggcaagaacagacagctgcagggcctgaagggcctgttcaacaagaaccccagacacagcagcagcgagaacaacagccactacgtgagaaagagaagcatcggcgacagaatcctgagaagaaccgccagcgcccccgccaagggcagaaagaagagcaagatgggcttccaggagatggtggagatcaaggacagcgtgagcgaggccaccagagaccaggacggcgtgctgagaagaaccaccagaagcctgcaggccagacccgtgagcatgcccgtggacagaaacctgctgggcgccctgagcctgcccgtgagcgagaccgccaaggacatcgagggcaaggagaacagcctggccgaggacaaggacggcagaagaaagggcaaggccagcatcaaggacccccacttcctgaacttcaacaagaagctgagcagcagcagcagcgccctgctgcacaaggacaccagccagggcgacaccatcgtgagcaccgcccacatgagcgtgaccggcgagcagctgggcatgagcagccccagaggcggcagaaccaccagcaacgccaccagcaactgccaggagaacccctgccccagcaagagcctgagccccaagcagcacctggcccccgaccccgtggtgaaccccacccaggacctgcacggcgtgaagatcaaggagaagggcaaccccgaggacttcgtggagggcaagagcatcctgagcggcagcgtgctgagccacagcaacctggagatcaagaacctggagggcaacagaggcaagggcagagccgccaccagcttcagcctgagcgacgtgagcatgctgtgcagcgacatccccgacctgcacagcaccgccatcctgcaggagagcgtgatcagccacctgatcgacaacgtgaccctgaccaacgagaacgagcccggcagcagcatcagcgccctgatcggccagttcgacgagaccaacaaccaggccctgaccgtggtgagccacctgcacaacaccagcgtgatgagcggccactgccccctgcccagcctgggcctgaagatgcccatcaagcacggcttctgcaagggcaagagcaagagcagcttcctgtgcagcagccccgagctgatcgccctgagcagcagcgagaccaccaagcacgccaccaacaccgtgtacgagaccacctgcacccccatcagcaagaccaagcccgacgacgacctgagcagcaaggccaagaccgccgccctggagagcaacctgcccggcagccccaacaccagcagaggctggctgcccaagagccccaccaagggcgaggactgggagaccctgaagagctgcagccccgccagcagccccgacctgaccctggaggacgtgatcgccgaccccaccctgtgcttcaacagcggcgagagcagcctggtggagatcgacggcgagagcgagaacctgagcctgaccacctgcgagtacagaagagagggcaccagccagctggccagccccctgaagctgaagtacaaccagggcgtggtggagcacttccagagaggcctgagaaacggctactgcaaggagaccctgagacccagcgtgcccgagatcttcaacaacatccaggacgtgaagacccagagcatcagctacctggcctaccagggcgccggcttcgtgcacaaccacttcagcgacagcgacgccaagatgttccagacctgcgtgccccagcagagcagcgcccaggacatgcacgtgcccgtgcccaagcagctggcccacctgcccctgcccgccctgaagctgcccagcccctgcaagagcaagagcctgggcgacctgaccagcgaggacatcgcctgcaacttcgagagcaagtaccagtgcatcagcaagagcttcgtgaccaccggcatcagagacaagaagggcgtgaccgtgaagaccaagagcctggagcccatcgacgccctgaccgagcagctgagaaagctggtgagcttcgaccaggaggacaactgccaggtgctgtacagcaagcaggacgccaaccagctgcccagagccctggtgagaaagctgagcagcagaagccagagcagagtgagaaacatcgccagcagagccaaggagaagcaggaggccaacaagcagaaggtgcccaaccccagcaacggcgccggcgtggtgctgagaaacaagcccagcgcccccacccccgccgtgaacagacacagcaccggcagctacatcgccggctacctgaagaacaccaagggcggcggcctggagggcagaggcatccccgagggcgcctgcaccgccctgcactacggccacgtggaccagttctgcagcgacaacagcgtgctgcagaccgagcccagcagcgacgacaagcccgagatctacttcctgctgagactgtag

SEQ ID NO: 183667 - protein, 225 aa, Artificial Sequence
  derived and/or modified sequence
MAAAGGGGGGAAAAGRAYSFKVVLLGEGCVGKTSLVLRYCENKFNDKHITTLQASFLTKKLNIGGKRVNLAIWDTAGQERFHALGPIYYRDSNGAILVYDITDEDSFQKVKNWVKELRKMLGNEICLCIVGNKIDLEKERHVSIQEAESYAESVGAKHYHTSAKQNKGIEELFLDLCKRMIETAQVDERAKGNGSSQPGTARRGVQIIDDEPQAQTSGGGCCSSG

SEQ ID NO: 183668 - DNA, 678 bp, Artificial Sequence
  derived and/or modified sequence
atggcagccgccggcggaggtggcggtggagctgcagcagcaggcagagcctacagctttaaggtagttctactaggcgagggatgcgtagggaagacctccctcgtgcttaggtactgcgagaacaagttcaatgacaaacatattactactcttcaggcatcatttttaacgaagaaactcaatatagggggcaaacgagtgaatctggctatctgggacacggctggccaggagcggttccatgccttagggcccatttattaccgggattctaacggcgctattcttgtgtatgacatcactgacgaggactcttttcagaaggttaagaattgggtcaaagagctgagaaagatgttgggtaatgagatctgtctctgtatcgtgggtaataaaatcgatttggagaaagagcggcacgtatcaatccaagaagccgaaagctacgctgaatctgtgggagcgaagcattaccatacctcggcaaagcagaacaaaggcatcgaagaactctttcttgacttgtgcaaaagaatgattgaaactgcgcaggttgacgagcgggccaaaggcaatggtagttcacagcccggaaccgcaaggcgcggcgtgcagattatcgatgacgagccgcaggcccagacctccggaggcgggtgttgcagtagtgggtag

SEQ ID NO: 183669 - DNA, 678 bp, Artificial Sequence
  derived and/or modified sequence
atggctgctgctgggggcggcggcggcggcgctgctgctgctggccgggcctacagcttcaaggtggtgctgctgggggagggctgtgtgggcaagaccagcctggtgctgcgctactgtgagaacaagttcaatgacaagcacatcaccaccctgcaggccagcttcctgaccaagaagctgaacattggaggcaagagggtgaacctggccatctgggacacagctggccaggagcgcttccacgccctgggccccatctactacagagacagcaatggagccatcctggtgtatgacatcacagatgaggacagcttccagaaggtgaagaactgggtgaaggagctgaggaagatgctgggcaatgagatctgcctgtgcatcgtgggcaacaagattgacctggagaaggagagacatgtgtccatccaggaggccgagagctatgcagagagcgtgggcgccaagcactaccacaccagcgccaagcagaacaagggcatcgaggagctgttcctggacctgtgcaagaggatgattgaaacagcccaggtggatgagcgggccaagggaaatggcagcagccagcccggcacagcccggcggggcgtgcagatcattgatgatgagccccaggcccagaccagcggcggcggctgctgcagcagcggctag

SEQ ID NO: 183670 - DNA, 678 bp, Artificial Sequence
  derived and/or modified sequence
atggccgccgccggcggcggcggcggcggcgccgccgccgccggccgtgcctattcctttaaggtggtcctgctgggcgagggatgcgttggaaaaacgagtctcgtacttcggtattgtgaaaacaagttcaatgacaagcatatcaccaccctacaagctagttttctgactaaaaaactgaatatcggagggaagcgtgtgaatctggctatttgggataccgcgggccaagagaggtttcacgctctggggcccatctactatcgggactctaatggggcaatcctggtttatgacataaccgacgaggattctttccagaaagtgaagaattgggtcaaggaactccggaaaatgctcggaaatgagatctgtctctgcattgtcggcaataaaatagacttagagaaagaacgacatgtctctatccaggaagctgagagctatgcagagtccgtcggggcaaaacactatcatacaagcgccaagcagaacaaggggatcgaggagctgtttctggacctttgcaagcgaatgattgaaacggcccaggtagatgagagggcaaaaggtaatggatcaagccagcccggtacagctaggcggggtgtgcaaatcatcgacgacgagccccaagctcagaccagtgggggaggttgctgtagtagcggctag

SEQ ID NO: 183671 - DNA, 678 bp, Artificial Sequence
  derived and/or modified sequence
atggccgcagcgggaggcggaggcggaggcgctgctgccgctggccgagcctactcatttaaggtagtcctactgggggaaggctgtgtgggcaagaccagtctcgttttgcgatattgtgaaaataagttcaacgacaagcatattacaacactccaggcttcctttctcacaaagaaactgaacatcggtggtaagcgcgtgaacctggctatatgggatacagccggtcaggagagattccacgccctgggaccaatctactaccgcgactctaacggggctattttggtgtacgatatcaccgatgaagacagcttccagaaggtcaaaaactgggtaaaagagctcagaaagatgctaggcaacgagatctgcctctgtattgtcggtaacaaaattgatctggagaaagagcgccacgtaagtatccaggaagccgagtcttatgcagaaagcgtaggcgctaaacactaccatacatccgccaaacaaaataaaggtatagaagagctcttcctcgacctctgtaagcggatgatagaaaccgctcaggtggacgaacgcgctaagggtaacggttcttctcagcctggcaccgctcggcgtggcgtacaaataatcgatgatgagccccaggcccagacatctggagggggatgttgttcttccggctag

SEQ ID NO: 183672 - DNA, 6180 bp, Artificial Sequence
  derived and/or modified sequence
gagacgccattagagggaggcagagagggatcgttcttcgcttttcctccggtgcctgacgtggtgggctggggcccttcattctcggactttccctcagcccttccaggcctcgcccgaggagggcgtggggacagcgcccgggtcggcggggccggggcggtgggggctgagccggccgtggctgtgaaggcgctgccgcggctgtcgggagggcggcgcgacactcgggctcgggcggccgggaagcgacgggatggctgcggccggcggcggcggcggcggggcggcggcggcgggccgagcctactcgttcaaggtggtgctgctgggggaaggctgcgtggggaagacgtcgctggtgctgcgctactgcgagaacaagtttaacgacaagcacatcaccactctgcaggcatcattcttaacaaagaagttaaatattggtgggaaaagagtaaaccttgccatatgggatacggcaggtcaagagagattccatgcattgggtccaatttactacagagattcaaatggagcgattttagtttatgacataacagatgaagattcttttcagaaggtaaaaaactgggtcaaagaattacggaaaatgttgggaaatgaaatctgtttatgtatagttggtaataaaatagacttggaaaaggagagacatgtttccattcaagaagcagagtcgtatgcagaatctgtgggagcaaaacattatcatacttcagccaaacagaacaaaggaattgaggaactctttcttgacctttgtaaaaggatgatagaaacagcacaagtggatgagagagcaaaaggcaatggctctagtcagccgggaactgcaaggcgaggtgtacagattattgatgatgaacctcaagcccagaccagtggtggagggtgctgttcttctggataactgttcacgcctaagaaattaaaagacagaacaaaactgtggatcattgccctcaacatgaagactgccatattccaagtcacattattttaccaatggaattatagaattaacagtattttaaattacgtttataacactgcagagaccttaagtgctaaacttagtggagtttgtgaccagagaattggcattttctacaaatgtttttttttgttttttttttgtttttttttgtttttttttgagacggagtctcgctctgtcacccaggctggagtgcactggcttgatctcggctcactgcaagctccacctcccaggttcacgccattctcctgcctcagcctcccgagtagctgggactataggcgcccaccacgacgcccggctaattttttgtatttttagtagagacggggtttcaccaggttagccaggatggtctcgatctcctgaccttgtgatccgcccgcctcggcctcccaaagtgctgggattacaggcgtgagccaccgtgcccggcctacaaatgttaacaaagcaattaccaatggcctttttacatattttttctttaatgaggaataatatgcatgtagaaaagacctacttaaagtcttcatttatattctttcaaatcaaatctttatttaataacttatatatgttgttggaatggttacatttttgcagccctttgtattttgtggtagttgaaattgtatcacttctaaacagcaaactgtttttgtttttaattagcagatatctgaagtactatttttgcagggtttgcacaggcccgtaactgtctactactttgatataatctgtatacatcctgtatgctgagctggtaaaatacattgtaaattacatattaaatattttatctgcttttacaagcgcaaggtgcaaaaatatatacaatagtctcattgatgactgtaaagtgaattaacatttggtgattatgcctagcttttttgactaatataaagatcatagctccccttcacttctgtcttaacttgaacatggcgtgtttaaattttcatacatactttacttgaattattgctgttgtcacatatttttgcctctgtgagttcatctgatgattgagcagtagcatttgccttttgggttttttgtttgttattatagaagagatgacttctgctgattttgctttagaatggttaccttagaagaatttgggtggctcatgttgaatttcacttctgcaatagctttcattttctcataggctttataagagatgggttcagtggtatgagcagaggaagagatcccagatagtagccagttaaccaagactcattcatatagcacgtagtttatgttcctgaggcagcacttttagatcctttgtgagcaagttctatttgttcattgcttgccagagatgaacacagaatgttctgtttcattttacaagaactatcctgagtttctgtggatggaaacattacatgtaatgcagatatagtgaacactggaaagatttattaaagaattatatttgtgtatactttataaattagtccctcattagatttttttttcttaagcataagactgaacttaaatgtgttaattttagtagaatcaggcactgctcgcagaaggaacacagattgtagagattaacataaattgttcttgttctaatatatatattttttcatttctgtcgtgcttggaaaactagtaaatattatgtctaagataaaatggaatggcccctggatttacttcttataagaagcagtagtatgtaataaagctattagcatgagcaattaagaggctataaagagattatagttacaaaagaaatactgccatatttttaagttaataacttaaaccttctcaaatgggttaaaagttgaatgaattgacaccctgatgttatgatgttggaattttaacttaaactgggaggcattctgtgagccttcactttaccttctttaattattgtccttgctaaactcaacacagacttttctgttatgtgtttttgaggaagttggggtgggaagagtcagggagataagctaaaattgtcttcttttatggggtaattgtactctgtagtctcttggtttcctgtgaagttagtatttatgtgggggtgggggaaggtagcaagaatcatgggtatcacggtactttgtttttgacctcctggctctttcagacagagtgaagaaagcttttccattcttactgttgtagaagtagataggaaataagcttttctcattacagtgaaatatgttttaaaaactagagtagctgggcacagaggcatgcatttgtagggccagctacttgggagagtgaggcaggaggatcacttgaggccaggatttcaaatccagcctaggtaacactgagacctccatctcgtaaaaggcacaaaaactagttagagatgaaattgagctttattttaaaaaaacgttctaaagcctgataattggagagctatacttcagcttttcatcctactttaatgaaacagctagataggaacctctgctccagaattgccagataattattggtgggtcataactattcttcatattttttttttcttttttctcctttggtttctgtgttatctttcttaacctcacgtatttctttatcctttttagtgggggcctgtaattgaggctaattcaatagcaacaatagacaacatgatatggctgctgtcactttgaaacccaaaaggtctttgggtaggaatagagtaatgaaagaggaccagtcaacttcagtatatatacaaaggaaagacaaagagatgataaaccaaggctgaggaaatttttctgatgctttcttcatttctctaatataccttttgcattctttttctgataattgtgctattaggcagaagacacaagttaccacgttgtgtattaaaagcagtaggtaggttgtgccagtattttttcagccagtaagcatatacagttaacttatataattaaaaattggtttaagatagtgattaaaaatacctgaatattatgttaaaagtatacaatcattgtttctgtaatgatgatgggtattctgcttcttgtttttcattgtaattacaggggaagattgtttttgaaaatgtatattgccatgcttttggggtaagcagtaatgtgaaaagaaaaaagcattatgttattgtatgaaatataagtgttcagatttgttttgtctggggtgttgcctaagaataccctaaagctatggctgttactgcattgaaatcttttttttttttaatagtagccatatgttattagtggagtactttatatttgacattaaagtgaagaagaagagtagtacttcacttttaggtttttagtagtgaaagataaaattggaaaaatagggaaagagcatagggaggaatagaatggaagtcaagtaaataaaaaactacaacctgacagttttttaaatcactttgaaaagtacattacttttatcaaagagtttctaattaaggcaaactatgcattatgccaaatattaagaacattttaaaaatggattgtgatactgtttatttctttaattatataatttgcaattttctgtattataagtgctaccaggattctagatagttgatcttacatattcagatagtatagtttactcttataattacccgttacgttatctctaaaagtagtttgatctgtgcctttaacttttagaattcatcttttgacttgtttgccactgtagagttttcagttttctctgtagattcagtgtgacaaagagggaatacataatttgtgaccatttaagatgctgatattttctggaaaaggatatagatagtagtagtgacccgcaggagcctcacaataatgtctaaagatataaactgagtagatccctaagtactcttctctaaattataaaatgcattacctaggctttaatagttaaaagctggaatttattgaaccgcatctacttgatttcataatatgcattgattttagtatgttgctgttctgttatctgtaatcaactataacagagtaatatatttggtgttctggaccaaaattcgtgctacacatatgtctgatggcctttaccttttcaagaaaacagttgcaattttgagcaaaattttcctagttgtaatattttaatagtgttatgtattggaaaaaatttagaaatactcctaagagttttcaatttcaagcagaaatgcttctcttctaaataaataccacttaattgatagacctttagcagttcttgtgctatctaggatttatacatttttgcttttctggaaaactgctttggcgcattaacctttctactgcaacattttctcttcagtagatatatgagtaaacatgatgagttaatgttacacagcatacccagttaggtctcttattcttaaagcatctttctttagaagtctgcacatattttcaaatgcatcatattaaaggcacaagtcaagaggaggtggagttgcctacttcagtggcctttattcccactataccagttctcagtcttgattttgatactttctggcaactgtatcatctcttcactatcacgtattttaagaaaaagctaaggtgatttctttacatttgaacatgtgtagatcaatgagagaatggtgagggatagcaaggataaagtataatgttgaaaagtagaaagaagtggtatctgctaaactctagctttagtagcaagctattttaaggaaatcattgtatgtggtacttcctagaaatatgaaagttcctcattttgtatttaattatgtaagaaaatgttctaggaaaagaataaaaaacatatattgtcaaagtgccctttggtagtgctcccaaatggtagtaactattggtctctagtatatactcctcaaatatctttttgctatgtattaatatatctatatgtttacatatagaaatacatagtgttgtgggttttaaattttcacataaattgtgtcttacccatgtgttttgccatttgccttttctcttgccaacgtgtctaggagctctttggtaaatacagactttttcattttatttcctcccacatttctatggatgtgtcttgcctttttcttttttttttctttctttttttcttttttaaaatagcctctgact

SEQ ID NO: 183673 - DNA, 678 bp, Artificial Sequence
  derived and/or modified sequence
atggccgccgccggcggcggcggcggcggcgccgccgccgccggcagagcctacagcttcaaggtggtgctgctgggcgagggctgcgtgggcaagaccagcctggtgctgagatactgcgagaacaagttcaacgacaagcacatcaccaccctgcaggccagcttcctgaccaagaagctgaacatcggcggcaagagagtgaacctggccatctgggacaccgccggccaggagagattccacgccctgggccccatctactacagagacagcaacggcgccatcctggtgtacgacatcaccgacgaggacagcttccagaaggtgaagaactgggtgaaggagctgagaaagatgctgggcaacgagatctgcctgtgcatcgtgggcaacaagatcgacctggagaaggagagacacgtgagcatccaggaggccgagagctacgccgagagcgtgggcgccaagcactaccacaccagcgccaagcagaacaagggcatcgaggagctgttcctggacctgtgcaagagaatgatcgagaccgcccaggtggacgagagagccaagggcaacggcagcagccagcccggcaccgccagaagaggcgtgcagatcatcgacgacgagccccaggcccagaccagcggcggcggctgctgcagcagcggctag

SEQ ID NO: 183674 - protein, 464 aa, Artificial Sequence
  derived and/or modified sequence
MAMTAGTTTTFPMSNHTRERVTVAKLTLENFYSNLILQHEERETRQKKLEVAMEEEGLADEEKKLRRSQHARKETEFLRLKRTRLGLDDFESLKVIGRGAFGEVRLVQKKDTGHIYAMKILRKSDMLEKEQVAHIRAERDILVEADGAWVVKMFYSFQDKRNLYLIMEFLPGGDMMTLLMKKDTLTEEETQFYISETVLAIDAIHQLGFIHRDIKPDNLLLDAKGHVKLSDFGLCTGLKKAHRTEFYRNLTHNPPSDFSFQNMNSKRKAETWKKNRRQLAYSTVGTPDYIAPEVFMQTGYNKLCDWWSLGVIMYEMLIGYPPFCSETPQETYRKVMNWKETLVFPPEVPISEKAKDLILRFCIDSENRIGNSGVEEIKGHPFFEGVDWEHIRERPAAIPIEIKSIDDTSNFDDFPESDILQPVPNTTEPDYKSKDWVFLNYTYKRFEGLTQRGSIPTYMKAGKL

SEQ ID NO: 183675 - protein, 94 aa, Artificial Sequence
  derived and/or modified sequence
MAMTAGTTTTFPMSNHTRERVTVAKLTLENFYSNLILQHEERETRQKKLEVAMEEEGLADEEKKLRRSQHARKETEFLRLKRTRLGLDDFESLK

SEQ ID NO: 183676 - protein, 131 aa, Artificial Sequence
  derived and/or modified sequence
MAMTAGTTTTFPMSNHTRERVTVAKLTLENFYSNLILQHEERETRQKKLEVAMEEEGLADEEKKLRRSQHARKETEFLRLKRTRLGLDDFESLKVIGRGAFGEVRLVQKKDTGHIYAMKILRKSDMLEKEQ

SEQ ID NO: 183677 - DNA, 1395 bp, Artificial Sequence
  derived and/or modified sequence
atggccatgaccgccggcaccaccaccaccttccccatgagcaaccacaccagagagagagtgaccgtggccaagctgaccctggagaacttctacagcaacctgatcctgcagcacgaggagagagagaccagacagaagaagctggaggtggccatggaggaggagggcctggccgacgaggagaagaagctgagaagaagccagcacgccagaaaggagaccgagttcctgagactgaagagaaccagactgggcctggacgacttcgagagcctgaaggtgatcggcagaggcgccttcggcgaggtgagactggtgcagaagaaggacaccggccacatctacgccatgaagatcctgagaaagagcgacatgctggagaaggagcaggtggcccacatcagagccgagagagacatcctggtggaggccgacggcgcctgggtggtgaagatgttctacagcttccaggacaagagaaacctgtacctgatcatggagttcctgcccggcggcgacatgatgaccctgctgatgaagaaggacaccctgaccgaggaggagacccagttctacatcagcgagaccgtgctggccatcgacgccatccaccagctgggcttcatccacagagacatcaagcccgacaacctgctgctggacgccaagggccacgtgaagctgagcgacttcggcctgtgcaccggcctgaagaaggcccacagaaccgagttctacagaaacctgacccacaacccccccagcgacttcagcttccagaacatgaacagcaagagaaaggccgagacctggaagaagaacagaagacagctggcctacagcaccgtgggcacccccgactacatcgcccccgaggtgttcatgcagaccggctacaacaagctgtgcgactggtggagcctgggcgtgatcatgtacgagatgctgatcggctacccccccttctgcagcgagaccccccaggagacctacagaaaggtgatgaactggaaggagaccctggtgttcccccccgaggtgcccatcagcgagaaggccaaggacctgatcctgagattctgcatcgacagcgagaacagaatcggcaacagcggcgtggaggagatcaagggccaccccttcttcgagggcgtggactgggagcacatcagagagagacccgccgccatccccatcgagatcaagagcatcgacgacaccagcaacttcgacgacttccccgagagcgacatcctgcagcccgtgcccaacaccaccgagcccgactacaagagcaaggactgggtgttcctgaactacacctacaagagattcgagggcctgacccagagaggcagcatccccacctacatgaaggccggcaagctgtag

SEQ ID NO: 183678 - DNA, 285 bp, Artificial Sequence
  derived and/or modified sequence
atggccatgaccgccggcaccaccaccaccttccccatgagcaaccacaccagagagagagtgaccgtggccaagctgaccctggagaacttctacagcaacctgatcctgcagcacgaggagagagagaccagacagaagaagctggaggtggccatggaggaggagggcctggccgacgaggagaagaagctgagaagaagccagcacgccagaaaggagaccgagttcctgagactgaagagaaccagactgggcctggacgacttcgagagcctgaagtag

SEQ ID NO: 183679 - DNA, 396 bp, Artificial Sequence
  derived and/or modified sequence
atggccatgaccgccggcaccaccaccaccttccccatgagcaaccacaccagagagagagtgaccgtggccaagctgaccctggagaacttctacagcaacctgatcctgcagcacgaggagagagagaccagacagaagaagctggaggtggccatggaggaggagggcctggccgacgaggagaagaagctgagaagaagccagcacgccagaaaggagaccgagttcctgagactgaagagaaccagactgggcctggacgacttcgagagcctgaaggtgatcggcagaggcgccttcggcgaggtgagactggtgcagaagaaggacaccggccacatctacgccatgaagatcctgagaaagagcgacatgctggagaaggagcagtag

SEQ ID NO: 183680 - DNA, 1395 bp, Artificial Sequence
  derived and/or modified sequence
atggcgatgacggcaggcacaacaacaacgtttccaatgagcaatcacacccgagagcgcgtgaccgttgctaaacttacactggaaaacttctactctaacctgatcttgcagcatgaggaaagggagacacggcagaagaagctggaggtagccatggaagaggaagggctcgctgacgaggagaagaaactgcgccgatcacagcacgctaggaaggagaccgagtttctcaggctgaagaggacccggttgggcctcgatgattttgaaagcctgaaagtaataggacgaggagcctttggtgaagttcgactggtccaaaaaaaagacaccggccatatttacgccatgaagattctgcgtaagtcagatatgttggagaaagagcaggtcgcacacatccgcgcagagcgtgatatcctggttgaggccgatggggcatgggtagtgaagatgttttattcctttcaggataagagaaacctctacctgatcatggaattcctcccgggaggcgacatgatgacattgcttatgaagaaggacactctcaccgaggaggaaacgcagttctatatcagcgagacagtgctggccatcgacgcgatccaccagctcggctttattcaccgagacataaaacctgataacttacttctcgacgctaagggtcacgttaagctgagcgatttcggactttgcaccgggctgaagaaggcccataggacggaattctatcggaatctgacacacaaccccccctccgatttctccttccagaacatgaactcaaagaggaaggccgagacctggaagaaaaaccgcaggcagcttgcttactcaacagtgggaactcccgactatatagcccccgaggttttcatgcagaccgggtacaataaattatgcgattggtggtcacttggagtgataatgtacgagatgttgattggctaccctccattctgcagtgaaacaccccaggagacatatagaaaggttatgaattggaaagaaactctggtgttccccccagaagtgcccatctctgaaaaggcgaaggacctgatcctcaggttttgcatagattctgaaaatcggatcgggaattccggtgtagaggaaatcaaaggacatccctttttcgaaggggtggattgggagcacattagggagaggccagcagctattcctattgagataaagtcaatagacgacacttccaacttcgacgatttccccgagtccgacatactgcaaccggtgcctaatacaaccgagcccgattataagagtaaggactgggtgttcctcaactatacgtataagcgctttgagggcttaacccagagagggtccattcccacatacatgaaagccggtaagctctag

SEQ ID NO: 183681 - DNA, 285 bp, Artificial Sequence
  derived and/or modified sequence
atggccatgaccgccggaacaacaaccactttccccatgtccaaccacacgcgggaacgtgttacagtggctaagctgacccttgagaatttttattcaaacctaattctgcaacacgaagagcgggagactcgccagaaaaagcttgaagttgcgatggaagaggagggccttgctgacgaggagaagaagctgcgtcggagccagcacgcacggaaggagaccgagttcctgagactgaaaagaactcgcctgggcctggatgactttgagtcactgaagtag

SEQ ID NO: 183682 - DNA, 396 bp, Artificial Sequence
  derived and/or modified sequence
atggccatgaccgctggaactactacgacttttcccatgtcgaatcacaccagggaaagggtcactgtggccaagctgactctagagaacttttattctaacctgatcctgcagcacgaggagcgcgaaactcgccaaaagaagctggaggtggctatggaggaggaaggactggccgacgaggagaagaagctccgtaggagccagcacgcacgaaaagaaacggaattcctgagactgaaaagaaccaggttagggttggatgacttcgagagtcttaaagtcattggcaggggagcctttggggaggtgcgcctcgttcaaaaaaaggatacaggccatatttacgctatgaaaattctacgaaaaagcgatatgctggaaaaagagcagtag

SEQ ID NO: 183683 - DNA, 396 bp, Artificial Sequence
  derived and/or modified sequence
atggctatgaccgcgggcaccacgactacgttccctatgagtaatcacaccagggagagagtgacagtggcgaaattaacactggaaaacttttacagcaacctgatcctgcagcacgaggaaagggaaaccaggcaaaaaaaactggaggttgcgatggaggaggagggtttagctgacgaagaaaagaagctgcggcgctcccaacatgcccgcaaggagaccgaattcttgcgactgaagaggactaggctggggcttgacgactttgagagcctgaaggtgattggtagaggcgcatttggtgaagtgcgattggtacagaagaaagacaccgggcatatctacgcaatgaagattctccgcaagtccgatatgctcgaaaaggaacagtag

SEQ ID NO: 183684 - DNA, 396 bp, Artificial Sequence
  derived and/or modified sequence
atggctatgaccgcgggaaccacgacaaccttccccatgagtaatcacacccgagagagggtgaccgttgcgaagctgacactcgagaacttttattctaacctcattttgcagcatgaggaaagagaaacaaggcagaaaaaattggaggtggccatggaagaggagggtctcgccgacgaggagaaaaagttacggaggagccaacacgctagaaaagaaaccgagttcttacggttaaaacgcactcggctaggacttgatgatttcgagtccttgaaggttattggtaggggagccttcggggaagtgaggcttgtccaaaaaaaggacaccggtcacatctacgccatgaagatccttcgcaagtccgatatgcttgaaaaagaacagtag

SEQ ID NO: 183685 - DNA, 1395 bp, Artificial Sequence
  derived and/or modified sequence
atggccatgacagctggcaccaccaccaccttccccatgagcaaccacacccgggagcgggtgacagtggccaagctgaccctggagaacttctacagcaacctgatcctgcagcacgaggagcgggagacccggcagaagaagctggaggtggccatggaggaggagggcctggctgatgaggagaagaagctgcggcgcagccagcacgccaggaaggagacagagttcctgcggctgaagaggacccggctgggcctggatgactttgagagcctgaaggtgattggccgcggggcctttggagaggtgcggctggtgcagaagaaggacaccggccacatctatgccatgaagatcctgaggaagagtgacatgctggagaaggagcaggtggcccacatccgggcagagcgggacatcctggtggaggctgatggagcctgggtggtgaagatgttctacagcttccaggacaagaggaacctgtacctgatcatggagttcctgcctggaggagacatgatgaccctgctgatgaagaaggacaccctgacagaggaggagacccagttctacatcagcgagaccgtgctggccattgatgccatccaccagctgggcttcatccaccgggacatcaagccagacaacctgctgctggatgccaagggccacgtgaagctgagtgactttggcctgtgcaccggcctgaagaaggcccacaggacagagttctacagaaacctgacccacaacccccccagcgacttctccttccagaacatgaacagcaagaggaaggccgagacctggaagaagaacagacggcagctggcctacagcacagtgggcaccccagactacatcgcccctgaggtgttcatgcagacaggctacaacaagctgtgtgactggtggagcctgggcgtcatcatgtatgagatgctgattggctacccacccttctgcagcgagaccccccaggagacctacaggaaggtgatgaactggaaggagaccctggtgtttcctcctgaggtgcccatcagcgagaaggccaaggacctgatcctgcgcttctgcattgattctgagaacagaattggcaacagcggcgtggaggagatcaagggccaccccttctttgaaggagtggactgggagcacatccgggagaggcctgctgccatccccatcgagatcaagagcattgatgacaccagcaactttgatgacttccctgagagtgacatcctgcagcctgtgcccaacaccacagagccagactacaagagcaaggactgggtgttcctgaactacacctacaagagatttgagggcctgacccagaggggcagcatccccacctacatgaaggccggcaagctgtag

SEQ ID NO: 183686 - DNA, 5068 bp, Artificial Sequence
  derived and/or modified sequence
gagagttcagggaggccgccctgagattccggcgaggccgcgggtcccacctcccgggggcggggcgagggcggagcggggagaagggagctgacgggcgcccggccggctgcggtccgtgcggaggctgagccggccgcgggcgcgaccggaggcagtttccgttactatggcaatgacggcagggactacaacaacctttcctatgagcaaccatacccgggaaagagtgactgtagccaagctcacattggagaatttttatagcaacctaattttacagcatgaagagagagaaaccaggcagaagaaattagaagtggccatggaagaagaaggattagcagatgaagagaaaaagttacgtcgatcacaacacgctcgcaaagaaacagagttcttacggctcaaaaggaccagacttggcttggatgactttgagtctctgaaagttataggaagaggagcttttggagaggtgcggttggtccagaagaaagatacaggccatatctatgcaatgaagatattgagaaagtctgatatgcttgaaaaagagcaggtggcccatatccgagcagaaagagatattttggtagaagcagatggtgcctgggtggtgaagatgttttacagttttcaggataagaggaatctttatctaatcatggaatttctccctggaggtgacatgatgacattgctaatgaagaaagacaccttgacagaagaggaaacacagttctacatttcagagactgttctggcaatagatgcgatccaccagttgggtttcatccatcgggatattaagccagacaaccttttattggatgccaagggtcatgtaaaattatctgattttggtttatgtacgggattaaagaaagctcacaggactgaattttatagaaatctcacacacaacccaccaagtgacttctcatttcagaacatgaactcaaagaggaaagcagaaacttggaagaagaacaggagacaactggcatattccacagttgggacaccagattacattgctccagaagtattcatgcagactggttacaacaaattgtgtgactggtggtctttgggagtgattatgtatgaaatgctaataggatatccacctttctgctctgaaacacctcaagaaacgtacagaaaagtgatgaactggaaagaaactctggtatttcctccagaggtacctatatctgagaaagccaaggacttaattctcagattttgtattgattctgaaaacagaattggaaatagtggagtagaagaaataaaaggtcatcccttttttgaaggtgtcgactgggagcacataagggaaaggccagcagcaatccctatagaaatcaaaagcattgatgatacttcaaattttgatgacttccctgaatctgatattttacaaccagtgccaaataccacagaaccggactacaaatccaaagactgggtttttctcaattatacctataaaaggtttgaagggttgactcaacgtggctctatccccacctacatgaaagctgggaagttatgaatgaagataacattcacccataaccaagagaactcaggtagctgcatcaccaggcttgcttggcgtagataacaatacactgaaatactcctgaagatggtggtgcttattgactacaagaggaaattctacaggattaggatttctaagactactataggaattggttggcagtgccagctggctcttttttttaatattttattatttttgttaactttattatatgaaggtactggaataaaaggaacagacatccctttctaactgcactgcctacatgcgtattaaggtccattctgcctgtgtgtgctgtggctttgaactgtaacacctctaatcaattcaggagaaacacatatcatttaaagcaacataggctaacctgtaggtaacactgcagtattgatgttttactgcaaatcttatgggtctagataatcagtaaaagccatcttccatagttggtgttagaacattgccctattggtttggacatctgtagaatatatatgaagacaatttctgtaatggttttaagagatttaaaaagaaattcactggttctttacaaaatagaatttatcatcaagttattacacaaacttcacagtaaggagtgacaagtttataataaggaagacaaagtttaacaccttcactcaagcactccactaatatatttacgttgcattcagaaatactgatgaccttcatatacgtagtctgtatactcatagggagatgtactgtattatataacatgtaaagttgattttcttgtgacaagagaacttctttttttaacaagaggacatggcattattttaatttgattatggtgagttgaatttaagacatgaccatgaaggctgcttgtagaattagtgtatttttattaaactatttttttaaatgtcaaacttctatcatgtaaatggacttatagagaacaaaaagctatttactttggttttctagaaagttgttacatatcatggctggttaacttttatttcttttgatgaaaatttttcctttgatagtacttgtattattgtgccattattttcttatgctccaaatgtaccaaagatcttgaacagagtggatgttcacaactgagtagaattttcctttcctgtgggcatgctgtattcagacctgacagatctttgatagaggtcagcttattaaagggcaatattgttcttgtttagctacatcactgtggtgaatatagatggaattaaggaagtaaatgcaggccagggggttgtgatgagaggataggggagataatatcagcatcaaattctttgggtatctctctaagaattaaataatcttttctagcttaatattttaattctaattcaaacaactctgaggttttggtttcattagtaatagttgaggaataatatactagcaaagaatggcctaatgtttgtcataactgttaatggatgaaattttttaaagatacaaccatgataaccattataaatgatctatgatcaaaatctaaagtgatgaattatttgtaggaatgtcttcctaatggggaagaattgcataggagcattatgcaaatctacacaagcttttataaatgttgctgctgggtagctccacagtgtttcataaggccatcctgtttcccccaactcccccatttttggtttgtttctttttaaatatttgttgagtacttacgtgtttatctaacagttcacttccatttttctagtctggattttttgagtatttaggaaagagagctattaaaaactggggatttctcaatgtgactaactctaatttttctaattataactgcctttaattaacataatattaacttttgctgaggtttatgagattttctcaccccacatcgctcccctttttttaaaaaggactgttttgctagtgtgataatgaataggtaagatatgagataattgcaacattgtctagttctagtatggtaactattcttgaaatggtattgaaaaataccgttaattcaaattgacagagattgataaaaagaaactgatttacctaagtttactttttaattgcataatagagcattttttgttttgagttccctcattcttattaccagaaagagcttgcaaatagttttactttcttggcactggaagggtagttctggaaagctactttgttgagagtctcattcttccctggagttaatagagtgattcacaatctttggggttttctcctcatcaaaagcatttcttaagtgcctatctaaaagcaattaaagactgtgtctgccctttagaagctaagaatttgattcatgatgcaaattaactagataatttgcaaagtacccttgagattgaattttctctattatatatttcccatatttcaggtgaataatttaatttaaatgacaaaaccctatctagtcaactgggcataatgacattttctttaaattagactctattttgaattaaaagagttttattataaaccgtgtgtttttggtttttctaagtatatagaaagcttgtataattcagatttatcaatttcctgatttaatgtagactttgacttttttattaaaaacctttgtattaaagcaagttatgttatttttcttttatgcatttattactaacatagctttaaatctttaaatgtattgaagcattgtgctgtctgaaaataaggaattgcttataaaccagccacttctgaatacaatatgtagctgatttaataagctagttagtgaatggaaaataagtgtggagtattaaaaatgttctttggttggtaaggcctaagatagggtttcatttatttctatactttttctgttttttaaacacctgcatatttttatgtaaatctctaaatttaaaatattttaagtacatttatttttggtgttttattgtataaaaccttagacaatcaatcagtcagtctttactgacaggagcagcagctatctgtcttttgctgatctacaaataaatgaattgagaatttagtccatagaggtccctggctaccaaacacattctcctttgaattgttaaaattcagaacattcaaaataactgttttgctacaacccatgattattttcctgttgtgtttatttaaatttactttctctttagaagtgcacttatttctgaaaaatcttaatgaaacaaacgcttagaacaaatataaatatgagacacttgggactactagagatattttagatttttatgaaaaaaatgtgaggggatattgctgctttaaaaaggaataaagtaataaaaatatatctcagctatttttttaaagcaatataattcagcaattgtctagaaaagtaatcatgaggctactgagtttggtgttcagttactgagtttcaaaaatgttttggtggcatgaggacaaaatttcattgaaggtaagataagaataaaaactatgtttacaaaa

SEQ ID NO: 183687 - DNA, 285 bp, Artificial Sequence
  derived and/or modified sequence
atggccatgacagctggcaccaccaccaccttccccatgagcaaccacacccgggagcgggtgacagtggccaagctgaccctggagaacttctacagcaacctgatcctgcagcacgaggagcgggagacccggcagaagaagctggaggtggccatggaggaggagggcctggctgatgaggagaagaagctgcggcgcagccagcacgccaggaaggagacagagttcctgcggctgaagaggacccggctgggcctggatgactttgagagcctgaagtag

SEQ ID NO: 183688 - DNA, 396 bp, Artificial Sequence
  derived and/or modified sequence
atggccatgacagctggcaccaccaccaccttccccatgagcaaccacacccgggagcgggtgacagtggccaagctgaccctggagaacttctacagcaacctgatcctgcagcacgaggagcgggagacccggcagaagaagctggaggtggccatggaggaggagggcctggctgatgaggagaagaagctgcggcgcagccagcacgccaggaaggagacagagttcctgcggctgaagaggacccggctgggcctggatgactttgagagcctgaaggtgattggccgcggggcctttggagaggtgcggctggtgcagaagaaggacaccggccacatctatgccatgaagatcctgaggaagagtgacatgctggagaaggagcagtag

SEQ ID NO: 183689 - DNA, 1395 bp, Artificial Sequence
  derived and/or modified sequence
atggccatgaccgccggcaccaccaccaccttccccatgagcaaccacactagagagcgcgtgaccgtagctaagctgacacttgagaatttctactcaaacctgattctgcagcacgaggaaagggagacacgccagaagaaactggaggttgctatggaggaggaggggttggcggatgaggagaaaaagctcaggcgcagccagcatgctcgcaaagagaccgagttcctccgcctcaaacggacccggctcggccttgatgacttcgaatcattgaaagtgatagggcggggtgcctttggcgaagtgcggcttgttcagaagaaagataccggccatatctatgccatgaaaatcttgcggaagagcgatatgctggagaaggagcaggtggcccatatcagagctgagagagacatcctggtagaggcagatggcgcctgggttgtgaagatgttctactcattccaggacaagagaaacttgtacctgattatggaattcctgccaggtggggatatgatgaccctactcatgaagaaagacaccctgacagaggaggagacgcagttttatatttctgaaaccgtcctggccatagatgcaattcaccaacttgggttcatccatagggacattaagcccgacaacctgctgctggatgccaaaggccacgttaaactgagcgatttcggtctatgcactggcctgaaaaaggcccaccgaacagagttctaccggaacctcacacataatccaccttccgacttcagctttcaaaatatgaatagtaaacggaaggcagagacttggaagaaaaaccgcaggcaactggcctacagcaccgttggcacacctgattacatcgctcccgaggtatttatgcagacggggtacaataaactgtgtgactggtggagcctgggcgtgattatgtacgagatgttaatagggtacccaccattctgctctgagacaccccaggaaacctacagaaaggtcatgaactggaaggaaacattggtgtttccacctgaagtccccatcagtgagaaggccaaggatttgattctgcgattttgcatcgactcagagaacagaatcggtaactccggagtagaagagatcaaggggcacccctttttcgagggggttgactgggagcacattagagagagacccgccgctatccccatcgagattaaaagtattgatgatacttcaaactttgatgattttccggagtccgatattttacagccagtccccaacaccacggagcccgattacaaaagcaaagactgggtctttctcaattatacctataagaggttcgaaggcctaactcagaggggctctatcccaacatacatgaaagccgggaagctgtag

SEQ ID NO: 183690 - DNA, 285 bp, Artificial Sequence
  derived and/or modified sequence
atggccatgaccgccggcaccaccaccaccttccccatgagcaaccacacccgagagagggtgactgtcgcgaagttgactctcgaaaatttctattccaaccttatactgcagcacgaggaacgcgagacccggcagaaaaaactcgaggtagcgatggaggaggaaggactggccgacgaggagaaaaagctcagacggtcacagcatgcacgtaaagaaactgagtttctgcgcctcaaacgaaccaggctcggacttgatgactttgagagtcttaaatag

SEQ ID NO: 183691 - DNA, 396 bp, Artificial Sequence
  derived and/or modified sequence
atggccatgaccgccggcaccaccaccaccttccccatgagcaaccacaccagagaaagagtcacagtcgccaaactgactcttgagaacttttacagcaacctgattttacagcatgaagaaagagaaactaggcagaaaaagttagaggtggcaatggaagaagagggtctggcagacgaagagaagaaacttcggaggtcacagcatgccaggaaagagactgagttcctgaggctgaaacgcaccaggcttggtctggatgattttgagagtctgaaagtgataggtagaggagccttcggtgaagtgcggctcgtgcagaaaaaagacacaggccacatctacgcgatgaagatcttgcggaagtctgacatgttggaaaaggaacaatag

SEQ ID NO: 183692 - DNA, 396 bp, Artificial Sequence
  derived and/or modified sequence
atggccatgaccgccggcaccaccaccaccttccccatgagcaaccacacgcgggagcgggtgactgttgcgaaactgacattggagaatttctattctaatctgatcctgcaacacgaagaacgagagacaagacaaaaaaaactggaggttgctatggaagaggagggcctggcagacgaggagaagaagctgagaagatcccaacacgctcgcaaagagaccgagttccttaggctcaagcgaactaggcttggtctcgacgatttcgaatcgctgaaagttatcgggaggggcgcgttcggtgaggttcgactggtgcagaaaaaagatacaggacacatttacgcgatgaaaattttacgcaaatctgacatgctggagaaagagcagtag

SEQ ID NO: 183693 - DNA, 396 bp, Artificial Sequence
  derived and/or modified sequence
atggccatgaccgccggcaccaccaccaccttccccatgagcaaccatactcgtgagagagtgacggtggctaagctgacattggaaaacttctattcaaatcttatactgcaacacgaagagagggaaaccagacaaaagaaactggaagtggcaatggaagaggagggcctcgctgacgaagagaaaaagcttcgccggtcgcaacacgctagaaaggaaaccgaatttctgaggttaaagcgtactcgactgggtttggacgatttcgagagcctcaaagtgattggtagaggtgcgtttggtgaagtccgcctggtacaaaaaaaggatacaggccacatttacgcaatgaagattctgagaaaatccgacatgctggaaaaggagcagtag

SEQ ID NO: 183694 - DNA, 1395 bp, Artificial Sequence
  derived and/or modified sequence
atggctatgacagcgggaactaccactactttcccaatgagcaatcacacccgagagagagtcaccgtcgctaagctcaccctggaaaatttctatagcaatctcattctgcagcacgaggaacgagagacgcgccagaaaaaactcgaggttgccatggaggaagaggggctggcagatgaggagaaaaagctccggcgatctcagcatgctcgcaaggagacggagttcctccgcctcaaacgaactcgattaggactggacgactttgaatctctaaaggttatcgggaggggagcatttggggaagtccgtttagtccagaaaaaggacacagggcacatttatgcaatgaaaattctcaggaagtcggacatgctagagaaagagcaagttgcacatattcgcgcagaaagggacatcttggtggaagccgatggcgcatgggtagtgaagatgttctatagcttccaagacaaacggaatttgtacctaataatggaattcctgccgggtggtgacatgatgacactgctcatgaagaaagatactctgaccgaggaggaaacccagttttacatctccgagaccgtcctcgctatcgacgcaatccaccagcttggattcattcaccgcgatattaagcccgacaatctgctgctggatgctaaaggccacgtaaagctgtccgatttcgggctgtgcactggtctcaagaaggcacacagaaccgaattctatcgcaatctgacacacaatccgccatccgatttctcatttcaaaacatgaactcaaagcgcaaagccgaaacttggaaaaagaaccggagacaactcgcctacagtaccgtggggacaccagattatatcgcccctgaggtgttcatgcagacaggctacaacaagttgtgcgattggtggagcctgggcgtgattatgtacgaaatgctgattgggtaccctccattctgtagtgagactccccaggagacttatcggaaggtgatgaattggaaagagaccctggtcttcccaccagaagtccccatctctgaaaaggcgaaggatctcattctgcgcttctgcatcgactccgaaaatagaattgggaactccggcgtagaggaaatcaaggggcacccctttttcgaaggagtagactgggaacacatcagagaacgcccagccgcaatccctattgagattaagtctattgatgatacctccaacttcgatgattttccggagtctgacattctgcaacctgtgcccaacaccactgagccggactacaaatcaaaggattgggtcttcctgaactatacttacaagcggttcgagggcctgacccagagaggatccatcccaacttatatgaaggcaggcaagttgtag

SEQ ID NO: 183695 - DNA, 285 bp, Artificial Sequence
  derived and/or modified sequence
atggccatgacagccggaactactacaaccttccctatgtcaaaccacaccagagagcgcgtgaccgtcgccaagttgaccctggagaacttttactccaacctgattctgcagcacgaagagagggagacacgtcagaagaagttagaggtagccatggaggaagaggggctcgcggacgaagaaaagaagctgagaagatctcagcatgcccgaaaggaaactgaatttctccgccttaagcggaccaggctcggcttggatgacttcgagtctcttaagtag

SEQ ID NO: 183696 - DNA, 396 bp, Artificial Sequence
  derived and/or modified sequence
atggccatgactgcagggaccactaccaccttcccaatgtctaatcatacccgggagcgggtgactgtggccaagttgaccctggaaaacttctattcaaatctgatccttcagcacgaagagcgcgagaccagacagaaaaagctggaggtggctatggaggaggaggggttagccgacgaagagaaaaagctccgtcggtctcaacacgccagaaaggagacagagttcctcaggctgaagcggacaaggctgggtctggatgattttgagtccttaaaagtcatcgggaggggcgctttcggcgaggttcggctggtccagaagaaggatacggggcacatttatgctatgaagatcttaaggaagtctgacatgctggagaaagagcagtag

SEQ ID NO: 183697 - DNA, 396 bp, Artificial Sequence
  derived and/or modified sequence
atggctatgaccgcaggaaccacaactacattcccgatgtccaatcacaccagagaacgtgtgacagtagctaaattaacccttgagaatttctactcaaacctgatcctccagcatgaggagcgagagaccaggcagaaaaaattggaagtggctatggaagaagaggggctggctgacgaagagaagaagctgaggaggtctcaacacgccaggaaagaaacagagttcctgaggctaaagaggactcgcctcggtttggatgatttcgagagcctaaaagtaatcggcagaggggcattcggagaagtgcggttggtgcaaaaaaaagataccgggcatatatatgccatgaagattctgcggaagtcagatatgttagaaaaagagcagtag

SEQ ID NO: 183698 - DNA, 396 bp, Artificial Sequence
  derived and/or modified sequence
atggctatgactgctggaaccactaccacctttccgatgtctaaccatacacgcgaaagagtcaccgttgctaagctgactctggaaaacttctattctaatttaatccttcaacacgaggaacgtgagacacgtcagaaaaaattagaagtggctatggaagaagaagggctggcagacgaggagaagaagttaagacggtctcagcacgccaggaaggagactgaatttttgaggttgaaacgcacaagactcggcctagacgactttgaatcgctgaaggtgattggtcgcggtgcattcggggaagtgcgactggttcagaaaaaagacaccggccacatttacgcgatgaagattctgcggaagtcggatatgcttgagaaagagcaatag

SEQ ID NO: 183699 - DNA, 463 bp, Artificial Sequence
  derived and/or modified sequence
gtgcggaggctgagccggccgcgggcgcgaccggaggcaggcatctgaatttcatttgaaaatgaaatgggctgcacagtctggagaagtgtactataccttgttatagcacgttttggaatgacccagaattcagaatgaaatgggcagctatgagccccatccaaagtttccgttactatggcaatgacggcagggactacaacaacctttcctatgagcaaccatacccgggaaagagtgactgtagccaagctcacattggagaatttttatagcaacctaattttacagcatgaagagagagaaaccaggcagaagaaattagaagtggccatggaagaagaaggattagcagatgaagagaaaaagttacgtcgatcacaacacgctcgcaaagaaacagagttcttacggctcaaaaggaccagacttggcttggatgactttgagtctctgaaag

SEQ ID NO: 183700 - DNA, 545 bp, Artificial Sequence
  derived and/or modified sequence
acggcagtgaggtgaggctggtgagaggggaagtggcgacagttcagtcaactccctcaaaaccagtctggccttcaccaggcggagatgggtggggccgggaagacgggcgttgacgacagaaggctacttccggctgtgtttccgttactatggcaatgacggcagggactacaacaacctttcctatgagcaaccatacccgggaaagagtgactgtagccaagctcacattggagaatttttatagcaacctaattttacagcatgaagagagagaaaccaggcagaagaaattagaagtggccatggaagaagaaggattagcagatgaagagaaaaagttacgtcgatcacaacacgctcgcaaagaaacagagttcttacggctcaaaaggaccagacttggcttggatgactttgagtctctgaaagttataggaagaggagcttttggagaggtgcggttggtccagaagaaagatacaggccatatctatgcaatgaagatattgagaaagtctgatatgcttgaaaaagagcag

SEQ ID NO: 183701 - DNA, 548 bp, Artificial Sequence
  derived and/or modified sequence
attgtatgtgaattagccacccttgtgactatttgaggagagagaagttagtctaaaatattatgttaaattatgatattacataattttattgcataagttcatcaaactacttccatctgaaaaatcctgatctcaaaatagtttccgttactatggcaatgacggcagggactacaacaacctttcctatgagcaaccatacccgggaaagagtgactgtagccaagctcacattggagaatttttatagcaacctaattttacagcatgaagagagagaaaccaggcagaagaaattagaagtggccatggaagaagaaggattagcagatgaagagaaaaagttacgtcgatcacaacacgctcgcaaagaaacagagttcttacggctcaaaaggaccagacttggcttggatgactttgagtctctgaaagttataggaagaggagcttttggagaggtgcggttggtccagaagaaagatacaggccatatctatgcaatgaagatattgagaaagtctgatatgcttgaaaaagagcag

SEQ ID NO: 183702 - DNA, 526 bp, Artificial Sequence
  derived and/or modified sequence
agggcagcctgctcgacaaggccccttggcagacagtcagctccctccaaggccaaaccccaagttcaacatacatctttctctcccatttctgcaagcataactgtgaacagcataattcttttccgttactatggcaatgacggcagggactacaacaacctttcctatgagcaaccatacccgggaaagagtgactgtagccaagctcacattggagaatttttatagcaacctaattttacagcatgaagagagagaaaccaggcagaagaaattagaagtggccatggaagaagaaggattagcagatgaagagaaaaagttacgtcgatcacaacacgctcgcaaagaaacagagttcttacggctcaaaaggaccagacttggcttggatgactttgagtctctgaaagttataggaagaggagcttttggagaggtgcggttggtccagaagaaagatacaggccatatctatgcaatgaagatattgagaaagtctgatatgcttgaaaaagagcag

SEQ ID NO: 183703 - protein, 291 aa, Artificial Sequence [sequence omitted]

SEQ ID NO: 183704 - DNA, 876 bp, Artificial Sequence
  derived and/or modified sequence
atggcctctgtgaccctgtccgaggctgagaaggtatatattgttcatggtgttcaggaagacctacgggtggacggaaggggatgtgaggattaccgttgtgtcgaggtggagactgacgtcgttagcaatacttcagggtcggctcgggttaaactgggacacacggatattctcgtcggggtgaaggccgagatgggcacccctaaactcgagaagccaaatgagggctacttagagttctttgtggattgttctgcttccgctacgcccgagttcgaaggacgcggtggggatgacctgggaaccgagatcgccaatactctatacagaatttttaataacaaatcatcagttgacctcaagactctgtgcatatcacctcgtgaacactgttgggtcctgtacgtggatgtgctcctcttagaatgcggtgggaatttattcgacgcaatctctattgctgtgaaggctgctctgtttaacacacgtattccgcgagtcagagtactggaagacgaagagggctcaaaagacatagaactgagtgatgacccatacgactgtatcagactctctgtggagaatgtgccctgtattgttacgctctgcaagataggttaccggcacgtagtggatgccactctccaagaagaagcatgtagtctagcctctctgctggtgtccgtaacgtccaagggcgtggtaacgtgcatgagaaaggttggcaagggtagcctcgaccctgaaagtatctttgagatgatggaaactggaaaaagagtgggcaaagtactgcatgcaagtctccagtcagttgttcacaaagaggagtccctggggcctaaaaggcagaaggtcggtttcttgggctag

SEQ ID NO: 183705 - DNA, 876 bp, Artificial Sequence
  derived and/or modified sequence
atggcctctgtgaccctgtctgaggccgagaaggtgtacatcgtgcacggcgtgcaggaggacctgcgggtggatggccggggctgtgaggactaccgctgtgtggaggtggagacagatgtggtgagcaacaccagcggcagcgcccgggtgaagctgggccacacagacatcctggtgggcgtgaaggccgagatgggcacccccaagctggagaagcccaatgaaggctacctggagttctttgtggactgcagcgccagcgccaccccagagtttgagggcagaggaggagatgacctgggcacagaaattgccaacaccctgtaccgcatcttcaacaacaagagctctgtggacctgaagaccctgtgcatcagcccccgggagcactgctgggtgctgtatgtggatgtgctgctgctggagtgtggcggcaacctgtttgatgccatcagcattgctgtgaaggccgccctcttcaacacccgcatcccccgggtgcgggtgctggaggatgaggagggcagcaaggacatcgagctgagtgatgacccctatgactgcatccggctgtctgtggagaatgtgccctgcatcgtgaccctgtgcaagattggctaccgccacgtggtggatgccaccctgcaggaggaggcctgcagcctggccagcctgctggtgtctgtgaccagcaaaggagtggtgacctgcatgaggaaggtgggcaagggcagcctggaccctgagagcatctttgagatgatggagaccgggaagagggtgggcaaggtgctgcacgccagcctgcagagcgtggtgcacaaggaggagagcctgggccccaagaggcagaaggtgggcttcctgggctag

SEQ ID NO: 183706 - DNA, 876 bp, Artificial Sequence
  derived and/or modified sequence
atggccagcgtgaccctgagcgaggccgagaaggtgtacatcgtgcacggcgtccaagaagatctgcgtgttgacggaagggggtgtgaggattaccggtgcgtggaggtagagaccgatgtggtcagtaacacgtccggttccgcacgtgtgaaactaggacatacggacatcttggtcggcgtgaaggctgagatggggactccgaaactggagaagcctaatgaaggatatcttgaatttttcgtggattgttccgcctccgccacccctgaattcgagggacgaggtggggatgacctcggcacagaaattgccaacactttatatcgcatctttaacaacaagagcagcgtcgaccttaagaccctgtgcatctcccctcgcgagcattgctgggtcctctatgttgacgtgctgcttctggagtgcggcggtaatttattcgacgccatctctatcgcagtgaaggccgctttattcaacacacggatcccccgcgtcagggtactcgaagacgaggaaggttccaaggacatcgagctttccgatgacccctatgattgcattcggctgagcgtagaaaatgtaccatgtattgtgacactgtgcaaaatcggctacaggcacgtggtggacgctacactccaggaagaggcctgctccctggcttctctccttgtaagcgtcacctctaaaggcgtggtaacgtgcatgcggaaggtcggaaaagggtctcttgacccagaatctattttcgaaatgatggagaccggaaaacgcgtcggcaaggtcctccatgcgtccctgcagtccgtggtccacaaagaggagagcctggggcctaagaggcagaaggtgggcttcttgggctag

SEQ ID NO: 183707 - DNA, 876 bp, Artificial Sequence
  derived and/or modified sequence
atggcatcagtcactctttcagaagcggagaaagtatacattgttcacggcgtccaggaagacctccgtgtcgatgggagaggctgtgaagactaccgctgtgtggaggtggagaccgatgtggtgtctaacacatctggatccgctagggtgaagcttgggcacactgacattttagttggagtgaaggcagagatggggacaccaaagttagagaaacccaacgagggttacctagagttcttcgtggattgttcagcctcagccacccccgaatttgagggacggggaggggatgatctcggcaccgagattgcaaacacactgtaccggatcttcaataacaagagctcagtcgatctgaagaccctgtgtatctcccctcgcgagcactgttgggtcctgtacgtggatgtgctcttgctcgagtgcggcggtaacctcttcgatgctatttccattgcagtgaaagcagccctgtttaacactcgaattccgagggttcgagtgctcgaagacgaagagggatcgaaagacatcgagttgagcgacgatccctacgattgcattcgactttccgtcgagaatgtgccctgcattgtcactctttgtaagataggttaccgacacgtggtggatgcaactctgcaagaggaagcatgcagtctggcctcgttgctggtctccgtgactagcaagggcgtggtgacatgtatgaggaaagtagggaaaggcagccttgaccctgagagcattttcgaaatgatggagacagggaagcgcgtcggaaaagtgctgcatgcaagcctgcaatccgttgtacacaaagaagaaagcctgggcccaaagagacagaaggtgggttttctgggatag

SEQ ID NO: 183708 - DNA, 1055 bp, Artificial Sequence
  derived and/or modified sequence
gaggggacgcgcgcagatgacgtgcggctcgtggggcagctcggcagcatggcgtccgtgacgctgagcgaggcggagaaggtgtacatcgtgcatggcgtccaggaagacctccgtgtggatggccgtggctgtgaggactaccgatgtgtcgaagtggaaactgatgtggtgtccaacactagtgggtccgccagggtcaagctgggtcacacagacatcttggtgggagtgaaagcagaaatggggacgccgaagctggagaaaccaaatgaaggctacttggagttctttgttgactgttcagccagtgctacccctgaatttgaaggtagaggaggtgatgaccttggcaccgagatcgctaacaccctctatcggatatttaacaataaaagcagtgtcgacttaaagaccctctgcattagtcctcgggagcactgctgggttctctatgtggatgtgctgcttctggaatgtggtggaaatttgtttgatgccatttccattgctgtaaaggctgctctcttcaatacaaggataccaagggttcgagttttggaggatgaagaggggtcgaaggacattgaattgtcagatgacccttatgactgcatacgactaagtgtggagaatgtcccctgcattgtcactctgtgcaagattggctatcggcatgtggtggatgctactcttcaggaggaggcctgctcgctggccagcttgctggtgtcggtgaccagcaagggagttgtgacgtgcatgaggaaagtggggaagggcagcctggacccagagagcatcttcgagatgatggagactggcaagcgtgtgggcaaggtactgcatgcctccttgcagagtgttgtgcacaaggaagaaagcctggggcccaagagacagaaagttggattcctgggatgatttgcacatcaactgctcaactgtggattgttttttacttttccttttaaaccggttcgtatatatttttcttcgctgttacgaatttacagcagcatttgtacatgtaaaattaaaggctattttctggt

SEQ ID NO: 183709 - DNA, 876 bp, Artificial Sequence
  derived and/or modified sequence
atggccagcgtgaccctgagcgaggccgagaaggtgtacatcgtgcacggcgtgcaggaggacctgagagtggacggcagaggctgcgaggactacagatgcgtggaggtggagaccgacgtggtgagcaacaccagcggcagcgccagagtgaagctgggccacaccgacatcctggtgggcgtgaaggccgagatgggcacccccaagctggagaagcccaacgagggctacctggagttcttcgtggactgcagcgccagcgccacccccgagttcgagggcagaggcggcgacgacctgggcaccgagatcgccaacaccctgtacagaatcttcaacaacaagagcagcgtggacctgaagaccctgtgcatcagccccagagagcactgctgggtgctgtacgtggacgtgctgctgctggagtgcggcggcaacctgttcgacgccatcagcatcgccgtgaaggccgccctgttcaacaccagaatccccagagtgagagtgctggaggacgaggagggcagcaaggacatcgagctgagcgacgacccctacgactgcatcagactgagcgtggagaacgtgccctgcatcgtgaccctgtgcaagatcggctacagacacgtggtggacgccaccctgcaggaggaggcctgcagcctggccagcctgctggtgagcgtgaccagcaagggcgtggtgacctgcatgagaaaggtgggcaagggcagcctggaccccgagagcatcttcgagatgatggagaccggcaagagagtgggcaaggtgctgcacgccagcctgcagagcgtggtgcacaaggaggagagcctgggccccaagagacagaaggtgggcttcctgggctag

SEQ ID NO: 183710 - protein, 1066 aa, Artificial Sequence
  derived and/or modified sequence
MGFELDRFDGDVDPDLKCALCHKVLEDPLTTPCGHVFCAGCVLPWVVQEGSCPARCRGRLSAKELNHVLPLKRLILKLDIKCAYATRGCGRVVKLQQLPEHLERCDFAPARCRHAGCGQVLLRRDVEAHMRDACDARPVGRCQEGCGLPLTHGEQRAGGHCCARALRAHNGALQARLGALHKALKKEALRAGKREKSLVAQLAAAQLELQMTALRYQKKFTEYSARLDSLSRCVAAPPGGKGEETKSLTLVLHRDSGSLGFNIIGGRPSVDNHDGSSSEGIFVSKIVDSGPAAKEGGLQIHDRIIEVNGRDLSRATHDQAVEAFKTAKEPIVVQVLRRTPRTKMFTPPSESQLVDTGTQTDITFEHIMALTKMSSPSPPVLDPYLLPEEHPSAHEYYDPNDYIGDIHQEMDREELELEEVDLYRMNSQDKLGLTVCYRTDDEDDIGIYISEIDPNSIAAKDGRIREGDRIIQINGIEVQNREEAVALLTSEENKNFSLLIARPELQLDEGWMDDDRNDFLDDLHMDMLEEQHHQAMQFTASVLQQKKHDEDGGTTDTATILSNQHEKDSGVGRTDESTRNDESSEQENNGDDATASSNPLAGQRKLTCSQDTLGSGDLPFSNESFISADCTDADYLGIPVDECERFRELLELKCQVKSATPYGLYYPSGPLDAGKSDPESVDKELELLNEELRSIELECLSIVRAHKMQQLKEQYRESWMLHNSGFRNYNTSIDVRRHELSDITELPEKSDKDSSSAYNTGESCRSTPLTLEISPDNSLRRAAEGISCPSSEGAVGTTEAYGPASKNLLSITEDPEVGTPTYSPSLKELDPNQPLESKERRASDGSRSPTPSQKLGSAYLPSYHHSPYKHAHIPAHAQHYQSYMQLIQQKSAVEYAQSQMSLVSMCKDLSSPTPSEPRMEWKVKIRSDGTRYITKRPVRDRLLRERALKIREERSGMTTDDDAVSEMKMGRYWSKEERKQHLVKAKEQRRRREFMMQSRLDCLKEQQAADDRKEMNILELSHKKMMKKRNKKIFDNWMTIQELLTHGTKSPDGTRVYNSFLSVTTV

SEQ ID NO: 183711 - protein, 729 aa, Artificial Sequence
  derived and/or modified sequence
MGFELDRFDGDVDPDLKCALCHKVLEDPLTTPCGHVFCAGCVLPWVVQEGSCPARCRGRLSAKELNHVLPLKRLILKLDIKCAYATRGCGRVVKLQQLPEHLERCDFAPARCRHAGCGQVLLRRDVEAHMRDACDARPVGRCQEGCGLPLTHGEQRAGGHCCARALRAHNGALQARLGALHKALKKEALRAGKREKSLVAQLAAAQLELQMTALRYQKKFTEYSARLDSLSRCVAAPPGGKGEETKSLTLVLHRDSGSLGFNIIGGRPSVDNHDGSSSEGIFVSKIVDSGPAAKEGGLQIHDRIIEVNGRDLSRATHDQAVEAFKTAKEPIVVQVLRRTPRTKMFTPPSESQLVDTGTQTDITFEHIMALTKMSSPSPPVLDPYLLPEEHPSAHEYYDPNDYIGDIHQEMDREELELEEVDLYRMNSQDKLGLTVCYRTDDEDDIGIYISEIDPNSIAAKDGRIREGDRIIQINGIEVQNREEAVALLTSEENKNFSLLIARPELQLDEGWMDDDRNDFLDDLHMDMLEEQHHQAMQFTASVLQQKKHDEDGGTTDTATILSNQHEKDSGVGRTDESTRNDESSEQENNGDDATASSNPLAGQRKLTCSQDTLGSGDLPFSNESFISADCTDADYLGIPVEGEDPQRRDALHHQEARAGPPAAGARPEDPGRAQRHDHRRRRGERDEDGALLEQGGEEAAPGEGQGAAAAARVHDAEQVGLSQGAASSR

SEQ ID NO: 183712 - DNA, 3201 bp, Artificial Sequence
  derived and/or modified sequence
atgggctttgagctggataggttcgacggggacgtggatcccgacctgaaatgcgccctgtgtcataaggtcttagaggatcccctcaccaccccctgcgggcacgtgttttgcgccggctgcgttttaccctgggttgtgcaggagggcagttgccctgctagatgccgcggacggctctccgcaaaagaattgaaccatgttctcccccttaagaggctgattctcaaattagatatcaagtgcgcatatgctacccgtggatgtggcagagtggtgaagctacaacagctgcccgaacacctggagcgatgcgactttgcacccgcacgttgcagacacgcagggtgtggccaagtgctcctacgccgcgacgtggaagctcatatgagagacgcctgcgatgcacggcccgtcggtcgctgccaagaaggatgcgggctcccactcacccatggcgaacagagggcgggggggcattgctgcgcccgcgccctgagggcccataatggcgccctgcaggcgaggctgggcgctttgcataaagctcttaagaaggaggcgctgcgcgctgggaaacgggaaaaatcactagtggcccaactcgccgccgcacagctagagctgcagatgacagctcttcggtaccagaagaagtttacggaatactctgcgcgactggactctctctccaggtgtgtcgccgcccctccaggcggcaaaggtgaagaaactaagtccctgactctggtcttacaccgcgactccgggtctctgggctttaacatcattgggggacggcccagtgtcgataaccacgacggctcctcgtctgaaggcatttttgttagcaagatcgtggacagtggcccagccgcgaaggaaggcggactccagattcatgacaggattatcgaggtgaatggccgggatctcagcagagcgactcatgaccaagcagtcgaggcattcaaaaccgcgaaagaacctatagtggtacaggtcttgcggcggacacctcgcactaagatgttcactcccccatcagaatctcagttagttgacacagggactcagaccgacattacattcgagcacataatggccctgacaaaaatgagtagcccatctcccccggttcttgacccttatcttctgcctgaagagcaccccagtgcacacgaatattatgaccctaacgactacatcggtgacatacaccaggaaatggatagagaagagctggagctggaagaggtggacttgtacagaatgaattcccaagacaagcttggtttgactgtatgctaccggaccgacgatgaggatgatatcggaatctatatttccgaaatagacccaaattcgatcgccgccaaagatggaagaatcagggaaggcgaccgaataatccagatcaacggcatcgaggtgcaaaacagagaagaggctgttgctctgcttacatctgaggagaataagaactttagtttgctcatagctcgtccagaactgcaactggacgaaggttggatggacgacgaccgcaatgattttttggacgatcttcacatggacatgctcgaagagcagcaccatcaggccatgcagttcaccgcctccgtgcttcaacagaagaaacatgatgaggatggcggcaccaccgataccgccacaattctcagtaatcagcacgagaaggacagtggagttggcaggaccgatgagagtacccgcaacgacgaatcatccgagcaagagaacaacggcgatgatgccactgcgtcttccaaccccctcgccggtcagaggaagctgacctgtagccaggatacattaggatctggagatcttccattctctaacgagagcttcattagcgccgactgcaccgatgctgactatctggggattcctgtggacgagtgcgagcgtttccgagaacttcttgagcttaagtgtcaggttaagagtgcaacaccttacggcttgtattatcccagtggccccctggacgccgggaaatcagacccagagtctgttgacaaagaattagaactattaaacgaggagctgcgatccattgagctggagtgcctctccattgtgagagcccacaaaatgcagcaattgaaggagcagtaccgcgaaagttggatgttacacaattctggtttcaggaactataatacctcgattgatgttcggagacatgagctgtcggacatcacagagctcccagaaaagtcagataaggacagttcttccgcctataataccggcgagagctgtcggtcaactccactgaccctggaaatatctcccgataactcgctccgacgggcggcagaaggaatctcgtgcccatcttctgagggagcagtgggaacaacagaagcatacggaccagcatctaaaaaccttctttccatcacagaggaccccgaggtcggaactccaacctactctccaagcttgaaagaactcgaccccaaccagccattagaatctaaggaacggcgtgcctccgacggttctagaagtccaacaccctcgcagaaactggggtccgcttacctgccatcataccaccattccccttacaagcacgcccacatacctgcgcacgctcagcactatcagtcttatatgcagcttattcaacagaaatcagcagtggaatacgcccagtcacaaatgagcctcgtgtccatgtgcaaagatcttagcagtcctaccccttccgagcctcggatggaatggaaagtgaagatccgctctgatggcacaaggtacataacgaagcggcccgtccgggacagattgctcagagagcgggcactgaaaatccgtgaagagagatctgggatgactacggatgatgacgcagttagcgaaatgaaaatgggtcggtattggtctaaggaagaacgcaaacaacacttagtgaaggctaaagaacagagaaggcgtcgcgagtttatgatgcagagccggttggattgcttaaaggaacagcaagcggcagacgaccggaaggagatgaacatattagagctgtcacacaagaaaatgatgaaaaagcgtaataaaaagatttttgacaactggatgactatacaggaactgctgacacacggaacaaagagtcccgatggcacgagggtttacaactctttcctgagcgtgacaaccgtgtag

SEQ ID NO: 183713 - DNA, 2190 bp, Artificial Sequence
  derived and/or modified sequence
atgggctttgagctcgaccgcttcgacggcgatgtggatccagatttgaagtgtgcactgtgccacaaggttctggaggaccctcttacaacgccgtgtggccatgtcttctgcgctggctgcgtgttgccatgggtggtgcaggagggcagttgcccggcccgctgtcgagggagactatctgctaaagagcttaatcacgtcttacctctgaaacgacttatcctgaagctagacatcaaatgtgcctacgccaccaggggctgcggacgagtggtgaagctgcaacaactccccgagcacctggaacggtgtgacttcgcaccagccagatgtaggcacgcaggttgcggccaggtgctgcttcgccgcgatgtggaagcccacatgagggacgcgtgcgacgcaaggcctgtgggccgttgtcaggaaggatgtgggctgcctcttacacacggggaacagagagccgggggtcattgctgtgccagagcactgagggcgcacaatggagctcttcaagctagactgggagcgctgcataaggccctcaagaaagaggcactgagagctgggaagagggaaaagtctttagtggcacagctggctgccgctcaactggaactccagatgacggccctccggtaccagaaaaagttcaccgagtacagcgctcgcctggattccttgtctcgctgtgtggctgctcccccgggggggaagggggaggaaaccaagagtctcactctggttttacaccgggactccggatccttgggattcaatattattggcgggcgaccaagcgtagacaatcatgacgggtctagcagcgaaggtatattcgtcagcaaaattgttgatagcggacctgcagcgaaagaaggcggcctacagattcacgaccgtatcattgaagtgaatggccgggatctgtctcgtgctactcacgaccaggcagtagaggcattcaagaccgctaaggagcccatcgtggttcaggtactccggcgcacgccgcgcactaaaatgttcacacctcctagtgaaagtcagttagtggacactggtacacagaccgatatcacgtttgaacacataatggccttgaccaagatgtcctcccccagcccaccggtcctagacccttacctcctccccgaggagcacccatccgcccatgagtattacgatcccaatgactatattggggatatacatcaggaaatggaccgggaggagttagaactggaggaagtggatctctaccgaatgaactctcaggacaagttaggcctaacagtgtgctataggaccgacgatgaggacgacatcggaatttacataagcgagattgatccgaactctatcgctgcaaaggatgggagaattagagagggagataggataatccagatcaacggaattgaggtgcagaatagagaagaggccgtggccctgctgacatcagaagaaaacaagaacttctctctgctgatcgcacgccccgaacttcaactagacgaggggtggatggacgacgataggaatgattttcttgatgacttacatatggacatgctggaagagcagcaccatcaggctatgcagttcacggccagcgttctgcaacagaagaagcacgatgaggacggcggaaccaccgacaccgcgacaatcctgagcaatcagcatgagaaggatagtggcgtaggccgcaccgatgagtctactcggaacgatgagtcttcagaacaggagaataacggcgatgacgcaactgcatccagcaacccactcgcaggtcagcgtaagctgacatgtagccaggacacactcgggtcaggagatctgcccttcagcaatgagagctttattagcgcagactgcaccgacgcggattatctgggtatccctgtggaaggtgaagacccccagcggcgtgacgcactgcaccaccaagaagcgagggccggaccacccgccgccggggcaaggcctgaagaccccgggcgggcccagagacacgatcatagacggcggaggggggaacgagacgaagatggggccctgctggaacagggtggggaggaggccgcaccaggcgagggccagggggctgccgccgctgctagagttcacgacgctgagcaggttggcctttcacagggcgcagctagctccagatag

SEQ ID NO: 183714 - DNA, 3201 bp, Artificial Sequence
  derived and/or modified sequence
atgggctttgagctggacagatttgatggagatgtggaccctgacctgaagtgtgccctgtgccacaaggtgctggaggaccccctgaccaccccctgtggccacgtgttctgtgccggctgtgtgctgccctgggtggtgcaggagggcagctgcccagcccgctgccggggccgcctgagcgccaaggagctgaaccacgtgctgcccctgaagaggctcatcctgaagctggacatcaagtgtgcctatgccacccggggctgcggccgggtggtgaagctgcagcagctgcctgagcacctggagcgctgtgactttgccccagcccgctgcagacatgctggctgcggccaggtgctgctgcggagagatgtggaggcccacatgagagatgcctgtgatgcccggcctgtgggccgctgccaggagggctgcggcctgcccctgacccacggggagcagagagctgggggccactgctgtgcccgggccctgcgggcccacaacggggccctgcaggcccggctgggcgccctgcacaaggccctgaagaaggaggccctgcgggccggcaagcgggagaagagcctggtggcccagctggccgccgcccagctggagctgcagatgacagccctgcgctaccagaagaagttcacagagtacagcgcccggctggacagcctgagccgctgtgtggccgcccctcctgggggcaaaggagaggagaccaagagcctgaccctggtgctgcaccgggacagcggcagcctgggcttcaacatcatcggcggccggcccagcgtggacaaccatgatggcagcagcagcgagggcatctttgtgtccaagatcgtggacagcggccctgctgccaaggagggcggcctgcagatccatgaccgcatcatcgaggtgaatggccgggacctgagccgggccacccatgaccaggccgtggaggccttcaagacagccaaggagcccatcgtggtgcaggtgctgcggaggacccccaggaccaagatgttcaccccaccttctgagagccagctggtggacaccggcacccagacagacatcacctttgagcacatcatggccctgaccaagatgagcagccccagcccccctgtgctggacccctacctgctgcctgaggagcaccccagcgcccacgagtactatgaccccaatgactacatcggggacatccaccaggagatggaccgggaggagctggagctggaggaggtggacctgtacaggatgaacagccaggacaagctgggcctgactgtgtgctacagaacagatgatgaagatgacatcggcatctacatcagcgagattgaccccaacagcattgctgccaaggatggccgcatccgggagggggaccgcatcatccagatcaatggcatcgaggtgcagaaccgggaggaggccgtggccctgctgaccagcgaggagaacaagaacttcagcctgctgattgcccggcctgagctgcagctggatgagggctggatggatgatgacagaaatgacttcctggatgacctgcacatggacatgctggaggagcagcaccaccaggccatgcagttcaccgcctctgtgctgcagcagaagaagcatgatgaagatggcggcaccacagacacagccaccatcctgagcaaccagcacgagaaggacagcggcgtgggccgcacagatgagagcaccagaaatgatgagagcagcgagcaggagaacaatggagatgatgccacagccagcagcaaccccctggccggccagaggaagctgacctgcagccaggacaccctgggcagcggggacctgcccttcagcaatgaaagcttcatctctgctgactgcacagatgctgactacctgggcatccctgtggatgaatgtgagcgcttccgggagctgctggagctgaagtgccaggtgaagagcgccaccccctacggcctgtactaccccagcggccccctggatgctgggaagagtgaccctgagagcgtggacaaggagctggagctgctgaatgaggagctgcggagcattgagctggagtgcctgagcatcgtgcgggcccacaagatgcagcagctgaaggagcagtaccgggagagctggatgctgcacaacagcggcttcaggaactacaacaccagcattgatgtgagaagacatgagctgagtgacatcacagagctgcctgagaagagtgacaaggacagcagcagcgcctacaacacaggagagagctgccgcagcacccccctgaccctggagatcagcccagacaacagcctgcggcgggctgctgagggcatcagctgccccagcagcgagggcgctgtgggcaccacagaggcctacggccctgccagcaagaacctgctgagcatcacagaagatcctgaggtgggcacccccacctacagccccagcctgaaggagctggaccccaaccagcccctggagagcaaggagcggcgggccagtgatggcagccgcagccccacccccagccagaagctgggcagcgcctacctgcccagctaccaccacagcccctacaagcacgcccacatcccagcccacgcccagcactaccagagctacatgcagctgatccagcagaagtctgctgtggagtatgcccagagccagatgagcctggtgtccatgtgcaaggacctgagcagccccaccccatctgagcccaggatggagtggaaggtgaagatccgcagtgatggcacccgctacatcaccaagaggcctgtgcgggaccggctgctgcgggagcgggccctgaagatccgggaggagaggagcggcatgaccacagatgatgatgctgtgtctgagatgaagatgggccgctactggagcaaggaggagaggaagcagcacctggtgaaggccaaggagcagaggagaagaagagagttcatgatgcagagccggctggactgcctgaaggagcagcaggccgcagatgacaggaaggagatgaacatcctggagctgagccacaagaagatgatgaagaagaggaacaagaagatctttgacaactggatgaccatccaggagctgctgacccacggcaccaagagcccagatggcaccagggtgtacaacagcttcctgtctgtgaccaccgtgtag

SEQ ID NO: 183715 - DNA, 2190 bp, Artificial Sequence
  derived and/or modified sequence
atgggctttgagctggacagatttgatggagatgtggaccctgacctgaagtgtgccctgtgccacaaggtgctggaggaccccctgaccaccccctgtggccacgtgttctgtgccggctgtgtgctgccctgggtggtgcaggagggcagctgcccagcccgctgccggggccgcctgagcgccaaggagctgaaccacgtgctgcccctgaagaggctcatcctgaagctggacatcaagtgtgcctatgccacccggggctgcggccgggtggtgaagctgcagcagctgcctgagcacctggagcgctgtgactttgccccagcccgctgcagacatgctggctgcggccaggtgctgctgcggagagatgtggaggcccacatgagagatgcctgtgatgcccggcctgtgggccgctgccaggagggctgcggcctgcccctgacccacggggagcagagagctgggggccactgctgtgcccgggccctgcgggcccacaacggggccctgcaggcccggctgggcgccctgcacaaggccctgaagaaggaggccctgcgggccggcaagcgggagaagagcctggtggcccagctggccgccgcccagctggagctgcagatgacagccctgcgctaccagaagaagttcacagagtacagcgcccggctggacagcctgagccgctgtgtggccgcccctcctgggggcaaaggagaggagaccaagagcctgaccctggtgctgcaccgggacagcggcagcctgggcttcaacatcatcggcggccggcccagcgtggacaaccatgatggcagcagcagcgagggcatctttgtgtccaagatcgtggacagcggccctgctgccaaggagggcggcctgcagatccatgaccgcatcatcgaggtgaatggccgggacctgagccgggccacccatgaccaggccgtggaggccttcaagacagccaaggagcccatcgtggtgcaggtgctgcggaggacccccaggaccaagatgttcaccccaccttctgagagccagctggtggacaccggcacccagacagacatcacctttgagcacatcatggccctgaccaagatgagcagccccagcccccctgtgctggacccctacctgctgcctgaggagcaccccagcgcccacgagtactatgaccccaatgactacatcggggacatccaccaggagatggaccgggaggagctggagctggaggaggtggacctgtacaggatgaacagccaggacaagctgggcctgactgtgtgctacagaacagatgatgaagatgacatcggcatctacatcagcgagattgaccccaacagcattgctgccaaggatggccgcatccgggagggggaccgcatcatccagatcaatggcatcgaggtgcagaaccgggaggaggccgtggccctgctgaccagcgaggagaacaagaacttcagcctgctgattgcccggcctgagctgcagctggatgagggctggatggatgatgacagaaatgacttcctggatgacctgcacatggacatgctggaggagcagcaccaccaggccatgcagttcaccgcctctgtgctgcagcagaagaagcatgatgaagatggcggcaccacagacacagccaccatcctgagcaaccagcacgagaaggacagcggcgtgggccgcacagatgagagcaccagaaatgatgagagcagcgagcaggagaacaatggagatgatgccacagccagcagcaaccccctggccggccagaggaagctgacctgcagccaggacaccctgggcagcggggacctgcccttcagcaatgaaagcttcatctctgctgactgcacagatgctgactacctgggcatccctgtggagggggaggacccccagaggagagatgccctgcaccaccaggaggcccgggccggccccccagctgctggggcccggcctgaggaccccggccgggcccagagacatgaccacagaagaagaagaggagagagagatgaagatggagccctgctggagcagggcggggaggaggccgcccctggagagggccagggcgctgctgctgctgcccgggtgcatgatgctgagcaggtgggcctgagccagggcgccgccagcagcaggtag

SEQ ID NO: 183716 - DNA, 3201 bp, Artificial Sequence
  derived and/or modified sequence
atgggcttcgagctggaccggttcgacggcgacgtggaccccgacctcaaatgcgccctgtgtcacaaggttctggaagatcccctcactaccccatgcggacacgtcttttgtgctgggtgtgtactcccctgggttgtgcaggaaggttcatgccccgcacgctgcagaggccggcttagtgctaaggaattaaatcacgtgcttccccttaagcggctcatcttgaagttagacataaaatgtgcttacgcaactcgcggctgtggcagagtggtcaaattacagcaactccccgagcacttggagcgctgtgacttcgccccagctcgctgtagacatgctggctgcggacaagtgctgcttcgtcgggacgtggaggcccatatgcgggatgcgtgtgatgccaggcccgtcgggcgttgccaagagggatgtggattgcctttaacacacggtgaacaacgagctggagggcattgttgcgccagggcactacgagctcataatggcgctctgcaggctagactaggagccctccacaaggccctcaagaaggaggccctgcgggccggtaagagggagaagtccctggttgcccagctggcggccgctcaactggagcttcagatgaccgctctaaggtatcagaagaagtttacggagtattctgcacgccttgatagcttaagtagatgtgtggccgccccccccggaggcaaaggagaggaaacgaaaagcttgaccttagttctgcatcgggactcgggtagcctcggcttcaacattattggtgggcgacccagcgtggacaaccacgatgggagctcctctgagggaatatttgtgagcaagatcgtcgattccgggccagccgccaaggaaggcggactgcagattcacgaccgaatcattgaagtgaatggccgtgacctgtctcgcgccactcacgatcaggcagtggaggctttcaagactgccaaggaaccaattgtcgtgcaggtactacgacgcaccccgcgcaccaaaatgtttactccaccctcagagagtcaattggtggacaccgggacccagaccgacatcacattcgagcatatcatggccctgacaaaaatgtcctctcctagtccacccgtcctggacccttacctgctccccgaagagcacccttccgctcatgagtattatgatcctaacgattacatcggtgatatccatcaggaaatggatcgtgaggagctagagttagaggaggtcgacctctatcgcatgaattcacaggacaagttgggcttgaccgtgtgctaccgtacggacgacgaagacgatatcggtatttatattagcgaaatcgacccaaattctatagccgccaaagacggacgcatcagagagggcgacaggatcatacagatcaacggcatcgaagtgcaaaatcgggaggaagctgtagccctgctgaccagcgaagaaaacaaaaacttctcactgctcatcgctagaccagagttgcagctggatgaaggttggatggatgacgaccggaacgactttttggacgacctccacatggatatgctcgaggagcagcaccatcaggccatgcaattcaccgcatctgtattgcaacagaaaaagcacgatgaggatggcggtacgaccgacaccgcgactatcctcagcaatcagcacgagaaggatagcggagtcggccggacggacgaaagtactcgtaacgacgaatcctcagaacaggaaaataatggagacgatgctacggcctccagcaaccccttggccggacagcgcaagttgacttgcagccaagataccctcggcagcggggacctccccttttctaacgagagcttcatctccgcagattgtaccgatgcagactacctcggtattccggttgatgagtgcgaaagatttcgggaacttctggaacttaaatgtcaggttaaatccgctaccccatacggactttattaccctagtggacccctggacgccggaaagtcagatcctgagagtgtggacaaggaacttgagctgctcaatgaagaactcaggtccattgagctagaatgtctctcaattgttagagcccacaagatgcagcagttgaaagaacaataccgggagagttggatgctccacaattcagggtttagaaactataacacctccatcgacgtcagacgacatgaactgagcgacatcacagaattacccgagaaaagtgacaaggatagcagtagcgcctacaacaccggagaatcctgccgatctacccccctgacgctggaaatcagcccagacaattctctgcgcagggctgccgaggggatttcttgcccttctagcgagggagccgtgggcactaccgaagcctatggtccagcatcaaagaacttgcttagcattacggaagacccagaggtgggcacgcctacatactctccgtctctcaaagaactggaccccaatcagcctctcgaatctaaagaacggcgtgctagtgacgggtcccggagccccacgccgtctcagaagttaggcagcgcttatctgcccagttatcaccatagtccgtacaagcacgcacacatccccgcccacgcccagcattaccagtcatatatgcagttgatccaacagaaaagcgccgtggaatacgcacaaagccaaatgtctctagttagcatgtgcaaggacttatcgtcacctactccatcagagcctcgcatggaatggaaggtcaagatcagaagcgatggcacccgttatatcaccaagagaccagttcgcgatcgtctcttgcgcgaacgggctttgaaaattcgggaggaaaggtctggaatgacaactgacgatgatgcagtctccgaaatgaaaatgggaaggtactggtctaaggaagagcgcaaacagcacctcgtaaaagcaaaagaacagcgccgaaggcgggaatttatgatgcagtcaagactcgattgcctcaaggagcagcaggccgcggatgatcgaaaggaaatgaatatactagaactttcccataagaagatgatgaagaaacggaacaagaaaatcttcgataattggatgactatccaggaactgctaacccacggcacaaagagtcccgatggcacccgggtttataactccttcttatccgtcacgacggtttag

SEQ ID NO: 183717 - DNA, 2190 bp, Artificial Sequence
  derived and/or modified sequence
atgggcttcgagctggaccggttcgacggcgacgtggaccccgacttgaaatgcgcattgtgccacaaagtactggaagaccctcttactactccctgcgggcatgtattttgtgcagggtgtgtcctgccatgggtggttcaggaggggtcctgccctgcccgttgcagaggacggttgagcgctaaggagctgaatcacgtcctaccactgaagcgcctcattctgaagctcgacattaaatgcgcttacgccacccgggggtgcgggagagtagtcaagttgcaacagctgcctgagcacctcgagcggtgcgacttcgcacccgcacgttgtcggcatgcaggctgtgggcaagtgctgctcagaagggacgtggaggcccacatgcgggatgcctgtgacgcaaggccagtagggcgttgccaggaaggttgcggcttgcctctgacacacggagaacagcgggcaggtggccattgctgcgcgagggccctgcgcgctcataacggcgctcttcaagcaagattaggtgcgttgcacaaagcgttgaaaaaggaggctctgcgtgccggaaagcgagagaagtcattggtagcacaattagcagcggctcagttggaactccagatgacagcactgaggtaccaaaagaagttcaccgaatatagcgctcgcttggactcactgagcagatgcgtcgctgccccccctgggggtaagggcgaggaaactaaaagcctgacccttgtcctgcaccgcgattccggatcactcgggttcaatatcatcggcggtcggccttctgtagacaatcatgacggatcgagtagcgagggaatctttgtatcaaagatcgtcgactccgggcctgccgcaaaggagggcggcctccagatccacgatcgcatcatcgaggtcaatggacgagacctatcccgcgcaacacacgatcaagcggtggaggccttcaagactgctaaggagcccatagttgtccaggttctgaggaggacaccgcggactaagatgttcaccccaccctctgaatctcaactggtcgacaccggaacacaaactgacataaccttcgagcacatcatggctctcactaaaatgtcgagcccaagtcctccagtgcttgacccctacttgctgcccgaggagcacccatccgcacacgaatactacgaccccaatgattacatcggcgatatccaccaagagatggatcgcgaggagctcgagctggaggaagtagacttatatcgtatgaactctcaggataagctggggctcacagtgtgttatcgaactgatgacgaggacgacattggaatttacatctctgaaatagaccccaactccatcgctgctaaggacgggcgcatccgagagggggaccgcattattcagatcaatgggatagaggtacagaatagagaggaagcagtcgccttgctgacatctgaggaaaataagaatttctccctattgatagctcgcccagagctgcaattagatgagggatggatggatgacgacaggaacgactttctggatgacttgcatatggacatgttagaggaacagcatcaccaggcaatgcagtttactgcctccgtgcttcaacagaaaaagcatgatgaggatgggggcactaccgatacggctaccatcctgagcaatcagcacgaaaaagactctggtgtcgggaggacagacgaaagtacacggaacgatgagtcctccgagcaggaaaataatggcgacgacgccacagcatcgagcaaccctctggcgggccagaggaaactgacttgttcacaagacactctcggctctggcgacctgcccttcagcaatgaatcttttatcagtgccgactgtactgacgctgactacttgggtatacctgtggaaggtgaggatcctcaacggagggacgcgctgcatcatcaggaggcgcgtgctggaccccctgcggcaggcgcacggccagaagatccaggacgcgcccagagacatgaccaccgccggcggaggggcgagcgcgatgaggatggcgcgctgttagaacaaggtggcgaagaagcagcgcccggcgaaggacagggggctgccgctgcagcgagggtccacgacgccgagcaagtcgggctgtcgcagggagccgcatcctctcgatag

SEQ ID NO: 183718 - DNA, 4248 bp, Artificial Sequence
  derived and/or modified sequence
gtccggggagagccagcgagcgcgcgggcggcgtagccggcctgtctgggccgcctcgtggggagggagggggcgcccggccgcccggcggcgaccccggggcctggccgccaccatgggcttcgagctggaccgcttcgacggcgacgtggacccggacctgaagtgcgcgctgtgccacaaggtcctggaggacccgctgaccacgccgtgcggccacgtcttctgcgccggctgcgtgctgccctgggtggtgcaggagggcagctgcccggcgcgctgccgcggtcgcctgtcggccaaagagctcaaccacgtcctgccgctcaagcgccttatcctcaagctggacatcaagtgcgcgtacgcgacgcgcggctgcggccgggtggtcaagctgcagcagctgccggagcacctcgagcgctgcgacttcgcgcccgcgcgctgtcgccacgcgggttgcggccaggtgctgctgcggcgcgacgtggaggcgcacatgcgcgacgcctgcgacgcgcggccagtgggccgctgccaggagggctgcgggctacccttgacgcacggcgagcagcgcgcgggcggccactgctgcgcgcgagcgctgcgggcgcacaacggcgcgctccaggcccgcctgggcgcgctgcacaaggcgctcaagaaggaggcgctgcgcgctgggaagcgcgagaagtcgctggtggcccagctggccgcggcgcagcttgagctgcagatgaccgcgctgcgctaccagaagaaattcaccgaatacagcgcgcgcctcgactcgctcagccgctgcgtggccgcgccgcccggcggcaagggcgaagaaaccaaaagtctgactcttgtcctgcatcgggactccggctccctgggattcaatattattggtggccggccgagtgtggataaccacgatggatcatccagtgaaggaatctttgtatccaagatagttgacagtgggcctgcagccaaggaaggaggcctgcaaattcatgacaggattattgaggtcaacggcagagacttatccagagcaactcatgaccaggctgtggaagctttcaagacagccaaggagcccatagtggtgcaggtgttgagaagaacaccaaggaccaaaatgttcacgcctccatcagagtctcagctggtggacacgggaacccaaaccgacatcacctttgaacatatcatggccctcactaagatgtcctctcccagcccacccgtgctggatccctatctcttgccagaggagcatccctcagcccatgaatactacgatccaaatgactacattggagacatccatcaggagatggacagggaggagctggagctggaggaagtggacctctacagaatgaacagccaggacaagctgggcctcactgtgtgctaccggacggacgatgaagacgacattgggatttatatcagtgagattgaccctaacagcattgcagccaaggatgggcgcatccgagaaggagaccgcattatccagattaatgggatagaggtgcagaaccgtgaagaggctgtggctcttctaaccagtgaagaaaataaaaacttttcattgctgattgcaaggcctgaactccagctggatgagggctggatggatgatgacaggaacgactttctggatgacctgcacatggacatgctggaggagcagcaccaccaggccatgcaattcacagctagcgtgctgcagcagaagaagcacgacgaagacggtgggaccacagatacagccaccatcttgtccaaccagcacgagaaggacagcggtgtggggcggaccgacgagagcacccgtaatgacgagagctcggagcaagagaacaatggcgacgacgccaccgcatcctccaacccgctggcggggcagaggaagctcacctgcagccaggacaccttgggcagcggcgacctgcccttcagcaacgagtctttcatttcggccgactgcacggacgccgactacctggggatcccggtggacgagtgcgagcgcttccgcgagctcctggagctcaagtgccaggtgaagagcgccaccccttacggcctgtactaccctagcggccccctggacgccggcaagagtgaccctgagagcgtggacaaggagctggagctgctgaacgaagagctgcgcagcatcgagctggagtgcctgagcatcgtgcgcgcccacaagatgcagcagctcaaggagcagtaccgcgagtcctggatgctgcacaacagcggcttccgcaactacaacaccagcatcgacgtgcgcagacacgagctctcagatatcaccgagctcccggagaaatccgacaaggacagctcgagcgcctacaacacaggcgagagctgccgcagcaccccgctcaccctggagatctcccccgacaactccttgaggagagcggcggagggcatcagctgcccgagcagcgaaggggctgtggggaccacggaagcctacgggccagcctccaagaatctgctctccatcacggaagatcccgaagtgggcacccctacctatagcccgtccctgaaggagctggaccccaaccagcccctggaaagcaaagagcggagagccagcgacgggagccggagccccacgcccagccagaagctgggcagcgcctacctgccctcctatcaccactccccatacaagcacgcgcacatcccggcgcacgcccagcactaccagagctacatgcagctgatccagcagaagtcggccgtggagtacgcgcaaagccagatgagcctggtgagcatgtgcaaggacctgagctctcccaccccgtcggagccgcgcatggagtggaaggtgaagatccgcagcgacgggacgcgctacatcaccaagaggcccgtgcgggaccgcctgctgcgggagcgcgccctgaagatccgggaagagcgcagcggcatgaccaccgacgacgacgcggtgagcgagatgaagatggggcgctactggagcaaggaggagaggaagcagcacctggtgaaggccaaggagcagcggcggcggcgcgagttcatgatgcagagcaggttggattgtctcaaggagcagcaagcagccgatgacaggaaggagatgaacattctcgaactgagccacaaaaagatgatgaagaagaggaataagaaaatcttcgataactggatgacgatccaagaactcttaacccacggcacaaaatccccggacggcactagagtatacaattccttcctatcggtgactactgtataattttcacttctgcattatgtacataaaggagaccactaccactggggtagaaattcctgcctcgttcaatgcggcaagtttttgtatataagataagtacggtcttcatgtttatagtccaaatttgcaaaccctacaactctgggtgtcataggtctattttaagggaagagagagaaaaacacccttactatcttggaaggcaatattaacaaacagagcttttttcaaatagcaattgtacttttctacctgtacccttttacataaagtgtttaaatttcagaaagatcttttattaagcatactttcacagaataacttgtttaaactatattcatataaaaaagttaaacacgctttttttcctgcctaaaacacaaatacaactgccagtatgtatttttaatggaaccctattttataatggtacgttactgaatgtgtttcatatgcgtgaccgttaagatattatcatttaggtgaaggtttcaactcaaaaccacccaacccggtggttaacgatttaatacatataaccaaaccggcagcgtttagagttgggatatacatttaaacattttcctggttaaggttcccaagagagtgtaaaggttttagcagaaagcaaaatatcttgcatctttatggaagtttaaagcatgtttgcaaatattgcagcccattgaaagaatttgcatgtacaggaaagttgtggatggagacggtttgtggaattttaagtgctcattgtagtaaacttttgctttgtagatttgaaggtacagacttatacaggcaagttcacaaaatcatgattagttacaaacagtaaaatgaagttaaaataaattattattttctatttgatatgttttgatgtgattcctcattttgcagtggtgcctataaaataaaagccttttgcagtg

SEQ ID NO: 183719 - DNA, 2288 bp, Artificial Sequence
  derived and/or modified sequence
gagcgcgcgggcggcgtagccggcctgtctgggccgcctcgtggggagggagggggcgcccggccgcccggcggcgaccccggggcctggccgccaccatgggcttcgagctggaccgcttcgacggcgacgtggacccggacctgaagtgcgcgctgtgccacaaggtcctggaggacccgctgaccacgccgtgcggccacgtcttctgcgccggctgcgtgctgccctgggtggtgcaggagggcagctgcccggcgcgctgccgcggtcgcctgtcggccaaagagctcaaccacgtcctgccgctcaagcgccttatcctcaagctggacatcaagtgcgcgtacgcgacgcgcggctgcggccgggtggtcaagctgcagcagctgccggagcacctcgagcgctgcgacttcgcgcccgcgcgctgtcgccacgcgggttgcggccaggtgctgctgcggcgcgacgtggaggcgcacatgcgcgacgcctgcgacgcgcggccagtgggccgctgccaggagggctgcgggctacccttgacgcacggcgagcagcgcgcgggcggccactgctgcgcgcgagcgctgcgggcgcacaacggcgcgctccaggcccgcctgggcgcgctgcacaaggcgctcaagaaggaggcgctgcgcgctgggaagcgcgagaagtcgctggtggcccagctggccgcggcgcagcttgagctgcagatgaccgcgctgcgctaccagaagaaattcaccgaatacagcgcgcgcctcgactcgctcagccgctgcgtggccgcgccgcccggcggcaagggcgaagaaaccaaaagtctgactcttgtcctgcatcgggactccggctccctgggattcaatattattggtggccggccgagtgtggataaccacgatggatcatccagtgaaggaatctttgtatccaagatagttgacagtgggcctgcagccaaggaaggaggcctgcaaattcatgacaggattattgaggtcaacggcagagacttatccagagcaactcatgaccaggctgtggaagctttcaagacagccaaggagcccatagtggtgcaggtgttgagaagaacaccaaggaccaaaatgttcacgcctccatcagagtctcagctggtggacacgggaacccaaaccgacatcacctttgaacatatcatggccctcactaagatgtcctctcccagcccacccgtgctggatccctatctcttgccagaggagcatccctcagcccatgaatactacgatccaaatgactacattggagacatccatcaggagatggacagggaggagctggagctggaggaagtggacctctacagaatgaacagccaggacaagctgggcctcactgtgtgctaccggacggacgatgaagacgacattgggatttatatcagtgagattgaccctaacagcattgcagccaaggatgggcgcatccgagaaggagaccgcattatccagattaatgggatagaggtgcagaaccgtgaagaggctgtggctcttctaaccagtgaagaaaataaaaacttttcattgctgattgcaaggcctgaactccagctggatgagggctggatggatgatgacaggaacgactttctggatgacctgcacatggacatgctggaggagcagcaccaccaggccatgcaattcacagctagcgtgctgcagcagaagaagcacgacgaagacggtgggaccacagatacagccaccatcttgtccaaccagcacgagaaggacagcggtgtggggcggaccgacgagagcacccgtaatgacgagagctcggagcaagagaacaatggcgacgacgccaccgcatcctccaacccgctggcggggcagaggaagctcacctgcagccaggacaccttgggcagcggcgacctgcccttcagcaacgagtctttcatttcggccgactgcacggacgccgactacctggggatcccggtggaaggtgaagatccgcagcgacgggacgcgctacatcaccaagaggcccgtgcgggaccgcctgctgcgggagcgcgccctgaagatccgggaagagcgcagcggcatgaccaccgacgacgacgcggtgagcgagatgaagatggggcgctactggagcaaggaggagaggaagcagcacctggtgaaggccaaggagcagcggcggcggcgcgagttcatgatgcagagcaggttggattgtctcaaggagcagcaagcagccgatga

SEQ ID NO: 183720 - DNA, 3201 bp, Artificial Sequence
  derived and/or modified sequence
atgggtttcgagctggacaggttcgatggtgatgtggatcccgatttgaagtgtgccctatgccacaaggtgttagaggaccctctgaccaccccgtgcggccacgtgttctgtgccggatgtgtattgccctgggtggtccaggaggggtcatgtccggctagatgccggggtagactgagcgccaaagagctcaaccacgttctgcccctcaagcggttgatattgaagctcgatataaagtgcgcatacgccactcggggatgcggacgggtggttaagttgcagcaacttcccgagcatctggaacggtgcgacttcgcgccagccaggtgcagacatgctggatgcgggcaggtcctgcttcggcgagatgtggaagcccacatgcgcgacgcctgcgacgccagaccagtcggaaggtgccaggagggctgcggtttacccctaactcatggcgaacagcgagcgggaggacattgctgtgctcgcgcactgagagcccacaacggcgctctccaagcaagactaggcgcacttcataaggcactcaaaaaggaagctctgagagccggaaagcgcgaaaagagcctagtcgctcagcttgccgctgctcagcttgaactgcagatgacagcactgaggtatcaaaagaagttcacagagtatagcgccagattagacagcttaagcaggtgcgtcgcagcccctcccggagggaaaggagaagagacgaaaagcctaaccctggtgctgcaccgggactccgggtcactcggattcaacatcattggcggtcgcccaagcgttgataaccacgatggttcctcgagcgaaggaatcttcgtgtctaagatcgtagattctggccctgccgctaaagagggcggactgcagatccacgaccggattattgaggtcaacgggcgagacttgtctcgcgctactcatgatcaggctgttgaggcatttaaaaccgccaaggagccgattgtggtgcaagttcttaggcgcacaccccgaaccaaaatgtttaccccccctagcgagtcacagttggtggatacaggaactcagaccgacatcacttttgaacatatcatggccctcactaagatgtcttcaccgagcccaccagtcttggacccatacctgttgcccgaagagcacccctctgctcatgaatactatgacccaaatgattatatcggagacattcaccaggagatggatcgagaggagttggagcttgaggaggttgatctgtatcggatgaactctcaggataaactcggactgaccgtgtgttatagaacagacgacgaggacgacatagggatttacatctccgagatcgatcctaatagcatcgccgcaaaggatggcagaatcagagagggtgacagaattatccaaataaacggcattgaagtgcagaaccgggaggaagcggtggctttgctcactagtgaggaaaataaaaatttttcccttctgatcgctagaccggaattgcagctggatgagggatggatggacgatgacaggaacgacttcctcgacgacttacatatggacatgttagaagaacagcaccaccaggctatgcagttcacagcctcagtcctgcagcagaaaaaacatgacgaagacgggggtaccacagatacagcaacaatcctctccaatcagcacgagaaggacagtggcgtagggagaaccgacgaaagtactcgtaacgacgaaagtagtgaacaggagaacaacggagacgacgcaaccgcctcctcgaatcccctggccggtcagaggaaattgacctgcagccaagacaccctgggctccggcgacctgccatttagtaatgagtcgttcataagcgccgattgtaccgacgccgactacctgggcatccccgtagacgaatgtgaacgattccgggagcttctggaactcaagtgccaagttaagtctgctacaccgtacgggctgtattacccaagcggcccactggatgcaggcaaatccgatcccgagtctgtcgacaaggaattggagttgctcaacgaagagctgcgctcaatcgaactggagtgtctctcaattgtcagagcccacaaaatgcagcaacttaaggagcaataccgagagtcttggatgctccataactcgggtttccgaaattataacacctcgatcgacgtgcgccgtcacgagctctcagacatcaccgaattgcctgaaaaaagtgacaaagattcatcctctgcatacaacaccggtgagtcttgccggtcgacaccgctgaccctggagatcagtcccgataattccctgaggcgcgcagccgaggggattagttgtccttcttccgagggggctgtgggtacaacggaggcctacggccctgcctccaagaatctgctgtctatcaccgaggatcccgaggtcggaactcccacctacagtcctagcctgaaagagctcgaccctaatcagccccttgaatcaaaagaaaggagagcgagcgatggatctcgcagtccaacaccatcgcagaagctgggatccgcctatctgcccagctatcatcacagcccgtacaaacatgcccacatacctgcccacgctcaacattaccagtcctatatgcaattgattcagcaaaaatcggccgttgaatacgcccagtcgcagatgagcttggtaagtatgtgtaaagacctgtcatcccctactccctccgaacccagaatggaatggaaggtaaaaatccggtcagacggcaccagatatattacaaaacgacccgttcgggatagattactccgtgagcgcgcactgaaaatccgcgaggaaagatcgggcatgactaccgatgacgatgctgtcagcgagatgaagatgggcaggtattggtccaaggaagaaaggaagcaacatcttgtgaaggccaaggagcagcgcaggagacgcgagtttatgatgcagtcacgcttagactgcttaaaagaacaacaggctgcagatgaccgtaaggagatgaacattctggagctctcacacaagaaaatgatgaagaaaagaaataaaaaaatctttgataattggatgaccatacaggaactcttgactcacggaactaagtcacccgacggaacccgcgtgtataattcctttctcagcgttaccacagtgtag

SEQ ID NO: 183721 - DNA, 2190 bp, Artificial Sequence
  derived and/or modified sequence
atgggatttgagctggacagatttgatggggatgtggatcccgacttgaagtgtgccctatgtcacaaggtgcttgaagaccctctgactaccccctgtggacatgtgttctgcgctggctgcgtcctaccttgggtcgttcaggaaggttcttgtcctgccagatgccgcggtcggctgtctgctaaggagctgaatcacgtactccccctgaagaggctgatcttgaaattggacatcaagtgtgcatacgctactcgaggctgcggaagggtggtgaaactgcaacagctacctgagcatttggaaaggtgcgacttcgcccctgcgaggtgcagacatgccggatgtggccaggtcttactgagacgcgatgttgaagctcacatgcgcgatgcatgtgatgccaggccggtcggtcggtgccaggagggatgtggccttcctctcacccacggcgagcaaagggctggtggacattgctgcgccagggcactacgcgcacacaacggtgccttacaggctcgcctgggcgcactgcacaaagccctcaagaaagaggctctgagagcgggtaagcgggagaagtccctggtggcacaattagccgcagctcagcttgagctccagatgacagccctgcgctatcaaaaaaaattcacggaatacagcgccagactggactccttatctaggtgtgttgcagcgccaccagggggtaaaggcgaggaaactaagtctctgacactcgtcctacatagggattcggggtcgcttggattcaacatcattggcggaagaccctcggtggacaatcatgacggatcaagtagtgaaggaatttttgtctccaaaatcgtagattccggtccagcagcaaaagaaggtggcctgcagattcatgatagaatcatcgaggtgaatggccgagacctctcgcgagctacccacgaccaggctgtcgaagcatttaagacagccaaagagccgattgtcgttcaggtgttaagaaggacacctcgaactaagatgtttacccctccctccgagagtcagctagtggatactggcacacagactgatattacctttgagcatatcatggcgctgaccaagatgagctctccttcacctccggtgctggacccttatttgctgcctgaggaacatccatctgctcacgagtattatgaccctaacgattacattggcgacatccaccaggaaatggatcgcgaggaactcgagttggaagaggttgacctgtacagaatgaattcccaggataaactgggcctcacggtctgctatcgaaccgacgacgaagatgatattgggatatacatcagtgagattgatccaaattctatcgccgctaaggatgggagaatacgggagggagacagaataatacagatcaacggaatagaagtccaaaaccgggaagaggccgtggccttattaaccagtgaagaaaataaaaatttcagccttctcatcgctaggcccgaactacagctcgatgaaggatggatggacgatgaccgcaatgattttttggatgatttacacatggacatgctcgaggaacagcaccaccaggcgatgcagttcactgcttccgtcctgcaacagaagaagcacgacgaggacggtgggaccaccgacacagccacaatcctgagcaaccagcacgagaaggatagcggcgttggaagaactgacgaaagcacccgtaacgatgaaagcagtgaacaggagaataacggcgatgatgctactgcttccagcaatccacttgctggacaacgtaaactaacatgctctcaggatacactgggctctggagatctgccattttcaaacgaatccttcattagcgcggactgtacggacgccgattacttggggatccccgtggagggcgaagatcctcagcgcagagacgcacttcatcaccaggaggcacgtgcgggaccccctgcagccggagcaaggccagaagatcccggaagagcacagcggcatgatcaccggagaagacgcggagaacgggatgaagatggagcactgctcgagcaaggaggagaggaagccgctcccggagaaggacagggcgctgccgctgccgcacgcgtccatgatgcagagcaagtgggcctgtctcagggtgccgctagcagtcgctag

SEQ ID NO: 183722 - DNA, 3201 bp, Artificial Sequence
  derived and/or modified sequence
atgggcttcgagctggacagattcgacggcgacgtggaccccgacctgaagtgcgccctgtgccacaaggtgctggaggaccccctgaccaccccctgcggccacgtgttctgcgccggctgcgtgctgccctgggtggtgcaggagggcagctgccccgccagatgcagaggcagactgagcgccaaggagctgaaccacgtgctgcccctgaagagactgatcctgaagctggacatcaagtgcgcctacgccaccagaggctgcggcagagtggtgaagctgcagcagctgcccgagcacctggagagatgcgacttcgcccccgccagatgcagacacgccggctgcggccaggtgctgctgagaagagacgtggaggcccacatgagagacgcctgcgacgccagacccgtgggcagatgccaggagggctgcggcctgcccctgacccacggcgagcagagagccggcggccactgctgcgccagagccctgagagcccacaacggcgccctgcaggccagactgggcgccctgcacaaggccctgaagaaggaggccctgagagccggcaagagagagaagagcctggtggcccagctggccgccgcccagctggagctgcagatgaccgccctgagataccagaagaagttcaccgagtacagcgccagactggacagcctgagcagatgcgtggccgccccccccggcggcaagggcgaggagaccaagagcctgaccctggtgctgcacagagacagcggcagcctgggcttcaacatcatcggcggcagacccagcgtggacaaccacgacggcagcagcagcgagggcatcttcgtgagcaagatcgtggacagcggccccgccgccaaggagggcggcctgcagatccacgacagaatcatcgaggtgaacggcagagacctgagcagagccacccacgaccaggccgtggaggccttcaagaccgccaaggagcccatcgtggtgcaggtgctgagaagaacccccagaaccaagatgttcaccccccccagcgagagccagctggtggacaccggcacccagaccgacatcaccttcgagcacatcatggccctgaccaagatgagcagccccagcccccccgtgctggacccctacctgctgcccgaggagcaccccagcgcccacgagtactacgaccccaacgactacatcggcgacatccaccaggagatggacagagaggagctggagctggaggaggtggacctgtacagaatgaacagccaggacaagctgggcctgaccgtgtgctacagaaccgacgacgaggacgacatcggcatctacatcagcgagatcgaccccaacagcatcgccgccaaggacggcagaatcagagagggcgacagaatcatccagatcaacggcatcgaggtgcagaacagagaggaggccgtggccctgctgaccagcgaggagaacaagaacttcagcctgctgatcgccagacccgagctgcagctggacgagggctggatggacgacgacagaaacgacttcctggacgacctgcacatggacatgctggaggagcagcaccaccaggccatgcagttcaccgccagcgtgctgcagcagaagaagcacgacgaggacggcggcaccaccgacaccgccaccatcctgagcaaccagcacgagaaggacagcggcgtgggcagaaccgacgagagcaccagaaacgacgagagcagcgagcaggagaacaacggcgacgacgccaccgccagcagcaaccccctggccggccagagaaagctgacctgcagccaggacaccctgggcagcggcgacctgcccttcagcaacgagagcttcatcagcgccgactgcaccgacgccgactacctgggcatccccgtggacgagtgcgagagattcagagagctgctggagctgaagtgccaggtgaagagcgccaccccctacggcctgtactaccccagcggccccctggacgccggcaagagcgaccccgagagcgtggacaaggagctggagctgctgaacgaggagctgagaagcatcgagctggagtgcctgagcatcgtgagagcccacaagatgcagcagctgaaggagcagtacagagagagctggatgctgcacaacagcggcttcagaaactacaacaccagcatcgacgtgagaagacacgagctgagcgacatcaccgagctgcccgagaagagcgacaaggacagcagcagcgcctacaacaccggcgagagctgcagaagcacccccctgaccctggagatcagccccgacaacagcctgagaagagccgccgagggcatcagctgccccagcagcgagggcgccgtgggcaccaccgaggcctacggccccgccagcaagaacctgctgagcatcaccgaggaccccgaggtgggcacccccacctacagccccagcctgaaggagctggaccccaaccagcccctggagagcaaggagagaagagccagcgacggcagcagaagccccacccccagccagaagctgggcagcgcctacctgcccagctaccaccacagcccctacaagcacgcccacatccccgcccacgcccagcactaccagagctacatgcagctgatccagcagaagagcgccgtggagtacgcccagagccagatgagcctggtgagcatgtgcaaggacctgagcagccccacccccagcgagcccagaatggagtggaaggtgaagatcagaagcgacggcaccagatacatcaccaagagacccgtgagagacagactgctgagagagagagccctgaagatcagagaggagagaagcggcatgaccaccgacgacgacgccgtgagcgagatgaagatgggcagatactggagcaaggaggagagaaagcagcacctggtgaaggccaaggagcagagaagaagaagagagttcatgatgcagagcagactggactgcctgaaggagcagcaggccgccgacgacagaaaggagatgaacatcctggagctgagccacaagaagatgatgaagaagagaaacaagaagatcttcgacaactggatgaccatccaggagctgctgacccacggcaccaagagccccgacggcaccagagtgtacaacagcttcctgagcgtgaccaccgtgtag

SEQ ID NO: 183723 - DNA, 2190 bp, Artificial Sequence
  derived and/or modified sequence
atgggcttcgagctggacagattcgacggcgacgtggaccccgacctgaagtgcgccctgtgccacaaggtgctggaggaccccctgaccaccccctgcggccacgtgttctgcgccggctgcgtgctgccctgggtggtgcaggagggcagctgccccgccagatgcagaggcagactgagcgccaaggagctgaaccacgtgctgcccctgaagagactgatcctgaagctggacatcaagtgcgcctacgccaccagaggctgcggcagagtggtgaagctgcagcagctgcccgagcacctggagagatgcgacttcgcccccgccagatgcagacacgccggctgcggccaggtgctgctgagaagagacgtggaggcccacatgagagacgcctgcgacgccagacccgtgggcagatgccaggagggctgcggcctgcccctgacccacggcgagcagagagccggcggccactgctgcgccagagccctgagagcccacaacggcgccctgcaggccagactgggcgccctgcacaaggccctgaagaaggaggccctgagagccggcaagagagagaagagcctggtggcccagctggccgccgcccagctggagctgcagatgaccgccctgagataccagaagaagttcaccgagtacagcgccagactggacagcctgagcagatgcgtggccgccccccccggcggcaagggcgaggagaccaagagcctgaccctggtgctgcacagagacagcggcagcctgggcttcaacatcatcggcggcagacccagcgtggacaaccacgacggcagcagcagcgagggcatcttcgtgagcaagatcgtggacagcggccccgccgccaaggagggcggcctgcagatccacgacagaatcatcgaggtgaacggcagagacctgagcagagccacccacgaccaggccgtggaggccttcaagaccgccaaggagcccatcgtggtgcaggtgctgagaagaacccccagaaccaagatgttcaccccccccagcgagagccagctggtggacaccggcacccagaccgacatcaccttcgagcacatcatggccctgaccaagatgagcagccccagcccccccgtgctggacccctacctgctgcccgaggagcaccccagcgcccacgagtactacgaccccaacgactacatcggcgacatccaccaggagatggacagagaggagctggagctggaggaggtggacctgtacagaatgaacagccaggacaagctgggcctgaccgtgtgctacagaaccgacgacgaggacgacatcggcatctacatcagcgagatcgaccccaacagcatcgccgccaaggacggcagaatcagagagggcgacagaatcatccagatcaacggcatcgaggtgcagaacagagaggaggccgtggccctgctgaccagcgaggagaacaagaacttcagcctgctgatcgccagacccgagctgcagctggacgagggctggatggacgacgacagaaacgacttcctggacgacctgcacatggacatgctggaggagcagcaccaccaggccatgcagttcaccgccagcgtgctgcagcagaagaagcacgacgaggacggcggcaccaccgacaccgccaccatcctgagcaaccagcacgagaaggacagcggcgtgggcagaaccgacgagagcaccagaaacgacgagagcagcgagcaggagaacaacggcgacgacgccaccgccagcagcaaccccctggccggccagagaaagctgacctgcagccaggacaccctgggcagcggcgacctgcccttcagcaacgagagcttcatcagcgccgactgcaccgacgccgactacctgggcatccccgtggagggcgaggacccccagagaagagacgccctgcaccaccaggaggccagagccggcccccccgccgccggcgccagacccgaggaccccggcagagcccagagacacgaccacagaagaagaagaggcgagagagacgaggacggcgccctgctggagcagggcggcgaggaggccgcccccggcgagggccagggcgccgccgccgccgccagagtgcacgacgccgagcaggtgggcctgagccagggcgccgccagcagcagatag

SEQ ID NO: 183724 - protein, 940 aa, Artificial Sequence
  derived and/or modified sequence
MEIDQCLLESLPLGQRQRLVKRMRCEQIKAYYEREKAFQKQEGFLKRLKHAKNPKVHFNLTDMLQDAIIHHNDKEVLRLLKEGADPHTLVSSGGSLLHLCARYDNAFIAEILIDRGVNVNHQDEDFWTPMHIACACDNPDIVLLLVLAGANVLLQDVNGNIPLDYAVEGTESSSILLTYLDENGVDLTSLRQMKLQRPMSMLTDVKHFLSSGGNVNEKNDEGVTLLHMACASGYKEVVSLILEHGGDLNIVDDQYWTPLHLAAKYGQTNLVKLLLMHQANPHLVNCNEEKASDIAASEFIEEMLLKAEIAWEEKMKEPLSASTLAQEEPYEEIIHDLPVLSSKLSPLVLPIAKQDSLLEKDIMFKDATKGLCKQQSQDSIPENPMMSGSTKPEQVKLMPPAPNDDLATLSELNDGSLLYEIQKRFGNNQIYTFIGDILLLVNPYKELPIYSSMVSQLYFSSSGKLCSSLPPHLFSCVERAFHQLFREQRPQCFILSGERGSGKSEASKQIIRHLTCRAGASRATLDSRFKHVVCILEAFGHAKTTLNDLSSCFIKYFELQFCERKQQLTGARIYTYLLEKSRLVSQPLGQSNFLIFYLLMDGLSAEEKYGLHLNNLCAHRYLNQTIQDDASTGERSLNREKLAVLKRALNVVGFSSLEVENLFVILAAILHLGDIRFTALNEGNSAFVSDLQLLEQVAGMLQVSTDELASALTTDIQYFKGDMIIRRHTIQIAEFFRDLLAKSLYSRLFSFLVNTMNSCLHSQDEQKSMQTLDIGILDIFGFEEFQKNEFEQLCVNMTNEKMHHYINEVLFLHEQVECVQEGVTMETAYSPGNQNGVLDFFFQKPSGFLTLLDEESQMIWSVESNFPKKLQSLLESSNTNAVYSPMKDGNGNVALKDHGTAFTIMHYAGRVMYDVVGAIEKNKDSLSQNLLFVMKRGRCF

SEQ ID NO: 183725 - protein, 1858 aa, Artificial Sequence
  derived and/or modified sequence
MEIDQCLLESLPLGQRQRLVKRMRCEQIKAYYEREKAFQKQEGFLKRLKHAKNPKVHFNLTDMLQDAIIHHNDKEVLRLLKEGADPHTLVSSGGSLLHLCARYDNAFIAEILIDRGVNVNHQDEDFWTPMHIACACDNPDIVLLLVLAGANVLLQDVNGNIPLDYAVEGTESSSILLTYLDENGVDLTSLRQMKLQRPMSMLTDVKHFLSSGGNVNEKNDEGVTLLHMACASGYKEVVSLILEHGGDLNIVDDQYWTPLHLAAKYGQTNLVKLLLMHQANPHLVNCNEEKASDIAASEFIEEMLLKAEIAWEEKMKEPLSASTLAQEEPYEEIIHDLPVLSSKLSPLVLPIAKQDSLLEKDIMFKDATKGLCKQQSQDSIPENPMMSGSTKPEQVKLMPPAPNDDLATLSELNDGSLLYEIQKRFGNNQIYTFIGDILLLVNPYKELPIYSSMVSQLYFSSSGKLCSSLPPHLFSCVERAFHQLFREQRPQCFILSGERGSGKSEASKQIIRHLTCRAGASRATLDSRFKHVVCILEAFGHAKTTLNDLSSCFIKYFELQFCERKQQLTGARIYTYLLEKSRLVSQPLGQSNFLIFYLLMDGLSAEEKYGLHLNNLCAHRYLNQTIQDDASTGERSLNREKLAVLKRALNVVGFSSLEVENLFVILAAILHLGDIRFTALNEGNSAFVSDLQLLEQVAGMLQVSTDELASALTTDIQYFKGDMIIRRHTIQIAEFFRDLLAKSLYSRLFSFLVNTMNSCLHSQDEQKSMQTLDIGILDIFGFEEFQKNEFEQLCVNMTNEKMHHYINEVLFLHEQVECVQEGVTMETAYSPGNQNGVLDFFFQKPSGFLTLLDEESQMIWSVESNFPKKLQSLLESSNTNAVYSPMKDGNGNVALKDHGTAFTIMHYAGRVMYDVVGAIEKNKDSLSQNLLFVMKTSENVVINHLFQSKLSQTGSLVSAYPSFKFRGHKSALLSKKMTASSIIGENKNYLELSKLLKKKGTSTFLQRLERGDPVTIASQLRKSLMDIIGKLQKCTPHFIHCIRPNNSKLPDTFDNFYVSAQLQYIGVLEMVKIFRYGYPVRLSFSDFLSRYKPLADTFLREKKEQSAAERCRLVLQQCKLQGWQMGVRKVFLKYWHADQLNDLCLQLQRKIITCQKVIRGFLARQHLLQRISIRQQEVTSINSFLQNTEDMGLKTYDALVIQNASDIARENDRLRSEMNAPYHKEKLEVRNMQEEGSKRTDDKSGPRHFHPSSMSVCAAVDGLGQCLVGPSIWSPSLHSVFSMDDSSSLPSPRKQPPPKPKRDPNTRLSASYEAVSACLSAAREAANEALARPRPHSDDYSTMKKIPPRKPKRSPNTKLSGSYEEISGSRPGDARPAGAPGAAARVLTPGTPQCALPPAAPPGDEDDSEPVYIEMLGHAARPDSPDPGESVYEEMKCCLPDDGGPGAGSFLLHGASPPLLHRAPEDEAAGPPGDACDIPPPFPNLLPHRPPLLVFPPTPVTCSPASDESPLTPLEVKKLPVLETNLKYPVQPEGSSPLSPQYSKSQKGDGDRPASPGLALFNGSGRASPPSTPPPPPPPPGPPPAPYRPCAHLAFPPEPAPVNAGKAGPSAEAPKVHPKPNSAPVAGPCSSFPKIPYSPVKATRADARKAGSSASPPAPYSPPSSRPLSSPLDELASLFNSGRSVLRKSAAGRKIREAEGFETNMNISSRDDPSTSEITSETQDRNANNHGIQLSNSLSSAITAENGNSISNGLPEEDGYSRLSISGTGTSTFQRHRDSHTTQVIHQLRLSENESVALQELLDWRRKLCEEGQDWQQILHHAEPRVPPPPPCKKPSLLKKPEGASCNRLPSELWDTTI

SEQ ID NO: 183726 - protein, 878 aa, Artificial Sequence
  derived and/or modified sequence
MKLQRPMSMLTDVLHMACASGYKEVVSLILEHGGDLNIVDDQYWTPLHLAAKYGQTNLVKLLLMHQANPHLVNCNEEKASDIAASEFIEEMLLKAEIAWEEKMKEPLSASTLAQEEPYEEIIHDLPVLSSKLSPLVLPIAKQDSLLEKDIMFKDATKGLCKQQSQDSIPENPMMSGSTKPEQVKLMPPAPNDDLATLSELNDGSLLYEIQKRFGNNQIYTFIGDILLLVNPYKELPIYSSMVSQLYFSSSGKLCSSLPPHLFSCVERAFHQLFREQRPQCFILSGERGSGKSEASKQIIRHLTCRAGASRATLDSRFKHVVCILEAFGHAKTTLNDLSSCFIKYFELQFCERKQQLTGARIYTYLLEKSRLVSQPLGQSNFLIFYLLMDGLSAEEKYGLHLNNLCAHRYLNQTIQDDASTGERSLNREKLAVLKRALNVVGFSSLEVENLFVILAAILHLGDIRFTALNEGNSAFVSDLQLLEQVAGMLQVSTDELASALTTDIQYFKGDMIIRRHTIQIAEFFRDLLAKSLYSRLFSFLVNTMNSCLHSQDEQKSMQTLDIGILDIFGFEEFQKNEFEQLCVNMTNEKMHHYINEVLFLHEQVECVQEGVTMETAYSPGNQNGVLDFFFQKPSGFLTLLDEESQMIWSVESNFPKKLQSLLESSNTNAVYSPMKDGNGNVALKDHGTAFTIMHYAGRVMYDVVGAIEKNKDSLSQNLLFVMKTSENVVINHLFQSKLSQTGSLVSAYPSFKFRGHKSALLSKKMTASSIIGENKNYLELSKLLKKKGTSTFLQRLERGDPVTIASQLRKSLMDIIGKLQKCTPHFIHCIRPNNSKLPDTFDNFYVSAQLQYIGVLEMVKIFRYGYPVRLSFSDFLSR

SEQ ID NO: 183727 - protein, 940 aa, Artificial Sequence
  derived and/or modified sequence
MEIDQCLLESLPLGQRQRLVKRMRCEQIKAYYEREKAFQKQEGFLKRLKHAKNPKVHFNLTDMLQDAIIHHNDKEVLRLLKEGADPHTLVSSGGSLLHLCARYDNAFIAEILIDRGVNVNHQDEDFWTPMHIACACDNPDIVLLLVLAGANVLLQDVNGNIPLDYAVEGTESSSILLTYLDENGVDLTSLRQMKLQRPMSMLTDVKHFLSSGGNVNEKNDEGVTLLHMACASGYKEVVSLILEHGGDLNIVDDQYWTPLHLAAKYGQTNLVKLLLMHQANPHLVNCNEEKASDIAASEFIEEMLLKAEIAWEEKMKEPLSASTLAQEEPYEEIIHDLPVLSSKLSPLVLPIAKQDSLLEKDIMFKDATKGLCKQQSQDSIPENPMMSGSTKPEQVKLMPPAPNDDLATLSELNDGSLLYEIQKRFGNNQIYTFIGDILLLVNPYKELPIYSSMVSQLYFSSSGKLCSSLPPHLFSCVERAFHQLFREQRPQCFILSGERGSGKSEASKQIIRHLTCRAGASRATLDSRFKHVVCILEAFGHAKTTLNDLSSCFIKYFELQFCERKQQLTGARIYTYLLEKSRLVSQPLGQSNFLIFYLLMDGLSAEEKYGLHLNNLCAHRYLNQTIQDDASTGERSLNREKLAVLKRALNVVGFSSLEVENLFVILAAILHLGDIRFTALNEGNSAFVSDLQLLEQVAGMLQVSTDELASALTTDIQYFKGDMIIRRHTIQIAEFFRDLLAKSLYSRLFSFLVNTMNSCLHSQDEQKSMQTLDIGILDIFGFEEFQKNEFEQLCVNMTNEKMHHYINEVLFLHEQVECVQEGVTMETAYSPGNQNGVLDFFFQKPSGFLTLLDEESQMIWSVESNFPKKLQSLLESSNTNAVYSPMKDGNGNVALKDHGTAFTIMHYAGRVMYDVVGAIEKNKDSLSQNLLFVMKNRRCF

SEQ ID NO: 183728 - protein, 857 aa, Artificial Sequence
  derived and/or modified sequence
MRRADTRDGERGSGKSEASKQIIRHLTCRAGASRATLDSRFKHVVCILEAFGHAKTTLNDLSSCFIKYFELQFCERKQQLTGARIYTYLLEKSRLVSQPLGQSNFLIFYLLMDGLSAEEKYGLHLNNLCAHRYLNQTIQDDASTGERSLNREKLAVLKRALNVVGFSSLEVENLFVILAAILHLGDIRFTALNEGNSAFVSDLQLLEQVAGMLQVSTDELASALTTDIQYFKGDMIIRRHTIQIAEFFRDLLAKSLYSRLFSFLVNTMNSCLHSQDEQKSMQTLDIGILDIFGFEEFQKNEFEQLCVNMTNEKMHHYINEVLFLHEQVECVQEGVTMETAYSPGNQNGVLDFFFQKPSGFLTLLDEESQMIWSVESNFPKKLQSLLESSNTNAVYSPMKDGNGNVALKDHGTAFTIMHYAGRVMYDVVGAIEKNKDSLSQNLLFVMKTSENVVINHLFQSKLSQTGSLVSAYPSFKFRGHKSALLSKKMTASSIIGENKNYLELSKLLKKKGTSTFLQRLERGDPVTIASQLRKSLMDIIGKLQKCTPHFIHCIRPNNSKLPDTFDNFYVSAQLQYIGVLEMVKIFRYGYPVRLSFSDFLSRYKPLADTFLREKKEQSAAERCRLVLQQCKLQGWQMGVRKVFLKYWHADQLNDLCLQLQRKIITCQKVIRGFLARQHLLQRISIRQQEVTSINSFLQNTEDMGLKTYDALVIQNASDIARENDRLRSEMNAPYHKEKLEVRNMQEEGSKRTDDKSGPRHFHPSSMSVCAAVDGLGQCLVGPSIWSPSLHSVFSMDDSSSLPSPRKQPPPKPKRDPNTRLSASYEAVSACLSAAREAANEGQPWGGTQPRVPGSRML

SEQ ID NO: 183729 - DNA, 2823 bp, Artificial Sequence
  derived and/or modified sequence
atggagatcgaccagtgcctgctggagagcctgcccctgggccagagacagagactggtgaagagaatgagatgcgagcagatcaaggcctactacgagagagagaaggccttccagaagcaggagggcttcctgaagagactgaagcacgccaagaaccccaaggtgcacttcaacctgaccgacatgctgcaggacgccatcatccaccacaacgacaaggaggtgctgagactgctgaaggagggcgccgacccccacaccctggtgagcagcggcggcagcctgctgcacctgtgcgccagatacgacaacgccttcatcgccgagatcctgatcgacagaggcgtgaacgtgaaccaccaggacgaggacttctggacccccatgcacatcgcctgcgcctgcgacaaccccgacatcgtgctgctgctggtgctggccggcgccaacgtgctgctgcaggacgtgaacggcaacatccccctggactacgccgtggagggcaccgagagcagcagcatcctgctgacctacctggacgagaacggcgtggacctgaccagcctgagacagatgaagctgcagagacccatgagcatgctgaccgacgtgaagcacttcctgagcagcggcggcaacgtgaacgagaagaacgacgagggcgtgaccctgctgcacatggcctgcgccagcggctacaaggaggtggtgagcctgatcctggagcacggcggcgacctgaacatcgtggacgaccagtactggacccccctgcacctggccgccaagtacggccagaccaacctggtgaagctgctgctgatgcaccaggccaacccccacctggtgaactgcaacgaggagaaggccagcgacatcgccgccagcgagttcatcgaggagatgctgctgaaggccgagatcgcctgggaggagaagatgaaggagcccctgagcgccagcaccctggcccaggaggagccctacgaggagatcatccacgacctgcccgtgctgagcagcaagctgagccccctggtgctgcccatcgccaagcaggacagcctgctggagaaggacatcatgttcaaggacgccaccaagggcctgtgcaagcagcagagccaggacagcatccccgagaaccccatgatgagcggcagcaccaagcccgagcaggtgaagctgatgccccccgcccccaacgacgacctggccaccctgagcgagctgaacgacggcagcctgctgtacgagatccagaagagattcggcaacaaccagatctacaccttcatcggcgacatcctgctgctggtgaacccctacaaggagctgcccatctacagcagcatggtgagccagctgtacttcagcagcagcggcaagctgtgcagcagcctgcccccccacctgttcagctgcgtggagagagccttccaccagctgttcagagagcagagaccccagtgcttcatcctgagcggcgagagaggcagcggcaagagcgaggccagcaagcagatcatcagacacctgacctgcagagccggcgccagcagagccaccctggacagcagattcaagcacgtggtgtgcatcctggaggccttcggccacgccaagaccaccctgaacgacctgagcagctgcttcatcaagtacttcgagctgcagttctgcgagagaaagcagcagctgaccggcgccagaatctacacctacctgctggagaagagcagactggtgagccagcccctgggccagagcaacttcctgatcttctacctgctgatggacggcctgagcgccgaggagaagtacggcctgcacctgaacaacctgtgcgcccacagatacctgaaccagaccatccaggacgacgccagcaccggcgagagaagcctgaacagagagaagctggccgtgctgaagagagccctgaacgtggtgggcttcagcagcctggaggtggagaacctgttcgtgatcctggccgccatcctgcacctgggcgacatcagattcaccgccctgaacgagggcaacagcgccttcgtgagcgacctgcagctgctggagcaggtggccggcatgctgcaggtgagcaccgacgagctggccagcgccctgaccaccgacatccagtacttcaagggcgacatgatcatcagaagacacaccatccagatcgccgagttcttcagagacctgctggccaagagcctgtacagcagactgttcagcttcctggtgaacaccatgaacagctgcctgcacagccaggacgagcagaagagcatgcagaccctggacatcggcatcctggacatcttcggcttcgaggagttccagaagaacgagttcgagcagctgtgcgtgaacatgaccaacgagaagatgcaccactacatcaacgaggtgctgttcctgcacgagcaggtggagtgcgtgcaggagggcgtgaccatggagaccgcctacagccccggcaaccagaacggcgtgctggacttcttcttccagaagcccagcggcttcctgaccctgctggacgaggagagccagatgatctggagcgtggagagcaacttccccaagaagctgcagagcctgctggagagcagcaacaccaacgccgtgtacagccccatgaaggacggcaacggcaacgtggccctgaaggaccacggcaccgccttcaccatcatgcactacgccggcagagtgatgtacgacgtggtgggcgccatcgagaagaacaaggacagcctgagccagaacctgctgttcgtgatgaagagaggcagatgcttctag

SEQ ID NO: 183730 - DNA, 5577 bp, Artificial Sequence
  derived and/or modified sequence
atggagatcgaccagtgcctgctggagagcctgcccctgggccagagacagagactggtgaagagaatgagatgcgagcagatcaaggcctactacgagagagagaaggccttccagaagcaggagggcttcctgaagagactgaagcacgccaagaaccccaaggtgcacttcaacctgaccgacatgctgcaggacgccatcatccaccacaacgacaaggaggtgctgagactgctgaaggagggcgccgacccccacaccctggtgagcagcggcggcagcctgctgcacctgtgcgccagatacgacaacgccttcatcgccgagatcctgatcgacagaggcgtgaacgtgaaccaccaggacgaggacttctggacccccatgcacatcgcctgcgcctgcgacaaccccgacatcgtgctgctgctggtgctggccggcgccaacgtgctgctgcaggacgtgaacggcaacatccccctggactacgccgtggagggcaccgagagcagcagcatcctgctgacctacctggacgagaacggcgtggacctgaccagcctgagacagatgaagctgcagagacccatgagcatgctgaccgacgtgaagcacttcctgagcagcggcggcaacgtgaacgagaagaacgacgagggcgtgaccctgctgcacatggcctgcgccagcggctacaaggaggtggtgagcctgatcctggagcacggcggcgacctgaacatcgtggacgaccagtactggacccccctgcacctggccgccaagtacggccagaccaacctggtgaagctgctgctgatgcaccaggccaacccccacctggtgaactgcaacgaggagaaggccagcgacatcgccgccagcgagttcatcgaggagatgctgctgaaggccgagatcgcctgggaggagaagatgaaggagcccctgagcgccagcaccctggcccaggaggagccctacgaggagatcatccacgacctgcccgtgctgagcagcaagctgagccccctggtgctgcccatcgccaagcaggacagcctgctggagaaggacatcatgttcaaggacgccaccaagggcctgtgcaagcagcagagccaggacagcatccccgagaaccccatgatgagcggcagcaccaagcccgagcaggtgaagctgatgccccccgcccccaacgacgacctggccaccctgagcgagctgaacgacggcagcctgctgtacgagatccagaagagattcggcaacaaccagatctacaccttcatcggcgacatcctgctgctggtgaacccctacaaggagctgcccatctacagcagcatggtgagccagctgtacttcagcagcagcggcaagctgtgcagcagcctgcccccccacctgttcagctgcgtggagagagccttccaccagctgttcagagagcagagaccccagtgcttcatcctgagcggcgagagaggcagcggcaagagcgaggccagcaagcagatcatcagacacctgacctgcagagccggcgccagcagagccaccctggacagcagattcaagcacgtggtgtgcatcctggaggccttcggccacgccaagaccaccctgaacgacctgagcagctgcttcatcaagtacttcgagctgcagttctgcgagagaaagcagcagctgaccggcgccagaatctacacctacctgctggagaagagcagactggtgagccagcccctgggccagagcaacttcctgatcttctacctgctgatggacggcctgagcgccgaggagaagtacggcctgcacctgaacaacctgtgcgcccacagatacctgaaccagaccatccaggacgacgccagcaccggcgagagaagcctgaacagagagaagctggccgtgctgaagagagccctgaacgtggtgggcttcagcagcctggaggtggagaacctgttcgtgatcctggccgccatcctgcacctgggcgacatcagattcaccgccctgaacgagggcaacagcgccttcgtgagcgacctgcagctgctggagcaggtggccggcatgctgcaggtgagcaccgacgagctggccagcgccctgaccaccgacatccagtacttcaagggcgacatgatcatcagaagacacaccatccagatcgccgagttcttcagagacctgctggccaagagcctgtacagcagactgttcagcttcctggtgaacaccatgaacagctgcctgcacagccaggacgagcagaagagcatgcagaccctggacatcggcatcctggacatcttcggcttcgaggagttccagaagaacgagttcgagcagctgtgcgtgaacatgaccaacgagaagatgcaccactacatcaacgaggtgctgttcctgcacgagcaggtggagtgcgtgcaggagggcgtgaccatggagaccgcctacagccccggcaaccagaacggcgtgctggacttcttcttccagaagcccagcggcttcctgaccctgctggacgaggagagccagatgatctggagcgtggagagcaacttccccaagaagctgcagagcctgctggagagcagcaacaccaacgccgtgtacagccccatgaaggacggcaacggcaacgtggccctgaaggaccacggcaccgccttcaccatcatgcactacgccggcagagtgatgtacgacgtggtgggcgccatcgagaagaacaaggacagcctgagccagaacctgctgttcgtgatgaagaccagcgagaacgtggtgatcaaccacctgttccagagcaagctgagccagaccggcagcctggtgagcgcctaccccagcttcaagttcagaggccacaagagcgccctgctgagcaagaagatgaccgccagcagcatcatcggcgagaacaagaactacctggagctgagcaagctgctgaagaagaagggcaccagcaccttcctgcagagactggagagaggcgaccccgtgaccatcgccagccagctgagaaagagcctgatggacatcatcggcaagctgcagaagtgcaccccccacttcatccactgcatcagacccaacaacagcaagctgcccgacaccttcgacaacttctacgtgagcgcccagctgcagtacatcggcgtgctggagatggtgaagatcttcagatacggctaccccgtgagactgagcttcagcgacttcctgagcagatacaagcccctggccgacaccttcctgagagagaagaaggagcagagcgccgccgagagatgcagactggtgctgcagcagtgcaagctgcagggctggcagatgggcgtgagaaaggtgttcctgaagtactggcacgccgaccagctgaacgacctgtgcctgcagctgcagagaaagatcatcacctgccagaaggtgatcagaggcttcctggccagacagcacctgctgcagagaatcagcatcagacagcaggaggtgaccagcatcaacagcttcctgcagaacaccgaggacatgggcctgaagacctacgacgccctggtgatccagaacgccagcgacatcgccagagagaacgacagactgagaagcgagatgaacgccccctaccacaaggagaagctggaggtgagaaacatgcaggaggagggcagcaagagaaccgacgacaagagcggccccagacacttccaccccagcagcatgagcgtgtgcgccgccgtggacggcctgggccagtgcctggtgggccccagcatctggagccccagcctgcacagcgtgttcagcatggacgacagcagcagcctgcccagccccagaaagcagcccccccccaagcccaagagagaccccaacaccagactgagcgccagctacgaggccgtgagcgcctgcctgagcgccgccagagaggccgccaacgaggccctggccagacccagaccccacagcgacgactacagcaccatgaagaagatcccccccagaaagcccaagagaagccccaacaccaagctgagcggcagctacgaggagatcagcggcagcagacccggcgacgccagacccgccggcgcccccggcgccgccgccagagtgctgacccccggcaccccccagtgcgccctgccccccgccgccccccccggcgacgaggacgacagcgagcccgtgtacatcgagatgctgggccacgccgccagacccgacagccccgaccccggcgagagcgtgtacgaggagatgaagtgctgcctgcccgacgacggcggccccggcgccggcagcttcctgctgcacggcgccagcccccccctgctgcacagagcccccgaggacgaggccgccggcccccccggcgacgcctgcgacatccccccccccttccccaacctgctgccccacagaccccccctgctggtgttcccccccacccccgtgacctgcagccccgccagcgacgagagccccctgacccccctggaggtgaagaagctgcccgtgctggagaccaacctgaagtaccccgtgcagcccgagggcagcagccccctgagcccccagtacagcaagagccagaagggcgacggcgacagacccgccagccccggcctggccctgttcaacggcagcggcagagccagcccccccagcaccccccccccccccccccccccccccggccccccccccgccccctacagaccctgcgcccacctggccttcccccccgagcccgcccccgtgaacgccggcaaggccggccccagcgccgaggcccccaaggtgcaccccaagcccaacagcgcccccgtggccggcccctgcagcagcttccccaagatcccctacagccccgtgaaggccaccagagccgacgccagaaaggccggcagcagcgccagcccccccgccccctacagcccccccagcagcagacccctgagcagccccctggacgagctggccagcctgttcaacagcggcagaagcgtgctgagaaagagcgccgccggcagaaagatcagagaggccgagggcttcgagaccaacatgaacatcagcagcagagacgaccccagcaccagcgagatcaccagcgagacccaggacagaaacgccaacaaccacggcatccagctgagcaacagcctgagcagcgccatcaccgccgagaacggcaacagcatcagcaacggcctgcccgaggaggacggctacagcagactgagcatcagcggcaccggcaccagcaccttccagagacacagagacagccacaccacccaggtgatccaccagctgagactgagcgagaacgagagcgtggccctgcaggagctgctggactggagaagaaagctgtgcgaggagggccaggactggcagcagatcctgcaccacgccgagcccagagtgccccccccccccccctgcaagaagcccagcctgctgaagaagcccgagggcgccagctgcaacagactgcccagcgagctgtgggacaccaccatctag

SEQ ID NO: 183731 - DNA, 2637 bp, Artificial Sequence
  derived and/or modified sequence
atgaagctgcagagacccatgagcatgctgaccgacgtgctgcacatggcctgcgccagcggctacaaggaggtggtgagcctgatcctggagcacggcggcgacctgaacatcgtggacgaccagtactggacccccctgcacctggccgccaagtacggccagaccaacctggtgaagctgctgctgatgcaccaggccaacccccacctggtgaactgcaacgaggagaaggccagcgacatcgccgccagcgagttcatcgaggagatgctgctgaaggccgagatcgcctgggaggagaagatgaaggagcccctgagcgccagcaccctggcccaggaggagccctacgaggagatcatccacgacctgcccgtgctgagcagcaagctgagccccctggtgctgcccatcgccaagcaggacagcctgctggagaaggacatcatgttcaaggacgccaccaagggcctgtgcaagcagcagagccaggacagcatccccgagaaccccatgatgagcggcagcaccaagcccgagcaggtgaagctgatgccccccgcccccaacgacgacctggccaccctgagcgagctgaacgacggcagcctgctgtacgagatccagaagagattcggcaacaaccagatctacaccttcatcggcgacatcctgctgctggtgaacccctacaaggagctgcccatctacagcagcatggtgagccagctgtacttcagcagcagcggcaagctgtgcagcagcctgcccccccacctgttcagctgcgtggagagagccttccaccagctgttcagagagcagagaccccagtgcttcatcctgagcggcgagagaggcagcggcaagagcgaggccagcaagcagatcatcagacacctgacctgcagagccggcgccagcagagccaccctggacagcagattcaagcacgtggtgtgcatcctggaggccttcggccacgccaagaccaccctgaacgacctgagcagctgcttcatcaagtacttcgagctgcagttctgcgagagaaagcagcagctgaccggcgccagaatctacacctacctgctggagaagagcagactggtgagccagcccctgggccagagcaacttcctgatcttctacctgctgatggacggcctgagcgccgaggagaagtacggcctgcacctgaacaacctgtgcgcccacagatacctgaaccagaccatccaggacgacgccagcaccggcgagagaagcctgaacagagagaagctggccgtgctgaagagagccctgaacgtggtgggcttcagcagcctggaggtggagaacctgttcgtgatcctggccgccatcctgcacctgggcgacatcagattcaccgccctgaacgagggcaacagcgccttcgtgagcgacctgcagctgctggagcaggtggccggcatgctgcaggtgagcaccgacgagctggccagcgccctgaccaccgacatccagtacttcaagggcgacatgatcatcagaagacacaccatccagatcgccgagttcttcagagacctgctggccaagagcctgtacagcagactgttcagcttcctggtgaacaccatgaacagctgcctgcacagccaggacgagcagaagagcatgcagaccctggacatcggcatcctggacatcttcggcttcgaggagttccagaagaacgagttcgagcagctgtgcgtgaacatgaccaacgagaagatgcaccactacatcaacgaggtgctgttcctgcacgagcaggtggagtgcgtgcaggagggcgtgaccatggagaccgcctacagccccggcaaccagaacggcgtgctggacttcttcttccagaagcccagcggcttcctgaccctgctggacgaggagagccagatgatctggagcgtggagagcaacttccccaagaagctgcagagcctgctggagagcagcaacaccaacgccgtgtacagccccatgaaggacggcaacggcaacgtggccctgaaggaccacggcaccgccttcaccatcatgcactacgccggcagagtgatgtacgacgtggtgggcgccatcgagaagaacaaggacagcctgagccagaacctgctgttcgtgatgaagaccagcgagaacgtggtgatcaaccacctgttccagagcaagctgagccagaccggcagcctggtgagcgcctaccccagcttcaagttcagaggccacaagagcgccctgctgagcaagaagatgaccgccagcagcatcatcggcgagaacaagaactacctggagctgagcaagctgctgaagaagaagggcaccagcaccttcctgcagagactggagagaggcgaccccgtgaccatcgccagccagctgagaaagagcctgatggacatcatcggcaagctgcagaagtgcaccccccacttcatccactgcatcagacccaacaacagcaagctgcccgacaccttcgacaacttctacgtgagcgcccagctgcagtacatcggcgtgctggagatggtgaagatcttcagatacggctaccccgtgagactgagcttcagcgacttcctgagcagatag

SEQ ID NO: 183732 - DNA, 2823 bp, Artificial Sequence
  derived and/or modified sequence
atggagatcgaccagtgcctgctggagagcctgcccctgggccagagacagagactggtgaagagaatgagatgcgagcagatcaaggcctactacgagagagagaaggccttccagaagcaggagggcttcctgaagagactgaagcacgccaagaaccccaaggtgcacttcaacctgaccgacatgctgcaggacgccatcatccaccacaacgacaaggaggtgctgagactgctgaaggagggcgccgacccccacaccctggtgagcagcggcggcagcctgctgcacctgtgcgccagatacgacaacgccttcatcgccgagatcctgatcgacagaggcgtgaacgtgaaccaccaggacgaggacttctggacccccatgcacatcgcctgcgcctgcgacaaccccgacatcgtgctgctgctggtgctggccggcgccaacgtgctgctgcaggacgtgaacggcaacatccccctggactacgccgtggagggcaccgagagcagcagcatcctgctgacctacctggacgagaacggcgtggacctgaccagcctgagacagatgaagctgcagagacccatgagcatgctgaccgacgtgaagcacttcctgagcagcggcggcaacgtgaacgagaagaacgacgagggcgtgaccctgctgcacatggcctgcgccagcggctacaaggaggtggtgagcctgatcctggagcacggcggcgacctgaacatcgtggacgaccagtactggacccccctgcacctggccgccaagtacggccagaccaacctggtgaagctgctgctgatgcaccaggccaacccccacctggtgaactgcaacgaggagaaggccagcgacatcgccgccagcgagttcatcgaggagatgctgctgaaggccgagatcgcctgggaggagaagatgaaggagcccctgagcgccagcaccctggcccaggaggagccctacgaggagatcatccacgacctgcccgtgctgagcagcaagctgagccccctggtgctgcccatcgccaagcaggacagcctgctggagaaggacatcatgttcaaggacgccaccaagggcctgtgcaagcagcagagccaggacagcatccccgagaaccccatgatgagcggcagcaccaagcccgagcaggtgaagctgatgccccccgcccccaacgacgacctggccaccctgagcgagctgaacgacggcagcctgctgtacgagatccagaagagattcggcaacaaccagatctacaccttcatcggcgacatcctgctgctggtgaacccctacaaggagctgcccatctacagcagcatggtgagccagctgtacttcagcagcagcggcaagctgtgcagcagcctgcccccccacctgttcagctgcgtggagagagccttccaccagctgttcagagagcagagaccccagtgcttcatcctgagcggcgagagaggcagcggcaagagcgaggccagcaagcagatcatcagacacctgacctgcagagccggcgccagcagagccaccctggacagcagattcaagcacgtggtgtgcatcctggaggccttcggccacgccaagaccaccctgaacgacctgagcagctgcttcatcaagtacttcgagctgcagttctgcgagagaaagcagcagctgaccggcgccagaatctacacctacctgctggagaagagcagactggtgagccagcccctgggccagagcaacttcctgatcttctacctgctgatggacggcctgagcgccgaggagaagtacggcctgcacctgaacaacctgtgcgcccacagatacctgaaccagaccatccaggacgacgccagcaccggcgagagaagcctgaacagagagaagctggccgtgctgaagagagccctgaacgtggtgggcttcagcagcctggaggtggagaacctgttcgtgatcctggccgccatcctgcacctgggcgacatcagattcaccgccctgaacgagggcaacagcgccttcgtgagcgacctgcagctgctggagcaggtggccggcatgctgcaggtgagcaccgacgagctggccagcgccctgaccaccgacatccagtacttcaagggcgacatgatcatcagaagacacaccatccagatcgccgagttcttcagagacctgctggccaagagcctgtacagcagactgttcagcttcctggtgaacaccatgaacagctgcctgcacagccaggacgagcagaagagcatgcagaccctggacatcggcatcctggacatcttcggcttcgaggagttccagaagaacgagttcgagcagctgtgcgtgaacatgaccaacgagaagatgcaccactacatcaacgaggtgctgttcctgcacgagcaggtggagtgcgtgcaggagggcgtgaccatggagaccgcctacagccccggcaaccagaacggcgtgctggacttcttcttccagaagcccagcggcttcctgaccctgctggacgaggagagccagatgatctggagcgtggagagcaacttccccaagaagctgcagagcctgctggagagcagcaacaccaacgccgtgtacagccccatgaaggacggcaacggcaacgtggccctgaaggaccacggcaccgccttcaccatcatgcactacgccggcagagtgatgtacgacgtggtgggcgccatcgagaagaacaaggacagcctgagccagaacctgctgttcgtgatgaagaacagaagatgcttctag

SEQ ID NO: 183733 - DNA, 2574 bp, Artificial Sequence
  derived and/or modified sequence
atgagaagagccgacaccagagacggcgagagaggcagcggcaagagcgaggccagcaagcagatcatcagacacctgacctgcagagccggcgccagcagagccaccctggacagcagattcaagcacgtggtgtgcatcctggaggccttcggccacgccaagaccaccctgaacgacctgagcagctgcttcatcaagtacttcgagctgcagttctgcgagagaaagcagcagctgaccggcgccagaatctacacctacctgctggagaagagcagactggtgagccagcccctgggccagagcaacttcctgatcttctacctgctgatggacggcctgagcgccgaggagaagtacggcctgcacctgaacaacctgtgcgcccacagatacctgaaccagaccatccaggacgacgccagcaccggcgagagaagcctgaacagagagaagctggccgtgctgaagagagccctgaacgtggtgggcttcagcagcctggaggtggagaacctgttcgtgatcctggccgccatcctgcacctgggcgacatcagattcaccgccctgaacgagggcaacagcgccttcgtgagcgacctgcagctgctggagcaggtggccggcatgctgcaggtgagcaccgacgagctggccagcgccctgaccaccgacatccagtacttcaagggcgacatgatcatcagaagacacaccatccagatcgccgagttcttcagagacctgctggccaagagcctgtacagcagactgttcagcttcctggtgaacaccatgaacagctgcctgcacagccaggacgagcagaagagcatgcagaccctggacatcggcatcctggacatcttcggcttcgaggagttccagaagaacgagttcgagcagctgtgcgtgaacatgaccaacgagaagatgcaccactacatcaacgaggtgctgttcctgcacgagcaggtggagtgcgtgcaggagggcgtgaccatggagaccgcctacagccccggcaaccagaacggcgtgctggacttcttcttccagaagcccagcggcttcctgaccctgctggacgaggagagccagatgatctggagcgtggagagcaacttccccaagaagctgcagagcctgctggagagcagcaacaccaacgccgtgtacagccccatgaaggacggcaacggcaacgtggccctgaaggaccacggcaccgccttcaccatcatgcactacgccggcagagtgatgtacgacgtggtgggcgccatcgagaagaacaaggacagcctgagccagaacctgctgttcgtgatgaagaccagcgagaacgtggtgatcaaccacctgttccagagcaagctgagccagaccggcagcctggtgagcgcctaccccagcttcaagttcagaggccacaagagcgccctgctgagcaagaagatgaccgccagcagcatcatcggcgagaacaagaactacctggagctgagcaagctgctgaagaagaagggcaccagcaccttcctgcagagactggagagaggcgaccccgtgaccatcgccagccagctgagaaagagcctgatggacatcatcggcaagctgcagaagtgcaccccccacttcatccactgcatcagacccaacaacagcaagctgcccgacaccttcgacaacttctacgtgagcgcccagctgcagtacatcggcgtgctggagatggtgaagatcttcagatacggctaccccgtgagactgagcttcagcgacttcctgagcagatacaagcccctggccgacaccttcctgagagagaagaaggagcagagcgccgccgagagatgcagactggtgctgcagcagtgcaagctgcagggctggcagatgggcgtgagaaaggtgttcctgaagtactggcacgccgaccagctgaacgacctgtgcctgcagctgcagagaaagatcatcacctgccagaaggtgatcagaggcttcctggccagacagcacctgctgcagagaatcagcatcagacagcaggaggtgaccagcatcaacagcttcctgcagaacaccgaggacatgggcctgaagacctacgacgccctggtgatccagaacgccagcgacatcgccagagagaacgacagactgagaagcgagatgaacgccccctaccacaaggagaagctggaggtgagaaacatgcaggaggagggcagcaagagaaccgacgacaagagcggccccagacacttccaccccagcagcatgagcgtgtgcgccgccgtggacggcctgggccagtgcctggtgggccccagcatctggagccccagcctgcacagcgtgttcagcatggacgacagcagcagcctgcccagccccagaaagcagcccccccccaagcccaagagagaccccaacaccagactgagcgccagctacgaggccgtgagcgcctgcctgagcgccgccagagaggccgccaacgagggccagccctggggcggcacccagcccagagtgcccggcagcagaatgctgtag

SEQ ID NO: 183734 - DNA, 2823 bp, Artificial Sequence
  derived and/or modified sequence
atggagatcgatcagtgtttactggaatctctgccgctgggtcagcgacagagactggtcaaacgaatgcgatgcgaacagatcaaggcttactacgaacgtgaaaaggccttccagaaacaggaagggtttctgaaacgtctgaaacacgccaaaaaccctaaagtgcatttcaatcttacagacatgctgcaggacgcgattatccatcataatgacaaggaagttttaagacttctcaaggagggagcagacccccacacactggtttcatccggtggtagcctgcttcatctgtgtgccaggtatgacaatgccttcattgcggagattcttattgatcgtggggtaaacgtaaaccaccaggacgaagatttctggacccccatgcatattgcctgtgcctgtgacaatcccgatatagtcctcctcctcgtcctggccggtgcaaacgtcctgttgcaggatgtgaacgggaatatccctctggactatgcagtcgaaggcaccgagagttcttctattcttttaacgtatttggacgaaaatggagttgaccttacctctctgagacagatgaaactccagcgcccgatgagcatgttgactgatgtgaagcacttcctttcctcaggagggaatgttaacgaaaaaaacgatgagggggtaaccctgctgcatatggcttgtgcttctggctataaggaggttgtgagtctaattctcgagcacggcggggatctgaacatcgtggacgatcagtactggactcctttgcaccttgctgcaaagtacggccaaacaaatctcgttaagttgctcctgatgcaccaggccaatccacatcttgtcaactgtaatgaagaaaaggcctcagatatcgcagccagcgagttcatcgaggagatgctcctcaaagcagagatcgcctgggaggaaaagatgaaagaacccctgtccgcctctacactggcacaagaggaaccgtacgaagagattatccatgacctgcccgtgctgtctagcaagttgtctcctctagtcttgccaatagcgaaacaggatagtcttctggagaaggatataatgttcaaggatgctacgaagggcctatgtaagcagcagagccaggactcaattcccgaaaatccaatgatgtccgggtccaccaagcccgaacaagtgaaactgatgcccccggctcctaacgacgacttagctaccctgtctgaactgaacgatggtagcctcctgtacgaaatacagaagcggttcgggaataaccagatttatacattcattggagatatcctcctcctggtcaatccctacaaagaactgccaatatattcttccatggtgtcccagctgtacttttcttctagtggcaaactatgtagctcgctgcccccccacctgttcagttgcgtggaaagagctttccaccagttgtttcgcgagcaacgcccccagtgtttcatcttgtcaggagaaaggggtagtggtaagagtgaggcatcaaagcagattatccgccacttgacctgtcgggccggcgcatccagagctactctggactccagattcaagcacgtcgtttgtattctggaagccttcggccatgctaaaactacactcaacgacttgagttcgtgttttatcaaatatttcgagctgcagttctgtgagcgtaagcagcagctgacgggtgccagaatatacacctatctcctggagaaaagtcggctagtcagtcagccacttgggcaatccaatttcctgatcttctaccttctgatggacggactgtcggcagaggaaaagtacggactgcatctgaataacctttgtgcacaccgctacctcaatcagaccatacaggacgacgcatccacaggcgaaagaagcctgaatcgcgaaaaactcgcagtcctcaaacgtgcattgaatgtggtgggctttagttcactggaggtggagaatctcttcgtcatcttagcagcgatcctgcacctgggcgacatccgatttacagccttgaatgagggtaattccgcttttgtgagcgatctgcaactgctcgagcaggtcgccggcatgcttcaggttagcaccgacgagctcgcctccgcattaaccaccgacattcaatacttcaagggcgacatgatcattcgaaggcatactatccagattgctgagttcttcagagacttactcgccaagagcctttattcccggctgttttcgtttctggtcaataccatgaatagctgcctgcacagccaggacgaacaaaaatcgatgcagactcttgacatcggtattttggatatattcggcttcgaggagttccagaagaatgaattcgaacagctgtgcgtcaacatgaccaacgagaagatgcaccactacattaacgaggtattgtttcttcatgaacaggtggaatgtgtgcaggaaggggtcaccatggagactgcctactctcctggaaatcaaaacggggtcctggactttttctttcaaaaaccttccggttttttgactcttctcgacgaggagagtcaaatgatatggtccgtggaatccaactttcctaaaaagctgcagagtctgctcgagagctcgaatacaaacgccgtatattcacctatgaaggatggcaatggcaacgtggcactgaaggaccacggcactgcgttcactattatgcactacgcaggtagggtgatgtatgatgtggtaggggcaatcgaaaagaacaaagactctctttctcagaatcttctgtttgtaatgaaacggggacgctgcttctag

SEQ ID NO: 183735 - DNA, 5577 bp, Artificial Sequence
  derived and/or modified sequence
atggagatcgatcagtgtcttttggaatcattgcccctgggccagaggcagaggcttgtcaaacgaatgcggtgcgagcaaatcaaagcctattacgaacgggaaaaggcctttcaaaaacaggaaggctttctgaaacgactcaaacatgcaaagaacccaaaggttcattttaatctaacagatatgttgcaggacgccatcattcaccacaatgacaaggaagtgctacgcctgctgaaggaaggtgctgatccgcacactctggtaagctcaggcggatccctgctccacctatgcgccaggtacgacaatgcttttatagccgagatcctgattgaccgcggagttaacgttaaccaccaagatgaagatttttggacgccgatgcacatcgcatgcgcatgtgataatcccgacattgttctactgctggtgctggccggagccaatgtgctcttgcaggatgtgaacgggaacattcctttagactatgccgtggaaggaaccgagtcatcatcaattctgttgacctatctggacgagaacggtgtggatctgacatcactccggcagatgaaacttcagcggccaatgtctatgctgactgacgtgaagcactttttgtcgtcaggcggtaatgtgaatgagaaaaacgatgagggcgtgaccttgctgcacatggcctgtgccagcggatacaaagaggtggtgagcctcatcctggagcacgggggtgacttgaatattgtggatgaccagtactggacacccttgcatttggccgctaagtacgggcagaccaacctggtgaagctcctgctgatgcaccaggccaatcctcatctggtaaattgcaacgaagagaaggcttccgacattgctgcctcagagttcatagaggagatgctcttaaaagctgagattgcctgggaagagaaaatgaaggagcctctctcagcgtctaccttggcacaagaggagccttatgaggagattattcatgacctaccagttctgtcttcaaaacttagcccactggtcctgcctattgcgaagcaggatagcctgctggaaaaggatatcatgtttaaagatgctacgaagggactgtgcaagcagcagtcacaggacagtatccccgaaaatcccatgatgtcagggagtactaaaccggagcaggtgaaactgatgccacctgcgccgaatgatgatctcgctacactatccgaattaaatgacggatccctgctctacgaaattcagaagcggtttgggaataaccagatctacacatttatcggggacatactgctcctggtgaatccatacaaagagttgcctatttacagctcaatggttagccaattatactttagcagctcgggtaagctgtgttcttccctcccgccacacttgttttcttgtgtggaacgggcttttcaccagttgtttcgggagcaacggccccagtgctttattctcagcggcgaacgggggtccggcaaatcagaagcttctaagcaaattattcgccatctaacatgtcgcgccggtgcgagcagggcgaccttggattcacgattcaagcacgtcgtatgtattttagaggcgttcggccatgctaaaacaacattaaacgatctgtcaagttgctttataaagtatttcgagctacagttttgtgagcgtaagcaacagctcaccggggcccggatttacacataccttctggagaagtcgcgacttgtcagccaaccactgggccagtccaatttcctgatcttctacttactgatggatgggctttccgcagaagagaagtacggcctgcacttaaataacctttgtgcccatagatacctaaaccaaaccatccaggatgatgccagcaccggtgagaggagcctcaatcgcgaaaaattggccgtcctgaagagagcgttgaatgtggtggggtttagctcactcgaagtcgaaaatcttttcgtgatcctggcagctatattgcacctcggggatatccgcttcaccgccttgaatgaggggaatagtgcctttgtgtcggacctgcaactgctggaacaggtggcaggtatgttgcaggtgtcaacggatgagttagcctctgcacttacgacggatatccagtattttaaaggcgacatgataatcaggagacatacaatccagatcgctgaattctttcgagacctgcttgctaaaagcttatattctagattatttagttttcttgtcaacactatgaacagttgcttacacagtcaggacgaacagaagtcaatgcagaccctcgatataggcatcctggacattttcggatttgaggaatttcagaaaaacgagtttgagcagttatgcgtgaacatgaccaacgaaaaaatgcatcactatattaacgaagtgctgttcttacacgagcaagtggagtgtgtgcaagaaggagtgactatggagactgcctactccccaggaaatcaaaacggcgtgctggacttctttttccagaagccatccggattcctgaccctgctcgacgaagagtcccagatgatttggtccgtcgaaagcaactttccgaagaagcttcagagcctccttgagtcctccaacacaaacgccgtctactcacctatgaaggacgggaacggcaacgttgcactcaaggatcatggaacagcattcaccattatgcactacgctggaagagttatgtacgatgtggtgggcgccatcgagaaaaataaagatagtttgtctcagaacctgttgtttgtaatgaagacatcggaaaacgtggttataaatcatctatttcagagcaagctttcccagaccggcagtctggtatccgcctatccatcctttaagtttcgggggcataaaagtgcccttttgtcaaaaaaaatgactgcttcgtctatcatcggggagaataaaaattatctggaattgagcaagctgctgaagaagaagggtaccagtaccttcctccagcgcctcgaacgaggagatcctgtgaccatagcttcccagctgcgcaagtctctcatggatatcattggaaaacttcagaagtgcacaccccatttcatccactgtatcagaccaaacaattcgaagcttcctgatacctttgataacttttacgtttcagctcagcttcagtatatcggggtgctggaaatggtgaagatttttcgctacggatatcccgttcgcctgagcttcagcgattttctgtcccgttataagcctctcgcagacacctttcttcgggagaaaaaggagcaaagcgccgccgagaggtgtagattggttcttcagcaatgcaagctccagggttggcagatgggagtgcgcaaagtgttcctgaaatattggcacgcggatcagctcaacgatttgtgcttgcaattgcagaggaaaattatcacctgccagaaggtgatacggggtttcctggccagacagcatttgctccaaagaattagtattaggcagcaagaggtaactagcatcaatagctttcttcagaacactgaggatatgggacttaaaacatacgacgcactggtgatccagaatgctagcgatatagcacgggagaatgatagattgagatccgaaatgaatgccccctaccataaggaaaaactggaagtgcggaacatgcaggaagaaggttccaagagaaccgacgataagagcggaccccgccacttccatccttcgtccatgagtgtgtgcgccgccgtggatgggctcggacagtgcctggtcggcccaagcatttggagcccaagcttacacagcgtgtttagcatggacgacagtagttcattgccaagtcctcgtaagcaaccacctcctaaacccaaaagagatccaaatacgcgcctgtctgcaagctatgaggctgtgtctgcgtgccttagcgcagccagagaggcagctaacgaagccctcgcacgccctagaccccattctgacgattactctacaatgaagaagattcctccacggaaacctaagcggtcacccaatactaaactgagtggaagctatgaagaaatctccgggagccggccaggcgacgccagacccgctggcgcccctggtgccgctgctagggttttaaccccaggtacaccacagtgcgccctcccgcctgcagcacctcccggcgacgaggacgactcagagcctgtttacattgagatgctgggacacgccgcccggcctgattcaccagaccctggcgagagtgtgtacgaggagatgaagtgctgcctgccggacgacgggggcccgggtgctgggtcctttttgctgcatggagctagtccccccttactgcaccgggcacccgaagatgaggcggccggccccccaggcgatgcttgcgacattccgcctccttttccgaacctgctgccacaccggcccccgctcttggtctttcctcccactccagtgacttgttctcccgcctctgacgaatcgccgttgactcccttggaagtgaaaaaactcccagtgctggaaactaacctgaagtatcccgtgcagcccgagggctcctcacctctgtctccacagtattccaagagtcagaagggcgacggcgatcggcctgcttccccaggcctggctctgttcaatggcagcgggcgcgcctcgcccccctctaccccaccacccccgccaccaccacccggcccccctcccgctccctaccgcccgtgcgcccatctcgccttccctcccgagcccgcccctgtgaacgctgggaaagctggcccttctgctgaagcccctaaagtccatcctaagcctaatagtgcaccagtcgctggaccgtgctctagcttcccaaagatcccttactcacctgtcaaggccacccgggcggatgccaggaaggccggctcaagtgcttcgcccccagcaccatattctcctccatcttccaggcctctgtcctccccactggacgaattagcctccctgttcaattctggaaggtcggtccttagaaagagcgcagctgggcgaaagatcagagaggccgaaggattcgaaacaaatatgaatatctctagcagggatgatcccagcaccagtgagatcacttccgagacccaggatcggaatgcgaataaccacggcatacagctgagtaactcattgtcatccgcgatcacagctgagaacggtaattcaatttcaaacgggttgccggaagaggacgggtactcccgcctgtccatcagtgggacaggcacgtccacttttcaacggcacagggattcgcatacgacacaggttatccatcaactccgcctgtcagagaacgaatccgtggccttgcaggagctgctggactggcgcagaaaactttgtgaggagggccaggactggcagcagattctccaccatgctgaacctcgagtaccgccaccacccccttgcaaaaaaccctccctgctgaagaagcctgaaggcgcaagctgcaacaggctaccctccgagctgtgggacacaactatctag

SEQ ID NO: 183736 - DNA, 5577 bp, Artificial Sequence
  derived and/or modified sequence
atggaaatcgatcagtgcctcttggaatctctgcccctgggccagcgtcagaggcttgttaaacggatgcgatgtgagcagattaaggcatactacgagcgcgagaaagcttttcagaagcaggagggattcctgaagcgcctaaaacacgccaaaaatcctaaggtgcacttcaacctaactgatatgcttcaggacgcaataatacaccacaatgataaagaagtcctcagactcctgaaggagggcgctgatccacacactttagtgtcatcaggcggctccctactgcatctatgtgcccgttacgataacgcttttatagccgagattttgattgaccgcggggtgaatgtaaatcaccaggatgaagacttttggaccccaatgcacatcgcctgcgcctgcgataatcccgacattgtgctgctgctcgtgctggccggcgctaacgttttgttacaggacgtcaacggaaatataccccttgattatgcggtcgaggggactgaaagctcttcaatcctcctgacctacctggacgaaaatggagtggatctgaccagtctgcggcaaatgaagctgcagcgtccaatgagcatgctgaccgacgtgaagcattttctttcctctggcggcaacgtgaacgaaaagaatgacgaaggtgtgacattactccacatggcttgtgcctctggatataaggaagtggtgtctttgattctggaacacggcggggacttgaatatcgtagatgatcagtattggacaccacttcacctggctgctaaatacggacaaactaacctcgtgaagctgctgctgatgcatcaggcgaacccccatctggtcaattgcaacgaagaaaaggcttcagatatcgctgcgtccgagttcattgaggagatgctgttaaaggctgaaatagcttgggaggagaagatgaaggagccactttctgccagcactctggcgcaagaagagccatacgaggaaatcatccatgaccttccagtgctatcctcaaaactaagcccccttgttttgccaatcgcaaaacaagattctctgcttgaaaaggatattatgtttaaagacgctactaaaggtttgtgcaagcagcagtcccaggattccataccagagaacccaatgatgtccggctccactaagcccgaacaggtgaagctgatgccccctgcacctaacgatgaccttgccacactgtccgaattgaatgacggctcactcctgtacgagattcagaaaagattcgggaacaatcagatctacaccttcataggggatatcctgctccttgtgaacccatacaaagaattgccaatttattcaagcatggtctcccaactctactttagtagcagcggaaaactttgttccagcttgccaccccacctgttcagctgcgttgagagagctttccatcaactgttccgggaacagcggccacaatgcttcattctttcaggggagcggggctccggtaaatcagaggcatctaaacagatcatccgccaccttacgtgcagagccggcgcctcacgtgcaaccctggatagtcgattcaagcacgtggtatgcatcctggaagctttcggacacgctaagaccactctgaatgacctgtcttcttgctttataaagtactttgagctacagttctgtgagcgcaagcaacagctgacaggagctaggatttacacctatctgttagaaaaaagcaggctggtttctcagccattaggccaaagcaacttcctcattttttatcttcttatggatggcctgtcagctgaagagaaatacggactgcacctgaacaacctgtgcgcccaccgctatcttaaccagaccattcaggacgatgcgagtaccggagagcgtagcctgaatcgggaaaagttggccgtgttaaagcgggccctcaatgtggtcggcttcagcagtttagaagtggaaaatctcttcgttattctggctgccatcttgcacttgggggatatcagatttaccgctctaaatgaaggcaattcagcttttgttagtgatttgcagctgttagagcaggtggcggggatgcttcaggtctccaccgatgagttagcctccgccctgaccaccgacatccaatattttaagggggatatgatcattaggcgtcatacgatacaaatcgctgagttttttcgggacctgctggcgaaatccctatatagtcggcttttctccttcctggtgaataccatgaactcatgccttcattctcaagatgagcagaaatccatgcaaacacttgacattgggattctggacatttttggctttgaagaatttcagaagaacgaatttgagcagctatgtgtcaatatgaccaacgagaaaatgcatcactacataaacgaagtcctatttcttcatgaacaagtggaatgtgtccaggagggggtgacaatggagaccgcatacagtccaggaaaccagaatggtgtcctggatttttttttccagaaacctagtggattccttacgcttctggatgaggaatcccagatgatttggtcggtggaatccaattttccgaaaaaacttcagtctctgttagagagctccaacactaatgccgtatatagtcccatgaaagatggtaacggcaacgtggcgctgaaggatcatggcacagctttcactataatgcattacgcaggtagagtaatgtacgatgtggttggagcaatcgaaaagaataaggattctctgagccagaacctcctgtttgtgatgaaaacttctgagaacgtggtgataaaccatctcttccagagcaaactgtctcagaccggctcgctcgtttctgcatatccttcatttaaattcagaggtcataaaagtgctttactgagcaagaagatgacagcgtccagcattataggcgaaaataagaattatctagaactgtccaagttgctgaagaagaaggggacttctacattcctccagaggctcgaacggggggacccagtgaccattgccagccagctccggaaaagcttgatggatatcatcggcaagcttcagaaatgcacccctcatttcatccactgcataagacctaataactccaagctgccagataccttcgataacttttacgtctctgcacagctccagtacatcggtgtgctggaaatggttaagatctttaggtacgggtaccctgtgcgactctcgttcagtgatttcctgagccggtacaagccactggcagatactttcctccgcgagaagaaggagcagtcagccgcagagcgctgtaggcttgtcctgcagcagtgtaaactccaaggctggcagatgggtgtccggaaagtttttctaaagtattggcatgctgatcagttgaatgacctgtgcctccagttgcagcgcaaaataattacttgtcagaaggttatcaggggcttcctagcaaggcaacacctcctgcagcgcatcagcattagacagcaagaggtcacttcgatcaacagcttcttgcagaacactgaggatatgggtttgaagacttatgacgccctcgttatccaaaatgcctcagacatcgcccgtgagaatgacaggcttcgctctgaaatgaacgctccctaccataaggagaagctggaggtgcggaacatgcaagaggaaggctcaaagagaacagatgataaatccggacctcggcacttccacccctcaagcatgagcgtgtgcgcagccgttgatggcctgggtcaatgcttagtgggcccatccatatggagcccatccctgcactccgttttttccatggacgattctagttcactcccctcacccagaaagcaacctcccccaaagccaaaaagggaccctaatacacgcctctctgctagctacgaagcagtttcagcctgcctgtccgcggctcgcgaagccgccaacgaagctctcgcccggccccgaccacacagtgacgactatagcacaatgaaaaagatccccccccgtaagccaaagaggtcccctaacaccaagctcagcggatcatatgaggagatttcagggtctaggcctggagacgcacggcctgccggggcccccggcgctgctgcccgcgtcttgactccaggaaccccccagtgtgctcttcccccggctgcgccccctggagatgaggatgactcagaacctgtgtacatagagatgctcggacatgctgctcggccagactcccccgatccaggggaatcagtctatgaagaaatgaaatgctgccttcccgatgacggagggccaggggccgggtcatttctgctgcatggcgccagcccaccactgcttcatagagcccccgaggatgaggccgctggacctccgggggatgcctgcgacatccctccaccttttcctaacctgttgccccaccggcccccactcctggtatttccgccaaccccagttacttgttcaccggcctctgacgaaagccccttaaccccattggaggtgaagaagttgcctgtgcttgaaaccaacttgaaatacccagtacagccagaaggctcctctccgttgagcccgcaatattctaaatcccagaaaggagatggagaccgccctgcctcaccaggcttggcactctttaatggaagcggcagggcgagtccccccagcacacctccacctcctccccctcctcccgggcctcctcctgcaccatatcggccttgcgctcatcttgccttcccacccgagccagcaccagttaacgccggcaaagcagggccttcagccgaagcccccaaggtccatcccaagccaaacagtgcaccagttgctggcccctgtagctctttcccaaagattccatatagccctgttaaggcaactagggccgacgctagaaaggcgggtagctcggcatcccctccagctccttattcccctccatctagccggccgctgtcaagccccttggatgagttggcttcactcttcaattcgggccgttcagtgctgagaaagtcagctgcaggccggaaaattagggaagctgagggcttcgaaacaaacatgaacattagctcccgtgacgacccatctacctctgagataacatcagaaacacaggatcggaatgccaacaaccatgggattcagctttccaattcattgagttccgccatcacggcagagaacggtaattctatatccaacggcctccctgaagaggatggatattctagactgtccatttctggtacgggaacctcgaccttccagagacaccgcgactcgcacacaacacaggtgatccaccagctgcgcctcagtgagaatgagagcgtggctttgcaggaacttctggattggagacggaaactgtgcgaggagggccaggactggcagcagatactccatcatgctgagcccagagtgccccctcctccaccatgcaaaaagccatctctcctgaaaaaacctgagggtgcctcgtgcaataggctcccaagtgagctgtgggacacaacaatctag

SEQ ID NO: 183737 - DNA, 2637 bp, Artificial Sequence
  derived and/or modified sequence
atgaagctgcaaagacctatgagtatgctgactgatgtgctgcacatggcatgtgcctcaggctacaaggaagtggttagcctgattctagagcatggaggcgacctgaatatcgtcgacgatcagtattggaccccattgcatctggctgccaagtatgggcagacaaatctagtcaaactcctgctaatgcaccaggccaaccctcacttagtcaactgcaacgaagagaaagctagtgatatcgcggcatccgaattcattgaagaaatgctgttaaaagccgaaatcgcctgggaagagaaaatgaaggagcccctgagtgccagtaccttggcgcaggaagagccatatgaggagattatacacgacttgcccgtgctatcgagcaagctctcgccccttgtgttgccaatcgccaaacaggactccctgttagagaaagacataatgtttaaggacgccaccaaagggctctgcaaacagcaaagccaggacagcattccagagaaccccatgatgtccgggtccaccaagcctgagcaggtgaagcttatgccccctgcccctaatgacgaccttgctactctgtctgagctgaacgatggttccctgctctacgagattcagaaacgattcgggaacaaccagatttacactttcatcggagatatcttgcttctcgttaatccttacaaggaactcccaatttattccagtatggtttcccagctatattttagctcatctgggaagctgtgtagctccctacctccacatcttttttcatgcgtcgagcgggcattccatcagctatttcgtgaacagagaccacaatgctttatcctctccggcgagaggggctcgggcaagtccgaggcaagcaaacagattattcggcaccttacatgcagagcaggggcttccagagccacgcttgatagccggtttaagcacgtggtgtgcattctggaagcttttggacatgctaagactacgcttaacgatctctcttcttgctttatcaagtactttgagctgcagttctgcgagcggaaacagcaactaactggggcacggatctacacttatctcctggagaaatctaggttggtttcacagccacttgggcagtccaactttttaatattctacctccttatggatggactgtccgccgaggagaaatatggactgcatctcaataacctatgcgcgcataggtatctaaaccagactatccaggacgacgcttctaccggcgagaggagcctgaaccgagagaagctcgcagtgctgaaaagggcactcaatgtcgtgggatttagcagcctggaagtggagaacctgtttgtgatccttgcagctattctgcacttaggtgatatccgcttcaccgcacttaacgaggggaactctgcttttgtgtctgatttgcagctgttggagcaggtcgcaggcatgcttcaggtgtccactgatgagctggcgtccgcattgaccactgacatccagtacttcaagggcgacatgataatcagacggcacacgatccagattgcggaatttttccgggacctgttagcaaagtctctctatagccgcttgttctcattcttggtcaacacaatgaacagttgtttgcacagccaggatgagcagaaatccatgcagactttggacattggtattctggatatcttcggttttgaggaattccaaaaaaatgaattcgagcagctgtgtgtgaatatgaccaatgagaaaatgcaccactatattaacgaggttctatttttgcacgagcaagtcgagtgcgtgcaggagggtgtgacaatggaaactgcgtattccccgggaaatcaaaacggagtcctggattttttttttcagaaaccctcagggtttctaacgttgctcgacgaggaaagccagatgatctggtcggtggagtcaaatttccctaagaaactgcagtcgctcttggagtcatctaatacaaatgccgtttactctccaatgaaagacggaaacggcaacgtcgctttaaaagatcacggtaccgccttcactattatgcattatgccgggagggtcatgtatgacgtggtgggcgcaatcgaaaagaataaagattccctctcgcagaacctattgttcgttatgaagactagtgagaacgttgtcatcaaccaccttttccagtccaagctttcgcagaccggctccttggtgtccgcttacccatctttcaagtttcgcggccacaaatcagccctcctatcaaaaaagatgacagcctcttcaattatcggagaaaataagaactatctggagttgtccaaattgctcaagaagaagggtacctccacgtttcttcaaagacttgagcgcggcgatcccgtaaccatcgcttcccagttgcgcaaatcactgatggacattattggcaagctgcagaagtgtacaccacattttatccactgcatcagaccaaacaatagtaagctgcctgatacctttgataatttttacgtgagcgcgcaacttcagtatataggcgtgctggagatggttaagatctttagatacggatatcccgtccgcctgagtttcagcgatttccttagtaggtag

SEQ ID NO: 183738 - DNA, 2823 bp, Artificial Sequence
  derived and/or modified sequence
atggaaattgaccagtgcctgctggagtcactaccactgggtcagcggcagaggttggtgaagagaatgaggtgtgaacagatcaaggcttattatgaaagggagaaagccttccagaagcaggagggatttctgaagcgcctgaaacacgccaagaatcctaaggtgcattttaacctcactgacatgttgcaggacgccattatccatcataatgataaggaggtactgaggctgctcaaagagggcgcagaccctcacaccctagtgtcctccggcggaagcctcctgcacttgtgtgcccgctacgacaacgccttcatcgccgagatcctcatagatcgaggcgttaacgtgaaccaccaagacgaggatttttggactccaatgcacatcgcctgtgcatgtgataaccctgatatcgtccttctgctggtactcgccggggccaatgtattactgcaggacgttaacggcaacattcctttggattatgccgtggaaggcacagaatctagctcaattctcctgacttatctggacgagaacggtgtcgatctcacttccttgaggcagatgaaactgcagaggccgatgtcgatgctgacagacgtcaagcattttttgtcctctggaggcaatgtgaatgaaaagaacgatgaaggcgttactctactgcatatggcttgcgccagtggatataaagaagtggtgtctctgatcctggagcacggcggcgacctgaacattgtcgacgaccagtactggacccccctgcacctggccgcaaaatatggccagaccaatctggtgaagctactgctgatgcatcaggctaacccacacctagtgaattgcaacgaagagaaggctagcgatattgctgcctccgaattcattgaagagatgctgctgaaggcagaaattgcctgggaggagaaaatgaaagaaccactctcagctagcacgctggctcaagaggaaccctatgaggaaatcatccatgacctgcccgtgctgtcaagcaagctaagtccattggtgctgcctattgctaaacaggattccctgctcgaaaaggatattatgttcaaggatgcaacgaaaggcctatgcaagcagcagtcacaggatagcatccctgagaatccgatgatgtccgggtctacgaagccggagcaggtaaaactgatgccccctgccccaaacgacgatctcgctacgctgagcgagctgaatgatgggagtctcctctatgaaattcagaagcgtttcggtaataaccagatttatacatttataggggatattctgctcttggtgaacccatacaaagagctgcccatctattcatccatggtgtcacaactgtatttttcctcctcagggaagctctgttcaagtctccctccccacctcttcagctgcgttgagagagcgttccaccaactgttccgtgaacaacgtcctcaatgttttattctttctggagaacgggggtcagggaagtctgaggcctcaaaacaaatcatccgtcacctgacatgccgagcaggcgcctcaagagctacgctcgactctcgattcaaacacgtggtgtgcatattggaggcattcggacatgctaaaacgaccctcaacgatctgagtagctgttttatcaagtacttcgaactgcagttctgtgaacgaaagcagcagctgacaggagcgaggatttatacctatcttctcgaaaaatctcggcttgtaagtcaaccgctgggacaaagtaacttcctcatcttctatctactgatggatggtctaagtgccgaagagaagtatgggctgcatctgaataatctgtgcgcgcaccgatatctgaatcagacaatacaggacgacgccagtacaggggaaaggagcctgaatcgtgaaaagctggccgtgctcaagcgtgccctgaacgtcgtcggcttttcgtctctggaggtagaaaatctgttcgtcatcctggccgcgatccttcatctaggggacattaggttcaccgccttgaacgagggaaatagtgctttcgtgtctgacctgcaactgcttgagcaagtagccggaatgctgcaggtatccacagatgagctggccagtgcacttacaactgacatccaatactttaagggtgacatgattatcagacgacatacaatccagatcgccgagttttttcgtgacttactggctaagtctctgtactccagactgttctcctttttagtgaatacaatgaacagctgtctgcacagccaggatgagcagaaaagcatgcagaccctggatatcggaatcttggacatcttcggatttgaagaattccagaagaatgaatttgaacagctgtgcgtgaacatgaccaacgaaaagatgcatcattacattaatgaggttcttttcttgcatgagcaggtcgagtgtgtgcaggaaggtgttactatggaaacagcgtactctccgggtaatcaaaatggagttcttgattttttttttcagaagccttctggcttcctcacactgttggacgaagaatcccagatgatttggtccgtagagagcaattttccaaagaaactccagtccctcctggaaagttccaatacaaacgcggtgtacagcccgatgaaggacggaaacggaaatgtggccctgaaagatcacggcacagcttttacaattatgcattacgctgggagagtaatgtatgatgttgttggagccatcgagaaaaacaaggattccctgagccagaatctgttatttgtgatgaagaataggaggtgcttctag

SEQ ID NO: 183739 - DNA, 2574 bp, Artificial Sequence
  derived and/or modified sequence
atgcggagggccgatacgagggacggagagcgcggcagtggcaagtctgaagcctcaaagcagattattaggcacctgacatgtagggctggggcttccagggcaacactagactcccgttttaaacacgtagtatgcattctagaagcctttgggcacgcgaagactacattgaacgacctctcgtcctgtttcatcaagtattttgagctgcaattttgtgagcggaagcagcagctaactggggctcggatctacacttacctcttagagaaatctaggttggtgtcccagcccctcggccagtcaaattttctcattttttatcttttaatggatgggctctctgccgaagaaaagtacggtctgcacttaaacaatctttgtgcccatagatatctgaatcaaactattcaggatgacgcctccacaggggagcgatcactgaatcgggagaagctggcggtcctgaagcgcgcgctgaatgtggtgggcttttcttcactggaagtcgagaacctctttgtgatactggctgctatcctccacttgggcgatattaggtttaccgctcttaacgagggtaattccgctttcgtttctgacctacagcttctcgaacaagttgcgggaatgctgcaggtatcgacagacgagctcgcttcagctcttacgacggacatccaatatttcaagggcgacatgatcatcagaagacatactatacagattgctgagttcttccgtgacctgctggctaagagcctctatagtcgcctgtttagcttcctagtcaacacgatgaacagctgcctgcattcacaagacgaacagaagtctatgcaaaccttagacatcgggatcctggacatctttgggttcgaggaatttcagaaaaacgaattcgaacagctgtgtgttaatatgaccaacgaaaaaatgcaccactacattaacgaggtgctattcctacacgagcaagtggaatgcgtgcaggaaggcgttaccatggaaacagcctattcacctggcaatcagaacggcgttctcgatttcttttttcagaaaccgagtggatttcttaccctcctagacgaagagagtcagatgatttggagcgtggagagcaacttccctaaaaagctccagtcgctactggagtccagtaacacgaatgccgtttattctccaatgaaggatggaaatgggaacgtggccttgaaagatcacgggaccgccttcactattatgcactacgctggacgtgtgatgtacgatgtcgtgggagccatcgagaaaaacaaagactctttgagccagaatctcctgtttgtcatgaagaccagtgagaatgtcgtcattaaccacctattccagagcaaactatcacaaacagggtctctcgtgagcgcatacccaagttttaagtttagaggtcacaaatccgccctcctaagcaagaagatgacagcctcatccatcataggcgagaacaagaactacttggagctgagcaaattactcaaaaagaagggaacctccacctttctccagaggcttgaacggggagaccccgttaccattgcttctcagctacgcaaaagcctcatggacattattgggaagctgcagaagtgtacccctcacttcattcactgtatccgtcccaataacagtaaactccctgacaccttcgataacttttacgtgagtgctcagctgcaatacattggcgttctagagatggtgaaaatctttagatacggctacccagttcgactgtctttttctgatttccttagtcggtataaacccctggcagacacattcctgcgagagaagaaagagcagagcgccgcagaaaggtgccggctggttctgcagcaatgtaagctccagggctggcagatgggagtgagaaaggtgtttctcaaatactggcatgcagatcagctgaatgacttatgcctgcaactgcagaggaagatcataacttgtcagaaggtaatcaggggtttcttggctaggcagcatcttctgcagagaatctctatccggcagcaggaggtgacctcaattaattccttcctgcagaacaccgaggacatgggtctgaaaacttatgatgccttagtgatccagaatgcatcggatatcgctcgggagaatgatcgacttcggtctgaaatgaacgctccatatcacaaggaaaaactggaggtgcggaacatgcaggaagagggaagtaagcgaactgatgataagagtgggcctagacatttccatccctcaagcatgagtgtttgtgcagctgtcgacggcctcgggcagtgccttgtgggtccttcaatttggtcaccctcactccattctgtcttcagtatggacgactcctcaagcttacctagccctcggaagcaaccccccccaaaacccaaacgggaccccaacactcggctgtccgccagctacgaggccgtctcggcctgtctctccgccgctagagaggcagcaaatgaagggcagccttgggggggcactcagcccagggtgcccggcagcagaatgctgtag

SEQ ID NO: 183740 - DNA, 2823 bp, Artificial Sequence
  derived and/or modified sequence
atggagattgaccagtgcctgctggagagcctgcccctgggccagaggcagaggctggtgaagaggatgagatgtgagcagatcaaggcctactatgaaagagagaaggccttccagaagcaggagggcttcctgaagaggctgaagcacgccaagaaccccaaggtgcacttcaacctgacagacatgctgcaggatgccatcatccaccacaatgacaaggaggtgctgcggctgctgaaggagggcgctgacccccacaccctggtgagcagcggcggcagcctgctgcacctgtgtgcccgctatgacaatgccttcatcgccgagatcctgattgaccggggcgtgaatgtgaaccaccaggatgaggacttctggacccccatgcacatcgcctgtgcctgtgacaacccagacatcgtgctgctgctggtgctggccggggccaacgtgctgctgcaggatgtgaatggaaacatccccctggactatgctgtggagggcacagagagcagcagcatcctgctgacctacctggatgaaaatggagtggacctgaccagcctgcggcagatgaagctgcagaggcccatgtccatgctgacagatgtgaagcacttcctgagcagcggcggcaatgtgaatgagaagaatgatgagggcgtgaccctgctgcacatggcctgtgccagcggctacaaggaggtggtgtccctcatcctggagcacggcggggacctgaacatcgtggatgaccagtactggacccccctgcacctggccgccaagtatggccagaccaacctggtgaagctgctgctgatgcaccaggccaacccccacctggtgaactgcaatgaggagaaggccagtgacattgctgccagcgagttcatcgaggagatgctgctgaaggccgagatcgcctgggaggagaagatgaaggagcccctgagcgccagcaccctggcccaggaggagccctatgaggagatcatccatgacctgcctgtgctgagcagcaagctgagccccctggtgctgcccatcgccaagcaggacagcctgctggagaaggacatcatgttcaaggatgccaccaagggcctgtgcaagcagcagagccaggacagcatccctgagaaccccatgatgagcggcagcaccaagccagagcaggtgaagctgatgcccccagccccaaatgatgacctggccaccctgtctgagctgaatgatggcagcctgctgtatgagatccagaagagatttggaaacaaccagatctacaccttcatcggggacatcctgctgctggtgaacccctacaaggagctgcccatctacagctccatggtgtcccagctgtacttcagcagcagcggcaagctgtgcagcagcctgcccccccacctgttcagctgtgtggagcgggccttccaccagctgttccgggagcagaggccccagtgcttcatcctgagcggggagcggggcagcggcaagtctgaggccagcaagcagatcatccgccacctgacctgccgggccggggccagccgggccaccctggacagccgcttcaagcacgtggtgtgcatcctggaggcctttggacatgccaagaccaccctgaatgacctgagcagctgcttcatcaagtactttgagctgcagttctgtgagaggaagcagcagctgactggagcccgcatctacacctacctgctggagaagagccggctggtgtcccagcccctgggccagagcaacttcctgatcttctacctgctgatggatggcctgtctgctgaggagaagtatggcctgcacctgaacaacctgtgtgcccaccgctacctgaaccagaccatccaggatgatgccagcactggagagaggagcctgaaccgggagaagctggccgtgctgaagagggccctgaatgtggtgggcttcagcagcctggaggtggagaacctgtttgtgatcctggccgccatcctgcacctgggggacatccgcttcaccgccctgaatgaaggcaacagcgcctttgtgtctgacctgcagctgctggagcaggtggccggcatgctgcaggtgtccacagatgagctggccagcgccctgaccacagacatccagtacttcaagggggacatgatcatccgccgccacaccatccagattgctgagttcttccgggacctgctggccaagagcctgtacagccgcctcttctccttcctggtgaacaccatgaacagctgcctgcacagccaggatgagcagaagtccatgcagaccctggacatcggcatcctggacatcttcggctttgaggagttccagaagaatgaatttgagcagctgtgtgtgaacatgaccaatgagaagatgcaccactacatcaatgaggtgctcttcctgcacgagcaggtggagtgtgtgcaggagggcgtgaccatggagacagcctacagccctggcaaccagaatggagtgctggacttcttcttccagaagcccagcggcttcctgaccctgctggatgaggagagccagatgatctggagcgtggagagcaacttccccaagaagctgcagagcctgctggagagcagcaacaccaatgctgtgtacagccccatgaaggatggaaatggaaatgtggccctgaaggaccacggcacagccttcaccatcatgcactacgccggccgggtgatgtatgatgtggtgggcgccatcgagaagaacaaggacagcctgagccagaacctgctgtttgtgatgaagaggggccgctgcttctag

SEQ ID NO: 183741 - DNA, 5577 bp, Artificial Sequence
  derived and/or modified sequence
atggagattgaccagtgcctgctggagagcctgcccctgggccagaggcagaggctggtgaagaggatgagatgtgagcagatcaaggcctactatgaaagagagaaggccttccagaagcaggagggcttcctgaagaggctgaagcacgccaagaaccccaaggtgcacttcaacctgacagacatgctgcaggatgccatcatccaccacaatgacaaggaggtgctgcggctgctgaaggagggcgctgacccccacaccctggtgagcagcggcggcagcctgctgcacctgtgtgcccgctatgacaatgccttcatcgccgagatcctgattgaccggggcgtgaatgtgaaccaccaggatgaggacttctggacccccatgcacatcgcctgtgcctgtgacaacccagacatcgtgctgctgctggtgctggccggggccaacgtgctgctgcaggatgtgaatggaaacatccccctggactatgctgtggagggcacagagagcagcagcatcctgctgacctacctggatgaaaatggagtggacctgaccagcctgcggcagatgaagctgcagaggcccatgtccatgctgacagatgtgaagcacttcctgagcagcggcggcaatgtgaatgagaagaatgatgagggcgtgaccctgctgcacatggcctgtgccagcggctacaaggaggtggtgtccctcatcctggagcacggcggggacctgaacatcgtggatgaccagtactggacccccctgcacctggccgccaagtatggccagaccaacctggtgaagctgctgctgatgcaccaggccaacccccacctggtgaactgcaatgaggagaaggccagtgacattgctgccagcgagttcatcgaggagatgctgctgaaggccgagatcgcctgggaggagaagatgaaggagcccctgagcgccagcaccctggcccaggaggagccctatgaggagatcatccatgacctgcctgtgctgagcagcaagctgagccccctggtgctgcccatcgccaagcaggacagcctgctggagaaggacatcatgttcaaggatgccaccaagggcctgtgcaagcagcagagccaggacagcatccctgagaaccccatgatgagcggcagcaccaagccagagcaggtgaagctgatgcccccagccccaaatgatgacctggccaccctgtctgagctgaatgatggcagcctgctgtatgagatccagaagagatttggaaacaaccagatctacaccttcatcggggacatcctgctgctggtgaacccctacaaggagctgcccatctacagctccatggtgtcccagctgtacttcagcagcagcggcaagctgtgcagcagcctgcccccccacctgttcagctgtgtggagcgggccttccaccagctgttccgggagcagaggccccagtgcttcatcctgagcggggagcggggcagcggcaagtctgaggccagcaagcagatcatccgccacctgacctgccgggccggggccagccgggccaccctggacagccgcttcaagcacgtggtgtgcatcctggaggcctttggacatgccaagaccaccctgaatgacctgagcagctgcttcatcaagtactttgagctgcagttctgtgagaggaagcagcagctgactggagcccgcatctacacctacctgctggagaagagccggctggtgtcccagcccctgggccagagcaacttcctgatcttctacctgctgatggatggcctgtctgctgaggagaagtatggcctgcacctgaacaacctgtgtgcccaccgctacctgaaccagaccatccaggatgatgccagcactggagagaggagcctgaaccgggagaagctggccgtgctgaagagggccctgaatgtggtgggcttcagcagcctggaggtggagaacctgtttgtgatcctggccgccatcctgcacctgggggacatccgcttcaccgccctgaatgaaggcaacagcgcctttgtgtctgacctgcagctgctggagcaggtggccggcatgctgcaggtgtccacagatgagctggccagcgccctgaccacagacatccagtacttcaagggggacatgatcatccgccgccacaccatccagattgctgagttcttccgggacctgctggccaagagcctgtacagccgcctcttctccttcctggtgaacaccatgaacagctgcctgcacagccaggatgagcagaagtccatgcagaccctggacatcggcatcctggacatcttcggctttgaggagttccagaagaatgaatttgagcagctgtgtgtgaacatgaccaatgagaagatgcaccactacatcaatgaggtgctcttcctgcacgagcaggtggagtgtgtgcaggagggcgtgaccatggagacagcctacagccctggcaaccagaatggagtgctggacttcttcttccagaagcccagcggcttcctgaccctgctggatgaggagagccagatgatctggagcgtggagagcaacttccccaagaagctgcagagcctgctggagagcagcaacaccaatgctgtgtacagccccatgaaggatggaaatggaaatgtggccctgaaggaccacggcacagccttcaccatcatgcactacgccggccgggtgatgtatgatgtggtgggcgccatcgagaagaacaaggacagcctgagccagaacctgctgtttgtgatgaagaccagtgaaaatgtggtgatcaaccacctgttccagagcaagctgagccagacaggcagcctggtgtctgcctaccccagcttcaagttccggggccacaagagcgccctgctgagcaagaagatgacagccagcagcatcattggagagaacaagaactacctggagctgagcaagctgctgaagaagaagggcaccagcaccttcctgcagaggctggagcggggggaccctgtgaccatcgccagccagctgaggaagagcctgatggacatcatcggcaagctgcagaagtgcaccccccacttcatccactgcatccggcccaacaacagcaagctgcctgacacctttgacaacttctacgtgtctgcccagctgcagtacatcggcgtgctggagatggtgaagatcttccgctatggctaccctgtgcggctgtccttcagtgacttcctgagccgctacaagcccctggccgacaccttcctgcgggagaagaaggagcagagcgctgctgagcgctgccgcctggtgctgcagcagtgcaagctgcagggctggcagatgggcgtgaggaaggtgttcctgaagtactggcatgctgaccagctgaatgacctgtgcctgcagctgcagaggaagatcatcacctgccagaaggtgatccggggcttcctggcccggcagcacctgctgcagaggatcagcatccggcagcaggaggtgaccagcatcaacagcttcctgcagaacacagaggacatgggcctgaagacctatgatgccctggtgatccagaatgccagtgacatcgcccgggagaatgaccggctgcggtctgagatgaatgccccctaccacaaggagaagctggaggtgaggaacatgcaggaggagggcagcaagaggacagatgacaagagcggccccaggcacttccaccccagctccatgtctgtgtgtgccgctgtggatggcctgggccagtgcctggtgggccccagcatctggagccccagcctgcacagcgtcttctccatggatgacagcagcagcctgcccagccccaggaagcagcccccacccaagcccaagagggaccccaacacccggctgagcgccagctatgaggccgtgtctgcctgcctgtctgctgcccgggaggccgccaatgaggccctggcccggccccggccccacagtgatgactacagcaccatgaagaagatcccccccaggaagcccaagaggagccccaacaccaagctgagcggcagctatgaggagatcagcggcagcaggcctggagatgcccggcctgctggggcccctggagctgctgcccgggtgctgaccccaggcaccccccagtgtgccctgcccccagctgcccctcctggagatgaagatgacagcgagcctgtgtacatcgagatgctgggccatgctgcccggccagacagcccagaccctggagagagcgtgtatgaggagatgaagtgctgcctgcctgatgatggcggccctggagctggcagcttcctgctgcatggagccagcccccccctgctgcaccgggccccagaagatgaggccgccggccccccaggagatgcctgtgacatccccccacccttccccaacctgctgccccaccggccccccctgctggtgttcccccccacccctgtgacctgcagccctgccagtgatgagagccccctgacccccctggaggtgaagaagctgcctgtgctggagaccaacctgaagtaccctgtgcagcctgagggcagcagccccctgagcccccagtacagcaagagccagaagggagatggagacaggcctgccagccctggcctggccctcttcaacggcagcggccgggccagcccccccagcaccccacctcctcctcctcctcctcctggccccccaccagccccctaccggccctgtgcccacctggccttccccccagagcccgcccctgtgaatgctgggaaggccggccccagcgctgaggcccccaaggtgcaccccaagcccaacagcgcccctgtggccggcccctgcagcagcttccccaagatcccctacagccctgtgaaggccaccagggcagatgccaggaaggccggcagcagcgccagccccccagccccctacagcccccccagcagccggcccctgagcagccccctggatgagctggccagcctcttcaacagcggccgctctgtgctgaggaagtctgctgctggcaggaagatccgggaggccgagggctttgagaccaacatgaacatcagcagcagagatgaccccagcaccagcgagatcaccagcgagacccaggacagaaatgccaacaaccacggcatccagctgagcaacagcctgagcagcgccatcacagcagaaaatggaaacagcatcagcaatggcctgcctgaagaagatggctacagccggctgagcatcagcggcaccggcaccagcaccttccagaggcaccgggacagccacaccacccaggtgatccaccagctgcggctgtctgaaaatgaatctgtggccctgcaggagctgctggactggaggaggaagctgtgtgaggagggccaggactggcagcagatcctgcaccacgccgagccccgggtgcccccacctccaccctgcaagaagcccagcctgctgaagaagccagagggcgccagctgcaaccggctgcccagcgagctgtgggacaccaccatctag

SEQ ID NO: 183742 - DNA, 2637 bp, Artificial Sequence
  derived and/or modified sequence
atgaagctgcagaggcccatgtccatgctgacagatgtgctgcacatggcctgtgccagcggctacaaggaggtggtgtccctcatcctggagcacggcggggacctgaacatcgtggatgaccagtactggacccccctgcacctggccgccaagtatggccagaccaacctggtgaagctgctgctgatgcaccaggccaacccccacctggtgaactgcaatgaggagaaggccagtgacattgctgccagcgagttcatcgaggagatgctgctgaaggccgagatcgcctgggaggagaagatgaaggagcccctgagcgccagcaccctggcccaggaggagccctatgaggagatcatccatgacctgcctgtgctgagcagcaagctgagccccctggtgctgcccatcgccaagcaggacagcctgctggagaaggacatcatgttcaaggatgccaccaagggcctgtgcaagcagcagagccaggacagcatccctgagaaccccatgatgagcggcagcaccaagccagagcaggtgaagctgatgcccccagccccaaatgatgacctggccaccctgtctgagctgaatgatggcagcctgctgtatgagatccagaagagatttggaaacaaccagatctacaccttcatcggggacatcctgctgctggtgaacccctacaaggagctgcccatctacagctccatggtgtcccagctgtacttcagcagcagcggcaagctgtgcagcagcctgcccccccacctgttcagctgtgtggagcgggccttccaccagctgttccgggagcagaggccccagtgcttcatcctgagcggggagcggggcagcggcaagtctgaggccagcaagcagatcatccgccacctgacctgccgggccggggccagccgggccaccctggacagccgcttcaagcacgtggtgtgcatcctggaggcctttggacatgccaagaccaccctgaatgacctgagcagctgcttcatcaagtactttgagctgcagttctgtgagaggaagcagcagctgactggagcccgcatctacacctacctgctggagaagagccggctggtgtcccagcccctgggccagagcaacttcctgatcttctacctgctgatggatggcctgtctgctgaggagaagtatggcctgcacctgaacaacctgtgtgcccaccgctacctgaaccagaccatccaggatgatgccagcactggagagaggagcctgaaccgggagaagctggccgtgctgaagagggccctgaatgtggtgggcttcagcagcctggaggtggagaacctgtttgtgatcctggccgccatcctgcacctgggggacatccgcttcaccgccctgaatgaaggcaacagcgcctttgtgtctgacctgcagctgctggagcaggtggccggcatgctgcaggtgtccacagatgagctggccagcgccctgaccacagacatccagtacttcaagggggacatgatcatccgccgccacaccatccagattgctgagttcttccgggacctgctggccaagagcctgtacagccgcctcttctccttcctggtgaacaccatgaacagctgcctgcacagccaggatgagcagaagtccatgcagaccctggacatcggcatcctggacatcttcggctttgaggagttccagaagaatgaatttgagcagctgtgtgtgaacatgaccaatgagaagatgcaccactacatcaatgaggtgctcttcctgcacgagcaggtggagtgtgtgcaggagggcgtgaccatggagacagcctacagccctggcaaccagaatggagtgctggacttcttcttccagaagcccagcggcttcctgaccctgctggatgaggagagccagatgatctggagcgtggagagcaacttccccaagaagctgcagagcctgctggagagcagcaacaccaatgctgtgtacagccccatgaaggatggaaatggaaatgtggccctgaaggaccacggcacagccttcaccatcatgcactacgccggccgggtgatgtatgatgtggtgggcgccatcgagaagaacaaggacagcctgagccagaacctgctgtttgtgatgaagaccagtgaaaatgtggtgatcaaccacctgttccagagcaagctgagccagacaggcagcctggtgtctgcctaccccagcttcaagttccggggccacaagagcgccctgctgagcaagaagatgacagccagcagcatcattggagagaacaagaactacctggagctgagcaagctgctgaagaagaagggcaccagcaccttcctgcagaggctggagcggggggaccctgtgaccatcgccagccagctgaggaagagcctgatggacatcatcggcaagctgcagaagtgcaccccccacttcatccactgcatccggcccaacaacagcaagctgcctgacacctttgacaacttctacgtgtctgcccagctgcagtacatcggcgtgctggagatggtgaagatcttccgctatggctaccctgtgcggctgtccttcagtgacttcctgagcaggtag

SEQ ID NO: 183743 - DNA, 2823 bp, Artificial Sequence
  derived and/or modified sequence
atggagattgaccagtgcctgctggagagcctgcccctgggccagaggcagaggctggtgaagaggatgagatgtgagcagatcaaggcctactatgaaagagagaaggccttccagaagcaggagggcttcctgaagaggctgaagcacgccaagaaccccaaggtgcacttcaacctgacagacatgctgcaggatgccatcatccaccacaatgacaaggaggtgctgcggctgctgaaggagggcgctgacccccacaccctggtgagcagcggcggcagcctgctgcacctgtgtgcccgctatgacaatgccttcatcgccgagatcctgattgaccggggcgtgaatgtgaaccaccaggatgaggacttctggacccccatgcacatcgcctgtgcctgtgacaacccagacatcgtgctgctgctggtgctggccggggccaacgtgctgctgcaggatgtgaatggaaacatccccctggactatgctgtggagggcacagagagcagcagcatcctgctgacctacctggatgaaaatggagtggacctgaccagcctgcggcagatgaagctgcagaggcccatgtccatgctgacagatgtgaagcacttcctgagcagcggcggcaatgtgaatgagaagaatgatgagggcgtgaccctgctgcacatggcctgtgccagcggctacaaggaggtggtgtccctcatcctggagcacggcggggacctgaacatcgtggatgaccagtactggacccccctgcacctggccgccaagtatggccagaccaacctggtgaagctgctgctgatgcaccaggccaacccccacctggtgaactgcaatgaggagaaggccagtgacattgctgccagcgagttcatcgaggagatgctgctgaaggccgagatcgcctgggaggagaagatgaaggagcccctgagcgccagcaccctggcccaggaggagccctatgaggagatcatccatgacctgcctgtgctgagcagcaagctgagccccctggtgctgcccatcgccaagcaggacagcctgctggagaaggacatcatgttcaaggatgccaccaagggcctgtgcaagcagcagagccaggacagcatccctgagaaccccatgatgagcggcagcaccaagccagagcaggtgaagctgatgcccccagccccaaatgatgacctggccaccctgtctgagctgaatgatggcagcctgctgtatgagatccagaagagatttggaaacaaccagatctacaccttcatcggggacatcctgctgctggtgaacccctacaaggagctgcccatctacagctccatggtgtcccagctgtacttcagcagcagcggcaagctgtgcagcagcctgcccccccacctgttcagctgtgtggagcgggccttccaccagctgttccgggagcagaggccccagtgcttcatcctgagcggggagcggggcagcggcaagtctgaggccagcaagcagatcatccgccacctgacctgccgggccggggccagccgggccaccctggacagccgcttcaagcacgtggtgtgcatcctggaggcctttggacatgccaagaccaccctgaatgacctgagcagctgcttcatcaagtactttgagctgcagttctgtgagaggaagcagcagctgactggagcccgcatctacacctacctgctggagaagagccggctggtgtcccagcccctgggccagagcaacttcctgatcttctacctgctgatggatggcctgtctgctgaggagaagtatggcctgcacctgaacaacctgtgtgcccaccgctacctgaaccagaccatccaggatgatgccagcactggagagaggagcctgaaccgggagaagctggccgtgctgaagagggccctgaatgtggtgggcttcagcagcctggaggtggagaacctgtttgtgatcctggccgccatcctgcacctgggggacatccgcttcaccgccctgaatgaaggcaacagcgcctttgtgtctgacctgcagctgctggagcaggtggccggcatgctgcaggtgtccacagatgagctggccagcgccctgaccacagacatccagtacttcaagggggacatgatcatccgccgccacaccatccagattgctgagttcttccgggacctgctggccaagagcctgtacagccgcctcttctccttcctggtgaacaccatgaacagctgcctgcacagccaggatgagcagaagtccatgcagaccctggacatcggcatcctggacatcttcggctttgaggagttccagaagaatgaatttgagcagctgtgtgtgaacatgaccaatgagaagatgcaccactacatcaatgaggtgctcttcctgcacgagcaggtggagtgtgtgcaggagggcgtgaccatggagacagcctacagccctggcaaccagaatggagtgctggacttcttcttccagaagcccagcggcttcctgaccctgctggatgaggagagccagatgatctggagcgtggagagcaacttccccaagaagctgcagagcctgctggagagcagcaacaccaatgctgtgtacagccccatgaaggatggaaatggaaatgtggccctgaaggaccacggcacagccttcaccatcatgcactacgccggccgggtgatgtatgatgtggtgggcgccatcgagaagaacaaggacagcctgagccagaacctgctgtttgtgatgaagaacagacgctgcttctag

SEQ ID NO: 183744 - DNA, 2574 bp, Artificial Sequence
  derived and/or modified sequence
atgagaagagctgacaccagagatggagagcggggcagcggcaagtctgaggccagcaagcagatcatccgccacctgacctgccgggccggggccagccgggccaccctggacagccgcttcaagcacgtggtgtgcatcctggaggcctttggacatgccaagaccaccctgaatgacctgagcagctgcttcatcaagtactttgagctgcagttctgtgagaggaagcagcagctgactggagcccgcatctacacctacctgctggagaagagccggctggtgtcccagcccctgggccagagcaacttcctgatcttctacctgctgatggatggcctgtctgctgaggagaagtatggcctgcacctgaacaacctgtgtgcccaccgctacctgaaccagaccatccaggatgatgccagcactggagagaggagcctgaaccgggagaagctggccgtgctgaagagggccctgaatgtggtgggcttcagcagcctggaggtggagaacctgtttgtgatcctggccgccatcctgcacctgggggacatccgcttcaccgccctgaatgaaggcaacagcgcctttgtgtctgacctgcagctgctggagcaggtggccggcatgctgcaggtgtccacagatgagctggccagcgccctgaccacagacatccagtacttcaagggggacatgatcatccgccgccacaccatccagattgctgagttcttccgggacctgctggccaagagcctgtacagccgcctcttctccttcctggtgaacaccatgaacagctgcctgcacagccaggatgagcagaagtccatgcagaccctggacatcggcatcctggacatcttcggctttgaggagttccagaagaatgaatttgagcagctgtgtgtgaacatgaccaatgagaagatgcaccactacatcaatgaggtgctcttcctgcacgagcaggtggagtgtgtgcaggagggcgtgaccatggagacagcctacagccctggcaaccagaatggagtgctggacttcttcttccagaagcccagcggcttcctgaccctgctggatgaggagagccagatgatctggagcgtggagagcaacttccccaagaagctgcagagcctgctggagagcagcaacaccaatgctgtgtacagccccatgaaggatggaaatggaaatgtggccctgaaggaccacggcacagccttcaccatcatgcactacgccggccgggtgatgtatgatgtggtgggcgccatcgagaagaacaaggacagcctgagccagaacctgctgtttgtgatgaagaccagtgaaaatgtggtgatcaaccacctgttccagagcaagctgagccagacaggcagcctggtgtctgcctaccccagcttcaagttccggggccacaagagcgccctgctgagcaagaagatgacagccagcagcatcattggagagaacaagaactacctggagctgagcaagctgctgaagaagaagggcaccagcaccttcctgcagaggctggagcggggggaccctgtgaccatcgccagccagctgaggaagagcctgatggacatcatcggcaagctgcagaagtgcaccccccacttcatccactgcatccggcccaacaacagcaagctgcctgacacctttgacaacttctacgtgtctgcccagctgcagtacatcggcgtgctggagatggtgaagatcttccgctatggctaccctgtgcggctgtccttcagtgacttcctgagccgctacaagcccctggccgacaccttcctgcgggagaagaaggagcagagcgctgctgagcgctgccgcctggtgctgcagcagtgcaagctgcagggctggcagatgggcgtgaggaaggtgttcctgaagtactggcatgctgaccagctgaatgacctgtgcctgcagctgcagaggaagatcatcacctgccagaaggtgatccggggcttcctggcccggcagcacctgctgcagaggatcagcatccggcagcaggaggtgaccagcatcaacagcttcctgcagaacacagaggacatgggcctgaagacctatgatgccctggtgatccagaatgccagtgacatcgcccgggagaatgaccggctgcggtctgagatgaatgccccctaccacaaggagaagctggaggtgaggaacatgcaggaggagggcagcaagaggacagatgacaagagcggccccaggcacttccaccccagctccatgtctgtgtgtgccgctgtggatggcctgggccagtgcctggtgggccccagcatctggagccccagcctgcacagcgtcttctccatggatgacagcagcagcctgcccagccccaggaagcagcccccacccaagcccaagagggaccccaacacccggctgagcgccagctatgaggccgtgtctgcctgcctgtctgctgcccgggaggccgccaatgaaggccagccctggggcggcacccagccccgggtgcccggcagcaggatgctgtag

SEQ ID NO: 183745 - DNA, 3121 bp, Artificial Sequence
  derived and/or modified sequence
gagtggatttgacctcactgcgccagatgaagcttcagagaccaatgagtatgttaacagatgtcttacacatggcgtgtgcgagtggctacaaggaggtggtgtctcttatcctggaacatggtggagacctcaacatagtagatgatcagtactggactcccctccacttggcagccaaatatggccagacaaatctggtgaaacttctcctgatgcatcaggcaaacccacacctcgtgaactgtaatgaggagaaggcgtcagatattgctgcctctgagtttattgaggaaatgctgctgaaagccgaaattgcctgggaagaaaaaatgaaagagcctttatctgcttctaccttagctcaagaagagccctatgaagagatcattcacgatcttcccgtactgtcgagtaagctcagtcccctggtgttaccaattgccaagcaagacagtttgttggaaaaagacattatgttcaaagatgcaacaaaaggtctgtgtaagcagcagtctcaggacagcatccctgaaaaccccatgatgagcggttccaccaaacccgagcaggtcaagctaatgcctcctgccccaaacgatgacctggcaacgctcagcgagctcaatgatggcagcctgctctatgagattcagaagcgctttgggaacaatcagatctatacattcattggagacattcttttgcttgttaacccatacaaggagcttccaatttattcttccatggtgtcccagctgtatttcagctcctcagggaagctgtgttcctcgctgcctcctcacctcttctcctgtgtggagagagcctttcaccagctcttccgggaacagcggcctcagtgtttcatcctcagtggagaaaggggatcaggaaagtctgaagccagcaaacaaatcataagacacctcacctgcagggctggcgccagcagggccacactggattccagattcaaacatgtcgtgtgcatcttagaagcctttggacatgccaagaccacacttaatgatttgtccagttgcttcatcaagtattttgaactgcagttctgtgagaggaaacaacagctaaccggagccagaatttatacatatttgctagagaaatccagacttgtttcacaacctcttggccagagcaattttctcattttctacttgttgatggatgggttatctgctgaagaaaaatatggacttcatcttaataatttatgtgcacaccggtatttgaaccagaccatacaggatgatgcatccacaggggagcgttctctgaacagggagaaattggctgttttgaaacgagccctgaatgtagttggcttcagcagcttggaggtggagaatctgttcgtaattctagcagcaatattgcaccttggagacattcggtttactgccctgaatgaggggaactccgccttcgtttctgacctccagctcctggaacaagtggctggaatgttacaagtatcaacagatgaattggcatctgccttaacaactgatattcaatattttaaaggggatatgataatacgacgacataccatacagattgctgagtttttccgagacctcttggccaagtccctgtacagtcgtttgtttagctttttggtgaataccatgaattcttgcctccacagtcaagatgaacagaaaagcatgcagacattggatattggaatattggacatttttggttttgaagagtttcaaaagaatgaatttgaacaactttgtgtcaacatgaccaatgagaagatgcaccactatatcaatgaagtgctttttctccacgagcaagtggaatgtgtacaagagggagttaccatggaaacagcatattctcctggtaaccagaatggagttttggacttttttttccagaagccatctggatttctcaccttattggatgaagaaagtcaaatgatttggtcagtggaatcaaattttccaaaaaaactacaaagtctcctagaatcctcaaacacaaatgcggtgtactcccccatgaaggatgggaatgggaatgttgccctcaaagaccacggtacagccttcaccatcatgcactacgcaggaagggtaatgtatgatgttgttggggcgattgaaaaaaataaagactccctttcacagaatcttctatttgtaatgaaaactagtgaaaatgtcgtgatcaatcatttgttccagtcgaaattgtcacaaacaggatccctcgtatctgcctatccttcctttaaattccgaggacataagtctgccctgctcagtaagaaaatgacagcttcttcaattattggagaaaacaagaattatctagaacttagtaagttattaaaaaagaaaggaacttctacatttcttcaaagattggaacgaggagatccagtcaccatagcatcacaactcaggaaatcactaatggatattattggaaaacttcagaagtgcactccacacttcattcattgcatcaggcccaataactcaaagctgccagatacttttgataatttttacgtgtctgctcagctacaatatattggggtcctggagatggtgaagatcttccgatatggataccctgttcgcctttccttctcggatttcctgtcaaggtaaattcttctgctcttaaaatcgtcgttctcgctgctgttcagtgcagtgtactgacactgacactattgtagcaagggtcttctgttgtcttttttggcactgcttttgttgtttacttttttctatctccaataaacaaaatattctgggaaacaatgaaatacactgacaaagctcacataaaaaataattaaactgtactgaggacagtatcttggaaaccattctcatgttcctttcaaagtgtggctttccttggattaaagttttgtaaaatgattgcatgtgatatttactatttattatttaaaaggagaatgtatgtaagtgattatttccccttttatatatgaacaaaatattatttagatcagtggttggcaaactacactcatgggccagccaaatccagcctaccacctgtttttgtaaataaagttttattggaacatggccac

SEQ ID NO: 183746 - DNA, 2933 bp, Artificial Sequence
  derived and/or modified sequence
agtagagacgaggtttcaccgtgttagccaggatggtctcgatctcctgaccttgtgatccgcccaccacagcctctcaaagtgctgggattacaggcgtgagccaccgcgcccggccctcctttgggtcattttttaaagttaatgattccctgtaccaaccccttattttgaaaaaatacctcttcattcaagtttcaagaaggtgttgatgcaggattttgctccttagctcggctacgtccaggttcttgcctcacgacctggaaaaatgaggcgtgcggacacgagagatggagaaaggggatcaggaaagtctgaagccagcaaacaaatcataagacacctcacctgcagggctggcgccagcagggccacactggattccagattcaaacatgtcgtgtgcatcttagaagcctttggacatgccaagaccacacttaatgatttgtccagttgcttcatcaagtattttgaactgcagttctgtgagaggaaacaacagctaaccggagccagaatttatacatatttgctagagaaatccagacttgtttcacaacctcttggccagagcaattttctcattttctacttgttgatggatgggttatctgctgaagaaaaatatggacttcatcttaataatttatgtgcacaccggtatttgaaccagaccatacaggatgatgcatccacaggggagcgttctctgaacagggagaaattggctgttttgaaacgagccctgaatgtagttggcttcagcagcttggaggtggagaatctgttcgtaattctagcagcaatattgcaccttggagacattcggtttactgccctgaatgaggggaactccgccttcgtttctgacctccagctcctggaacaagtggctggaatgttacaagtatcaacagatgaattggcatctgccttaacaactgatattcaatattttaaaggggatatgataatacgacgacataccatacagattgctgagtttttccgagacctcttggccaagtccctgtacagtcgtttgtttagctttttggtgaataccatgaattcttgcctccacagtcaagatgaacagaaaagcatgcagacattggatattggaatattggacatttttggttttgaagagtttcaaaagaatgaatttgaacaactttgtgtcaacatgaccaatgagaagatgcaccactatatcaatgaagtgctttttctccacgagcaagtggaatgtgtacaagagggagttaccatggaaacagcatattctcctggtaaccagaatggagttttggacttttttttccagaagccatctggatttctcaccttattggatgaagaaagtcaaatgatttggtcagtggaatcaaattttccaaaaaaactacaaagtctcctagaatcctcaaacacaaatgcggtgtactcccccatgaaggatgggaatgggaatgttgccctcaaagaccacggtacagccttcaccatcatgcactacgcaggaagggtaatgtatgatgttgttggggcgattgaaaaaaataaagactccctttcacagaatcttctatttgtaatgaaaactagtgaaaatgtcgtgatcaatcatttgttccagtcgaaattgtcacaaacaggatccctcgtatctgcctatccttcctttaaattccgaggacataagtctgccctgctcagtaagaaaatgacagcttcttcaattattggagaaaacaagaattatctagaacttagtaagttattaaaaaagaaaggaacttctacatttcttcaaagattggaacgaggagatccagtcaccatagcatcacaactcaggaaatcactaatggatattattggaaaacttcagaagtgcactccacacttcattcattgcatcaggcccaataactcaaagctgccagatacttttgataatttttacgtgtctgctcagctacaatatattggggtcctggagatggtgaagatcttccgatatggataccctgttcgcctttccttctcggatttcctgtcaaggtataagccactggctgatacattcctgcgtgagaagaaggaacagtcagctgccgagcgatgtcgacttgttctccagcagtgtaaattacaaggctggcagatgggagtccgaaaagtgtttctaaaatactggcatgctgaccaactcaatgatttgtgcctacagttgcagagaaaaattataacctgccaaaaagttatcagaggatttttagcacgccagcacctgcttcagagaataagcatcagacaacaagaggtgacttctatcaatagctttctgcagaacacagaggacatggggctgaaaacctacgatgccctggtcattcagaatgcttcagacattgcccgggaaaatgaccggctccgtagtgaaatgaacgctccctaccataaagagaagttagaggtcaggaacatgcaagaggaaggaagcaaaagaaccgatgacaagagtggacccaggcatttccaccccagctccatgtcagtctgcgcggccgtggatggcctgggccagtgcctcgttggcccgtccatctggtctccttcgctgcactcggtgttcagcatggatgacagcagcagcctcccgtctccacggaaacagcccccgcccaagccaaagagggaccccaacacccggctgagtgcttcctatgaggctgtgagcgcctgcctctccgcggccagggaagcggccaacgaaggtcagccctggggagggacccagcctcgtgttccgggctcgcgcatgctctgacttcgccttggggcgcccatggcagtactgtcgccctaatgtattcttaatagaaataaatccaattgttggcttgccagcagctctt

SEQ ID NO: 183747 - DNA, 2823 bp, Artificial Sequence
  derived and/or modified sequence
atggagatcgaccagtgcctgctggagagcctgcccctgggccagcgacagcgactcgtcaaaaggatgcgctgcgagcagatcaaggcatactatgaacgagaaaaggcgtttcagaagcaggaaggtttcctgaaaagactcaagcacgcgaagaacccaaaggtgcattttaatctgaccgatatgcttcaggacgctataatccaccacaatgacaaagaggtgctgcggctcctgaaggaaggcgccgacccccacactctggtctcctcaggggggagtttgttgcacttatgcgctcggtatgacaacgcctttatagccgaaatcctcatagaccgaggagtgaatgtgaatcaccaggacgaggatttctggactccaatgcacatagcctgcgcctgcgacaacccagacatcgtgctgcttctggtactggccggggctaacgtcctcctgcaggatgtaaacggcaatattcccctcgattacgctgttgaagggaccgagtcatccagcatcctcctgacttacttggatgagaacggagtggatctcactagtcttcgccaaatgaaactgcagagacctatgagcatgttaacggatgtgaaacattttctgagcagcggggggaatgtgaatgagaagaatgacgaaggggtaaccttgctgcatatggcttgtgcgagtgggtacaaggaggtcgtgtcgcttattctcgagcacggaggtgacttaaatattgtagatgatcaatactggacccccttgcacctggccgctaagtacggccagaccaacctggtcaaactgctgttaatgcatcaggcgaatccccatctggtgaattgcaacgaggagaaggcatcagacattgccgcctccgaatttattgaggaaatgctgttaaaagcagaaatagcatgggaagaaaagatgaaagaacccctgagtgcatcaactctggctcaggaggagccctatgaagaaataattcacgatttacctgtactttcgtcgaagctcagtcccctcgtgctgcccatcgccaaacaggactctttactggaaaaggatataatgtttaaggacgccaccaagggactgtgcaaacagcaaagccaggactcgattcccgagaatcctatgatgtccggttctacaaaaccagaacaggtcaagctaatgcctcctgctcctaacgatgacctggccaccctgagcgaattaaacgatggttccctgctctacgagattcagaagagatttgggaataatcagatatacacattcataggtgatatcctgttactggtaaacccctacaaggagctgcccatctattcaagtatggtgagtcagctgtacttctcctcctccggtaagctttgctcctcgttgcccccacacctatttagttgcgtagaaagggcttttcatcagctgttcagggagcagcgaccgcagtgcttcatcctgtcaggtgagaggggatcaggaaagtctgaagccagtaagcaaataattcgtcacctgacctgtcgagcaggcgcgagtcgcgccaccctggactcacgcttcaagcacgtcgtgtgtattttggaagcgtttggtcacgcaaaaactactttgaatgaccttagcagttgcttcataaagtattttgaacttcagttctgtgagcgcaagcagcaactgacaggcgcccgcatctacacctacctcctcgagaagtctaggcttgtctcacagcccctgggccagtcaaattttttgatattctaccttctgatggatggactcagcgccgaagagaagtatgggctgcatcttaataatttgtgtgctcacagatatctgaatcagacaattcaggatgatgcgagtacgggcgagcggtcactgaacagggagaagctcgctgtactcaagagggccttgaatgtggtcggcttttcctctctggaggttgaaaatttgtttgtgatcctggctgcgattctgcatctaggggacatccggttcaccgccctgaacgagggcaactctgcctttgtaagcgatctccagcttctggaacaagtggcaggcatgctgcaggtttccacagatgagctggcatccgccctcactacggatatacagtatttcaagggcgacatgatcatccgccggcatactattcaaattgcagagttctttcgggacctgctggcaaaatctctgtattctcggctattcagctttctcgtgaacaccatgaactcttgcctgcattctcaagatgaacagaaatccatgcagactcttgacattggaatcctggacatattcggtttcgaagagttccaaaagaatgagtttgaacagctgtgcgtaaacatgacgaacgagaaaatgcaccactatatcaatgaggttctctttctgcatgagcaggtagaatgcgtgcaggaaggagttaccatggagaccgcatacagcccaggcaaccaaaacggcgtgcttgatttctttttccaaaagccatctggatttctgacccttctcgacgaggaatcccagatgatttggtccgtggaaagtaatttcccgaaaaaactccagtctctgttggagtcgtccaatacgaacgccgtgtactctccaatgaaagatggaaatgggaatgtagcactgaaggatcatggaacagcatttacaataatgcactacgctggccgtgtgatgtatgacgtggttggagcaatcgagaaaaataaagattccctgtctcagaatttgctctttgtgatgaagaggggtcggtgcttctag

SEQ ID NO: 183748 - DNA, 5577 bp, Artificial Sequence
  derived and/or modified sequence
atggagatcgaccagtgcctgctggagagcctgcccctgggccagaggcagcggctcgtcaaaagaatgagatgtgagcagattaaggcttattatgagcgcgagaaggctttccaaaaacaagaggggttcctgaagaggctaaagcatgcaaaaaatccaaaagttcatttcaatctcactgacatgttgcaggatgccatcattcaccacaacgataaggaggtccttcggctcctcaaggagggagcggatccacatactttggtgtcctctggagggagcctcctgcacttgtgcgctagatatgacaacgccttcattgctgagatactcattgaccgcggcgtgaacgttaatcatcaggacgaggacttctggactcctatgcatattgcttgtgcttgcgataaccccgatattgtgctgctgctggtcctggccggcgccaacgtgctactgcaggacgtgaatggaaatatcccgctcgactatgctgttgaggggacggagtcaagtagcatcctccttacctacttggatgagaatggagttgaccttacatctttacggcaaatgaagctgcagagaccgatgagcatgctgaccgatgtgaagcatttcctgtccagtggagggaacgtgaatgagaaaaacgatgagggggtgacactgttacacatggcctgcgcttctggttacaaggaagtggttagcctcatcctcgaacacggaggagatctcaacatagtggatgaccagtactggacacccctccacctagccgccaagtatggtcaaaccaacctggtcaaactcctcttaatgcatcaggccaacccacacctcgtgaactgtaacgaagaaaaagcgtccgatatcgccgcctctgaatttattgaggagatgcttcttaaggccgagatcgcatgggaagaaaaaatgaaagaacctttgagcgcctccaccttggctcaagaagagccttatgaggagattatccatgacctgcccgtcctgagctccaaactgagcccacttgtacttccgatagccaaacaggacagtttactggaaaaggatataatgtttaaggacgcgacaaaaggtttatgcaagcaacagtcccaggattctatcccagagaaccccatgatgagtggatcaacaaagcctgagcaggtgaaactgatgccccctgctccgaacgacgatcttgctactttatcagagcttaatgacggctctctgctgtatgagattcaaaaaagatttggaaacaatcagatttatactttcatcggtgatattctactgctagtgaacccctacaaggagctgcccatttattccagtatggtgtcacaattatactttagttcctcgggcaagctgtgctcatctctccctccacatttattctcctgcgtggaaagggcatttcaccagctgttcagagaacaacgaccccagtgctttattctgagcggtgaacgtggaagcggaaagtctgaagcaagcaagcagatcattaggcatctcacttgccgtgctggtgcaagcagagcaacactggactcaagattcaagcacgtggtatgtatcctagaagctttcggacatgctaagaccacattgaacgatttgtcatcctgttttattaagtatttcgaactccagttttgtgaacgcaaacagcagttgacaggcgcccgaatttacacctacctgctagaaaaaagtcgtttagttagccagccattgggtcagagcaacttcttgattttttacctcctcatggatgggctgtccgccgaggagaagtatggcctgcatctgaacaatctttgtgcccatagatacttaaaccaaacaattcaagacgacgcgagcacgggagagcgttcgctgaaccgcgaaaagttggccgtgctgaaacgcgcactgaacgtggtaggattctcctccctggaggtggagaatctgttcgtgattctggccgcgatcctgcatctcggggatattaggttcacggccctgaatgaggggaacagcgcatttgtgtccgacctccagcttctcgagcaggtggctggcatgctgcaggtgtccactgacgagctcgcctccgctcttacgaccgacatccagtattttaaaggagacatgatcatccgccgtcacacgattcagattgctgaatttttccgtgacctgctggccaaatccctctattcccgtttgttctcattcctggtgaataccatgaacagctgcctgcacagtcaggacgaacagaagtctatgcagacactggacataggcattctggacatctttggcttcgaagagtttcagaaaaacgaattcgaacagctttgcgtgaacatgaccaacgagaagatgcatcattatattaacgaggtgctgtttctgcacgagcaggttgagtgtgtgcaggagggagtaaccatggagactgcttatagtccgggcaaccagaacggagtgctcgatttcttctttcagaaaccatccggattcctcacgctgctcgacgaggagtcacagatgatatggtcagtggagagcaattttcccaaaaagctccagtcactcctggagagttcaaacaccaacgctgtgtactccccaatgaaagatggcaacggcaacgtggccctgaaggaccacggtacagcattcacaatcatgcattatgccgggagagttatgtatgatgtggttggcgccattgaaaagaacaaggactctctgagccagaatctgttattcgtcatgaaaacttctgagaacgtggtcattaatcatctattccagtctaaactgtcccagactggctcgctggtttcggcctaccccagctttaagttccgcggtcacaaatcagctctcctatccaagaagatgacggcatcctctattattggagagaacaaaaactacctagaactctctaagctcctgaagaaaaagggcacctccaccttcctgcagcggctggagagaggagaccctgtgaccattgcatctcagcttcggaaatctctgatggatattatcggaaagttgcaaaagtgcacccctcacttcatccactgtatccgccccaataactcaaaactccccgatacatttgataacttctatgtctccgcgcagttacagtacattggcgtcctggaaatggtgaaaatattccgctatgggtaccctgtgcgtctatccttttctgattttctttcccgttacaaaccactcgccgacacctttctcagagaaaagaaagagcagagcgctgcggagagatgtaggttggtgctgcaacagtgcaagttgcaaggatggcagatgggagttcggaaagttttcctgaagtattggcacgcagaccagctcaatgatctctgccttcagctccagcgtaaaattatcacctgccagaaggtgatcagggggtttctggctaggcaacacttgttgcaaagaatcagcatccgtcagcaggaggttaccagcatcaactctttcctacaaaatacagaggacatgggacttaagacatatgatgctctggttatccagaatgcgtctgacattgccagggaaaatgacagactacgttctgaaatgaacgccccataccacaaggaaaagctggaggtaagaaacatgcaggaagagggcagcaagcgcaccgacgacaaatcagggcctcggcatttccacccatccagtatgtctgtctgcgcggccgtggacggacttggccagtgtctggtcgggccctctatctggtctccctctctgcacagcgtgttttcgatggacgatagctctagtttacctagcccacgcaaacagcctcctcccaaacccaagagggacccaaataccagactctctgcgtcctatgaggccgtgtcggcttgcctttcggcggcccgagaagcagccaacgaggctctggcacggccccgcccacattccgatgattacagcaccatgaagaagatacctcccagaaaacctaagcgtagcccaaataccaaactgagcgggagttacgaggagattagcggttctcgccccggtgatgccaggccagctggtgctcctggggccgcagcccgagtcctaacgccaggaacgccacaatgtgcgctgccaccagccgctcctcctggagatgaggacgattccgaaccagtgtacattgaaatgctggggcacgccgctaggcccgactcccccgaccccggggagtcagtctatgaggaaatgaaatgctgcctgcccgatgacggagggccaggcgccggctcatttctccttcacggggcatctccaccactgctgcatcgggcacctgaggacgaggcagcgggccctcctggcgacgcatgcgatattcccccaccctttccaaacctgctgcctcatcggcctccactgctggtgttcccaccaacaccagtcacctgctcaccggcctcggatgaaagccctttaactcctctggaggtcaagaagctaccagtactggagaccaacctaaaataccccgtacagcctgaaggaagcagtccgttaagcccacagtactctaagtctcaaaagggagatggtgaccggccagcatcacctggtctcgcactctttaacggatccgggagagcctcgcccccaagtacacccccccctccaccccccccgccgggaccacctcccgcaccatacaggccatgtgcacatcttgcgtttccccccgaacctgcccccgtgaacgctggcaaagccggcccatctgccgaagcgccaaaagtacaccccaaaccgaactcggctcctgtagccgggccatgtagctcttttccaaaaataccgtacagtcccgtgaaggctactcgtgccgacgccaggaaggcaggaagttccgcttcgcctcccgccccctacagtcccccatcttctagaccattatcttcacccctcgatgagttagcgtccctattcaacagcgggcggagtgtgctgcggaaatccgccgctggccgcaagatccgcgaagcggaggggttcgaaacgaacatgaacatctctagtcgtgatgatccttcaacctctgagattaccagtgagacccaggatagaaatgcaaataatcatggcatccagctaagcaattcccttagctccgccatcaccgctgaaaacggaaatagtatcagcaacggtctgcccgaggaagatggatacagtaggctgtccattagcggcaccggcacttcaacattccagcgccacagagattcacatacgacccaagtcattcaccaactgcggctgagcgaaaacgaatcggtcgccttgcaggaactgttagattggcggcgaaaactctgcgaggagggccaagattggcagcagatactccaccatgccgagcctagggtaccacccccaccaccgtgcaaaaagccaagcctcctgaaaaagcccgaaggggcaagctgcaacaggcttccaagtgagctgtgggacacgacaatctag

SEQ ID NO: 183749 - DNA, 5577 bp, Artificial Sequence
  derived and/or modified sequence
atggagatcgaccagtgcctgctggagagcctgcccctgggccagcggcagagactggtgaaaaggatgcggtgcgagcagatcaaggcatactatgagagggaaaaagcttttcagaaacaagaaggctttctcaaaagactgaagcatgctaaaaatccaaaggtgcactttaacctgactgacatgctccaggatgctatcatccaccacaacgacaaggaggtgctccggctcttgaaagagggcgctgaccctcacaccttggtgtcctccggcggctctctgcttcacctctgcgctcggtacgacaatgcctttatagccgagatcttaattgacagaggggtgaacgtaaaccatcaggatgaagacttctggactcccatgcatattgcttgtgcttgcgataaccctgacattgtcctacttcttgtgctagccggcgccaacgttctgctgcaggacgttaacgggaacatccccctggactacgccgtggaagggaccgagtcctcttccatacttctgacatatttggacgagaatggtgtggatctgacctctctccgccagatgaaacttcagcggccaatgtccatgctgacggacgtcaaacactttctctccagtggcggcaacgtcaatgaaaaaaatgatgaaggcgttacccttctgcatatggcctgtgcttccggttataaagaagtggtttcgctcatactcgagcatggaggcgacttgaacatagttgatgaccagtattggactcccctacatttggcggctaagtatggacaaactaacctggtcaaattgctgttgatgcaccaagctaacccgcatttagtgaactgcaacgaggagaaggccagcgatattgctgcctccgagttcattgaagaaatgctgcttaaagctgaaatcgcatgggaggaaaagatgaaggagcccttgtcggccagtaccctggcccaggaggagccctacgaagagattatccacgatctgcctgtgttgtcgtcaaagctaagtcccctggttttgcccattgccaaacaagactcccttcttgaaaaggatattatgtttaaggacgcgactaagggtctctgtaagcagcagtcacaggatagcatacccgagaacccaatgatgtccgggtctaccaagcctgagcaggttaaattaatgcctcccgctcccaacgatgatctggccaccctcagcgagctcaacgatggaagcctgctttacgaaatacagaagcgctttggtaacaaccagatctacaccttcataggggatatcttgttactggtgaatccatacaaagagctcccgatatattcaagcatggtatctcagctttactttagcagtagtggaaaactgtgttcaagcctacccccccacctctttagctgcgtcgagcgagcattccatcagctatttagagaacagagaccccagtgtttcattctgtccggggagaggggcagtggcaagagcgaggcgtcaaaacaaatcatccggcacctgacatgccgagcaggagcctctagagccacattagactccagattcaagcacgtggtgtgcattttggaggcatttggtcatgccaagaccaccctgaacgatctgtcttcttgtttcatcaaatattttgaactgcagttttgtgaaagaaagcaacagctgaccggggcgcgcatctatacatacctgctggagaagtcccgtctggtgtcccagcccttgggtcagagcaatttcctgatcttctaccttttgatggatggattgagtgccgaggaaaagtacggcctccacttaaacaacctatgtgcccatcggtatctgaatcagaccattcaggatgacgctagcaccggagaaagatcgctcaacagggagaagttggcggtgctcaagcgagctctcaatgtggtgggattctcctccctcgaagtggagaacctgtttgtgatacttgccgctattctacacctgggagacatccggttcacggccctcaacgaggggaattctgcgtttgtgtctgacctgcagttattagagcaggtggctggtatgctccaggtttcgactgacgagttggcttcagcattgactacagacatacagtattttaagggggacatgatcatccgtcgccatacaatacagattgcagagttttttcgggacttgttagcgaagagtctctactcaaggctgttcagcttcttggtaaatactatgaattcctgcctgcattcacaagatgagcagaagagtatgcagaccttggatatagggatccttgacatctttggcttcgaggaattccagaagaacgaattcgagcagctttgtgtgaatatgactaacgaaaagatgcatcactacatcaatgaagtcttgttcttgcatgagcaggtagagtgtgtgcaagagggggttactatggagaccgcctacagtcctgggaaccagaatggggtcctcgatttcttttttcagaagccttccggctttctgaccttgctggacgaggagagccagatgatttggagcgtcgagagtaacttccccaagaaacttcaatccctactcgagagcagtaacacaaacgctgtgtactcccctatgaaagacggaaacggcaatgtggccctgaaggaccacggaaccgcatttaccatcatgcattatgccggccgagtaatgtatgatgtcgtgggtgccattgagaaaaataaggatagcctgtcccagaacctgctatttgtgatgaagaccagtgagaatgtggtaatcaatcatttgttccaaagcaaattatcgcagacagggtcactggtttctgcctacccatcatttaaattccgcggacacaaatctgcactccttagcaagaaaatgaccgcctcgagcatcattggcgaaaacaaaaattatctggagctctcaaaactgctgaagaaaaaaggaacatccacgttccttcagaggctggagcgtggggaccctgtcacgattgcgagtcagctgcgcaaaagcttgatggacatcataggaaagctgcagaaatgtacgccccattttatccactgcattaggccaaataactccaagttgcctgacacattcgataatttttacgtgagcgctcaattgcagtatattggcgtgttggaaatggtgaaaatctttcggtacggataccccgtgcggctcagtttttccgatttccttagtcgctacaagccactggctgatacctttctcagagagaagaaggagcagtccgcagcagagcgctgccgactcgtcttgcagcagtgtaagttacagggctggcagatgggggtgcgaaaggtatttctgaagtattggcacgctgaccaacttaatgacctctgcttgcagctgcaacggaaaatcattacgtgtcagaaggtcatccgcgggttcttggccagacagcacctcctacagcggatttcaatacgccaacaggaagtaactagcattaatagctttctgcagaataccgaggacatgggtctcaaaacttacgacgcacttgtaattcaaaatgcctcagacattgcacgggagaatgatcggttgcggagcgaaatgaatgccccttaccataaggaaaagctagaggtgaggaatatgcaggaagagggcagtaagaggactgacgacaaaagtggaccgcgtcactttcatccttctagcatgagcgtctgcgctgcagtggatggactcgggcagtgcttggtgggtcccagcatatggtcaccttctctccacagcgtctttagcatggacgatagcagtagcttgcccagtccccgcaaacagcctcctcctaagcccaaacgagacccaaacactcgactttcagcctcatacgaggccgtctctgcatgcttgtcggccgctcgtgaggcagccaatgaggcccttgcccgccctagaccccatagcgatgactatagtacaatgaagaaaatcccccccaggaaacctaagcgctcacctaacaccaaactatctggatcttacgaagagatctctgggtctcgccccggagatgctcgccctgcaggcgctcctggagctgcagcacgggtattaacgcctggcacacctcagtgcgccctgccccccgctgcaccacccggggacgaagacgactccgagcccgtatatattgaaatgctgggacacgcagctcgccccgattctccagacccaggcgagagtgtctacgaggaaatgaaatgttgcctacccgatgacggggggcccggggcaggcagctttctcctccacggcgcctcccctccactgctgcaccgcgctcccgaggacgaggccgctggccctccaggcgatgcatgcgacattccacctccctttcccaacctgctgccccatcggcctcctctgctggtcttcccacctaccccagtaacttgcagtcccgcttccgatgagtcaccactcacacctcttgaagtaaagaaactgcctgttttagagactaatctgaagtatccagtgcagccagagggctcaagccctcttagcccccagtactccaaatcccagaagggagacggggatcggcctgccagtccaggtctcgcactgttcaatggttcgggccgcgcatctccgccatcgacccctcccccaccacccccaccacccgggccgccccccgctccttatcgaccctgtgcacacctggcttttcctccagaaccggctcctgtgaatgcagggaaggccggtccatccgcggaagcacctaaggtgcacccaaaacctaatagcgccccagttgctggaccgtgttcctcttttccaaagattccatattcccccgtaaaagcgacacgcgccgacgcgaggaaagcaggcagttctgcctccccgccagccccttatagccctccaagctccagacctctgagtagcccattggacgagttagcgtctctgtttaatagtgggcggtccgtgttacgcaaaagcgccgcaggccgcaaaatcagggaggccgagggattcgagactaacatgaatatttcatccagagacgacccttccacctcagagattacgtccgagacgcaagaccgcaacgcaaataatcacggaatccagctgagcaacagtctctcctcagctattacagcagagaacggaaacagcatttcgaatggacttccggaagaggacgggtatagccgcctgagcatttcaggcactggcacaagcacatttcagcgccaccgtgattcccataccacccaagtgattcaccagcttcgtttgagtgaaaacgagtctgttgccctgcaggaattgctagactggcggcgaaagctctgcgaagaaggccaagattggcaacaaattcttcatcatgcggagcctcgagtgcccccgcccccgccctgtaaaaagccatccctgctcaagaagccagaaggcgcctcttgcaacaggcttccgagtgaactctgggataccacaatttag

SEQ ID NO: 183750 - DNA, 2637 bp, Artificial Sequence
  derived and/or modified sequence
atgaagctgcagcggcccatgagcatgctgaccgacgtgctgcacatggcctgcgcttccgggtataaggaggtagtgtctctgatcctcgaacatgggggagacctaaatattgtggatgaccaatattggacccccctccacttagctgcgaaatatggccagacaaatctggtgaaactactgcttatgcaccaggctaatccccatctagtaaactgcaacgaggagaaagcctccgatatcgcagctagcgaattcattgaagaaatgttgctgaaggctgaaatcgcctgggaagagaaaatgaaggagccgctttctgcctctacacttgcccaggaagagccatatgaggagattattcacgatcttcccgtccttagttccaagcttagtccactcgtcctcccaatcgcgaaacaagatagtctgctggaaaaggacatcatgtttaaggacgccacaaaaggcctttgtaaacagcagagccaggatagcattccagagaatccaatgatgtctggctccaccaagccagagcaggtaaaactgatgccacccgccccaaatgatgatcttgcgacgcttagtgagctaaatgacggcagtttactgtacgaaatccagaagaggttcggtaataaccagatctatactttcattggtgatattctcctgttggtgaacccctataaggaactaccgatctattcatcaatggtgagtcaattgtatttctcctcttccggcaagctctgctcttccctcccaccccacctattctcttgcgtcgagcgggcatttcaccaactgtttcgtgagcagaggcctcaatgctttatcctcagtggtgaaagagggtcaggcaagtccgaagcttcaaaacaaattatccgccatctcacctgccgcgcaggtgccagccgggctactctcgactcacgctttaagcatgtggtgtgtatcctggaagcattcggacatgccaaaaccacgcttaatgatttgtcatcatgctttatcaagtatttcgagctccagttctgcgagcgaaagcagcaattaactggcgctaggatctacacatacctactcgagaagtccaggcttgtatcacagcccctgggtcagagtaactttctgatcttttacctgctcatggatggtctgtccgccgaggagaaatacgggctgcacctcaacaatctgtgtgcccacagatatctcaatcaaacaatccaggatgatgcgtctactggagagcgtagccttaacagggaaaagctcgcagtactcaagcgtgcccttaacgtagtcggtttttcctctctcgaggtggaaaacctgtttgtaatcttggccgccatcttgcaccttggagatatccggttcacagcactgaacgaaggcaattctgccttcgtcagcgacctgcagttgctggaacaggtggctggcatgctgcaagtgtccactgatgaattggcatccgcactcacgaccgatattcaatacttcaagggggacatgattatccggcgccataccatccaaatagctgaattttttcgggacttactggctaagagtctgtatagccgattgtttagctttttggtcaatacaatgaatagctgtctgcattcccaggacgagcaaaaatctatgcaaactctagacattggaatccttgacatctttggtttcgaggagttccagaaaaatgaatttgagcaactatgcgtgaacatgacaaacgagaaaatgcatcactatatcaatgaggttctgtttttgcatgagcaggtggagtgtgttcaagaaggggtaactatggaaacagcttattcccccggaaaccagaacggggttcttgatttcttctttcagaaaccatctgggttcttgaccctgcttgacgaggaatctcagatgatctggagtgtggaaagtaatttccctaaaaagttacagtccctcttagagtctagtaatacaaatgccgtgtattctccaatgaaagatggtaacggaaacgtcgcgttaaaagaccatggaaccgcttttaccataatgcattatgccggaagagtgatgtatgacgtggtaggcgcaatcgaaaagaataaagacagcttatcacagaatctgctgttcgtgatgaagacttcagaaaacgtcgtgatcaatcacttgttccaaagtaaactgtcacagacagggtcactagttagtgcatatccaagttttaagttcagaggacacaagagtgcactgctcagcaagaaaatgacggcgtcctctatcatcggcgagaacaagaactatctagagctttcaaagctgctgaagaaaaaaggtacttcaacctttctgcagcgattagaacggggtgatcccgtgaccatcgcaagccagctgagaaagtcactcatggatatcatagggaagttgcaaaagtgcaccccgcacttcatacactgtattaggcctaataactccaagttacctgacacctttgataacttttatgtctcagcgcagctccagtacattggcgtgctggagatggttaagatttttcgatatggatacccagtccgcctgagcttctcagattttctttcccgctag

SEQ ID NO: 183751 - DNA, 2823 bp, Artificial Sequence
  derived and/or modified sequence
atggagatcgaccagtgcctgctggagagcctgcccctgggccagcggcaacggttagtgaagaggatgcggtgcgagcagattaaagcctactatgagagggaaaaggcctttcagaagcaagaaggttttctgaagagacttaagcatgccaaaaacccaaaagtgcatttcaacctaacagatatgctgcaagatgccatcatccatcataatgataaagaagtgctgcgcctcttgaaggagggggcagatcctcatactctggtgagcagcgggggaagtctgctgcatctgtgtgcccggtatgacaacgcctttatcgcagagatactaatcgatagaggcgtcaacgtcaaccatcaagacgaggatttctggacacccatgcacatcgcttgcgcttgtgataacccggatattgttctgctcctggtcttagcgggagcaaacgttttactgcaggacgttaacgggaacattcccctggactacgccgttgagggtaccgaaagctcatcaatcctcctcacatacctagacgaaaacggcgtggacctgacctctctgcggcaaatgaaacttcagcgccccatgagtatgttgacagatgtcaagcatttcctatccagcggaggtaacgttaacgagaagaacgatgaaggtgtgacattgctacacatggcctgtgcgtcgggttataaggaagtcgtcagcctaattttggagcatgggggggatctgaacatcgtcgatgatcaatattggacaccactgcacctcgccgcaaaatacggtcagacaaacctagtaaaactactgctaatgcaccaggctaatccacacctggtcaattgtaatgaggagaaggcctcagacatcgccgcttccgaattcattgaagaaatgctgctcaaggcggagatcgcctgggaggagaagatgaaggagccattgtccgccagcaccctcgcgcaggaggagccttacgaagagattatccacgatctccctgtgctttcaagtaaattatctccattggtgttgcctattgccaaacaggattccttgctggaaaaagacattatgttcaaagatgccactaaaggcctttgtaaacagcagtcacaggactctatccccgagaatcccatgatgtctggtagcactaagccagagcaggtgaaacttatgccccctgcacccaatgacgatctggccactctgtcggaacttaacgacggaagtttactgtatgaaatccagaaaaggttcggaaacaaccaaatctacaccttcatcggggatatcttgctcctggtgaacccatataaagagctgcccatttatagtagcatggtaagtcagctgtatttctctagctcaggtaagctttgtagtagtttacctccgcatctcttttcatgcgtcgaacgggcgttccatcagctcttcagagagcaacgccctcagtgcttcatattgagcggtgagcgcggatcaggcaaatctgaggccagcaaacaaattatccgccacttgacatgccgcgccggagcatcaagagccactctggacagccgcttcaaacacgtcgtatgtatcctcgaggcctttgggcacgcgaaaacaactcttaacgatctgtctagctgctttatcaagtatttcgagctgcaattctgtgagcgtaaacagcagctcaccggggctcgaatctatacctacttgctcgagaagtccagactggtaagccagcccctgggccagtcgaactttctcatcttttacctgctgatggacgggttatccgcagaagaaaagtatggcctgcatctgaacaacttatgcgcccacagatatctcaaccaaacgatacaggacgatgcctcaaccggagaaaggtccttgaacagagaaaagctggcagtgctgaagcgcgccctgaacgtagtgggcttcagttcactggaggttgaaaacctgtttgtgatcctcgctgccattctgcacctcggagatatccgctttaccgcattgaatgagggcaattccgctttcgtgagtgatctccagcttttggagcaggtggctggcatgctacaggtcagtacagatgagttggcaagtgcgctcacaacggacatacagtacttcaagggcgacatgataatccgccggcatacaatccagattgctgagttttttcgggacctgttggcaaaaagcctgtattcccgcctcttcagttttctagtaaatacaatgaattcttgtctccattcacaagacgaacagaaatcaatgcaaaccttggacatagggatattggacatcttcggcttcgaggaattccaaaaaaacgagtttgaacagctgtgtgttaacatgactaatgaaaagatgcatcactatatcaacgaggtcctcttcctgcacgaacaagtcgagtgcgtgcaggagggcgtcaccatggagacagcatactctcctggcaaccagaacggcgtgttagactttttcttccagaaaccatcgggattcctgacacttcttgacgaggagtctcagatgatctggagcgtagagtctaacttcccgaaaaagctgcagagcttgctggagagtagcaatacaaatgctgtatactcccccatgaaagatggtaacggtaatgtcgcgcttaaagatcacgggaccgcattcaccatcatgcactacgctggcagagtgatgtacgatgttgttggcgccatagaaaaaaacaaagatagtctctcccagaacttgctctttgtaatgaaaaatcggagatgtttttag

SEQ ID NO: 183752 - DNA, 2574 bp, Artificial Sequence
  derived and/or modified sequence
atgcggcgggccgacacccgggacggcgagcggggcagcggcaagagtgaagccagcaaacaaattataagacatcttacctgtcgcgctggcgcaagcagggctacgcttgatagtagattcaagcacgttgtatgtattctggaggcgtttggacacgccaagactaccttgaacgatctgagttcttgcttcatcaagtattttgagcttcagttctgcgagcgcaagcaacagctgactggcgcaaggatttacacttatctgctcgaaaagagcaggttagtgagccagccgctgggacagagcaattttttaattttttatttgttgatggacggtctgtccgcagaagagaaatacggactccatctcaacaacctttgtgcacatcgctatctgaaccaaaccatccaagacgacgcaagtaccggtgaaaggagcctgaatagagagaaattagccgtgctgaagcgcgccctgaacgttgtcgggtttagcagtctggaagtagaaaacctgttcgtcatattggccgcaatcttacacttaggtgacatccgttttactgcgttaaacgaggggaatagtgcattcgtctctgatctgcagctcctggagcaagtggcagggatgctacaggtctcaacggacgagctggcttcggctctgactaccgatatccagtattttaaaggggatatgattatcagacgccatacaatacagatcgccgagtttttccgcgaccttctagcgaagtctctgtactcccgcctgttctccttcctcgtgaataccatgaacagctgcttgcattcacaggatgagcaaaaaagcatgcagactcttgacatcggaattttggacatatttggtttcgaggagttccagaaaaatgagtttgaacagttgtgtgtcaacatgacaaatgagaaaatgcatcactatatcaacgaagtgctgtttctacacgagcaggtggagtgcgtccaggagggcgtgacaatggaaacagcttacagtcccgggaaccagaacggggtgttagacttcttcttccagaaaccaagcggtttcctcacactcctggacgaagaaagccagatgatttggtctgtcgagagcaattttcccaaaaaactacaaagcctcttagaaagtagcaataccaatgcggtatactctcccatgaaagacgggaacggtaatgtcgctctgaaagaccacggcacggcattcactataatgcattacgctggacgggtcatgtacgatgtggtcggcgcgattgaaaagaataaggattctctcagccaaaacctgctgttcgtcatgaagactagtgagaacgtggtgatcaaccacctctttcaaagcaaactgtcccaaaccggctctcttgtgagcgcctatccatctttcaaatttcgcggccacaaaagtgctttgctgagcaaaaagatgactgctagctcgatcatcggagaaaacaaaaactacctggaactttcaaagctcctgaagaaaaagggtacatccacctttttgcagagacttgagcggggcgacccagtgaccatcgcgagccaattacgaaagtcactgatggatatcatcggaaagctccagaagtgcacaccacactttatccactgcatcaggcctaataattcaaaacttcctgatactttcgataacttctacgtgtccgctcagcttcaatatataggggtcttagagatggttaaaattttcaggtacggatatcctgtgcgacttagcttcagcgacttcctgagtaggtataagccactggctgacacattcctgcgagaaaagaaggaacagagtgcagccgaaagatgcagactggtcttgcagcagtgcaaactgcagggatggcagatgggcgtgagaaaagtctttctgaaatactggcacgccgatcaactgaacgatttgtgtctgcagctgcaacgcaagatcattacatgccagaaggtcattcggggttttctggcaaggcagcatctccttcagaggatcagcataaggcagcaggaggtgacgtccataaatagttttctgcagaacaccgaagatatgggtctgaaaacatacgatgccctggtcatacagaacgcatctgacattgcacgagagaacgaccggttaagatcggagatgaatgcaccataccacaaggaaaagctggaggtgcgaaatatgcaggaggaaggaagcaaaaggaccgacgataaatcaggccctcggcacttccaccctagttctatgtccgtgtgcgcggccgtggatggattaggccagtgcctggtaggaccatccatctggagcccatccctgcactctgtgttctcaatggatgatagctcttcattgcctagcccacggaaacagcctccacccaaaccaaagcgtgatccgaacacccgattaagcgcgagttatgaagccgtcagtgcctgcctgtctgctgctcgcgaagcggccaatgagggccaaccatggggcggaacacagccccgcgtgcctggctcccgcatgctctag

SEQ ID NO: 183753 - DNA, 2823 bp, Artificial Sequence
  derived and/or modified sequence
atggaaatcgaccagtgtctcctcgagtcactacccctaggacagcggcagaggctcgtgaagcggatgaggtgcgagcagatcaaggcgtattacgaaagggagaaagcctttcaaaaacaggaaggcttcttgaaaagattgaagcatgccaagaaccctaaggttcatttcaatttaacggacatgttacaggacgccattattcaccacaatgacaaggaagtgctgcggctcctgaaagagggggctgatccccatacgcttgtgtcttctgggggttccctgctccacctgtgtgcaagatacgataacgcatttattgccgaaatattgatagacagaggcgtcaatgtaaaccaccaggacgaggatttctggactcccatgcatattgcctgcgcatgcgataaccccgatatcgtactgctgttggtgctcgccggtgctaatgtgcttctccaggatgtcaatggaaacatccccctggattatgcggttgaaggtacagaaagttctagcatcctcctcacctacctcgatgagaatggggttgacctgacgtcactaagacaaatgaaactgcagaggcctatgtctatgcttactgatgtgaaacattttttgtcatccggcggtaatgttaatgagaagaacgacgaaggagtgacccttctgcatatggcttgcgctagcggatacaaagaggtcgtctcactgatactggagcatgggggagaccttaatatagtagacgaccagtactggacacctcttcacctcgctgccaagtacgggcagaccaatcttgtgaaactcctgttaatgcatcaggccaaccctcatctcgtgaattgcaatgaggaaaaggcttctgatattgctgcatccgagtttatcgaagaaatgttgctcaaagccgaaattgcttgggaagagaagatgaaagagcccctgtccgcctccaccttggcccaggaagagccctatgaagagatcattcatgacctaccagttttgtcatcgaagctgtccccactggtgcttccaatcgcgaagcaggacagcttgcttgaaaaagatatcatgttcaaggacgcaactaagggactctgcaagcagcagagccaggattccattccagagaatcctatgatgtctggcagcaccaagccagagcaggtgaaactgatgccgccagccccaaacgatgatctggctacgctttctgagctgaatgacggcagtctcctctatgagatccagaaacgtttcggtaacaaccagatctacacgttcataggcgacattctcctgcttgtgaacccatacaaggaactgccaatatactcttcaatggtgtcccagttatacttttcatcgtccggaaaactgtgtagctccctgcccccacatctgtttagctgtgttgaaagggcattccaccagctatttagagagcagcgtccccagtgcttcatcctttccggcgaacgcggaagcgggaaatccgaagcttcgaaacagattattaggcacttgacttgtcgcgctggggcatcccgagcaactttggatagcaggttcaagcacgtggtgtgtatcctcgaagcgttcgggcacgccaaaactacgctcaacgacctgagtagctgcttcataaagtatttcgaactccaattctgtgaaagaaaacagcagttgacgggcgctcgcatctatacatatctgctcgaaaagagcagattggtatcacaaccactgggacagtccaacttcctcattttttacttgcttatggacgggctttcagccgaggagaagtacgggcttcatttgaataacctttgcgctcataggtacttaaatcaaacaatccaggacgatgcgtcgacgggcgagaggtcattaaaccgggaaaagctcgcagtgttgaagcgcgcactgaacgtcgttgggttctcctcgctggaggtagagaaccttttcgttatactggcagccatcctgcatctcggagacataagattcaccgcgcttaatgagggaaatagtgctttcgtttccgacttgcagttgctcgaacaggtcgctggaatgctacaggtctccaccgatgagctggctagcgctttaacaactgatattcaatattttaagggcgacatgatcatcaggcggcatacaattcaaatcgccgagttttttagagacctactcgctaagtcactgtattcacgcctgttttcctttcttgtgaataccatgaattcatgtcttcactcacaagacgaacagaagtcaatgcagacactggacatcggcattttagatatcttcgggtttgaggagttccagaagaacgagttcgagcagctttgcgtcaacatgacgaacgagaagatgcaccactacatcaacgaagtactgttcctccatgaacaagttgagtgcgttcaagaaggagttactatggaaaccgcctactcaccagggaatcaaaacggggtgctcgattttttctttcaaaaaccctctggcttcttgactctgctcgacgaggagagtcagatgatttggtcggtcgaatccaatttccccaagaagctacagtcactcctcgaatcctcaaatactaatgctgtgtactctcctatgaaagatgggaacggaaacgtcgccctgaaagatcatgggactgcgttcaccatcatgcattacgcgggtcgggtgatgtacgacgtcgttggagcaatcgaaaagaacaaggattctctctctcagaatctccttttcgtcatgaagcgtgggagatgcttctag

SEQ ID NO: 183754 - DNA, 5576 bp, Artificial Sequence
  derived and/or modified sequence
atggagattgaccagtgtctgctcgaaagcctccctctgggccagcgccagcgactggtaaaaaggatgcggtgtgagcagataaaagcatattatgaacgagagaaggcatttcagaagcaagaggggtttttgaaaaggctcaagcacgccaagaacccaaaggttcactttaacctgactgatatgctccaggatgctatcatccaccataacgacaaggaagtcctaagacttctaaaagaaggggcagatccacataccctcgttagttcaggcggatcactgcttcacctgtgtgcacggtatgacaacgcattcatcgccgaaattcttatcgatcggggagtcaacgttaatcaccaggatgaagatttctggactccgatgcatatcgcttgcgcttgtgacaaccccgacatcgtgcttttactagtgctggcaggagcgaacgtgctcctgcaggatgtgaacgggaatatccctctagactacgctgtcgaggggacagagtcctccagtatactgctcacatacctggacgaaaacggagtcgacctgaccagtctgagacagatgaaactacagcggccaatgtctatgctcacagacgttaagcactttctgagttcgggcggaaacgtgaacgagaaaaatgacgaaggggtcacgctgctccacatggcctgtgcctccggttacaaagaagtcgtgtccttgatcctggagcacggaggagatctgaatatagtggatgatcagtactggactcctctgcatcttgcggcaaaatatggccagacgaatctcgtgaagctcctgctgatgcaccaggccaatccccatctggttaattgcaatgaggaaaaggcctcggacattgcagcatccgagtttatcgaagagatgctgctgaaggctgaaatcgcttgggaagaaaaaatgaaggagcctctttcagcttctacactggcccaggaggagccctacgaagagatcattcacgatctgcctgttctgtcgtccaaactctccccactggtgctccccatcgccaagcaggacagtctcctagaaaaagacatcatgtttaaagacgccaccaaaggtctttgtaaacaacagtcacaagacagcatccctgaaaatccaatgatgagcggatcaaccaagccagaacaagtgaaactaatgccaccagccccaaatgacgatctggctaccctttccgagctgaacgacggtagtctgttatacgaaattcagaagcgatttgggaacaaccagatttacaccttcattggggatatcctgctcctcgttaacccctacaaggaactgccgatctacagttcaatggtgtctcagctttacttttcctccagcggcaaactgtgttctagcttgcctcctcacctgttcagctgcgtagagcgcgctttccaccagctctttcgggagcagagacctcaatgttttatcttatcgggggagcgcggatccggcaagtcagaagcaagcaagcagattatcagacatctgacgtgtagggccggagccagccgcgcaaccctggactcaaggtttaaacatgtggtgtgtattcttgaggctttcgggcacgccaagactactctaaacgacctgtccagttgtttcatcaagtatttcgagctgcaattctgcgagcgtaagcaacagctgacaggcgctagaatctacacttatctcttggagaaatccaggcttgtcagccagccactgggtcagagcaactttcttattttctatctgctcatggacgggttgagtgctgaagagaagtacggtctgcacctcaacaatctgtgtgcccataggtacctgaatcagaccatccaggacgatgcatcaacgggagagcggagcctcaaccgggagaagctcgccgtactgaagcgcgcactgaatgtggtaggcttttcctctttggaggtcgagaatctgtttgtcattctcgcagcgatcttacacctgggagatatccgtttcactgcccttaatgagggaaatagtgcattcgtttcagacctgcagctgctagaacaggtcgcgggtatgctgcaggttagcacagacgagctagcaagtgcactgacaaccgacattcagtatttcaagggagacatgataattaggagacatactattcaaattgccgagttctttcgcgacctgctggcgaaatcgctctactcacgactcttttcattcttggtgaacaccatgaatagctgtctgcactcccaagacgagcagaagagtatgcagaccctggatatcggcatactggacatatttgggttcgaagaatttcagaaaaacgagttcgagcagctgtgcgtgaacatgaccaatgagaagatgcatcactatattaacgaggtcctgtttctgcacgagcaggtggaatgtgtgcaggaaggcgtcaccatggaaacggcctactcacctggcaaccagaatggtgtcttggactttttttttcagaaaccatctggtttcctgactctgctggacgaggagtcccagatgatttggtctgtggaaagcaatttccctaaaaaactccagtctctcttggaatcctcaaatactaacgcagtgtacagccctatgaaagatggcaacggcaatgtggcactaaaggaccacggtacagcatttaccatcatgcattacgccggacgagtaatgtacgacgttgtgggtgccatcgaaaaaaataaagactcgctctcccagaaccttctgtttgtgatgaagacttccgaaaacgtggttatcaatcacctctttcagtcgaagctgagccaaaccgggtcccttgtctccgcatacccatcattcaagtttaggggacacaagagtgctctgctcagtaagaaaatgacagccagctcaatcattggtgagaacaaaaattatctggagctctccaagctgttgaaaaaaaaggggacctctacctttttgcagcggctggaacgaggagaccccgtcaccatcgcaagccagttacgcaaaagcctcatggacattatagggaaactgcagaagtgcaccccccacttcatccattgcatcagaccaaataactcaaagctgccagatacttttgacaatttctacgtttccgcgcagctgcagtacatcggtgtgctggagatggttaaaattttccgttacgggtatcccgtcagattatcattttcagacttcctttccaggtacaaaccgttggccgacacatttttaagagagaagaaagagcagagtgctgccgaaagatgccgattagtactgcagcaatgcaagctccaggggtggcaaatgggagtgaggaaggtgtttctgaaatattggcacgccgaccaactgaacgacctgtgtttgcagctgcagaggaagatcataacatgccaaaaggtgatccggggttttttggcgagacagcatctgctgcagagaatctccatccgccaacaagaggttactagcataaattccttcttgcagaacaccgaggatatgggcctcaagacctatgacgctctcgtaatacaaaatgcgtctgatattgctagagaaaatgaccggctgcggtctgaaatgaacgcaccataccacaaggagaaactggaagtacggaatatgcaggaggaagggtccaagcgaacagacgataaatccgggccacgacacttccatccctcctcaatgtccgtgtgcgcagcagtggacgggcttggacaatgccttgtgggcccttctatctggagcccaagcttgcattctgtcttcagcatggatgactcttcgagtctgccttctccaagaaagcagccaccacctaagcccaaaagggatcctaacacaaggctgtctgcctcctatgaggccgtgtctgcctgtctgagcgcggctcgggaagcagcaaatgaggcactggcccgaccgagacctcacagtgatgactatagcactatgaagaagataccacctcgaaagccaaagcggtctcccaacactaaactgagcggttcttacgaagagattagtgggtcccgaccaggcgatgcgcgtcctgccggagctcccggagccgctgccagagtgttaaccccaggcactcctcagtgtgctcttcctcccgctgcacccccaggagacgaagatgattccgaaccagtgtacattgagatgttaggccacgctgccagaccagattcgcctgaccctggagaatcggtatatgaagaaatgaagtgctgcttacctgatgacggaggcccaggagccggatctttcctgctgcacggcgcatctccccctcttcttcacagggcaccagaggacgaggctgccggacctcctggcgacgcctgtgacattccaccacccttcccaaatcttctgccccacaggccccctctcctcgtcttccctccaacccccgttacgtgcagcccagcgtctgacgagtctcccctaacacccctcgaagtcaagaagcttccagtcctggagaccaatctgaagtacccagtgcagcctgaaggctcctctccgctgagcccccagtattctaaaagccaaaagggcgatggcgacaggcctgcttctccgggattggctctgtttaacggctccggccgagcaagcccaccttccacccccccaccccctccccctccacctgggccacctccggctccctatcgcccatgcgcacatctggcattcccccctgagccggctccggtgaatgcaggtaaggccggaccgagtgccgaagctccaaaagttcacccaaaacctaatagtgctcccgtggctggtccctgcagcagcttcccgaaaattccctatagtcccgtaaaggcgacccgcgcagatgccagaaaagccggatcttccgcaagccccccagccccttatagcccaccttcatcgcgacctctttctagccccctagatgagctcgcttcactctttaactcaggccgatcagtactccgcaaaagcgccgcaggacgaaaaatccgggaagccgaggggtttgagactaacatgaatatctcttctcgagacgatccatccacttcagagattacctccgaaacgcaggaccgcaatgccaacaatcacggcatccagctgagcaattctctgagcagcgctatcactgctgagaatggaaatagcatctcaaacggtttaccggaagaggatggctactcccgcctcagcatttctggtacgggcacatctacctttcagcgacatcgagattcccacactacccaggtgatacatcagctgcggttgagtgagaacgagagtgtggctctgcaagagctgctggactggcggaggaagctgtgtgaggaaggacaagattggcagcagattctgcaccatgctgagcccagggtccccccaccaccgccttgcaagaagcccagcctgctcaagaaacctgagggcgcatcctgcaacaggctgccctcagaactgtgggataccactatcta

SEQ ID NO: 183755 - DNA, 5576 bp, Artificial Sequence
  derived and/or modified sequence
atggagattgaccagtgtctgctagaatccctgccactcggccagaggcaaaggcttgtgaaacgaatgcggtgtgagcagattaaggcctattacgaaagggaaaaggctttccagaagcaagaaggctttctgaaaagactaaaacacgctaaaaacccaaaggtccatttcaacctgaccgatatgcttcaggatgccattatccatcacaatgacaaggaagtcctacggctgctgaaggaaggcgctgacccccatacactagtgagctctgggggtagcctccttcacctttgtgccagatacgacaacgcatttattgcggagattcttattgaccgaggagtgaacgtgaatcaccaggacgaggacttctggacaccaatgcacatcgcttgtgcttgtgataaccccgatattgttctccttctggtcctggcaggagcaaacgtgctgttgcaggatgtcaatgggaacatcccgttagattatgcggtggaggggacggagtcaagctccattctgcttacctatctggacgagaatggagtagatctgactagcctcaggcagatgaagctgcagagaccaatgtcgatgttaacggacgtaaagcattttttgagtagcggtggaaatgtgaacgaaaagaatgacgagggtgtgacactcttgcacatggcctgtgcctcaggctataaggaggtggtgtcactcatcctggagcatgggggagatctcaatatcgtcgacgaccagtactggacaccactgcatctggccgcaaagtatgggcaaaccaacctcgtaaagctgctcctcatgcaccaggctaacccacaccttgtgaactgcaatgaggaaaaggccagtgatattgcagcttccgaattcatcgaagagatgttacttaaggctgaaatcgcctgggaagaaaagatgaaggagcctcttagtgcctctaccctggcccaggaggaaccatatgaggaaattattcacgacctgccagtgttaagctctaagctgtctccattagtgctacctatcgccaaacaggatagcctcctcgagaaagatatcatgttcaaggatgccacaaagggtttatgtaaacaacagagccaagattccatacccgagaaccccatgatgtctgggtctactaaacctgagcaggttaagctgatgcccccagccccaaatgacgacctcgcaacactgtccgaactcaatgatggaagtctactctacgaaatacagaaaaggttcggcaacaaccaaatctacacatttatcggcgatattctgttgctcgtgaatccatataaggaactgcctatctactctagtatggtttcccagctgtatttctcctcatctggtaagttgtgtagcagtctgcctccacacctgttctcctgcgtggaaagggcatttcatcagttgttccgcgagcaacgacctcaatgcttcatactgagcggtgaacgcggttctggaaagagtgaggcctccaagcagattatcaggcatttaacctgtcgagcaggagcctctagagccactttggacagtcgttttaaacatgtcgtttgtatcctagaggctttcggccacgctaagaccacgctcaatgacctctccagctgtttcattaaatactttgagctccagttctgtgagcgcaagcagcagcttactggtgcgagaatctacacctatctactggaaaaatctagacttgtctcccagcctctgggtcagtcaaacttcctgatcttctacctcttaatggacgggctgtcagctgaagagaagtacgggctccatttgaacaacttatgtgcccatagatacctaaaccagaccatccaggacgatgctagcacgggggaaagatctctgaacagagaaaaattggcagttcttaaaagagcgctgaatgtggtgggattctcgagcctagaggtcgagaacctgtttgtcattcttgctgctatcctacatctgggcgatatcaggtttactgctctaaacgaaggcaacagcgctttcgtcagcgacttgcagctgttggagcaggtcgcgggaatgctgcaggtatcaaccgacgagttagcgtcagctctgaccaccgatattcagtattttaaaggagacatgatcattcggaggcacacgattcagatcgctgagttttttagagatctgcttgccaaatcactatactccagattattctcctttctcgtgaatactatgaactcttgtctccactcccaggacgaacagaagagcatgcagaccctagacattggaatccttgatatctttggattcgaggaatttcaaaagaacgagtttgaacaactgtgcgtaaacatgacgaatgagaaaatgcatcactatattaacgaagttcttttcctgcatgaacaggtggaatgcgtccaggagggtgtgacaatggagacagcctatagccccggtaaccagaacggagtgctggacttttttttccagaaaccgagcggatttcttaccctgctcgacgaggagagtcagatgatctggagtgtggaatccaattttcctaagaaactgcagtccctgctagaatcttccaataccaatgctgtgtactctcctatgaaagacggtaacgggaatgttgccctgaaagaccacggtacggcattcactattatgcattatgctgggcgtgtcatgtatgacgtggtgggtgccattgagaaaaacaaagactccctatctcagaatctgcttttcgtgatgaaaacatcagagaatgtggtaattaatcacttattccagtccaagttgtcccagacaggttcgctagttagtgcctaccctagcttcaagttcaggggtcacaaatctgccctactgagcaaaaagatgaccgccagtagtataattggtgaaaataaaaactacctagaactgagcaagttactgaagaagaaaggcacaagtacctttctgcagagacttgagagaggagatcctgtcactatcgcctctcagctgcggaagtctctgatggatattattggtaagcttcagaagtgcacgccacacttcatacactgcatacgccctaataacagtaagctccctgacaccttcgataatttctacgtctctgcccagcttcagtacatcggcgtgctggaaatggtgaaaatcttcagatatggctacccagtgaggcttagtttttccgacttcctttctagatataagccactcgctgacaccttcctgcgcgagaaaaaggaacagagcgctgctgagagatgccgcttagttctccagcaatgcaagctccagggctggcagatgggtgtgagaaaagtctttctcaagtattggcatgccgatcagctgaacgatttgtgcctgcagctgcagcggaagatcatcacttgtcagaaggttatccgtgggtttcttgcccgtcagcacctgctacagcgcataagtatcagacagcaggaagtgacgtccattaattcattcctgcagaacaccgaagatatggggttgaaaacgtatgacgctctggttatacaaaacgcctcagacattgcccgtgagaacgatcgattgaggtcagagatgaacgccccataccacaaagagaaactcgaagtccgcaacatgcaggaggaagggagtaagaggactgacgataaatcaggccctagacatttccacccttcatccatgtctgtctgcgccgctgtcgatggccttggtcagtgtctggtcggaccctctatttggagcccaagcctgcattcagtcttctcaatggatgattccagttccctgccatcgcccaggaagcagccccctcctaaaccgaagcgggacccaaacacacgtctctccgccagctatgaagccgtgtccgcctgtctgagcgctgctagggaggctgctaacgaagcgctggctaggccacggcctcatagtgatgattacagcaccatgaaaaagataccccctagaaagcctaagcgatccccgaacaccaaactttctggctcatatgaagagatcagcggctctaggccgggagatgccaggccagccggtgctccaggagccgctgccagagtgctgaccccaggtacacctcagtgcgcgttgcctccagcagcccctcccggtgacgaggacgattctgagcctgtctatatagagatgttaggccatgccgcacgccctgattcacccgaccccggagagagtgtttatgaggaaatgaagtgctgcctgccagacgacgggggacctggagccggtagcttccttctccatggagccagccctcctctacttcaccgtgctccagaagacgaggccgcaggacccccaggagacgcctgcgatatccccccacctttccctaatcttctcccacatcgacctccactgctggtattcccccctacccctgttacttgctcaccagctagcgacgaaagccccctcacacctctagaagtgaagaagctgccagtgctcgaaacaaatcttaagtaccccgtgcagccagagggatcttcacctctttcccctcagtattcgaagtcccagaagggcgatggtgatcgacctgccagcccaggcctggcgctctttaacgggtccggaagagcatctccaccttccacgcccccacctccaccaccccctcccggacccccacctgccccatatcggccttgtgctcacctggctttccccccagagccagctcccgtaaatgctggcaaggcgggaccctcagctgaagcgcctaaggtgcatcccaaaccgaattccgctcccgtagcaggcccatgttcttcattcccaaagataccctattccccggtgaaggccacccgagctgatgccaggaaggccggaagttctgcatctccaccggcaccttactccccaccatcttcgcggcctctgagtagccccctcgacgaactcgccagcctatttaactcaggccgttctgttttacgaaagtcagcagctggacggaagatcagggaggccgaaggtttcgagaccaatatgaatattagtagtagagatgacccctcaacatctgaaattacttctgagacccaggacagaaacgcgaacaaccatggcatccaactcagtaattcccttagctccgccatcacggccgaaaacggcaatagtataagtaacggcttgccggaggaagatggctattctcgattgtctatcagcggaaccggaacatcaacctttcagagacacagggatagtcatacgacccaggtgatccatcagcttcggctgtctgagaatgagtccgtcgctttacaggaactgttagattggcggagaaaattgtgcgaggagggtcaagactggcagcagatcctccatcacgccgaacctagggtccccccacctcccccatgcaagaaacccagcctccttaagaaacccgagggagcctcatgcaatcgactgcctagcgaactgtgggacaccacaattta

SEQ ID NO: 183756 - DNA, 2637 bp, Artificial Sequence
  derived and/or modified sequence
atgaagcttcagcgccctatgtccatgctgaccgatgttctgcatatggcctgtgcgtcagggtataaggaggtcgttagtttaatactggagcacggtggcgatcttaatatcgtggacgaccagtactggacccctcttcatctggctgccaaatacgggcagaccaatctggtcaaactgcttctcatgcaccaggccaatccccatctggtaaattgcaacgaagagaaggctagtgatattgccgcatccgagttcatcgaggaaatgcttctcaaagccgagatcgcgtgggaagaaaagatgaaagaaccactcagcgcatccactctagcccaggaagagccttatgaagagataatccacgacctgccagtactctccagtaaactgtctccccttgttctcccaatcgccaagcaggactcactgctcgagaaggacatcatgtttaaagacgccacaaagggtctttgtaagcaacaatcacaggacagtatcccagagaaccctatgatgtccgggagcaccaagcccgaacaggtcaagctgatgcccccagcccctaacgacgatctcgccaccctgtccgaactgaatgatggcagcttgctgtatgaaattcagaaacgtttcggcaacaatcaaatctacacctttattggcgatatcctgctgctcgttaatccatataaagagctgcctatctactcctctatggtgagtcagctgtatttttccagctcaggcaagctatgttcaagcctccccccacatctgttttcgtgtgtagagcgagcatttcatcagctgtttcgcgaacaacgacctcaatgcttcattctgagtggcgaaagggggtctggaaagagcgaagcttcgaaacagatcattcggcatctcacttgcagggctggagcctccagggccaccttggactcccgcttcaaacatgtcgtgtgcatccttgaggctttcggccacgcgaagactactcttaacgatctctcgtcgtgctttatcaaatacttcgagcttcagttctgtgaaagaaaacagcagcttacgggtgctaggatatatacgtatctgctcgagaaatctcgactagtaagccaacctttgggtcagagtaatttcctcatattctacttgctgatggacggcctaagcgctgaagagaagtacggcttgcatctgaataatttgtgcgctcaccgatatctgaaccagacaattcaggacgacgcgtcaacaggcgagaggtcactgaacagggaaaagctcgccgttctcaaacgcgctcttaatgtagtcgggttcagcagcctggaggtggaaaatttattcgtgatactcgcggctatattacacttaggagacatccggttcaccgctctgaacgagggcaacagtgcgtttgtctccgacctgcaactgctcgagcaggtggcgggaatgttacaggtctcaactgatgaactggcatccgctctcactaccgacatccaatactttaagggagacatgatcatcagacgccatactatccagattgcagaattttttcgtgatcttcttgccaaaagtctttattcccggctcttttccttccttgtcaataccatgaactcgtgcctgcatagtcaggatgaacaaaagtcaatgcagacgctcgatatcggaatccttgatatctttggatttgaggagttccagaaaaacgagttcgaacagctgtgtgtaaatatgactaacgaaaagatgcaccactatataaatgaggtcctgttcctgcacgagcaggtggagtgtgtccaggaaggtgtgactatggagactgcttattctccgggtaatcaaaacggagtgttagacttcttttttcagaaacctagtggattcctgactctactcgacgaggagtcacaaatgatctggtctgtggagtcaaacttccctaagaaattacagtctctgttggaatcatctaacaccaatgctgtgtacagccctatgaaggacgggaacggaaacgtcgctctcaaagaccatggcacagccttcaccatcatgcattatgcaggacgcgtgatgtatgacgtcgtcggcgctattgagaagaacaaagattcgttgtcccagaacctactgttcgttatgaagacatctgaaaacgtggtgattaaccatctgtttcagtcgaaactctcacagaccggatcgctcgtcagcgcctaccccagctttaaattccgtggacataaatcagcccttttgtcaaaaaagatgactgcgtcaagcattataggcgagaataaaaactacctcgaattgagtaagctccttaagaaaaaaggaactagcacattccttcagagactagaacggggtgacccagtcacgattgcatctcagctcaggaaatcactgatggatataatcggcaaactccagaaatgtaccccacacttcattcattgcatcaggcctaacaacagtaagctacccgacaccttcgataacttctatgtctcagcccagctgcagtatataggggtgctggagatggtcaaaatatttcgctatggatatcccgttaggctgtctttttccgatttcttaagtaggtag

SEQ ID NO: 183757 - DNA, 2823 bp, Artificial Sequence
  derived and/or modified sequence
atggaaattgatcagtgtctgctggaaagtttgcccctgggtcagagacagcgcctcgtgaagcggatgcgatgcgagcagatcaaagcctattacgaacgtgagaaggcttttcaaaaacaggagggctttctgaaacggctgaagcacgctaaaaatcccaaggtgcactttaatttgacagacatgcttcaggacgccatcatacaccataacgacaaagaagtactgcgccttctcaaagagggtgcggaccctcacacgctggtcagttccgggggtagcttgcttcatctgtgcgcgagatacgataacgccttcattgctgaaatactcatcgatagaggcgtaaacgtgaatcatcaagacgaggacttctggactcccatgcacatagcgtgtgcatgcgacaacccagatatcgttttactgcttgtgctcgccggagcgaatgtattattacaggatgtcaacggaaatattcctctggattatgctgtggagggcactgagtccagctcaatcctcctgacctacctggacgagaacggggtggacctgacaagcctgaggcagatgaaattgcagcgcccaatgtccatgttaaccgatgtcaaacatttcctgtcatctggtgggaacgtgaacgagaaaaatgacgagggagtgaccctactgcacatggcgtgcgccagcgggtataaagaagttgtgagtctcattcttgaacacggaggtgaccttaatatagtggatgaccagtattggacacccttgcatttagcagctaagtatgggcaaacaaatctcgtcaaacttcttctgatgcatcaggctaacccgcatctagtcaattgcaacgaggaaaaagccagcgatatcgctgcttcagaatttatcgaggaaatgctcctcaaggctgagattgcatgggaggaaaagatgaaagaacctctgtccgcctcaacactggcccaggaagagccctatgaggagatcatacacgatctccccgtgctttcgagcaagctgagtccgctggtgcttcctatagcaaagcaggattctcttttagagaaggacattatgttcaaagacgcaacgaaaggactgtgcaagcagcagagccaggattctattcctgagaacccaatgatgagtggctccacaaaacctgagcaggtaaaactgatgcctcccgctccgaatgacgatctcgccactctctctgaactcaacgatggcagcctcttatatgagatacaaaagagatttggcaataatcaaatctatactttcatcggcgacatattgctgctggtcaatccatacaaggagctgcctatttattcctccatggtcagtcagctctacttcagttcaagcgggaaactctgttcatccctgccaccccatctattctcgtgcgtggaaagggcctttcatcagctgttcagggagcaacgaccacaatgcttcatcctcagcggggagaggggctctgggaagagtgaggctagtaagcagattattagacatctgacctgccgcgcaggcgcatcccgcgcaaccttggatagcagattcaagcatgtggtttgcatcctcgaggccttcgggcatgccaaaacaaccctcaacgatctctccagttgcttcattaaatattttgagctgcagttttgcgaaagaaagcagcagttgacaggtgccagaatttatacctacctcctagaaaagtcccgactggtgtcgcagccgctcggccaaagtaatttcctgatcttttatctgctgatggatgggctgagtgcggaggagaagtatggtctccacctaaacaatctatgcgcgcataggtacctcaaccaaacgatccaggacgacgcttccaccggggagcgctctctgaatcgcgagaaattagctgtactcaaacgagctctgaatgttgtcggctttagctcactggaagtggagaacctcttcgtgatattggcagcaatactgcatctgggagatattcggtttaccgcgctgaacgaaggtaacagtgcctttgtgagcgatctccagctcttagaacaggtggctggcatgctgcaggtgtccacagacgaactcgcctctgccctcacaaccgatatccagtacttcaagggagatatgattatcagacgtcacacaatccagatcgccgagttttttcgagatcttctggcaaaatccctgtattcacgcctcttttcattcctggttaatactatgaattcctgtctgcattcccaggacgaacagaagagcatgcaaaccttggatattggcatccttgatatcttcggcttcgaagagttccagaaaaacgaatttgaacagctttgcgtgaatatgactaacgagaaaatgcaccactacatcaacgaagtgctttttctgcatgagcaggtggagtgcgtccaggagggtgtgactatggaaaccgcctactcacctggtaaccagaacggggtgcttgacttcttctttcaaaaaccatcaggattcctcaccctgctggatgaagagagtcagatgatatggagcgtagaaagcaatttccctaaaaagctccaaagcttactggagtcctctaatactaatgcagtctacagtccaatgaaagatggtaacggcaacgtggcactgaaagatcacggtaccgcgttcaccataatgcattatgctggaagggtgatgtatgatgtggtgggagcgatcgagaaaaataaagattctttatcgcagaaccttttgtttgtcatgaagaacagacgctgcttttag

SEQ ID NO: 183758 - DNA, 2574 bp, Artificial Sequence
  derived and/or modified sequence
atgcgccgagcagataccagagacggggagcgaggtagtggtaaatctgaggccagtaagcagatcatccggcacctcacgtgtcgtgcaggggctagtcgagctaccctcgactcccgatttaagcatgtagtgtgcattttagaggcgttcggtcacgccaaaaccactctgaatgacctgagctcctgttttatcaagtacttcgagctgcagttttgtgagagaaagcagcagctcacgggtgcgaggatctatacttacctgttggagaaaagcagactggtgtcccagccactggggcaaagtaacttcttaatattctatctgctcatggatggtctgtctgccgaggagaaatacggcttgcacctaaacaatctatgcgctcatagatacctgaatcaaaccatccaggacgatgccagcactggcgaacggtcactcaaccgagagaagctggcggttctgaaacgtgctctaaacgtagtgggattctccagtttagaggtggagaatctgtttgtcattttggccgctatcctccacttgggcgatatccggttcacagcgttgaatgaaggcaactccgccttcgtgtcagacctgcagctcctcgaacaggtcgccggaatgctgcaggtaagcaccgacgaactggctagtgcgctcaccacagacattcagtacttcaaaggcgatatgattattcggagacacaccatccagatcgccgaattctttcgcgacctgctcgccaagtccctatactccaggttgttctcctttttagtcaatacaatgaactcctgtctgcacagccaagacgaacagaagtcaatgcagaccttggatatcggcatactggacatctttggttttgaagagtttcaaaagaatgagtttgagcaattgtgtgttaacatgaccaacgaaaagatgcaccactatataaacgaagtactgtttctgcacgagcaagtggaatgcgtgcaggagggggtgactatggagaccgcctattcccccggtaatcagaacggtgtccttgacttcttcttccagaagccgagcgggttcctgaccctacttgacgaggaaagccagatgatttggtccgtggagagcaactttccgaagaagcttcagtcactgctcgagtcttccaatactaatgccgtgtatagtcctatgaaggatggtaacgggaatgtggcgctgaaggatcacggaaccgcctttactattatgcattacgctggtagggtgatgtatgacgtggtgggggcaatcgaaaagaacaaggactctctgtcccaaaatctcctctttgtaatgaagacctctgagaacgttgtgataaatcacctgttccaatcaaagctgagccaaaccggctccctggtctcggcatatccatcttttaaattccgtgggcataagtctgctctgctttctaaaaagatgactgctagttcgataataggcgagaataagaactaccttgaactaagcaaacttcttaagaagaaaggaacctcaaccttcctccaaaggctagagcggggagacccagtgaccatcgcatctcagctgcgtaagtctcttatggatattatcggaaagctgcagaaatgtacgccgcactttatccattgcatcaggcccaacaattcaaaactgcctgacacatttgacaacttctacgtgtccgcacaactgcagtacatcggagtcctggagatggttaagattttccgctacgggtaccccgtaaggctgtcgttcagcgatttcctgtctaggtataaacctctggcagacacatttctcagagaaaaaaaggaacaaagcgccgctgaaagatgtagactcgtactacaacagtgcaaactacagggttggcagatgggtgtgcgaaaagtgttcctgaagtattggcacgcggatcagctcaatgatctgtgcttgcagctgcagcggaaaattataacgtgtcagaaggtgattcgcggtttcttagcaaggcagcacctcttgcagcgcatcagcatacgacagcaggaggtgacctctataaattctttcctacagaatactgaagacatgggtctgaagacttacgatgcccttgtcatccagaatgcctccgatatagcacgcgaaaatgaccggttacgttccgagatgaatgctccctaccacaaagagaaactcgaggttcggaacatgcaggaggaggggtccaagagaacagacgataaatccgggccaagacactttcatccatcctctatgtccgtgtgcgctgcggtggatggactaggccagtgtcttgtggggccatcaatttggagtcctagcctgcactctgtattttctatggatgattcgagctctctgcctagtccccgaaaacagccaccccctaaaccaaaacgtgaccctaatactcgcctttctgcttcatacgaagctgtcagcgcctgtttaagtgcagcaagggaagcagccaacgaagggcaaccatggggcggaacccagccaagggtacctggaagtaggatgctgtag

SEQ ID NO: 183759 - protein, 1096 aa, Artificial Sequence
  derived and/or modified sequence
MGSEDHGAQNPSCKIMTFRPTMEEFKDFNKYVAYIESQGAHRAGLAKIIPPKEWKPRQTYDDIDDVVIPAPIQQVVTGQSGLFTQYNIQKKAMTVGEYRRLANSEKYCTPRHQDFDDLERKYWKNLTFVSPIYGADISGSLYDDDVAQWNIGSLRTILDMVERECGTIIEGVNTPYLYFGMWKTTFAWHTEDMDLYSINYLHFGEPKSWYAIPPEHGKRLERLAIGFFPGSSQGCDAFLRHKMTLISPIILKKYGIPFSRITQEAGEFMITFPYGYHAGFNHGFNCAESTNFATLRWIDYGKVATQCTCRKDMVKISMDVFVRILQPERYELWKQGKDLTVLDHTRPTALTSPELSSWSASRASLKAKLLRRSHRKRSQPKKPKPEDPKFPGEGTAGAALLEEAGGSVKEEAGPEVDPEEEEEEPQPLPHGREAEGAEEDGRGKLRPTKAKSERKKKSFGLLPPQLPPPPAHFPSEEALWLPSPLEPPVLGPGPAAMEESPLPAPLNVVPPEVPSEELEAKPRPIIPMLYVVPRPGKAAFNQEHVSCQQAFEHFAQKGPTWKEPVSPMELTGPEDGAASSGAGRMETKARAGEGQAPSTFSKLKMEIKKSRRHPLGRPPTRSPLSVVKQEASSDEEASPFSGEEDVSDPDALRPLLSLQWKNRAASFQAERKFNAAAARTEPYCAICTLFYPYCQALQTEKEAPIASLGKGCPATLPSKSRQKTRPLIPEMCFTSGGENTEPLPANSYIGDDGTSPLIACGKCCLQVHASCYGIRPELVNEGWTCSRCAAHAWTAECCLCNLRGGALQMTTDRRWIHVICAIAVPEARFLNVIERHPVDISAIPEQRWKLKCVYCRKRMKKVSGACIQCSYEHCSTSFHVTCAHAAGVLMEPDDWPYVVSITCLKHKSGGHAVQLLRAVSLGQVVITKNRNGLYYRCRVIGAASQTCYEVNFDDGSYSDNLYPESITSRDCVQLGPPSEGELVELRWTDGNLYKAKFISSVTSHIYQVEFEDGSQLTVKRGDIFTLEEELPKRVRSRLSLSTGAPQEPAFSGEEAKAAKRPRVGTPLATEDSGRSQDYVAFVESLLQVQGRPGAPF

SEQ ID NO: 183760 - protein, 448 aa, Artificial Sequence
  derived and/or modified sequence
MGSEDHGAQNPSCKIMTFRPTMEEFKDFNKYVAYIESQGAHRAGLAKIIPPKEWKPRQTYDDIDDVVIPAPIQQVVTGQSGLFTQYNIQKKAMTVGEYRRLANSEKYCTPRHQDFDDLERKYWKNLTFVSPIYGADISGSLYDDDVAQWNIGSLRTILDMVERECGTIIEGVNTPYLYFGMWKTTFAWHTEDMDLYSINYLHFGEPKSWYAIPPEHGKRLERLAIGFFPGSSQGCDAFLRHKMTLISPIILKKYGIPFSRITQEAGEFMITFPYGYHAGFNHGFNCAESTNFATLRWIDYGKVATQCTCRKDMVKISMDVFVRILQPERYELWKQGKDLTVLDHTRPTALTSPELSSWSASRASLKAKLLRRTPPCVSPHRPSQPGIWCPPGGEAKASAASWLLTTRGHGDTEAGPGLGGDPLHAQSEGQASCVSTSRLRMATQDPCR

SEQ ID NO: 183761 - DNA, 5601 bp, Artificial Sequence
  derived and/or modified sequence
agggctcggtcgccagcaaccgagcggggcccggcccgagcggggcctgggggtgcgacgccgagggcgggggagagcgcgccgctgctcccggaccgggccgcgcacgccgcctcaggaaccatcactgttgctggaggcacctgacaaatcctagcgaatttttggagcatctccacccaggaacctcgccatccagaagtgtgcttcccgcacagctgcagccatggggtctgaggaccacggcgcccagaaccccagctgtaaaatcatgacgtttcgcccaaccatggaagaatttaaagacttcaacaaatacgtggcctacatagagtcgcagggagcccaccgggcgggcctggccaagatcatccccccgaaggagtggaagccgcggcagacgtatgatgacatcgacgacgtggtgatcccggcgcccatccagcaggtggtgacgggccagtcgggcctcttcacgcagtacaatatccagaagaaggccatgacagtgggcgagtaccgccgcctggccaacagcgagaagtactgtaccccgcggcaccaggactttgatgaccttgaacgcaaatactggaagaacctcacctttgtctccccgatctacggggctgacatcagcggctctttgtatgatgacgacgtggcccagtggaacatcgggagcctccggaccatcctggacatggtggagcgcgagtgcggcaccatcatcgagggcgtgaacacgccctacctgtacttcggcatgtggaagaccaccttcgcctggcacaccgaggacatggacctgtacagcatcaactacctgcactttggggagcctaagtcctggtacgccatcccaccagagcacggcaagcgcctggagcggctggccatcggcttcttccccgggagctcgcagggctgcgacgccttcctgcggcataagatgaccctcatctcgcccatcatcctgaagaagtacgggatccccttcagccggatcacgcaggaggccggggaattcatgatcacatttccctacggctaccacgccggcttcaatcacgggttcaactgcgcagaatctaccaacttcgccaccctgcggtggattgactacggcaaagtggccactcagtgcacgtgccggaaggacatggtcaagatctccatggacgtgttcgtgcgcatcctgcagcccgagcgctacgagctgtggaagcagggcaaggacctcacggtgctggaccacacgcggcccacggcgctcaccagccccgagctgagctcctggagtgcatcccgggcctcgctgaaggccaagctcctccgcaggtctcaccggaaacggagccagcccaagaagccgaagcccgaagaccccaagttccctggggagggtacggctggggcagcgctcctagaggaggctgggggcagcgtgaaggaggaggctgggccggaggttgaccccgaggaggaggaggaggagccgcagccactgccacacggccgggaggccgagggcgcagaagaggacgggaggggcaagctgcggccaaccaaggccaagagcgagcggaagaagaagagcttcggcctgctgcccccacagctgccgcccccgcctgctcacttcccctcagaggaggcgctgtggctgccatccccactggagcccccggtgctgggcccaggccctgcagccatggaggagagccccctgccggcaccccttaatgtcgtgccccctgaggtgcccagtgaggagctagaggccaagcctcggcccatcatccccatgctgtacgtggtgccgcggccgggcaaggcagccttcaaccaggagcacgtgtcctgccagcaggcctttgagcactttgcccagaagggtccgacctggaaggaaccagtttcccccatggagctgacggggccagaggacggtgcagccagcagtggggcaggtcgcatggagaccaaagcccgggccggagaggggcaggcaccgtccacattttccaaattgaagatggagatcaagaagagccggcgccatcccctgggccggccgcccacccggtccccactgtcggtggtgaagcaggaggcctcaagtgacgaggaggcatcccctttctccggggaggaagatgtgagtgacccggacgccttgaggccgctgctgtctctgcagtggaagaacagggcggccagcttccaggccgagaggaagttcaacgcagcggctgcgcgcacggagccctactgcgccatctgcacgctcttctacccctactgccaggccctacagactgagaaggaggcacccatagcctccctcggaaagggctgcccggccacattaccctccaaaagccgtcagaagacccgaccgctcatccctgagatgtgcttcacctctggcggtgagaacacggagccgctgcctgccaactcctacatcggcgacgacgggaccagccccctgatcgcctgcggcaagtgctgcctgcaggtccatgccagttgctatggcatccgtcccgagctggtcaatgaaggctggacgtgttcccggtgcgcggcccacgcctggactgcggagtgctgcctgtgcaacctgcgaggaggtgcgctgcagatgaccaccgataggaggtggatccacgtgatctgtgccatcgcagtccccgaggcgcgcttcctgaacgtgattgagcgccaccctgtggacatcagcgccatccccgagcagcggtggaagctgaaatgcgtgtactgccggaagcggatgaagaaggtgtcaggtgcctgtatccagtgctcctacgagcactgctccacgtccttccacgtgacctgcgcccacgccgcaggcgtgctcatggagccggacgactggccctatgtggtctccatcacctgcctcaagcacaagtcggggggtcacgctgtccaactcctgagggccgtgtccctaggccaggtggtcatcaccaagaaccgcaacgggctgtactaccgctgtcgcgtcatcggtgccgcctcgcagacctgctacgaagtgaacttcgacgatggctcctacagcgacaacctgtaccctgagagcatcacgagtagggactgtgtccagctgggacccccttccgagggggagctggtggagctccggtggactgacggcaacctctacaaggccaagttcatctcctccgtcaccagccacatctaccaggtggagtttgaggacgggtcccagctgacggtgaagcgtggggacatcttcaccctggaggaggagctgcccaagagggtccgctctcggctgtcactgagcacgggggcaccgcaggagcccgccttctcgggggaggaggccaaggccgccaagcgcccgcgtgtgggcaccccgcttgccacggaggactccgggcggagccaggactacgtggccttcgtggagagcctcctgcaggtgcagggccggcccggagcccccttctaggacagctggccgctcaggcgaccctcagcccggcggggaggccatggcatgccccgggcgttcgcttgctgtgaattcctgtcctcgtgtccccgacccccgagaggccacctccaagccgcgggtgccccctagggcgacaggagccagcgggacgccgcacgcggccccagactcagggagcagggccaggcgggctcgggggccggccaggggagcaccccactcaactactcagaattttaaaccatgtaagctctcttcttctcgaaaaggtgctactgcaatgccctactgagcaacctttgagattgtcacttctgtacataaaccacctttgtgaggctctttctataaatacatattgtttaaaaaaaagcaagaaaaaaaggaaaacaaaggaaaatatccccaaagttgttttctagatttgtggctttaagaaaaacaaaacaaaacaaacacattgtttttctcagaaccaggattctctgagaggtcagagcatctcgctgtttttttgttgttgttttaaaatattatgatttggctacagaccaggcagggaaagagacccggtaattggagggtgagcctcggggggggggcaggacgccccggtttcggcacagcccggtcactcacggcctcgctctcgcctcaccccggctcctgggctttgatggtctggtgccagtgcctgtgcccactctgtgcctgctgggaggaggcccaggctctctggtggccgcccctgtgcacctggccaggggaagcccgggggtctggggcctccctccgtctgcgcccacctttgcagaataaactctctcctggggtttgtctatctttgtttctctcacctgagagaaacgcaggtgttccagaggcttccttgcagacaaagcacccctgcacctcctatggctcaggatgagggaggcccccaggcccttctggttggtagtgagtgtggacagcttcccagctcttcgggtacaaccctgagcaggtcgggggacacagggccgaggcaggccttcggggcccctttcgcctgcttccgggcagggacgaggcctggtgtcctcgctccacccacccacgctgctgtcacctgaggggaatctgcttcttaggagtgggttgagctgatagagaaaaaacggccttcagcccaggctgggaagcgccttctccaggtgcctctccctcaccagctctgcacccctctggggagccttccccaccttagctgtctcctgccccagggagggatggaggagataatttgcttatattaaaaacaaaaaatggctgaggcaggagtttgggaccagcctgggctatatagcaagaccccatcactacaaattttttacaaattagctaggtgtggtggtgcgcacctgtggtcccagctactcgggaggctgtggtgggaggattgcttgagtccaggaggttgaggctgcagtcagctcagattgcaccactgcactccagcctgggcaacagagcgagaccctgtctccaaaaaaaaaaaaaagcaatgtttatattataaaagagtgtcctaacagtccccgggctagagaggactaaggaaaacagagagagtgttacgcaggagcaagcctttcatttccttggtgggggaggggggcggttgccctggagagggccggggtcggggaggttggggggtgtcagccaaaacgtggaggtgtccctctgcacgcagccctcgcccggcgtggcgctgacactgtattcttatgttgtttgaaaatgctatttatattgtaaagaagcgggcgggtgcccctgctgcccttgtcccttgggggtcacacccatcccctggtgggctcctgggcggcctgcgcagatgggccacagaagggcaggccggagctgcacactctccccacgaaggtatctctgtgtcttactctgtgcaaagacgcggcaaaacccagtgccctggtttttccccacccgagatgaaggatacgctgtattttttgcctaatgtccctgcctctaggttcataatgaattaaaggttcatgaacgctgcg

SEQ ID NO: 183762 - DNA, 3291 bp, Artificial Sequence
  derived and/or modified sequence
atgggcagcgaggaccatggggcccaaaacccttcctgcaagattatgactttccgccccactatggaggagttcaaagatttcaataaatacgtggcttatatcgagtcgcagggggcccaccgagccggtctcgctaagattatacccccaaaagaatggaaacccaggcagacctacgacgatatcgatgacgtagtgatccctgccccaatccagcaggtggtgacagggcagtccggactgttcacccagtataatatccaaaaaaaggctatgactgtgggagaatacagaagactggcaaactccgagaagtattgcacccctcggcatcaggatttcgatgacctagaacggaaatactggaaaaacctgacttttgtttcccccatctatggggctgacatctcaggttccctctacgacgatgacgtcgcccagtggaacatagggtctttgcgcaccatcctggatatggtggaacgagaatgcggcaccattatcgaaggtgtgaacaccccctacctctattttgggatgtggaagaccacattcgcgtggcatacggaagatatggatctctactctatcaactatctccatttcggcgaacccaagagttggtatgccatccctccagaacacggcaaacgccttgaacgactcgccatcggattctttcctggctcaagccagggctgtgatgcgtttcttcgtcacaagatgacgctcataagccccattattctcaagaaatacgggattcccttttctaggatcacccaagaagctggggaatttatgataactttcccctacggttaccacgcagggtttaaccatggcttcaactgtgccgaatccactaactttgcgaccctccgctggatagactatggcaaggtggctacccagtgcacctgtcgaaaagacatggtgaagatatcaatggatgtgttcgtgagaatactccaaccagagcgctacgagctgtggaaacagggaaaggacctcaccgtcctggaccataccagaccaaccgccctgacgagccctgagttgtccagctggagcgcctcccgggcctccctgaaggcaaagcttcttaggcggtcgcatagaaagcgttcccaaccaaaaaagcctaaacccgaagatcccaagtttcccggggaagggaccgccggtgctgctctgctggaagaggccggtggcagcgtcaaagaggaagcgggaccagaagtggaccccgaggaggaggaggaagaacctcaaccgctgccacatggcagagaagccgagggcgccgaggaagatggtagagggaaacttaggcccacaaaggcgaagtcagaaagaaagaaaaaatccttcggccttctcccacctcaacttccaccgccacctgctcatttcccctcggaagaggcattatggctaccttcacccctggaacccccagtcctggggcccggacctgcggccatggaggaatcccctctcccggcaccactgaatgtcgttccacctgaggtgcctagtgaggaactggaggctaagcctcgacccatcatccccatgctatacgtcgttccacgccccgggaaagcagcattcaatcaggagcatgttagttgccaacaggccttcgaacactttgcacaaaaaggacctacttggaaggagccggtctctccaatggaacttacaggcccagaggatggagccgctagctcaggggccggacggatggagacaaaggcaagagccggcgaaggacaggccccctcaacgttctccaaactgaaaatggaaataaaaaaatccagacgccatccactgggacgtccgcccacacggagcccactctccgtggtgaagcaggaagcatcctctgacgaggaagcgagtccattcagcggcgaggaggacgtgtcagacccagacgctctgaggcccctgttgtccctgcagtggaaaaaccgagccgcctccttccaggccgagcggaaattcaatgccgcagccgcacggacggagccttactgtgccatctgtaccctgttttatccgtattgccaggctctgcaaacggaaaaagaggcgccaatagcgtctttgggaaaaggatgcccagccactctaccctccaaatcaaggcaaaagacacggccactaatccccgaaatgtgttttactagcggtggagagaatacggagccgctgcctgcaaacagctatattggcgacgacgggacttccccacttattgcttgcgggaaatgctgccttcaggtacacgcctcctgctacgggatcagacctgagctagtgaatgaaggatggacttgcagtcgctgtgctgcgcacgcctggacggctgaatgctgtctgtgcaacctgcgagggggagcgttgcaaatgaccaccgaccggagatggattcatgtaatatgcgcgatcgctgtgcctgaggcgcgcttcttgaatgtgatcgagcgacaccccgtcgatatctctgcaatccctgagcagaggtggaagcttaaatgcgtctactgcagaaaaaggatgaagaaggtgagcggggcctgtattcaatgctcgtatgaacattgcagtaccagctttcacgtgacatgtgcccacgcagcaggggtgttgatggaacctgatgattggccctatgttgtatctattacctgcctgaagcacaaaagtggtgggcatgccgtgcaactgctcagggcagtcagccttgggcaagtcgtgattacaaagaatcgcaacggtctttactacaggtgccgggtgattggcgccgcctctcaaacatgctacgaggtgaactttgatgacggtagttactctgataatctgtatcctgagtcaatcactagtcgcgactgcgttcagttaggaccgccgagtgagggggagctggtggagcttagatggaccgatggaaacctgtataaagcaaagttcatctcctcagtgactagccacatctatcaggtggagttcgaggacgggagccagttaaccgtgaagaggggagatatcttcactttggaggaggagctccctaagcgggtgcggagccgcctgtccctttccaccggcgcaccacaggagcctgcgttctccggcgaggaagcgaaggccgccaagcgcccacgggtcggcacacctttggcaacggaggatagcggtaggagtcaggactacgtggcgtttgtcgagtccctgctccaagtgcagggaagacccggggcaccattttag

SEQ ID NO: 183763 - DNA, 3291 bp, Artificial Sequence
  derived and/or modified sequence
atgggcagcgaggaccacggggcccagaaccccagctgcaagatcatgaccttccggcccaccatggaggagttcaaggacttcaacaagtatgtggcctacatcgagagccagggcgcccacagagctggcctggccaagatcatcccccccaaggagtggaagccccggcagacctatgatgacattgatgatgtggtgatcccagcccccatccagcaggtggtgacaggccagagcggcctcttcacccagtacaacatccagaagaaggccatgacagtgggggagtacagaaggctggccaacagcgagaagtactgcacccccaggcaccaggactttgatgacctggagaggaagtactggaagaacctgacctttgtgagccccatctatggagctgacatcagcggcagcctgtatgatgatgatgtggcccagtggaacatcggcagcctgcggaccatcctggacatggtggagcgggagtgtggcaccatcattgaaggagtgaacaccccctacctgtacttcggcatgtggaagaccacctttgcctggcacacagaggacatggacctgtacagcatcaactacctgcactttggagagcccaagtcctggtacgccatccccccagagcacggcaagaggctggagcggctggccatcggcttcttccctggcagcagccagggctgtgatgccttcctgcggcacaagatgaccctcatcagccccatcatcctgaagaagtatggcatccccttcagccgcatcacccaggaggccggggagttcatgatcaccttcccctacggctaccacgccggcttcaaccacggcttcaactgtgccgagagcaccaactttgccaccctgcgctggattgattatggcaaggtggccacccagtgcacctgcaggaaggacatggtgaagatctccatggatgtgtttgtgcgcatcctgcagcctgagagatatgagctgtggaagcagggcaaggacctgactgtgctggaccacacccggcccacagccctgaccagccctgagctgagctcctggagcgccagccgggccagcctgaaggccaagctgctgcggcgcagccacaggaagaggagccagcccaagaagcccaagccagaggaccccaagtttcctggagagggcacagctggggccgccctgctggaggaggccggcggctctgtgaaggaggaggccggccctgaggtggaccctgaggaggaggaggaggagccccagcccctgccccacggccgggaggccgagggcgcagaagaagatggccggggcaagctgcggcccaccaaggccaagtctgagaggaagaagaagagctttggcctgctgcccccccagctgcccccacctccagcccacttccccagcgaggaggccctgtggctgcccagccccctggagccccctgtgctgggccctggccctgctgccatggaggagagccccctgcctgcccccctgaatgtggtgcccccagaggtgcccagcgaggagctggaggccaagccccggcccatcatccccatgctgtatgtggtgcccaggcctgggaaggccgccttcaaccaggagcacgtgtcctgccagcaggcctttgagcactttgcccagaagggccccacctggaaggagcctgtgagccccatggagctgactggaccagaagatggagctgccagcagcggggccggccgcatggagaccaaggcccgggccggggagggccaggcccccagcaccttcagcaagctgaagatggagatcaagaagagcagaagacaccccctgggccggccccccaccaggagccccctgtctgtggtgaagcaggaggccagcagtgatgaggaggccagccccttctctggagaggaggatgtgtctgaccctgatgccctgcggcccctgctgagcctgcagtggaagaacagagctgccagcttccaggccgagaggaagttcaatgctgctgctgccaggacagagccctactgtgccatctgcaccctcttctacccctactgccaggccctgcagacagagaaggaggcccccatcgccagcctgggcaagggctgcccagccaccctgcccagcaagagccggcagaagacccggcccctcatccctgagatgtgcttcaccagcggcggggagaacacagagcccctgcctgccaacagctacatcggagatgatggcaccagccccctcatcgcctgtgggaagtgctgcctgcaggtgcacgccagctgctacggcatccggcctgagctggtgaatgaaggctggacctgcagccgctgtgccgcccacgcctggacagctgagtgctgcctgtgcaacctgcggggcggggccctgcagatgaccacagaccggcgctggattcatgtgatctgtgccatcgctgtgcctgaggcccgcttcctgaatgtgattgagcggcaccctgtggacatcagcgccatccctgagcagcgctggaagctgaagtgtgtgtactgcaggaagaggatgaagaaggtgtctggggcctgcatccagtgcagctatgagcactgcagcaccagcttccacgtgacctgtgcccatgctgctggggtgctgatggagccagatgactggccctacgtggtgtccatcacctgcctgaagcacaagagcggcggccatgctgtgcagctgctgcgggctgtgtccctgggccaggtggtgatcaccaagaacagaaatggcctgtactaccgctgcagggtcatcggggccgccagccagacctgctatgaggtgaactttgatgatggcagctacagcgacaacctgtacccagagagcatcaccagccgggactgtgtgcagctgggcccccccagcgagggggagctggtggagctgcgctggacagatggcaacctgtacaaggccaagttcatcagctctgtgaccagccacatctaccaggtggagtttgaagatggcagccagctgactgtgaagagaggagacatcttcaccctggaggaggagctgcccaagagggtgcgcagccggctgagcctgagcactggagccccccaggagcccgccttctctggagaggaggccaaggccgccaagaggccccgggtgggcacccccctggccacagaggacagcggccgcagccaggactatgtggcctttgtggagagcctgctgcaggtgcagggccggcctggggcccccttctag

SEQ ID NO: 183764 - DNA, 3291 bp, Artificial Sequence
  derived and/or modified sequence
atgggcagcgaggaccacggcgcccagaaccccagctgcaagatcatgacattccgtcctacaatggaagaatttaaagacttcaacaagtatgtagcatatatcgaatcacagggtgcccatcgcgctggtctcgccaagatcattcctcctaaggaatggaagccccgacagacatacgacgacattgatgatgttgtgatcccagctcccatccagcaggtagttactggacaatctggtctattcactcagtacaacattcagaagaaagccatgactgttggagaataccggcggctagccaactcagaaaaatactgcacgcccaggcatcaggacttcgatgacctggagcggaaatactggaaaaacctgactttcgtatcgcccatctacggcgccgacatctccggcagtttgtacgacgacgatgtggcacaatggaatatcggctccttgagaacgatactggacatggtggagcgagagtgcgggactataattgaaggtgtgaacactccctatctatattttggaatgtggaaaacgacctttgcctggcacactgaggatatggacctctattctatcaattacctccactttggcgagccaaagagttggtacgctattcctcctgagcacgggaaaagactcgagcgcctggccatcggcttcttccctggttcctcacagggttgtgacgcatttctcaggcacaagatgaccctgatctcacccatcattcttaagaaatatgggatcccattttcccgcattacacaggaagcgggcgaatttatgatcactttcccttacgggtatcatgccggctttaaccacggcttcaattgcgctgagtccaccaactttgcaactctccggtggatcgactatgggaaggttgctacgcagtgcacctgccgcaaggacatggtgaagattagcatggacgtattcgtccggatcctccaacccgagaggtatgaactgtggaagcaaggaaaagacctgaccgtgttagaccacactcggccaaccgccctgacttctcccgaactatcctcgtggtcagcctcccgggccagcctgaaggccaagctcttgcgccgaagtcacagaaagagatctcagcctaaaaaacccaagcctgaggatcccaagttccctggtgaggggactgcaggtgcagcattactcgaagaagccggcgggagcgtcaaggaggaagcaggaccagaagtagatcctgaggaggaagaagaggaacctcagcccctgccacatggacgagaggctgagggagccgaagaggacgggcgggggaagctcagacctactaaggcaaagagtgagagaaaaaagaagtcttttggactcctcccgccacagctcccccccccacccgctcacttccctagtgaggaggctctgtggctgccatctccactggaacctcctgtgctcgggcctggacccgctgccatggaggagtcccccctaccagccccgctgaacgtggtcccacccgaagtgccttctgaggagcttgaggccaagcccaggcctattattcctatgttgtacgtggtgccccgacctggaaaagccgcctttaaccaggagcatgtcagctgccaacaggcctttgaacactttgcccagaagggaccaacctggaaagaaccagtttctcccatggaacttaccggacccgaggacggggccgccagctccggagctggtagaatggaaaccaaggcacgcgcaggtgaaggccaggccccctcaacctttagcaaactcaagatggaaattaaaaagtctcggcggcatcctcttggcaggcctcctactcggagcccactatcggttgtgaaacaggaggcctcaagcgacgaggaggctagcccattcagcggtgaggaagacgtgagcgatccggatgccctgagaccactgctgtccctacagtggaagaatagggccgcttcatttcaggccgagaggaaattcaacgcagctgccgctagaaccgagccttattgtgccatttgcacacttttctatccatattgccaagctcttcagacagagaaggaggctcctatagcctcactcggcaagggctgccccgcaaccctaccatccaagagccggcaaaaaacacgcccactgatacctgaaatgtgtttcacgtccggcggagaaaataccgagcctctgcccgcaaactcatacatcggcgacgacgggacatcacctttgatcgcctgtggaaagtgctgtctgcaagtgcatgccagttgttatggaatcagacctgaactggtcaatgaaggatggacctgtagtcgctgcgccgcacatgcatggaccgctgagtgctgtctatgtaatctcaggggtggggctctgcagatgactaccgacagacggtggattcacgtcatttgtgctattgccgttccggaggcccgatttctgaacgtgattgagaggcaccctgtcgatataagcgcgatccctgagcagcgctggaagttaaagtgtgtctattgtcggaagcgcatgaaaaaggtgtctggcgcctgcattcagtgttcatatgagcactgctcgaccagtttccatgttacttgtgcccatgcggccggggtcttaatggagcctgacgattggccatatgtcgtgtccattacttgtctgaagcataaatcaggcgggcatgcggtccagctgttgcgagcagtctccttaggccaagtggtcatcaccaaaaacaggaatggcttatattacaggtgtcgcgtgatcggtgctgctagtcagacatgttacgaggtcaactttgacgatgggagctacagtgataatctttatccagaaagtatcactagtagagattgcgtgcagttagggcctccctctgaaggtgagctcgtcgaacttagatggactgatggtaacttgtataaagcaaaatttatctcttcggttacgtcgcatatttatcaagtggaattcgaagacggctcccaacttactgtcaagaggggggacattttcacactagaggaagagctgccaaaaagggtgcgatcgcgactttccctctccaccggcgctcctcaagaacccgccttctcaggcgaagaggccaaggccgcaaaacgtcctagggtgggcacccccctcgccaccgaggatagcgggcgctctcaggactacgtagccttcgtggagagtttgttgcaagtgcaggggcgtccaggtgctcccttttag

SEQ ID NO: 183765 - DNA, 3291 bp, Artificial Sequence
  derived and/or modified sequence
atgggtagtgaggaccacggagcacagaatcccagctgcaagataatgacctttcggccaactatggaggaatttaaggactttaacaaatacgttgcttatatagaatcccaaggagcccatagggccggactggccaaaatcataccacccaaagaatggaaacccagacagacatacgacgatatagatgacgttgttatccctgctccaattcagcaggtggtgacagggcagtctggtttgtttacacagtacaatatccagaagaaggccatgacggttggggagtatagaagacttgctaattctgaaaagtactgtactcctagacaccaggacttcgatgaccttgaaagaaagtactggaagaacttaactttcgttagtccaatctacggcgcagacattagcggctctctctatgacgatgatgtcgcccagtggaacattggcagtctgcggacgatcctcgatatggtggagcgggagtgtgggaccatcattgagggcgttaacaccccttatctgtacttcggtatgtggaagacaacgtttgcctggcacacagaggacatggacctatattccatcaattacctacactttggcgagccaaaatcttggtacgccattccccctgagcatggcaaaaggctggaaagactggctattggtttttttccagggagcagccaggggtgtgacgcctttttgcgacataaaatgacgctgattagtcccatcatattgaaaaaatacggaatcccttttagccgcattactcaagaggcaggggaatttatgattacttttccatatgggtaccacgccggatttaatcacggtttcaactgtgccgaaagtaccaactttgccacccttaggtggatagattacgggaaagtagcaacacagtgcacttgtaggaaagatatggtaaaaatttcaatggacgtctttgtgcgaattttacagccggagcgctacgagttgtggaaacagggaaaggatctgaccgtgctggaccatacccgaccgacagccctgaccagcccggagctatcttcctggtctgccagtagggcaagcctgaaggccaaacttctgaggaggtcccaccgcaagaggtcccagccgaagaagcccaagcccgaggacccgaaatttcctggcgagggcacagccggagctgctttactcgaggaggcagggggttctgtaaaagaggaagcaggacccgaagtggatcccgaagaagaagaagaagagccccaaccacttccccatgggagggaggccgaaggtgcggaggaggacggacggggaaagctaagacctactaaagctaaatccgaacggaagaaaaaaagcttcggcctgctgcctcctcaactgcctcctccaccagcccattttccatccgaagaagcactctggctcccttcaccactggagccacctgtactggggcctggcccagccgctatggaggaatctcccctcccagcaccactgaacgttgtaccacctgaagttccttcggaggagctggaggccaaacctcggcctataatcccaatgctgtacgtggtgcctcgtcctgggaaagcagcgttcaaccaggagcacgtctcttgccaacaagcatttgaacacttcgctcagaaaggacccacatggaaggagcctgttagccctatggaactaacaggcccagaggacggcgctgccagctctggcgctggcaggatggaaactaaggcccgtgccggtgagggccaggccccttcaacctttagtaaactgaagatggaaatcaaaaaaagccgcaggcatcccttggggagaccccctacacggtctcccctaagcgtggtaaaacaggaggcgagcagcgacgaggaggcttcaccattctcaggtgaagaagacgtgagcgatcctgacgccctgaggcctttgctgtcgcttcagtggaagaaccgcgctgccagttttcaggccgagcgaaagttcaacgctgccgctgcccgaaccgagccctattgcgcaatctgcacactcttttacccctactgccaggctctgcagaccgagaaagaggcaccgatcgcttctctgggcaaaggatgccctgcaactctcccttctaagagcaggcagaagactcgcccactcatccctgagatgtgcttcacgtcaggaggtgagaacacagagccgttacccgctaatagttacatcggagacgacggcacatcgcccctgattgcctgtgggaagtgttgcttgcaggtgcatgcgagctgctatggtatccgccctgagctcgttaatgagggctggacttgcagtagatgcgctgcccacgcctggactgctgaatgctgcctgtgcaaccttcggggaggcgctctgcagatgaccacagatcggagatggattcatgtcatttgtgccatcgccgtccctgaagcacgtttcctgaatgtaatcgaaaggcatccagtcgatattagcgcgattccagaacaacgctggaaacttaaatgcgtttattgcagaaagaggatgaagaaggtttctggcgcatgtatccagtgtagctacgagcactgcagtacgagctttcatgtgacctgtgcccacgccgctggagtgctgatggaaccggacgactggccttacgtggttagtataacttgcctgaagcataagagcggaggccacgctgtgcaactgttgagagccgtgagccttgggcaggtggtaataacaaagaataggaacggcctgtattaccgttgcagagtaataggagctgcaagtcaaacctgttatgaagtaaatttcgacgatgggtcttacagtgacaatctatatccagagagcatcacctcaagggattgtgtgcagttgggcccaccatccgaaggggaactggtggagttacggtggaccgatggcaacctgtataaagccaaattcatttcttccgttacttcccacatctatcaggtagagtttgaagacggatcccagctgactgtaaagcggggagatatctttacactggaggaggaattacccaagagagtccgatcaagactttctcttagcaccggagcccctcaggagccagcgttctccggcgaagaggccaaggctgctaagcggccacgggtgggtacccctcttgccactgaagattctgggagatctcaggactacgtggccttcgtggagagccttctgcaggtgcaaggcaggcccggagccccattctag

SEQ ID NO: 183766 - DNA, 3291 bp, Artificial Sequence
  derived and/or modified sequence
atgggctccgaagaccatggggctcaaaacccctcctgcaaaatcatgaccttccggcctacgatggaggaattcaaggattttaacaagtacgtggcttacattgaatcccagggagcgcatagggccggcctcgctaagattatcccacctaaagaatggaagccaagacaaacatatgatgatatcgacgacgtcgttatacccgcccctatccagcaagtcgtgacggggcagagcgggctgttcacccagtataacatacagaaaaaggccatgacagtgggggaatatcgccgcctggcaaacagtgagaagtattgcacaccacggcaccaggacttcgacgatctggaacgcaagtactggaaaaacctcacctttgtgtcccctatctacggcgcggatatcagtgggtccctgtacgacgatgatgtggcacaatggaatatcggcagtcttcgcacaattcttgacatggtagagcgcgaatgcggcacaatcatcgaaggtgtgaatacaccttacctgtacttcgggatgtggaagaccacatttgcgtggcacaccgaggatatggatctctactctataaattatctacacttcggagagcccaaatcctggtacgctatccctcctgagcatggcaaaagactggagcgtttggccatcggattcttccccggatcctcccaaggatgtgatgcctttctccgacacaagatgacactcatctctcccatcattctcaaaaagtatggaatccctttctcacgcattacacaggaagcgggagagtttatgattaccttcccatatgggtaccatgctgggtttaaccacggatttaactgcgccgaatctaccaatttcgccaccctgagatggattgattacgggaaggtcgctacacagtgcacatgccgaaaggacatggtgaaaatctcaatggatgtatttgttcgtatcctgcagcccgagcgctatgagctatggaagcagggaaaagatcttactgtgcttgaccacacccgccccacagccctcactagccccgaactatcctcgtggtccgcttccagggccagcttaaaggctaaactgctgcgcaggtctcataggaagcgctcacagccaaaaaaaccaaagcctgaagaccccaaatttccaggggaaggcacagcaggtgccgcgctgctcgaggaagcgggaggttccgtcaaggaggaggcaggtcccgaagtggatccagaggaagaagaagaggaaccgcagccactgcctcacgggcgcgaagccgaaggagcagaagaggacggcagaggcaaattacggcccacaaaagccaagtctgaaagaaagaagaaaagctttggtctcttgccaccccagctccccccacctcctgctcacttcccttccgaagaagccctgtggttgccatcccccttggaaccccctgtgttggggcctgggcccgctgcaatggaggaatcacccctgccagcacctttgaacgtggttcccccggaggtaccctctgaggagttggaagcaaaaccaaggccaatcatccccatgttatatgtagtcccacggccaggcaaggctgcgttcaaccaggaacacgtgtcttgtcagcaagccttcgagcattttgcccagaagggccccacatggaaggaacccgtcagccctatggaactgacaggccccgaagatggagcagcctcctcgggcgctggccgcatggagacaaaggctcgagctggcgaagggcaagccccaagcacattttccaagctaaaaatggagatcaaaaagtctaggcgtcatcccctcgggaggccacccactagaagccctctttccgttgtaaagcaagaggcgtcctccgacgaggaggcctcccctttctctggggaagaagacgtgtctgatccagacgcactgcggcctctcttaagcctgcagtggaagaacagggccgcatcctttcaggccgaacgtaaattcaatgccgccgctgccagaacagaaccctactgcgccatatgtactttgttctatccatactgtcaggccctccaaacagagaaggaagccccaatcgcatcactcggcaaaggttgccccgcaacactcccatcgaagagcagacagaagacacgccccttaatacccgagatgtgttttacgagcggtggggaaaacactgaacccctgcctgccaactcgtatataggcgacgacgggacctctcctctgatcgcctgcggaaagtgttgcttacaagtacatgctagttgttatggcattagacctgaattggtgaacgaagggtggacatgttctcggtgtgctgcccacgcttggactgctgaatgctgcttgtgtaacctgcgcggcggggccttacagatgactacagacaggagatggatccatgtcatctgtgcgatcgccgttcctgaagcccggtttctgaacgtgattgagcgccacccagtagacatcagcgcaattccagaacagcggtggaagctcaagtgtgtgtattgtcgcaagaggatgaagaaggtgagcggcgcctgtatacaatgctcctacgaacactgctccacaagctttcacgtgacctgcgcacatgctgcaggcgtattgatggaaccagatgactggccatacgtcgtaagcataacatgtctgaagcataagtcagggggccacgcagtccagctgctccgagcggtttcactgggccaggtggtcatcacaaaaaacagaaacggactatactatagatgtagagtgatcggtgcagcttcacagacctgctacgaagtgaacttcgacgacggttcatatagcgataacctctatcccgaatctatcactagccgagactgcgtgcaactgggtcctccctccgaaggagaactggtggaacttcgctggaccgatggcaacctgtacaaggctaaattcattagctccgtgacctcacacatctaccaagtggagtttgaagacggctcgcagcttaccgtgaaaaggggagatatcttcaccctcgaagaggagctgccgaagcgggtacgttctcgcctgagcctcagcaccggcgcaccacaggagcctgccttcagtggcgaagaggctaaagcggccaagcgcccacgagtggggacccccttggctaccgaagattccgggcgctctcaggattatgtggctttcgtggaatccctcctgcaggtccagggtcgtcccggcgcgccattttag

SEQ ID NO: 183767 - DNA, 3291 bp, Artificial Sequence
  derived and/or modified sequence
atggggagcgaagaccatggcgcccaaaacccgagttgcaaaataatgacctttcgaccaacaatggaagaattcaaggattttaataagtatgttgcttatattgagtctcagggagcacacagggctggccttgccaaaatcatcccccctaaagagtggaagccacgccagacttatgatgatatagatgacgttgttataccagctcctattcaacaagtggtgaccggccagagcggattgtttacccagtacaacattcagaaaaaagccatgaccgtgggcgaatataggcgactcgcaaactcagagaaatactgcaccccccgccatcaagactttgacgatctcgaacgcaaatactggaaaaatctaactttcgtaagcccaatttacggggcagatattagcggatctctgtatgatgatgacgtggctcagtggaacatcggatccctaaggactattctggacatggttgaacgggaatgcggcacgataatcgaaggggtaaacaccccctacttatatttcgggatgtggaagacaacattcgcttggcataccgaagacatggatctatatagcattaattacctccattttggcgaacccaagagctggtatgctatccccccagagcacggaaagagactcgaacggttagctattggttttttccctggatcctcccaggggtgtgacgcttttcttaggcataagatgacactgatttcacctataattctcaaaaaatacggaattccattttcaaggattactcaggaggcgggggaattcatgatcacattcccatacgggtatcacgctgggtttaaccacggattcaactgtgcagagtctaccaattttgctactctccgctggattgactacggaaaagtggccacccaatgcacttgccggaaggatatggtgaagatctcaatggatgtattcgtcaggattctgcagcccgaacgctatgaattgtggaagcaaggcaaagatttaacagtgttagatcatacacggcctacagccctaacctccccggaactttctagctggtctgcctctagagcttcactgaaggcaaaactgctccgccggagtcacagaaagaggagtcagccaaaaaaacccaagcctgaagacccgaagttcccaggggaaggcacggcaggagcagcattattggaagaagcaggtggctctgtgaaggaagaggctgggcccgaggttgatcctgaggaagaagaggaggagccacagcccctgcctcatgggcgagaggctgaaggcgcagaggaagacggaagaggaaaacttagacccaccaaggccaagagcgaaaggaagaaaaaatcatttggactccttcccccacaactacctccccctccagctcacttccctagtgaagaagcactgtggttgccttcgccactggaacctcccgtgttaggtccgggacctgcggccatggaggaaagccccttgccagcacctttaaatgtagttccacccgaagtgcctagcgaagaattggaagcaaagccaaggccaatcattcctatgctgtacgtcgtacccagaccaggcaaagcagcgttcaaccaggaacacgtgtcttgtcagcaggcctttgagcactttgctcagaagggtccaacatggaaagaacccgtgtcaccaatggagttgactggaccagaggatggagccgcttccagcggagccgggcggatggaaaccaaggctcgggcgggtgaaggccaggctccctccactttcagcaagctgaagatggaaatcaaaaaatcacgcaggcaccccctcggtaggccccccacgcggtctcccctgtccgtcgtcaaacaggaggcctcctcagacgaagaagcctcaccattctccggcgaggaagatgtttccgatcctgatgcattgcgaccacttctgagcctacagtggaagaatagggccgcttcatttcaagcggagcgtaaattcaacgcagctgccgccagaaccgaaccatactgtgccatttgtacattgttttacccttactgtcaagcactgcaaaccgagaaggaagccccaatcgcatcactcggcaaaggttgccccgcaacactcccatcgaagagcagacagaagacacgccccttaatacccgagatgtgttttacgagcggtggggaaaacactgaacccctgcctgccaactcgtatataggcgacgacgggacctctcctctgatcgcctgcggaaagtgttgcttacaagtacatgctagttgttatggcattagacctgaattggtgaacgaagggtggacatgttctcggtgtgctgcccacgcttggactgctgaatgctgcttgtgtaacctgcgggggggagccttacagatgacaaccgaccgccgatggattcacgtaatttgtgcaatcgccgtccctgaagcgcgcttcctgaatgtcattgaacgccacccggtcgacattagtgccattcctgaacaaaggtggaaattaaagtgtgtttactgcagaaagcggatgaagaaggtttcaggcgcctgtatccagtgctcttacgaacactgctccacatccttccatgtgacctgtgcacatgcagctggggttcttatggagccagacgattggccatatgtcgtttctattacatgcctcaaacataaatctggcggccatgccgtacaactgctcagagccgtctccctgggtcaagtcgtgatcacaaaaaacagaaacggcctttactatcggtgccgcgtgattggggccgcttcacaaacttgctacgaagtgaactttgacgatggtagctattccgacaacctgtatccggaaagtataactagccgggattgtgtacaattagggccaccctccgaaggtgaattggtggaacttagatggaccgacggaaacctttacaaagcaaagtttataagctccgtcacctctcacatttaccaggtggaattcgaggatggaagccaactaaccgtgaaaagaggagatatcttcactctggaggaggaactgccgaaaagagtgcggtccaggctgagcctttcaacgggcgcaccacaggaacctgcgttttcaggcgaagaagccaaagcagcgaagcgcccccgcgttggaacaccactggcaaccgaggacagcggtcgctctcaggactacgtagccttcgtggaaagtctactccaagtccaaggacgaccaggagctcccttttag

SEQ ID NO: 183768 - DNA, 3291 bp, Artificial Sequence
  derived and/or modified sequence
atgggcagcgaggaccacggcgcccagaaccccagctgcaagatcatgaccttcagacccaccatggaggagttcaaggacttcaacaagtacgtggcctacatcgagagccagggcgcccacagagccggcctggccaagatcatcccccccaaggagtggaagcccagacagacctacgacgacatcgacgacgtggtgatccccgcccccatccagcaggtggtgaccggccagagcggcctgttcacccagtacaacatccagaagaaggccatgaccgtgggcgagtacagaagactggccaacagcgagaagtactgcacccccagacaccaggacttcgacgacctggagagaaagtactggaagaacctgaccttcgtgagccccatctacggcgccgacatcagcggcagcctgtacgacgacgacgtggcccagtggaacatcggcagcctgagaaccatcctggacatggtggagagagagtgcggcaccatcatcgagggcgtgaacaccccctacctgtacttcggcatgtggaagaccaccttcgcctggcacaccgaggacatggacctgtacagcatcaactacctgcacttcggcgagcccaagagctggtacgccatcccccccgagcacggcaagagactggagagactggccatcggcttcttccccggcagcagccagggctgcgacgccttcctgagacacaagatgaccctgatcagccccatcatcctgaagaagtacggcatccccttcagcagaatcacccaggaggccggcgagttcatgatcaccttcccctacggctaccacgccggcttcaaccacggcttcaactgcgccgagagcaccaacttcgccaccctgagatggatcgactacggcaaggtggccacccagtgcacctgcagaaaggacatggtgaagatcagcatggacgtgttcgtgagaatcctgcagcccgagagatacgagctgtggaagcagggcaaggacctgaccgtgctggaccacaccagacccaccgccctgaccagccccgagctgagcagctggagcgccagcagagccagcctgaaggccaagctgctgagaagaagccacagaaagagaagccagcccaagaagcccaagcccgaggaccccaagttccccggcgagggcaccgccggcgccgccctgctggaggaggccggcggcagcgtgaaggaggaggccggccccgaggtggaccccgaggaggaggaggaggagccccagcccctgccccacggcagagaggccgagggcgccgaggaggacggcagaggcaagctgagacccaccaaggccaagagcgagagaaagaagaagagcttcggcctgctgcccccccagctgccccccccccccgcccacttccccagcgaggaggccctgtggctgcccagccccctggagccccccgtgctgggccccggccccgccgccatggaggagagccccctgcccgcccccctgaacgtggtgccccccgaggtgcccagcgaggagctggaggccaagcccagacccatcatccccatgctgtacgtggtgcccagacccggcaaggccgccttcaaccaggagcacgtgagctgccagcaggccttcgagcacttcgcccagaagggccccacctggaaggagcccgtgagccccatggagctgaccggccccgaggacggcgccgccagcagcggcgccggcagaatggagaccaaggccagagccggcgagggccaggcccccagcaccttcagcaagctgaagatggagatcaagaagagcagaagacaccccctgggcagaccccccaccagaagccccctgagcgtggtgaagcaggaggccagcagcgacgaggaggccagccccttcagcggcgaggaggacgtgagcgaccccgacgccctgagacccctgctgagcctgcagtggaagaacagagccgccagcttccaggccgagagaaagttcaacgccgccgccgccagaaccgagccctactgcgccatctgcaccctgttctacccctactgccaggccctgcagaccgagaaggaggcccccatcgccagcctgggcaagggctgccccgccaccctgcccagcaagagcagacagaagaccagacccctgatccccgagatgtgcttcaccagcggcggcgagaacaccgagcccctgcccgccaacagctacatcggcgacgacggcaccagccccctgatcgcctgcggcaagtgctgcctgcaggtgcacgccagctgctacggcatcagacccgagctggtgaacgagggctggacctgcagcagatgcgccgcccacgcctggaccgccgagtgctgcctgtgcaacctgagaggcggcgccctgcagatgaccaccgacagaagatggatccacgtgatctgcgccatcgccgtgcccgaggccagattcctgaacgtgatcgagagacaccccgtggacatcagcgccatccccgagcagagatggaagctgaagtgcgtgtactgcagaaagagaatgaagaaggtgagcggcgcctgcatccagtgcagctacgagcactgcagcaccagcttccacgtgacctgcgcccacgccgccggcgtgctgatggagcccgacgactggccctacgtggtgagcatcacctgcctgaagcacaagagcggcggccacgccgtgcagctgctgagagccgtgagcctgggccaggtggtgatcaccaagaacagaaacggcctgtactacagatgcagagtgatcggcgccgccagccagacctgctacgaggtgaacttcgacgacggcagctacagcgacaacctgtaccccgagagcatcaccagcagagactgcgtgcagctgggcccccccagcgagggcgagctggtggagctgagatggaccgacggcaacctgtacaaggccaagttcatcagcagcgtgaccagccacatctaccaggtggagttcgaggacggcagccagctgaccgtgaagagaggcgacatcttcaccctggaggaggagctgcccaagagagtgagaagcagactgagcctgagcaccggcgccccccaggagcccgccttcagcggcgaggaggccaaggccgccaagagacccagagtgggcacccccctggccaccgaggacagcggcagaagccaggactacgtggccttcgtggagagcctgctgcaggtgcagggcagacccggcgcccccttctag

SEQ ID NO: 183769 - RNA, 3291 nt, Artificial Sequence
  derived and/or modified sequence
augggcuccgaagaccauggggcucaaaaccccuccugcaaaaucaugaccuuccggccuacgauggaggaauucaaggauuuuaacaaguacguggcuuacauugaaucccagggagcgcauagggccggccucgcuaagauuaucccaccuaaagaauggaagccaagacaaacauaugaugauaucgacgacgucguuauacccgccccuauccagcaagucgugacggggcagagcgggcuguucacccaguauaacauacagaaaaaggccaugacagugggggaauaucgccgccuggcaaacagugagaaguauugcacaccacggcaccaggacuucgacgaucuggaacgcaaguacuggaaaaaccucaccuuuguguccccuaucuacggcgcggauaucagugggucccuguacgacgaugauguggcacaauggaauaucggcagucuucgcacaauucuugacaugguagagcgcgaaugcggcacaaucaucgaaggugugaauacaccuuaccuguacuucgggauguggaagaccacauuugcguggcacaccgaggauauggaucucuacucuauaaauuaucuacacuucggagagcccaaauccugguacgcuaucccuccugagcauggcaaaagacuggagcguuuggccaucggauucuuccccggauccucccaaggaugugaugccuuucuccgacacaagaugacacucaucucucccaucauucucaaaaaguauggaaucccuuucucacgcauuacacaggaagcgggagaguuuaugauuaccuucccauauggguaccaugcuggguuuaaccacggauuuaacugcgccgaaucuaccaauuucgccacccugagauggauugauuacgggaaggucgcuacacagugcacaugccgaaaggacauggugaaaaucucaauggauguauuuguucguauccugcagcccgagcgcuaugagcuauggaagcagggaaaagaucuuacugugcuugaccacacccgccccacagcccucacuagccccgaacuauccucgugguccgcuuccagggccagcuuaaaggcuaaacugcugcgcaggucucauaggaagcgcucacagccaaaaaaaccaaagccugaagaccccaaauuuccaggggaaggcacagcaggugccgcgcugcucgaggaagcgggagguuccgucaaggaggaggcaggucccgaaguggauccagaggaagaagaagaggaaccgcagccacugccucacgggcgcgaagccgaaggagcagaagaggacggcagaggcaaauuacggcccacaaaagccaagucugaaagaaagaagaaaagcuuuggucucuugccaccccagcuccccccaccuccugcucacuucccuuccgaagaagcccugugguugccaucccccuuggaacccccuguguuggggccugggcccgcugcaauggaggaaucaccccugccagcaccuuugaacgugguucccccggagguacccucugaggaguuggaagcaaaaccaaggccaaucauccccauguuauauguagucccacggccaggcaaggcugcguucaaccaggaacacgugucuugucagcaagccuucgagcauuuugcccagaagggccccacauggaaggaacccgucagcccuauggaacugacaggccccgaagauggagcagccuccucgggcgcuggccgcauggagacaaaggcucgagcuggcgaagggcaagccccaagcacauuuuccaagcuaaaaauggagaucaaaaagucuaggcgucauccccucgggaggccacccacuagaagcccucuuuccguuguaaagcaagaggcguccuccgacgaggaggccuccccuuucucuggggaagaagacgugucugauccagacgcacugcggccucucuuaagccugcaguggaagaacagggccgcauccuuucaggccgaacguaaauucaaugccgccgcugccagaacagaacccuacugcgccauauguacuuuguucuauccauacugucaggcccuccaaacagagaaggaagccccaaucgcaucacucggcaaagguugccccgcaacacucccaucgaagagcagacagaagacacgccccuuaauacccgagauguguuuuacgagcgguggggaaaacacugaaccccugccugccaacucguauauaggcgacgacgggaccucuccucugaucgccugcggaaaguguugcuuacaaguacaugcuaguuguuauggcauuagaccugaauuggugaacgaaggguggacauguucucggugugcugcccacgcuuggacugcugaaugcugcuuguguaaccugcgcggcggggccuuacagaugacuacagacaggagauggauccaugucaucugugcgaucgccguuccugaagcccgguuucugaacgugauugagcgccacccaguagacaucagcgcaauuccagaacagcgguggaagcucaaguguguguauugucgcaagaggaugaagaaggugagcggcgccuguauacaaugcuccuacgaacacugcuccacaagcuuucacgugaccugcgcacaugcugcaggcguauugauggaaccagaugacuggccauacgucguaagcauaacaugucugaagcauaagucagggggccacgcaguccagcugcuccgagcgguuucacugggccagguggucaucacaaaaaacagaaacggacuauacuauagauguagagugaucggugcagcuucacagaccugcuacgaagugaacuucgacgacgguucauauagcgauaaccucuaucccgaaucuaucacuagccgagacugcgugcaacuggguccucccuccgaaggagaacugguggaacuucgcuggaccgauggcaaccuguacaaggcuaaauucauuagcuccgugaccucacacaucuaccaaguggaguuugaagacggcucgcagcuuaccgugaaaaggggagauaucuucacccucgaagaggagcugccgaagcggguacguucucgccugagccucagcaccggcgcaccacaggagccugccuucaguggcgaagaggcuaaagcggccaagcgcccacgaguggggacccccuuggcuaccgaagauuccgggcgcucucaggauuauguggcuuucguggaaucccuccugcagguccagggucgucccggcgcgccauuuuag

SEQ ID NO: 183770 - RNA, 3291 nt, Artificial Sequence
  derived and/or modified sequence
auggggagcgaagaccauggcgcccaaaacccgaguugcaaaauaaugaccuuucgaccaacaauggaagaauucaaggauuuuaauaaguauguugcuuauauugagucucagggagcacacagggcuggccuugccaaaaucauccccccuaaagaguggaagccacgccagacuuaugaugauauagaugacguuguuauaccagcuccuauucaacaaguggugaccggccagagcggauuguuuacccaguacaacauucagaaaaaagccaugaccgugggcgaauauaggcgacucgcaaacucagagaaauacugcaccccccgccaucaagacuuugacgaucucgaacgcaaauacuggaaaaaucuaacuuucguaagcccaauuuacggggcagauauuagcggaucucuguaugaugaugacguggcucaguggaacaucggaucccuaaggacuauucuggacaugguugaacgggaaugcggcacgauaaucgaagggguaaacacccccuacuuauauuucgggauguggaagacaacauucgcuuggcauaccgaagacauggaucuauauagcauuaauuaccuccauuuuggcgaacccaagagcugguaugcuauccccccagagcacggaaagagacucgaacgguuagcuauugguuuuuucccuggauccucccaggggugugacgcuuuucuuaggcauaagaugacacugauuucaccuauaauucucaaaaaauacggaauuccauuuucaaggauuacucaggaggcgggggaauucaugaucacauucccauacggguaucacgcuggguuuaaccacggauucaacugugcagagucuaccaauuuugcuacucuccgcuggauugacuacggaaaaguggccacccaaugcacuugccggaaggauauggugaagaucucaauggauguauucgucaggauucugcagcccgaacgcuaugaauuguggaagcaaggcaaagauuuaacaguguuagaucauacacggccuacagcccuaaccuccccggaacuuucuagcuggucugccucuagagcuucacugaaggcaaaacugcuccgccggagucacagaaagaggagucagccaaaaaaacccaagccugaagacccgaaguucccaggggaaggcacggcaggagcagcauuauuggaagaagcagguggcucugugaaggaagaggcugggcccgagguugauccugaggaagaagaggaggagccacagccccugccucaugggcgagaggcugaaggcgcagaggaagacggaagaggaaaacuuagacccaccaaggccaagagcgaaaggaagaaaaaaucauuuggacuccuucccccacaacuaccucccccuccagcucacuucccuagugaagaagcacugugguugccuucgccacuggaaccucccguguuagguccgggaccugcggccauggaggaaagccccuugccagcaccuuuaaauguaguuccacccgaagugccuagcgaagaauuggaagcaaagccaaggccaaucauuccuaugcuguacgucguacccagaccaggcaaagcagcguucaaccaggaacacgugucuugucagcaggccuuugagcacuuugcucagaaggguccaacauggaaagaacccgugucaccaauggaguugacuggaccagaggauggagccgcuuccagcggagccgggcggauggaaaccaaggcucgggcgggugaaggccaggcucccuccacuuucagcaagcugaagauggaaaucaaaaaaucacgcaggcacccccucgguaggccccccacgcggucuccccuguccgucgucaaacaggaggccuccucagacgaagaagccucaccauucuccggcgaggaagauguuuccgauccugaugcauugcgaccacuucugagccuacaguggaagaauagggccgcuucauuucaagcggagcguaaauucaacgcagcugccgccagaaccgaaccauacugugccauuuguacauuguuuuacccuuacugucaagcacugcaaaccgagaaggaagccccaaucgcaucacucggcaaagguugccccgcaacacucccaucgaagagcagacagaagacacgccccuuaauacccgagauguguuuuacgagcgguggggaaaacacugaaccccugccugccaacucguauauaggcgacgacgggaccucuccucugaucgccugcggaaaguguugcuuacaaguacaugcuaguuguuauggcauuagaccugaauuggugaacgaaggguggacauguucucggugugcugcccacgcuuggacugcugaaugcugcuuguguaaccugcgggggggagccuuacagaugacaaccgaccgccgauggauucacguaauuugugcaaucgccgucccugaagcgcgcuuccugaaugucauugaacgccacccggucgacauuagugccauuccugaacaaagguggaaauuaaaguguguuuacugcagaaagcggaugaagaagguuucaggcgccuguauccagugcucuuacgaacacugcuccacauccuuccaugugaccugugcacaugcagcugggguucuuauggagccagacgauuggccauaugucguuucuauuacaugccucaaacauaaaucuggcggccaugccguacaacugcucagagccgucucccugggucaagucgugaucacaaaaaacagaaacggccuuuacuaucggugccgcgugauuggggccgcuucacaaacuugcuacgaagugaacuuugacgaugguagcuauuccgacaaccuguauccggaaaguauaacuagccgggauuguguacaauuagggccacccuccgaaggugaauugguggaacuuagauggaccgacggaaaccuuuacaaagcaaaguuuauaagcuccgucaccucucacauuuaccagguggaauucgaggauggaagccaacuaaccgugaaaagaggagauaucuucacucuggaggaggaacugccgaaaagagugcgguccaggcugagccuuucaacgggcgcaccacaggaaccugcguuuucaggcgaagaagccaaagcagcgaagcgcccccgcguuggaacaccacuggcaaccgaggacagcggucgcucucaggacuacguagccuucguggaaagucuacuccaaguccaaggacgaccaggagcucccuuuuag

SEQ ID NO: 183771 - protein, 792 aa, Artificial Sequence
  derived and/or modified sequence
MHILPLVGGKIEEVKRRQYSLAFSSAGAQAQTYHVSFETLAEYQRWQRQASKVVSQRISTVDLSCYSLEEVPEHLFYSQDITYLNLRHNFMQLERPGGLDTLYKFSQLKGLNLSHNKLGLFPILLCEISTLTELNLSCNGFHDLPSQIGNLLNLQTLCLDGNFLTTLPEELGNLQQLSSLGISFNNFSQIPEVYEKLTMLDRVVMAGNCLEVLNLGVLNRMNHIKHVDLRMNHLKTMVIENLEGNKHITHVDLRDNRLTDLDLSSLCSLEQLHCGRNQLRELTLSGFSLRTLYASSNRLTAVNVYPVPSLLTFLDLSRNLLECVPDWACEAKKIEVLDVSYNLLTEVPVRILSSLSLRKLMLGHNHVQNLPTLVEHIPLEVLDLQHNALTRLPDTLFSKALNLRYLNASANSLESLPSACTGEESLSMLQLLYLTNNLLTDQCIPVLVGHLHLRILHLANNQLQTFPASKLNKLEQLEELNLSGNKLKTIPTTIANCKRLHTLVAHSNNISIFPEILQLPQIQFVDLSCNDLTEILIPEALPATLQDLDLTGNTNLVLEHKTLDIFSHITTLKIDQKPLPTTDSTVTSTFWSHGLAEMAGQRNKLCVSALAMDSFAEGVGAVYGMFDGDRNEELPRLLQCTMADVLLEEVQQSTNDTVFMANTFLVSHRKLGMAGQKLGSSALLCYIRPDTADPASSFSLTVANVGTCQAVLCRGGKPVPLSKVFSLEQDPEEAQRVKDQKAIITEVPEDLKEFQTTDIPVHHCNFRAVLGCLCSASVLGSYAGPAPRWRRT

SEQ ID NO: 183772 - protein, 1323 aa, Artificial Sequence
  derived and/or modified sequence
MKRNGSRNCLNRRSRFGSRERDWLREDVKRGCVYLYGADTTTATTTTTTSSSSSSSSSSSDLHLVLCTVETPASEICAGEGRESLYLQLHGDLVRRLEPTERPLQIVYDYLSRLGFDDPVRIQEEATNPDLGCMIRFYGEKPCHMDRLDRILLSGIYNVRKGKTQLHKWAERLVVLCGTCLIVSSVKDCQTGKMHILPLVGGKIEEVKRRQYSLAFSSAGAQAQTYHVSFETLAEYQRWQRQASKVVSQRISTVDLSCYSLEEVPEHLFYSQDITYLNLRHNFMQLERPGGLDTLYKFSQLKGLNLSHNKLGLFPILLCEISTLTELNLSCNGFHDLPSQIGNLLNLQTLCLDGNFLTTLPEELGNLQQLSSLGISFNNFSQIPEVYEKLTMLDRVVMAGNCLEVLNLGVLNRMNHIKHVDLRMNHLKTMVIENLEGNKHITHVDLRDNRLTDLDLSSLCSLEQLHCGRNQLRELTLSGFSLRTLYASSNRLTAVNVYPVPSLLTFLDLSRNLLECVPDWACEAKKIEVLDVSYNLLTEVPVRILSSLSLRKLMLGHNHVQNLPTLVEHIPLEVLDLQHNALTRLPDTLFSKALNLRYLNASANSLESLPSACTGEESLSMLQLLYLTNNLLTDQCIPVLVGHLHLRILHLANNQLQTFPASKLNKLEQLEELNLSGNKLKTIPTTIANCKRLHTLVAHSNNISIFPEILQLPQIQFVDLSCNDLTEILIPEALPATLQDLDLTGNTNLVLEHKTLDIFSHITTLKIDQKPLPTTDSTVTSTFWSHGLAEMAGQRNKLCVSALAMDSFAEGVGAVYGMFDGDRNEELPRLLQCTMADVLLEEVQQSTNDTVFMANTFLVSHRKLGMAGQKLGSSALLCYIRPDTADPASSFSLTVANVGTCQAVLCRGGKPVPLSKVFSLEQDPEEAQRVKDQKAIITEDNKVNGVTCCTRMLGCTYLYPWILPKPHISSTPLTIQDELLILGNKALWEHLSYTEAVNAVRHVQDPLAAAKKLCTLAQSYGCQDNVGAMVVYLNIGEEGCTCEMNGLTLPGPVGFASTTTIKDAPKPATPSSSSGIASEFSSEMSTSEVSSEVGSTASDEHNAGGLDTALLPRPERRCSLHPTPTSGLFQRQPSSATFSSNQSDNGLDSDDDQPVEGVITNGSKVEVEVDIHCCRGRDLENSPPLIESSPTLCSEEHARGSCFGIRRQNSVNSGMLLPMSKDRMELQKSPSTSCLYGKKLSNGSIVPLEDSLNLIEVATEVPKRKTGYFAAPTQMEPEDQFVVPHDLEEEVKEQMKQHQDSRLEPEPHEEDRTEPPEEFDTAL

SEQ ID NO: 183773 - protein, 956 aa, Artificial Sequence
  derived and/or modified sequence
MKRNGSRNCLNRRSRFGSRERDWLREDVKRGCVYLYGADTTTATTTTTTSSSSSSSSSSSDLHLVLCTVETPASEICAGEGRESLYLQLHGDLVRRLEPTERPLQIVYDYLSRLGFDDPVRIQEEATNPDLGCMIRFYGEKPCHMDRLDRILLSGIYNVRKGKTQLHKWAERLVVLCGTCLIVSSVKDCQTGKMHILPLVGGKIEEVKRRQYSLAFSSAGAQAQTYHVSFETLAEYQRWQRQASKVVSQRISTVDLSCYSLEEVPEHLFYSQDITYLNLRHNFMQLERPGGLDTLYKFSQLKGLNLSHNKLGLFPILLCEISTLTELNLSCNGFHDLPSQIGNLLNLQTLCLDGNFLTTLPEELGNLQQLSSLGISFNNFSQIPEVYEKLTMLDRVVMAGNCLEVLNLGVLNRMNHIKHVDLRMNHLKTMVIENLEGNKHITHVDLRDNRLTDLDLSSLCSLEQLHCGRNQLRELTLSGFSLRTLYASSNRLTAVNVYPVPSLLTFLDLSRNLLECVPDWACEAKKIEVLDVSYNLLTEVPVRILSSLSLRKLMLGHNHVQNLPTLVEHIPLEVLDLQHNALTRLPDTLFSKALNLRYLNASANSLESLPSACTGEESLSMLQLLYLTNNLLTDQCIPVLVGHLHLRILHLANNQLQTFPASKLNKLEQLEELNLSGNKLKTIPTTIANCKRLHTLVAHSNNISIFPEILQLPQIQFVDLSCNDLTEILIPEALPATLQDLDLTGNTNLVLEHKTLDIFSHITTLKIDQKPLPTTDSTVTSTFWSHGLAEMAGQRNKLCVSALAMDSFAEGVGAVYGMFDGDRNEELPRLLQCTMADVLLEEVQQSTNDTVFMANTFLVSHRKLGMAGQKLGSSALLCYIRPDTADPASSFSLTVANVGTCQAVLCRGGKPVPLSKVFSLEQDPEEAQRVKDQKAIITENWVLNQKHLQDFPGEDK

SEQ ID NO: 183774 - protein, 166 aa, Artificial Sequence
  derived and/or modified sequence
MAGQRNKLCVSALAMDSFAEGVGAVYGMFDGDRNEELPRLLQCTMADVLLEEVQQSTNDTVFMANTFLVSHRKLGMAGQKLGSSALLCYIRPDTADPASSFSLTVANVGTCQAVLCRGGKPVPLSKVFSLEQDPEEAQRVKDQKAIITENWVLNQKHLQDFPGEDK

SEQ ID NO: 183775 - DNA, 2379 bp, Artificial Sequence
  derived and/or modified sequence
atgcacatcctgcccctggtgggcggcaagatcgaggaggtgaagagaagacagtacagcctggccttcagcagcgccggcgcccaggcccagacctaccacgtgagcttcgagaccctggccgagtaccagagatggcagagacaggccagcaaggtggtgagccagagaatcagcaccgtggacctgagctgctacagcctggaggaggtgcccgagcacctgttctacagccaggacatcacctacctgaacctgagacacaacttcatgcagctggagagacccggcggcctggacaccctgtacaagttcagccagctgaagggcctgaacctgagccacaacaagctgggcctgttccccatcctgctgtgcgagatcagcaccctgaccgagctgaacctgagctgcaacggcttccacgacctgcccagccagatcggcaacctgctgaacctgcagaccctgtgcctggacggcaacttcctgaccaccctgcccgaggagctgggcaacctgcagcagctgagcagcctgggcatcagcttcaacaacttcagccagatccccgaggtgtacgagaagctgaccatgctggacagagtggtgatggccggcaactgcctggaggtgctgaacctgggcgtgctgaacagaatgaaccacatcaagcacgtggacctgagaatgaaccacctgaagaccatggtgatcgagaacctggagggcaacaagcacatcacccacgtggacctgagagacaacagactgaccgacctggacctgagcagcctgtgcagcctggagcagctgcactgcggcagaaaccagctgagagagctgaccctgagcggcttcagcctgagaaccctgtacgccagcagcaacagactgaccgccgtgaacgtgtaccccgtgcccagcctgctgaccttcctggacctgagcagaaacctgctggagtgcgtgcccgactgggcctgcgaggccaagaagatcgaggtgctggacgtgagctacaacctgctgaccgaggtgcccgtgagaatcctgagcagcctgagcctgagaaagctgatgctgggccacaaccacgtgcagaacctgcccaccctggtggagcacatccccctggaggtgctggacctgcagcacaacgccctgaccagactgcccgacaccctgttcagcaaggccctgaacctgagatacctgaacgccagcgccaacagcctggagagcctgcccagcgcctgcaccggcgaggagagcctgagcatgctgcagctgctgtacctgaccaacaacctgctgaccgaccagtgcatccccgtgctggtgggccacctgcacctgagaatcctgcacctggccaacaaccagctgcagaccttccccgccagcaagctgaacaagctggagcagctggaggagctgaacctgagcggcaacaagctgaagaccatccccaccaccatcgccaactgcaagagactgcacaccctggtggcccacagcaacaacatcagcatcttccccgagatcctgcagctgccccagatccagttcgtggacctgagctgcaacgacctgaccgagatcctgatccccgaggccctgcccgccaccctgcaggacctggacctgaccggcaacaccaacctggtgctggagcacaagaccctggacatcttcagccacatcaccaccctgaagatcgaccagaagcccctgcccaccaccgacagcaccgtgaccagcaccttctggagccacggcctggccgagatggccggccagagaaacaagctgtgcgtgagcgccctggccatggacagcttcgccgagggcgtgggcgccgtgtacggcatgttcgacggcgacagaaacgaggagctgcccagactgctgcagtgcaccatggccgacgtgctgctggaggaggtgcagcagagcaccaacgacaccgtgttcatggccaacaccttcctggtgagccacagaaagctgggcatggccggccagaagctgggcagcagcgccctgctgtgctacatcagacccgacaccgccgaccccgccagcagcttcagcctgaccgtggccaacgtgggcacctgccaggccgtgctgtgcagaggcggcaagcccgtgcccctgagcaaggtgttcagcctggagcaggaccccgaggaggcccagagagtgaaggaccagaaggccatcatcaccgaggtgcccgaggacctgaaggagttccagaccaccgacatccccgtgcaccactgcaacttcagagccgtgctgggctgcctgtgcagcgccagcgtgctgggcagctacgccggccccgcccccagatggagaagaacctag

SEQ ID NO: 183776 - DNA, 3972 bp, Artificial Sequence
  derived and/or modified sequence
atgaagagaaacggcagcagaaactgcctgaacagaagaagcagattcggcagcagagagagagactggctgagagaggacgtgaagagaggctgcgtgtacctgtacggcgccgacaccaccaccgccaccaccaccaccaccaccagcagcagcagcagcagcagcagcagcagcagcgacctgcacctggtgctgtgcaccgtggagacccccgccagcgagatctgcgccggcgagggcagagagagcctgtacctgcagctgcacggcgacctggtgagaagactggagcccaccgagagacccctgcagatcgtgtacgactacctgagcagactgggcttcgacgaccccgtgagaatccaggaggaggccaccaaccccgacctgggctgcatgatcagattctacggcgagaagccctgccacatggacagactggacagaatcctgctgagcggcatctacaacgtgagaaagggcaagacccagctgcacaagtgggccgagagactggtggtgctgtgcggcacctgcctgatcgtgagcagcgtgaaggactgccagaccggcaagatgcacatcctgcccctggtgggcggcaagatcgaggaggtgaagagaagacagtacagcctggccttcagcagcgccggcgcccaggcccagacctaccacgtgagcttcgagaccctggccgagtaccagagatggcagagacaggccagcaaggtggtgagccagagaatcagcaccgtggacctgagctgctacagcctggaggaggtgcccgagcacctgttctacagccaggacatcacctacctgaacctgagacacaacttcatgcagctggagagacccggcggcctggacaccctgtacaagttcagccagctgaagggcctgaacctgagccacaacaagctgggcctgttccccatcctgctgtgcgagatcagcaccctgaccgagctgaacctgagctgcaacggcttccacgacctgcccagccagatcggcaacctgctgaacctgcagaccctgtgcctggacggcaacttcctgaccaccctgcccgaggagctgggcaacctgcagcagctgagcagcctgggcatcagcttcaacaacttcagccagatccccgaggtgtacgagaagctgaccatgctggacagagtggtgatggccggcaactgcctggaggtgctgaacctgggcgtgctgaacagaatgaaccacatcaagcacgtggacctgagaatgaaccacctgaagaccatggtgatcgagaacctggagggcaacaagcacatcacccacgtggacctgagagacaacagactgaccgacctggacctgagcagcctgtgcagcctggagcagctgcactgcggcagaaaccagctgagagagctgaccctgagcggcttcagcctgagaaccctgtacgccagcagcaacagactgaccgccgtgaacgtgtaccccgtgcccagcctgctgaccttcctggacctgagcagaaacctgctggagtgcgtgcccgactgggcctgcgaggccaagaagatcgaggtgctggacgtgagctacaacctgctgaccgaggtgcccgtgagaatcctgagcagcctgagcctgagaaagctgatgctgggccacaaccacgtgcagaacctgcccaccctggtggagcacatccccctggaggtgctggacctgcagcacaacgccctgaccagactgcccgacaccctgttcagcaaggccctgaacctgagatacctgaacgccagcgccaacagcctggagagcctgcccagcgcctgcaccggcgaggagagcctgagcatgctgcagctgctgtacctgaccaacaacctgctgaccgaccagtgcatccccgtgctggtgggccacctgcacctgagaatcctgcacctggccaacaaccagctgcagaccttccccgccagcaagctgaacaagctggagcagctggaggagctgaacctgagcggcaacaagctgaagaccatccccaccaccatcgccaactgcaagagactgcacaccctggtggcccacagcaacaacatcagcatcttccccgagatcctgcagctgccccagatccagttcgtggacctgagctgcaacgacctgaccgagatcctgatccccgaggccctgcccgccaccctgcaggacctggacctgaccggcaacaccaacctggtgctggagcacaagaccctggacatcttcagccacatcaccaccctgaagatcgaccagaagcccctgcccaccaccgacagcaccgtgaccagcaccttctggagccacggcctggccgagatggccggccagagaaacaagctgtgcgtgagcgccctggccatggacagcttcgccgagggcgtgggcgccgtgtacggcatgttcgacggcgacagaaacgaggagctgcccagactgctgcagtgcaccatggccgacgtgctgctggaggaggtgcagcagagcaccaacgacaccgtgttcatggccaacaccttcctggtgagccacagaaagctgggcatggccggccagaagctgggcagcagcgccctgctgtgctacatcagacccgacaccgccgaccccgccagcagcttcagcctgaccgtggccaacgtgggcacctgccaggccgtgctgtgcagaggcggcaagcccgtgcccctgagcaaggtgttcagcctggagcaggaccccgaggaggcccagagagtgaaggaccagaaggccatcatcaccgaggacaacaaggtgaacggcgtgacctgctgcaccagaatgctgggctgcacctacctgtacccctggatcctgcccaagccccacatcagcagcacccccctgaccatccaggacgagctgctgatcctgggcaacaaggccctgtgggagcacctgagctacaccgaggccgtgaacgccgtgagacacgtgcaggaccccctggccgccgccaagaagctgtgcaccctggcccagagctacggctgccaggacaacgtgggcgccatggtggtgtacctgaacatcggcgaggagggctgcacctgcgagatgaacggcctgaccctgcccggccccgtgggcttcgccagcaccaccaccatcaaggacgcccccaagcccgccacccccagcagcagcagcggcatcgccagcgagttcagcagcgagatgagcaccagcgaggtgagcagcgaggtgggcagcaccgccagcgacgagcacaacgccggcggcctggacaccgccctgctgcccagacccgagagaagatgcagcctgcaccccacccccaccagcggcctgttccagagacagcccagcagcgccaccttcagcagcaaccagagcgacaacggcctggacagcgacgacgaccagcccgtggagggcgtgatcaccaacggcagcaaggtggaggtggaggtggacatccactgctgcagaggcagagacctggagaacagcccccccctgatcgagagcagccccaccctgtgcagcgaggagcacgccagaggcagctgcttcggcatcagaagacagaacagcgtgaacagcggcatgctgctgcccatgagcaaggacagaatggagctgcagaagagccccagcaccagctgcctgtacggcaagaagctgagcaacggcagcatcgtgcccctggaggacagcctgaacctgatcgaggtggccaccgaggtgcccaagagaaagaccggctacttcgccgcccccacccagatggagcccgaggaccagttcgtggtgccccacgacctggaggaggaggtgaaggagcagatgaagcagcaccaggacagcagactggagcccgagccccacgaggaggacagaaccgagccccccgaggagttcgacaccgccctgtag

SEQ ID NO: 183777 - DNA, 2871 bp, Artificial Sequence
  derived and/or modified sequence
atgaagagaaacggcagcagaaactgcctgaacagaagaagcagattcggcagcagagagagagactggctgagagaggacgtgaagagaggctgcgtgtacctgtacggcgccgacaccaccaccgccaccaccaccaccaccaccagcagcagcagcagcagcagcagcagcagcagcgacctgcacctggtgctgtgcaccgtggagacccccgccagcgagatctgcgccggcgagggcagagagagcctgtacctgcagctgcacggcgacctggtgagaagactggagcccaccgagagacccctgcagatcgtgtacgactacctgagcagactgggcttcgacgaccccgtgagaatccaggaggaggccaccaaccccgacctgggctgcatgatcagattctacggcgagaagccctgccacatggacagactggacagaatcctgctgagcggcatctacaacgtgagaaagggcaagacccagctgcacaagtgggccgagagactggtggtgctgtgcggcacctgcctgatcgtgagcagcgtgaaggactgccagaccggcaagatgcacatcctgcccctggtgggcggcaagatcgaggaggtgaagagaagacagtacagcctggccttcagcagcgccggcgcccaggcccagacctaccacgtgagcttcgagaccctggccgagtaccagagatggcagagacaggccagcaaggtggtgagccagagaatcagcaccgtggacctgagctgctacagcctggaggaggtgcccgagcacctgttctacagccaggacatcacctacctgaacctgagacacaacttcatgcagctggagagacccggcggcctggacaccctgtacaagttcagccagctgaagggcctgaacctgagccacaacaagctgggcctgttccccatcctgctgtgcgagatcagcaccctgaccgagctgaacctgagctgcaacggcttccacgacctgcccagccagatcggcaacctgctgaacctgcagaccctgtgcctggacggcaacttcctgaccaccctgcccgaggagctgggcaacctgcagcagctgagcagcctgggcatcagcttcaacaacttcagccagatccccgaggtgtacgagaagctgaccatgctggacagagtggtgatggccggcaactgcctggaggtgctgaacctgggcgtgctgaacagaatgaaccacatcaagcacgtggacctgagaatgaaccacctgaagaccatggtgatcgagaacctggagggcaacaagcacatcacccacgtggacctgagagacaacagactgaccgacctggacctgagcagcctgtgcagcctggagcagctgcactgcggcagaaaccagctgagagagctgaccctgagcggcttcagcctgagaaccctgtacgccagcagcaacagactgaccgccgtgaacgtgtaccccgtgcccagcctgctgaccttcctggacctgagcagaaacctgctggagtgcgtgcccgactgggcctgcgaggccaagaagatcgaggtgctggacgtgagctacaacctgctgaccgaggtgcccgtgagaatcctgagcagcctgagcctgagaaagctgatgctgggccacaaccacgtgcagaacctgcccaccctggtggagcacatccccctggaggtgctggacctgcagcacaacgccctgaccagactgcccgacaccctgttcagcaaggccctgaacctgagatacctgaacgccagcgccaacagcctggagagcctgcccagcgcctgcaccggcgaggagagcctgagcatgctgcagctgctgtacctgaccaacaacctgctgaccgaccagtgcatccccgtgctggtgggccacctgcacctgagaatcctgcacctggccaacaaccagctgcagaccttccccgccagcaagctgaacaagctggagcagctggaggagctgaacctgagcggcaacaagctgaagaccatccccaccaccatcgccaactgcaagagactgcacaccctggtggcccacagcaacaacatcagcatcttccccgagatcctgcagctgccccagatccagttcgtggacctgagctgcaacgacctgaccgagatcctgatccccgaggccctgcccgccaccctgcaggacctggacctgaccggcaacaccaacctggtgctggagcacaagaccctggacatcttcagccacatcaccaccctgaagatcgaccagaagcccctgcccaccaccgacagcaccgtgaccagcaccttctggagccacggcctggccgagatggccggccagagaaacaagctgtgcgtgagcgccctggccatggacagcttcgccgagggcgtgggcgccgtgtacggcatgttcgacggcgacagaaacgaggagctgcccagactgctgcagtgcaccatggccgacgtgctgctggaggaggtgcagcagagcaccaacgacaccgtgttcatggccaacaccttcctggtgagccacagaaagctgggcatggccggccagaagctgggcagcagcgccctgctgtgctacatcagacccgacaccgccgaccccgccagcagcttcagcctgaccgtggccaacgtgggcacctgccaggccgtgctgtgcagaggcggcaagcccgtgcccctgagcaaggtgttcagcctggagcaggaccccgaggaggcccagagagtgaaggaccagaaggccatcatcaccgagaactgggtgctgaaccagaagcacctgcaggacttccccggcgaggacaagtag

SEQ ID NO: 183778 - DNA, 2379 bp, Artificial Sequence
  derived and/or modified sequence
atgcatatcctcccactggtcggaggaaagatcgaagaagtcaagagacgccagtacagcctagccttttcctctgctggcgcacaggcccagacctaccacgtgtcatttgaaacgctggccgagtaccaacgctggcaacgccaggcctcaaaagtagtgtcgcaacgcatatctactgtggatttgagttgctattccttggaggaagttcctgagcacctgttttacagccaggacattacatacctgaacctgaggcataatttcatgcagctcgagaggccggggggtctggataccttatataaattcagccagttgaaaggtctaaacctgtctcacaacaaactcggcctttttcctatactcttgtgtgaaatctctacgctcacggaacttaatttgagttgtaacggctttcacgatctcccctcgcagatcgggaacctgctgaacctgcagacactgtgcctggatggcaattttctgacaacactccctgaggagctaggaaacctccagcaactgtcttctttaggaatcagcttcaacaacttctctcagattccagaggtctatgagaaactaactatgttggatagggtggtcatggcaggcaattgtctcgaggtcctaaacctcggcgtactcaataggatgaatcatataaaacacgtggacctccgtatgaatcacttgaaaactatggtcatagaaaatttggaaggtaacaaacacataacccatgttgatctacgtgacaatcgtctgacggatttggacctttcctccttatgcagtcttgagcagttgcactgtgggcggaaccagctccgtgagctgactctctccggcttcagccttcgcacactgtacgctagttctaatcggcttactgcagtgaatgtgtatcccgtcccatctttgctaacattccttgacctttcacgcaatcttttagaatgcgtgcctgattgggcctgtgaggctaagaagattgaagtacttgacgtgagctataatttattaactgaggttcccgtccggatcttatcaagcctgtccctgcgcaaactgatgctgggacacaaccatgttcaaaacctcccgaccctggtggagcatatccctctcgaagtgttggaccttcagcacaacgctctgacccggctgccagacaccctgttttctaaggccttgaacctgcgttacctaaacgcttcagccaactctctggaatctctacctagcgcatgtacgggtgaggaatccttatctatgctacaactgctctatcttactaacaatctgctaaccgaccagtgtatccccgtgttggtagggcacctccacctgaggatactgcacctggctaacaatcagctccaaacttttccagcttccaagttgaacaaactggaacagctggaggagttgaatttaagcggcaataagttgaagaccattccaaccacaatagccaactgtaagcggctacatacactggtcgcccactcgaacaatatctctatttttcctgaaattctgcagcttccgcagatacagttcgtcgacctatcttgtaacgacttaaccgaaatccttatacccgaagcccttcctgctactctccaggatctggaccttactggtaacactaacctggtccttgagcataagactcttgacatttttagtcatatcaccactctgaaaatcgaccagaaacctctccccacaacggatagcaccgttacatctacgttttggtctcatgggttggcggagatggccggacagcggaataagctctgtgtaagcgcgctcgctatggatagctttgccgaaggcgttggcgcggtgtatgggatgttcgacggagataggaatgaggaattgcctcgtctcctgcaatgtactatggctgatgtgctgctcgaagaggtgcagcagagcaccaacgatacggtttttatggccaacacctttttggtcagtcaccgaaagctgggcatggctggccagaaattgggctcttccgcactgctttgctacattaggcccgacacggctgaccctgccagtagcttctcgctgacagtcgcgaacgtagggacatgtcaggctgtcctttgtagaggtggtaagcccgtccctttatctaaggttttcagccttgagcaggatcccgaggaggcccagcgtgtgaaggatcaaaaagctataatcacagaggttcctgaggatctcaaggagttccagacaacggacatccctgttcaccactgtaatttccgtgccgttttgggctgtctttgttctgccagcgtgctcggctcatacgccgggcccgcccctaggtggcggaggacctag

SEQ ID NO: 183779 - DNA, 3972 bp, Artificial Sequence
  derived and/or modified sequence
atgaaaagaaacggttccaggaattgcctgaaccggaggagcaggttcgggtcaagagaacgcgactggctgcgggaggatgtcaaacggggctgtgtttacctttatggcgccgataccaccacagcaaccactacaacaactacatcaagctccagcagctcaagttcttcgtctagtgatctccatctggtactctgtaccgtggaaactccggcaagtgagatatgtgctggggaaggcagggaaagtttgtatttacaattgcatggcgacctcgttagacgcttggaaccaacagaacgccctctgcagattgtgtacgactacctcagccggctgggtttcgacgaccccgtcagaatccaggaagaagccactaatcccgatttaggttgtatgatccggttttacggagagaaaccttgccacatggaccgtctcgatagaatactgctaagcggcatttataatgtgcggaagggaaaaacacaactccacaaatgggccgagcggctggtggtcctatgcgggacatgcctcatcgtctccagcgttaaggactgtcagactgggaagatgcacatccttcccctagtgggagggaaaattgaagaggtgaagagaagacagtattccctggcattctcatcagccggcgcccaggcccaaacctatcacgtgtccttcgaaactttggcagagtatcaaagatggcagaggcaggcgtccaaggtggtgagtcagcggatttctacagtcgacctcagctgctactcactagaagaggtcccagagcatctgttctattctcaggacattacatacttgaatctccggcataacttcatgcagctggagcggcccggtgggctggacaccctgtataaatttagccagctcaagggactcaatctctcgcataacaagctaggtctgtttcctattctgctatgcgaaatctctacactgaccgagcttaacctttcttgcaatgggtttcacgacctaccatcgcaaattggaaatctgctgaacctgcagacgttgtgtttggacgggaatttccttacaactcttcccgaggaactggggaatctacagcaactctcctccctgggaatttcattcaataacttctcccaaattccagaggtgtatgagaagttgactatgcttgaccgcgtagtgatggcgggcaactgcctagaagtgctgaacttgggagtgctcaaccgaatgaaccatatcaagcacgtcgacctgagaatgaaccacctcaagacaatggtaatagaaaatcttgaggggaataagcatatcacacatgttgatctgagagataacagactaactgacctggatttatccagcctctgctctctagagcagctccactgcggcaggaaccagcttcgggagctcactctgtccggattcagccttaggactctatatgctagtagtaatagattgactgcagttaacgtgtatcccgtcccgagtttgttgacatttctcgacctgtcacgcaatctgctcgagtgcgtcccagattgggcatgtgaggctaagaaaattgaagtgctcgacgtttcttacaacttgctgacagaggttccggtgagaatactgtcaagcttatctctgaggaaactgatgttgggccataaccatgttcagaacctgccaacgttggtcgagcacatccctcttgaggtgctggacttacagcacaacgcactgactagattgcccgacaccttattctcaaaggcactcaatttgcggtatcttaacgcttccgcaaactctcttgagagcctcccttctgcttgtactggagaggagtccctctctatgcttcagctcctttacctgaccaataatctgctgacagaccagtgcattcctgtgctggtgggtcatctccaccttagaatcctgcatcttgccaacaaccagctgcaaacgttcccagctagcaagctgaataaactggaacagctcgaagagttaaatctgtctggtaacaagcttaaaaccatcccaactaccatcgcaaattgtaaacgattgcataccctggtggcccatagcaacaatattagcattttccctgagatcctccaactgcctcagatacagtttgtcgatctttcttgtaatgatctaaccgaaatcctcattcctgaagccttgccagcaaccttgcaggacttagaccttacaggtaacacgaacctggtgttggaacataagactttagacattttttcacatatcactacacttaagatcgatcagaagcctcttccaacgactgactctactgtaacctcaacgttttggagccacggcttggccgagatggccggccagcgtaacaaactgtgcgtgtctgctctggctatggactccttcgccgaaggcgttggagcagtctacggaatgtttgatggcgaccgtaatgaggagctgccacgcctgctgcaatgcaccatggcagatgtcctactggaagaagtccagcaatccaccaatgatacagtttttatggcgaatacatttttggtgtctcacagaaagctgggcatggctggccagaagctaggaagctccgcgctgctgtgctatattcgaccagacaccgccgatcctgcatcttccttctccttgactgtggctaatgttggcacatgtcaggcggttctgtgccgcggaggaaaacccgtgccactgtccaaggtcttctctttagaacaggacccagaggaggcccagagagtcaaagatcaaaaagccattataactgaagacaataaggtgaatggcgtgacctgttgtacacgcatgttgggatgcacttatctgtacccctggatcctgcccaagccccatatctcttcaacacccctgacaatccaagatgagctgttgatactgggtaacaaggcactgtgggagcacctctcttatacagaggccgtaaacgctgttcggcatgttcaggatcccttagctgcagcaaaaaagctctgcaccctggctcagagttatggttgccaggataacgtgggggcgatggttgtgtatctgaacatcggcgaggagggctgcacttgcgaaatgaacggtctgaccttacctggcccagtgggtttcgcatctaccacaactataaaggacgccccaaagccagccacgccatcaagctcctctggcatcgccagcgagttttccagcgagatgagcacctccgaagtatccagcgaggtgggaagtacagcatccgacgaacacaacgcaggtggactggatacagccctgctgccacggcccgagaggcgatgttccctgcacccaacccccacgtctggcctgttccagcgtcaaccttcttccgctaccttcagtagtaaccagtctgataatggcctggactctgacgacgaccagcccgttgaaggggtgatcaccaatggcagcaaagtggaagtcgaagttgacattcactgttgcagagggcgcgatctggagaatagtccccctctgattgagtcctctcctacgctctgcagtgaggagcatgcccggggatcatgctttggaatacggcgtcaaaactctgtaaatagtggtatgctcctcccaatgtcgaaggaccgcatggagctccagaaatccccaagcacatcttgtctttacggcaaaaagctgtccaacggatccatcgtacctctagaagattcccttaatctgatcgaagttgcaactgaggttcccaaaagaaagacagggtatttcgcagcgccaacacagatggaaccagaggaccagttcgtggtgcctcatgacctggaggaggaggtgaaggagcaaatgaaacagcatcaagattcgcgtttagaacccgaaccgcatgaagaggaccgcactgaaccacccgaagaattcgacactgccttgtag

SEQ ID NO: 183780 - DNA, 2871 bp, Artificial Sequence
  derived and/or modified sequence
atgaagagaaatggctcacggaactgcctcaaccgtcgttcaaggttcggctccagagagcgggactggctgcgagaggacgtcaagcgggggtgcgtctatctgtacggagcagacacaacgacggccaccaccactacaacaacatcatcaagttcctcaagctccagtagctcttcggatctgcacttagttctctgcacggtggaaactcctgcctcagagatttgcgcaggagaaggcagagagagtctgtaccttcagcttcacggcgaccttgttcgccggttggagcctactgagcgcccactgcagatagtgtacgattacttgtcccggttaggcttcgatgatcccgttcgcatacaggaagaagccaccaaccctgatcttggctgtatgatacgattttacggcgagaaaccgtgccacatggatagactggaccgtatcctgctgagcggtatatataacgtgaggaaggggaaaacccagcttcataagtgggctgagcgcttagtcgtcctctgcggcacctgtctgatcgtgtcatctgtgaaggactgccaaaccggaaagatgcatattttgcctctggtcggagggaagatcgaagaggtcaagcggagacagtactctttagcctttagttcagctggtgcccaggcccaaacataccatgttagttttgagacgcttgctgagtatcagaggtggcaacggcaagccagtaaggttgtttcccagaggatcagtaccgtcgatctatcttgttactcactcgaggaagtgccagaacatctgttttacagtcaagatattacttacttaaatcttcgccacaatttcatgcagctggaacgcccgggaggccttgataccctatataaattctctcaactgaaaggactgaacctgagccacaacaagttaggtctgtttcccattctactgtgcgaaatatcaactctgacggaactgaacctgagttgcaatgggttccacgacctaccttcccagattggaaatctccttaacttacagactctgtgtctcgatgggaattttctgacaaccctcccggaggagctgggcaatttacagcagttgtcttccctgggtatctctttcaataacttctcccaaatacccgaggtgtacgagaaattaaccatgctggacagagttgtcatggcaggcaattgtctagaagtgctgaatcttggggtactgaaccgtatgaaccacatcaagcatgtcgaccttcgaatgaaccatctgaagactatggtaatcgagaatctggagggcaacaagcacatcactcacgttgacctgcgcgacaacagactgacagacttggatttgtctagcttgtgtagtctggaacaactgcattgtggccgaaatcaacttagggaactgacactctctgggttttccctgagaacgttatacgcatctagcaatcggctcaccgctgtcaatgtctatcccgtcccaagcctcctgacttttcttgacttatcccgaaatctgctcgaatgcgtgcctgattgggcatgcgaggccaaaaagatcgaggtattggacgtttcttataatctactcacagaagtgcccgtcaggatcctgtcctctctcagtctgagaaaactcatgttaggccacaatcacgtgcagaaccttccaactcttgtagaacacatccctcttgaggtgcttgatttgcagcacaatgctttgaccagactgcccgacacgctcttcagcaaggccttgaacttaaggtatctcaacgcctcagccaactcattagagagtctgccatctgcctgcactggcgaagagagtttatcgatgctgcagctcctttatctaactaacaatcttctcaccgaccagtgcataccggtcttggttggccaccttcacctgaggattttacacctggcgaacaaccagctgcagacgtttcccgcatccaaactgaacaaattagaacagctggaggagctgaatttgagtgggaataaattgaaaactatcccgactaccatcgcaaattgtaagcggcttcacactctggtcgcccattcgaacaacattagcatattcccggagatactgcagctgccacaaatccaatttgtggacttaagttgtaatgatctcacagagatactcattccggaggcgctcccagcaacattgcaggacttggacttgaccggcaacaccaacttggtgctggaacacaagacacttgatatattcagccatatcaccacactgaaaatcgaccagaagcctctcccgactaccgattctaccgtgacctccacattctggtcccacggcctcgctgagatggcaggccagcgtaataaattgtgcgtaagtgccttagcgatggattcttttgcagagggcgtgggggccgtgtatggaatgttcgacggtgaccggaatgaggagctgcctcgactcctccagtgcacaatggcagatgtgctgctggaggaggtccagcaatcgactaatgacaccgtgtttatggcgaatacctttctggtgagtcatcgaaaactggggatggcaggccaaaagttaggatcatccgctctgttatgttacatcagacccgacacagcagatccagcttccagtttttcgctaactgttgccaacgtaggaacttgccaggcagtgttgtgccgcggagggaaaccagtgcctctatccaaggttttcagtctggaacaggaccccgaggaggcccagcgggtaaaggaccagaaggcgataatcactgagaactgggtgctgaaccagaagcatttacaagacttccccggggaagataaatag

SEQ ID NO: 183781 - DNA, 3972 bp, Artificial Sequence
  derived and/or modified sequence
atgaagcggaacggcagtaggaattgccttaatcgccgcagccggtttggctcacgggaaagggattggcttagggaggacgtgaagaggggttgtgtctatttgtacggtgcggacacaactacagctaccactaccaccactacatccagtagttcttctagctcctcatcatcttcagacttgcatttggttctgtgcactgtagaaacccctgcttccgaaatctgcgcaggtgagggtagggagtctttgtacttgcagctacatggagatctcgttcgtcggttagagcccactgaaaggccgctacaaattgtatacgactatctgtcacgcttgggattcgatgatccagtaagaattcaagaggaggccacgaatccagatctgggatgtatgatccgcttctatggtgagaaaccgtgccatatggacaggctggaccgaatcctgctaagtggcatatataatgttcgcaagggaaaaacccagctgcataaatgggccgagagacttgtggtactctgtggcacgtgtctcattgtatcctcagtgaaggattgtcagaccgggaagatgcacatactgccattggtcggcggtaagattgaagaagtcaaacgcaggcagtactcgctggctttctcatccgccggggcacaggctcagacctatcatgtgagctttgaaactttggccgagtaccagagatggcaacgccaggcctcaaaagtggtctcccagaggattagcacagtcgacctgtcctgttacagcctcgaggaagtcccggagcaccttttctatagtcaggacataacttacctaaacttgcggcacaatttcatgcagctcgagcggccaggaggcttagatactctttataagttctcccagttgaaaggccttaatctttcccataacaaacttggtctgttccccattctactctgcgagatatcaaccctgaccgagctgaacctatcgtgtaacggattccacgatctgccatcgcagattggaaaccttctgaatttgcaaaccctgtgcctggatggaaactttctcactacattacctgaagagttggggaatttgcagcagctctcaagtctcggtatctcctttaataatttcagtcaaattcctgaggtttacgagaagttaactatgcttgacagggtcgtgatggccggcaactgtttagaagtgttgaacttgggcgtactcaatcgcatgaaccacattaaacacgtagatctccgaatgaaccacctcaaaacgatggtgatagagaacttagaaggcaataaacacatcacacacgtcgatttgcgagataatcggcttacagacttggatctcagcagcctgtgctctctagaacagttacactgtggccgcaaccagctgagagagctgacgctgagtggatttagcctcagaactctgtacgcttccagtaataggttaactgccgtgaatgtttaccctgtgccctccctgctcaccttcctggacctgtctcgaaacttactcgagtgcgtgccagactgggcatgtgaggctaagaaaatcgaagtgctcgacgtgtcatacaatttgttaacagaagtacccgtccgaatcctatccagcctctccctacggaagctcatgctgggtcacaaccacgtgcagaatctgcctactctggtggaacatatcccccttgaagtgctcgacctccaacacaatgctcttacccgattgcccgataccctctttagtaaagccctgaatttgcggtatctcaacgcatccgcaaactcccttgagtcactgccctctgcctgtactggggaggagagcctgtcaatgctgcagctgctgtatttaaccaataacctgctaaccgaccaatgcattcctgtgctcgtgggccatcttcatctgcgcattctacacctggctaacaatcaactgcagacgtttcccgcctcgaaactgaacaagctggaacagctggaggagttgaatctgtcaggtaataaactaaagactataccaactacaatcgctaactgcaagcgattgcatactctcgtggctcatagtaacaatattagcatatttcccgagatcctccagctaccccagatccagtttgtcgatctttcatgtaacgatctaacagaaattttaattccggaggctctccctgctaccctgcaggaccttgacttgacaggtaacacaaacctcgtcttagagcataaaacccttgacatcttctcccatattacgacgctcaagattgaccaaaagccgctgcctacgactgacagcaccgtgacctctaccttttggtcccatggcctcgccgagatggccggccaacgcaacaaactgtgtgtctcagcgctggctatggatagcttcgccgagggggtgggtgccgtgtacgggatgtttgatggcgaccggaatgaggagctgcctcggttattgcagtgtacaatggccgacgtcctgctggaagaagtgcaacagagcactaacgatacggtgtttatggctaacacttttctagtctcgcacaggaaactcgggatggcgggtcagaaactgggatcttcagcacttctctgttacattaggcctgatacagctgatccggcttcttctttcagtctgacggtggctaatgtaggaacttgtcaggcagtgctatgcagggggggtaagccggtccccctgtccaaagtgttttcattggaacaagatccagaagaagcacagcgggtaaaagaccagaaggccataattacagaggataacaaagtgaacggagtgacatgctgcacaaggatgctcgggtgtacatacctgtatccatggattctccccaagcctcacatcagctctacaccactgactatccaggatgagttgctgattttgggcaacaaagccctctgggaacacttgtcctataccgaggccgtgaacgccgttcggcacgtccaggaccccctggcggcagccaaaaaattgtgcacattagcacaatcatatggttgccaggacaatgtgggggccatggtggtgtatctgaatattggggaagagggatgcacctgtgaaatgaatgggctaaccttaccaggaccagtcggtttcgctagcaccacaaccattaaggacgctcctaagcctgcaaccccaagctcttcttcaggcatcgcctctgagttcagttcagagatgtcaacctctgaagtgtcgagtgaagtggggagtactgcttcagatgaacataacgcaggcggcttagacacggccctactgcctcgtccagaaaggcgctgtagcttacatcctacccccacctctgggcttttccagcgacaacctagttcagcaaccttttcctcaaatcagtcagacaatgggctcgattctgacgacgatcagcctgtggagggtgtgatcactaacgggtcgaaggtcgaggtggaagtagacattcattgctgccgagggcgcgatttagagaattcaccacctttgatcgaatccagcccaacactgtgcagcgaagagcatgcacgcgggtcatgcttcggcatcagaagacagaactcggtgaacagcggaatgctcctaccgatgagtaaggatcgcatggaactgcagaagtccccttcaacctcctgcctgtatggaaaaaagttgtccaacggctccattgtgcctctggaagattctctgaatttaattgaggtagccaccgaagtgccaaagcgcaagacggggtacttcgcggcacctacccagatggaaccagaggatcagttcgtagtgccgcatgatctggaggaggaggtgaaagaacagatgaagcagcaccaggattcccgactggagcccgaacctcacgaagaagatcgcaccgaaccccctgaggaatttgataccgccctgtag

SEQ ID NO: 183782 - DNA, 2379 bp, Artificial Sequence
  derived and/or modified sequence
atgcacatcctgcccctggtgggcggcaagattgaggaggtgaagaggcggcagtacagcctggccttcagcagcgctggggcccaggcccagacctaccacgtgtcctttgagaccctggccgagtaccagcgctggcagaggcaggccagcaaggtggtgtcccagaggatcagcacagtggacctgagctgctacagcctggaggaggtgcctgagcacctgttctacagccaggacatcacctacctgaacctgcggcacaacttcatgcagctggagaggcctgggggcctggacaccctgtacaagttcagccagctgaagggcctgaacctgagccacaacaagctgggcctcttccccatcctgctgtgtgagatcagcaccctgacagagctgaacctgagctgcaatggcttccatgacctgcccagccagatcggcaacctgctgaacctgcagaccctgtgcctggatggcaacttcctgaccaccctgcctgaggagctgggcaacctgcagcagctgagcagcctgggcatctccttcaacaacttcagccagatccctgaggtgtatgagaagctgaccatgctggacagagtggtgatggccggcaactgcctggaggtgctgaacctgggcgtgctgaacaggatgaaccacatcaagcacgtggacctgaggatgaaccacctgaagaccatggtgattgagaacctggagggcaacaagcacatcacccacgtggacctgcgggacaaccggctgacagacctggacctgagcagcctgtgcagcctggagcagctgcactgcggcaggaaccagctgcgggagctgaccctgagcggcttcagcctgcggaccctgtatgccagcagcaaccggctgacagctgtgaatgtgtaccctgtgcccagcctgctgaccttcctggacctgagcaggaacctgctggagtgtgtgcctgactgggcctgtgaggccaagaagattgaggtgctggatgtgtcctacaacctgctgacagaggtgcctgtgcgcatcctgagcagcctgagcctgaggaagctgatgctgggccacaaccacgtgcagaacctgcccaccctggtggagcacatccccctggaggtgctggacctgcagcacaatgccctgacccggctgcctgacaccctcttcagcaaggccctgaacctgcgctacctgaatgccagcgccaacagcctggagagcctgcccagcgcctgcacaggagaggagagcctgtccatgctgcagctgctgtacctgaccaacaacctgctgacagaccagtgcatccctgtgctggtgggccacctgcacctgcgcatcctgcacctggccaacaaccagctgcagaccttccctgccagcaagctgaacaagctggagcagctggaggagctgaacctgagcggcaacaagctgaagaccatccccaccaccatcgccaactgcaagaggctgcacaccctggtggcccacagcaacaacatcagcatcttccctgagatcctgcagctgccccagatccagtttgtggacctgagctgcaatgacctgacagagatcctgatccctgaggccctgcctgccaccctgcaggacctggacctgactggaaacaccaacctggtgctggagcacaagaccctggacatcttcagccacatcaccaccctgaagattgaccagaagcccctgcccaccacagacagcacagtgaccagcaccttctggagccacggcctggccgagatggccggccagaggaacaagctgtgtgtgtctgccctggccatggacagctttgctgagggcgtgggcgctgtgtatggcatgtttgatggagacagaaatgaggagctgccccggctgctgcagtgcaccatggctgatgtgctgctggaggaggtgcagcagagcaccaatgacacagtgttcatggccaacaccttcctggtgagccacaggaagctgggcatggccggccagaagctgggcagcagcgccctgctgtgctacatccggccagacacagctgaccctgccagcagcttcagcctgactgtggccaacgtgggcacctgccaggccgtgctgtgccggggcggcaagcctgtgcccctgagcaaggtgttcagcctggagcaggaccctgaggaggcccagagggtgaaggaccagaaggccatcatcacagaggtgcctgaggacctgaaggagttccagaccacagacatccctgtgcaccactgcaacttccgggctgtgctgggctgcctgtgcagcgcctctgtgctgggcagctatgccggccctgccccccgctggaggagaacatag

SEQ ID NO: 183783 - DNA, 3972 bp, Artificial Sequence
  derived and/or modified sequence
atgaagagaaatggcagcaggaactgcctgaacagaagaagccgcttcggcagccgggagcgggactggctgcgggaggatgtgaagaggggctgtgtgtacctgtatggagctgacaccaccacagccaccaccaccaccaccaccagcagcagcagcagcagcagcagcagcagcagtgacctgcacctggtgctgtgcaccgtggagaccccagccagcgagatctgtgccggggagggccgggagagcctgtacctgcagctgcacggggacctggtgcggcggctggagcccacagagcggcccctgcagatcgtgtatgactacctgagccggctgggctttgatgatcctgtgcgcatccaggaggaggccaccaacccagacctgggctgcatgatccgcttctacggggagaagccctgccacatggaccggctggaccgcatcctgctgagcggcatctacaacgtgaggaagggcaagacccagctgcacaagtgggccgagcggctggtggtgctgtgtggcacctgcctgattgtgtcctctgtgaaggactgccagacaggcaagatgcacatcctgcccctggtgggcggcaagattgaggaggtgaagaggcggcagtacagcctggccttcagcagcgctggggcccaggcccagacctaccacgtgtcctttgagaccctggccgagtaccagcgctggcagaggcaggccagcaaggtggtgtcccagaggatcagcacagtggacctgagctgctacagcctggaggaggtgcctgagcacctgttctacagccaggacatcacctacctgaacctgcggcacaacttcatgcagctggagaggcctgggggcctggacaccctgtacaagttcagccagctgaagggcctgaacctgagccacaacaagctgggcctcttccccatcctgctgtgtgagatcagcaccctgacagagctgaacctgagctgcaatggcttccatgacctgcccagccagatcggcaacctgctgaacctgcagaccctgtgcctggatggcaacttcctgaccaccctgcctgaggagctgggcaacctgcagcagctgagcagcctgggcatctccttcaacaacttcagccagatccctgaggtgtatgagaagctgaccatgctggacagagtggtgatggccggcaactgcctggaggtgctgaacctgggcgtgctgaacaggatgaaccacatcaagcacgtggacctgaggatgaaccacctgaagaccatggtgattgagaacctggagggcaacaagcacatcacccacgtggacctgcgggacaaccggctgacagacctggacctgagcagcctgtgcagcctggagcagctgcactgcggcaggaaccagctgcgggagctgaccctgagcggcttcagcctgcggaccctgtatgccagcagcaaccggctgacagctgtgaatgtgtaccctgtgcccagcctgctgaccttcctggacctgagcaggaacctgctggagtgtgtgcctgactgggcctgtgaggccaagaagattgaggtgctggatgtgtcctacaacctgctgacagaggtgcctgtgcgcatcctgagcagcctgagcctgaggaagctgatgctgggccacaaccacgtgcagaacctgcccaccctggtggagcacatccccctggaggtgctggacctgcagcacaatgccctgacccggctgcctgacaccctcttcagcaaggccctgaacctgcgctacctgaatgccagcgccaacagcctggagagcctgcccagcgcctgcaccggggaggagagcctgtccatgctgcagctgctgtacctgaccaacaacctgctgacagaccagtgcatccctgtgctggtgggccacctgcacctgcgcatcctgcacctggccaacaaccagctgcagaccttccctgccagcaagctgaacaagctggagcagctggaggagctgaacctgagcggcaacaagctgaagaccatccccaccaccatcgccaactgcaagaggctgcacaccctggtggcccacagcaacaacatcagcatcttccctgagatcctgcagctgccccagatccagtttgtggacctgagctgcaatgacctgacagagatcctgatccctgaggccctgcctgccaccctgcaggacctggacctgaccggcaacaccaacctggtgctggagcacaagaccctggacatcttcagccacatcaccaccctgaagattgaccagaagcccctgcccaccacagacagcacagtgaccagcaccttctggagccacggcctggccgagatggccggccagaggaacaagctgtgtgtgtctgccctggccatggacagctttgctgagggcgtgggcgctgtgtatggcatgtttgatggagacagaaatgaggagctgccccggctgctgcagtgcaccatggctgatgtgctgctggaggaggtgcagcagagcaccaatgacaccgtcttcatggccaacaccttcctggtgagccacaggaagctgggcatggccggccagaagctgggcagcagcgccctgctgtgctacatccggccagacacagctgaccctgccagcagcttcagcctgactgtggccaacgtgggcacctgccaggccgtgctgtgccggggcggcaagcctgtgcccctgagcaaggtgttcagcctggagcaggaccctgaggaggcccagagggtgaaggaccagaaggccatcatcacagaggacaacaaggtgaatggagtgacctgctgcaccaggatgctgggctgcacctacctgtacccctggatcctgcccaagccccacatcagcagcacccccctgaccatccaggatgagctgctgatcctgggcaacaaggccctgtgggagcacctgagctacacagaggccgtgaatgctgtgcgccacgtgcaggaccccctggccgccgccaagaagctgtgcaccctggcccagagctatggctgccaggacaacgtgggcgccatggtggtgtacctgaacattggagaggagggctgcacctgtgagatgaatggcctgaccctgcccggccctgtgggctttgccagcaccaccaccatcaaggatgcccccaagccagccacccccagcagcagcagcggcatcgccagcgagttcagcagcgagatgagcaccagcgaggtgtcctctgaggtgggcagcacagccagtgatgagcacaatgccggcggcctggacacagccctgctgcccaggcctgagcggcgctgcagcctgcaccccacccccaccagcggcctcttccagaggcagcccagcagcgccaccttcagcagcaaccagagcgacaatggcctggacagtgatgatgaccagcctgtggagggcgtcatcaccaacggcagcaaggtggaggtggaggtggacatccactgctgccggggccgggacctggagaacagccccccactcatcgagagcagccccaccctgtgcagcgaggagcacgcccggggcagctgcttcggcatccggcggcagaacagcgtgaacagcggcatgctgctgcccatgagcaaggacaggatggagctgcagaagagccccagcaccagctgcctgtatggcaagaagctgagcaatggcagcatcgtgcccctggaggacagcctgaacctgattgaggtggccacagaggtgcccaagaggaagacaggctactttgctgcccccacccagatggagcctgaggaccagtttgtggtgccccatgacctggaggaggaggtgaaggagcagatgaagcagcaccaggacagccggctggagcctgagccccatgaggaggacagaacagagcccccagaggagtttgacacagccctgtag

SEQ ID NO: 183784 - DNA, 2871 bp, Artificial Sequence
  derived and/or modified sequence
atgaagagaaatggcagcaggaactgcctgaacagaagaagccgcttcggcagccgggagcgggactggctgcgggaggatgtgaagaggggctgtgtgtacctgtatggagctgacaccaccacagccaccaccaccaccaccaccagcagcagcagcagcagcagcagcagcagcagtgacctgcacctggtgctgtgcaccgtggagaccccagccagcgagatctgtgccggggagggccgggagagcctgtacctgcagctgcacggggacctggtgcggcggctggagcccacagagcggcccctgcagatcgtgtatgactacctgagccggctgggctttgatgatcctgtgcgcatccaggaggaggccaccaacccagacctgggctgcatgatccgcttctacggggagaagccctgccacatggaccggctggaccgcatcctgctgagcggcatctacaacgtgaggaagggcaagacccagctgcacaagtgggccgagcggctggtggtgctgtgtggcacctgcctgattgtgtcctctgtgaaggactgccagacaggcaagatgcacatcctgcccctggtgggcggcaagattgaggaggtgaagaggcggcagtacagcctggccttcagcagcgctggggcccaggcccagacctaccacgtgtcctttgagaccctggccgagtaccagcgctggcagaggcaggccagcaaggtggtgtcccagaggatcagcacagtggacctgagctgctacagcctggaggaggtgcctgagcacctgttctacagccaggacatcacctacctgaacctgcggcacaacttcatgcagctggagaggcctgggggcctggacaccctgtacaagttcagccagctgaagggcctgaacctgagccacaacaagctgggcctcttccccatcctgctgtgtgagatcagcaccctgacagagctgaacctgagctgcaatggcttccatgacctgcccagccagatcggcaacctgctgaacctgcagaccctgtgcctggatggcaacttcctgaccaccctgcctgaggagctgggcaacctgcagcagctgagcagcctgggcatctccttcaacaacttcagccagatccctgaggtgtatgagaagctgaccatgctggacagagtggtgatggccggcaactgcctggaggtgctgaacctgggcgtgctgaacaggatgaaccacatcaagcacgtggacctgaggatgaaccacctgaagaccatggtgattgagaacctggagggcaacaagcacatcacccacgtggacctgcgggacaaccggctgacagacctggacctgagcagcctgtgcagcctggagcagctgcactgcggcaggaaccagctgcgggagctgaccctgagcggcttcagcctgcggaccctgtatgccagcagcaaccggctgacagctgtgaatgtgtaccctgtgcccagcctgctgaccttcctggacctgagcaggaacctgctggagtgtgtgcctgactgggcctgtgaggccaagaagattgaggtgctggatgtgtcctacaacctgctgacagaggtgcctgtgcgcatcctgagcagcctgagcctgaggaagctgatgctgggccacaaccacgtgcagaacctgcccaccctggtggagcacatccccctggaggtgctggacctgcagcacaatgccctgacccggctgcctgacaccctcttcagcaaggccctgaacctgcgctacctgaatgccagcgccaacagcctggagagcctgcccagcgcctgcaccggggaggagagcctgtccatgctgcagctgctgtacctgaccaacaacctgctgacagaccagtgcatccctgtgctggtgggccacctgcacctgcgcatcctgcacctggccaacaaccagctgcagaccttccctgccagcaagctgaacaagctggagcagctggaggagctgaacctgagcggcaacaagctgaagaccatccccaccaccatcgccaactgcaagaggctgcacaccctggtggcccacagcaacaacatcagcatcttccctgagatcctgcagctgccccagatccagtttgtggacctgagctgcaatgacctgacagagatcctgatccctgaggccctgcctgccaccctgcaggacctggacctgaccggcaacaccaacctggtgctggagcacaagaccctggacatcttcagccacatcaccaccctgaagattgaccagaagcccctgcccaccacagacagcacagtgaccagcaccttctggagccacggcctggccgagatggccggccagaggaacaagctgtgtgtgtctgccctggccatggacagctttgctgagggcgtgggcgctgtgtatggcatgtttgatggagacagaaatgaggagctgccccggctgctgcagtgcaccatggctgatgtgctgctggaggaggtgcagcagagcaccaatgacaccgtcttcatggccaacaccttcctggtgagccacaggaagctgggcatggccggccagaagctgggcagcagcgccctgctgtgctacatccggccagacacagctgaccctgccagcagcttcagcctgactgtggccaacgtgggcacctgccaggccgtgctgtgccggggcggcaagcctgtgcccctgagcaaggtgttcagcctggagcaggaccctgaggaggcccagagggtgaaggaccagaaggccatcatcacagagaactgggtgctgaaccagaagcacctgcaggacttccctggagaggacaagtag

SEQ ID NO: 183785 - DNA, 2379 bp, Artificial Sequence
  derived and/or modified sequence
atgcacatcctgcccctggtgggcggcaagatcgaggaggtgaagcgacgccaatattccctggcatttagctctgccggtgcccaggcccagacataccatgtcagctttgagacgctggccgaataccaacgatggcagcgccaagcatctaaggtcgtctcccagcgtatcagcacagtggacctgagttgctatagcctggaggaagttcctgagcacttgttctattcccaagacattacttaccttaacttacgccataatttcatgcaattggagcggccaggagggctcgatacgctatataagtttagtcagctcaaaggcctcaaccttagccacaacaagctgggactgttcccaattctcctctgtgaaataagcaccctcaccgaattaaacctgtcctgtaacggatttcatgacctgccaagtcagattggcaacttgctgaacctgcagaccctctgtcttgacgggaacttcctcaccacactgcccgaggaactgggcaacctgcaacagctctcctctctgggaatttcatttaacaacttctctcagatccccgaggtgtacgaaaagctaacgatgctggatagagtggtgatggccgggaactgtctggaagtgctgaacttaggtgtcctcaatcgcatgaatcatattaaacacgtggacctgagaatgaatcaccttaaaactatggtgatcgaaaatcttgagggcaataagcacattactcatgtagacctgcgagataacagactgactgacctcgacctttcttcactgtgcagtctggagcaacttcactgtgggaggaatcaattacgggagctgaccctttctggcttttcccttagaaccctgtacgcctcctctaacagactgacagccgtgaacgtgtacccagtcccgtcgctgttaacttttctcgatctctcgagaaatctcctggagtgtgtccctgactgggcatgtgaagccaagaaaatagaagttctcgatgtctcctacaacctgctgacagaggtgcctgtaagaattctgagtagtctttcactccgcaagctgatgctgggacataatcacgtgcaaaatttacccaccctggtggaacacatcccgttggaagtactcgatttgcagcataatgccctgacccgcctccccgacaccctgttctcaaaggcccttaacttacggtatcttaacgccagtgccaatagcctcgaaagccttccatccgcttgtacgggagaggagtcattatctatgctgcagctactgtacctcacaaacaacctgttaactgatcagtgcatccctgtgttggtggggcacttgcatctcagaatcctgcatctcgccaacaaccagctgcagacatttcccgcctctaagcttaacaagcttgagcagctggaggagctcaacctgtctggcaacaaattgaagaccataccaactactattgccaattgcaagcgacttcacaccctggtcgcgcactcaaataatattagtatcttccctgaaatcctccaactcccgcaaatccagttcgtggaccttagctgtaatgatctgactgaaattctaattcctgaagcactaccagccacactccaggatctggaccttactggaaatacaaatctagttttggagcataaaacactggacatctttagccacattaccacactgaagatcgaccaaaaaccgctgcctaccaccgacagtactgtgacaagcaccttttggagtcacggtttagctgaaatggccggccagaggaataagctgtgtgtctcagccttagcgatggacagttttgctgagggggttggagcagtgtatggaatgttcgacggggacaggaatgaggaactcccccggctgctgcaatgtactatggcggacgtgctcctggaggaggtgcagcagagcacaaatgacactgtgttcatggcgaatacattcctggttagccaccggaaactaggaatggcaggacagaaactggggagttctgcattgttgtgttacattcgacctgacaccgctgatccagcgagttcattttcattaacagtagccaacgtggggacctgccaggctgtcctgtgtcggggggggaaacccgtgcctctgtccaaagtcttctccttagagcaggatccagaagaggctcagcgcgtcaaagaccagaaagccattattacagaggttcccgaggatttgaaggaatttcaaaccacagacataccggttcaccattgcaactttcgggcagtgctgggttgtttgtgcagcgcgagtgttctcggcagttacgccggtccggcgcctaggtggcgtcgcacttag

SEQ ID NO: 183786 - DNA, 3972 bp, Artificial Sequence
  derived and/or modified sequence
atgaagcggaacggcagccggaactgcctgaaccggcggagccggtttggatctagggagagggactggcttagagaagatgtgaagcgagggtgcgtgtacttatacggagcagataccacaactgcaacgacgacgaccaccactagctctagctccagtagcagttctagttcgtccgatcttcacctggtgctttgcactgtggagacacccgcctccgagatctgtgccggagagggacgcgaaagcctctaccttcagctccacggggatctagtgagacgtctcgagccaaccgaacgcccgctgcaaatagtttatgactacctgtctagacttggcttcgacgatcccgtacgaattcaagaagaagcgactaatcccgacctcgggtgtatgattcgcttctatggggagaagccttgtcacatggatcgacttgacagaatcctcctttctggtatctacaatgttagaaagggcaaaacgcagcttcacaagtgggctgagaggctggtggttctgtgcggtacctgcctaattgtttcatctgtaaaggattgccagactggcaagatgcatatattaccacttgtggggggcaagatcgaagaagtcaaaagacgtcagtatagtttagcatttagctctgcaggtgcccaggctcagacgtatcacgtttcctttgaaactctggccgaataccaaagatggcagagacaggcaagcaaagttgtcagccaacgaatctctacagtggacctgtcatgctatagcctagaggaggttccagaacatctgttttactcccaagatattacctacctgaacctgagacataactttatgcagctcgaacgtcccggaggcctcgacaccctgtacaaattttcccagctgaaaggactgaacttgtctcacaacaaactggggctttttcctatattactgtgcgaaatcagtaccctcactgagctgaacctgagctgcaacggtttccatgacctgccatcacagatcgggaatcttctcaatctgcagaccctgtgcctggatggtaatttcctgactaccttgccggaggaactgggaaatcttcaacaactgtcctcactcggcatcagctttaacaattttagccagattcccgaggtgtatgagaaactgacgatgctggaccgagtcgtaatggccggcaactgtttagaagtgttgaatctgggcgttctcaataggatgaatcatatcaagcatgtcgatctccggatgaaccatctcaagacaatggtaattgaaaacctggagggcaataagcacataactcatgttgacctgcgtgacaataggttgactgatctggacctctcaagcttgtgcagcctggaacagctgcattgtggaagaaaccagctgagagaactcaccttatccggattctctctccgaacgctttatgcctctagtaatcgtctcactgctgtgaacgtatacccggttccatcccttttgacctttctcgatctcagccgaaacctcctggagtgcgttcctgactgggcttgcgaggctaaaaaaatagaggtccttgatgtgtcttacaatctgttaacagaagtgcctgtgaggatcctgagctctctgtcactcaggaagctgatgctagggcataatcatgttcagaatttgccaaccctggtggaacatatcccccttgaggtcctggacctgcagcataatgccctcacccggcttccggacaccctcttctccaaggccctgaacctccgctatttgaacgctagtgcgaactctctggagagtctgccttcagcttgcactggcgaggagagtctcagtatgttacaactactttatctgactaataatctgcttaccgatcagtgcattcctgtgctggtcggacacctccaccttcgcattttgcacctggctaataaccaactgcaaacatttcccgcttctaaactgaacaaactggagcaacttgaagagctcaacctgagcgggaacaagctaaagactattccaaccaccattgctaattgcaaaagactacacacgctagtcgcacactccaacaatatttctatattccccgagattctgcaacttccccaaattcagtttgtggacctaagctgcaatgatctaactgaaattctgatcccagaggctctccctgcaaccctgcaggacctcgacctcacggggaacacaaatctggtgcttgagcacaagactctggatattttcagtcacatcaccaccctaaaaatcgaccaaaaacccctcccaactacagattctactgtgaccagcaccttctggtctcacggccttgctgagatggctgggcaacggaataaactatgcgttagcgccctggcaatggacagtttcgctgagggagtcggcgctgtgtatggaatgtttgatggtgacagaaacgaggagctgccacgactgctccagtgtactatggccgacgtgttgctggaggaagtccagcaatccactaacgataccgtgttcatggctaataccttcctggtgagtcatcggaagctggggatggctggacagaagcttggttcttcggcccttttgtgttacatccggcctgacaccgcagatccagcatctagtttttctctgaccgtggctaacgtaggcacgtgtcaggccgtgctttgcagggggggcaagccagttcccctgtcaaaagtgttttccttggaacaggaccccgaggaagcccagagagtcaaggaccagaaggcaatcattaccgaggataacaaggttaatggggttacctgctgtactcgcatgttaggttgcacatatctgtatccttggatcctgccaaaacctcacatcagctcgactcccctgacaatacaagacgagctgctgatcttgggcaacaaagcattatgggaacacctgtcttacaccgaggccgttaacgccgttaggcacgttcaagaccctctggcggctgccaaaaagctgtgtacgctggcacaaagctatggatgccaagataacgtgggtgctatggtggtgtatctgaacataggtgaggagggctgtacctgtgagatgaacggccttacgttacctggaccagtaggcttcgcatccaccactacaatcaaggatgcccccaaacccgctactccaagtagcagttccggcatagccagtgaattttcatctgagatgtccacaagcgaggtgtcctccgaagtgggaagcactgcttcagacgagcataacgccggcggcctggatactgcgctcctgccaaggcccgaacgccgttgctccctgcaccccactccaactagtggcttgttccaaaggcagccctcttcagcaacattctcctcgaatcaatctgataacgggttagatagtgacgacgatcagcctgtggaaggggtgattacgaatggttccaaagtggaggtggaagtggacatccactgctgccgcggccgcgatctcgagaattcgcctcctctgattgagagctccccgaccctctgtagtgaggagcatgcacgcggctcctgcttcggaattagacggcagaactccgtgaacagcggcatgctgctccctatgagcaaggaccgcatggagttacagaagtctccaagcacaagctgtctgtatgggaagaaactatcaaatgggagcattgtgcccctggaagactccctgaacctcatcgaggtggcaaccgaagttccaaaaagaaagacaggatacttcgcagccccaacccagatggaacccgaggaccagtttgtggtccctcacgatctggaagaggaggtgaaagagcagatgaaacaacatcaagactcccggttggaacctgagcctcacgaagaagaccgaaccgagcccccagaagaatttgacacagccctgtag

SEQ ID NO: 183787 - DNA, 2871 bp, Artificial Sequence
  derived and/or modified sequence
atgaagcggaacggcagccggaactgcctgaaccggcggagccggtttggctctcgtgaacgtgattggctgcgagaagatgttaaaagagggtgtgtgtatttatatggggctgacacaactacagcaaccacgaccactacaacttcctcctccagcagcagcagctcatcgagcagcgatctgcaccttgtgctatgcactgtcgagacccctgccagcgagatatgcgcaggcgagggtagggagtcactatatttgcaattgcacggggacctggtgaggcggctcgaaccaacggaaagacccctgcagattgtttacgattacctcagccgccttggcttcgatgatcctgttaggatccaggaggaagccacaaatcctgacctggggtgcatgatccgattttacggtgagaaaccatgtcacatggaccgcctggacaggattttgctgtccggcatttacaacgtgagaaagggcaagacacaactgcataagtgggccgaaaggctcgttgtcctctgtggaacctgcctcattgtgagcagcgtgaaagactgtcaaacgggcaagatgcacattctacccctggttggtggtaaaattgaagaggtaaagcgaagacagtatagtctggccttctccagtgcaggagcgcaggcccagacctatcacgtcagcttcgagacactcgctgagtaccagcgttggcagcgccaggcgtccaaggtcgtgtcccagcggattagtactgttgacctcagctgctattcactggaagaggtgcccgaacacctattttactcccaggacattacctacctgaaccttcgccataatttcatgcaactggaaagacctggggggctggacactttgtacaaattctcacaacttaagggcctgaatctgagtcataacaaactgggcctgtttcccattcttttatgcgagatctccacacttaccgagctaaacttgagctgcaatggcttccacgatcttccgtctcagatcggtaacctactaaatctccaaactctatgcctagatgggaatttcttgaccacactgcccgaagaacttgggaatctgcagcaacttagttcgctgggcatatcctttaataactttagccagattcctgaggtgtacgagaagctcaccatgctcgatcgagtcgtcatggccggcaattgcttggaggtccttaacctgggggtcctaaacagaatgaaccacataaagcacgttgatttgcggatgaatcacctgaaaactatggtgattgaaaatctggaaggaaacaaacacatcacacatgtcgatctgagagacaatcgccttacagacttggatctaagcagcctctgctccctggaacagctgcactgtggcaggaaccagctgcgagaactgaccttgagtgggttttctctgcgaaccctgtacgcctctagcaacaggctgaccgccgtgaacgtgtacccagttccttctctgttgaccttccttgatctttcccgcaacttgctggaatgtgtgcccgattgggcatgtgaggccaaaaagattgaggtcctcgatgtcagttataacctcctgaccgaggtgcccgtgcggatcctgagctctctctctcttagaaaactcatgctgggccacaaccacgtccagaacttacccactctggtagagcacatccccctggaagtgctggatttgcagcataacgcattgaccaggttgcctgataccctcttttctaaggctctcaacctccgttaccttaacgcctcagcaaacagcttagagtcattgcctagcgcctgtacaggtgaagaatccctcagcatgctccagttactgtacctgaccaataacttgctcaccgatcagtgtatccccgtgctagtcggccacctccatttgagaatcttacacctagctaataatcagttgcagactttcccagccagcaaactcaataaactggaacagctggaggagttgaacctgagcggaaacaaactcaagacaattcccactactatcgccaactgtaagcggctccacactctagttgcgcactctaacaatatatccatttttcctgagatcctacaactgccccagatccagtttgtagatctgagctgtaacgacctcaccgaaatactcatccctgaggccttgccagctaccctgcaggacttggatctgaccggcaataccaatctggtcttggaacacaaaaccttagatatcttctctcacattactacgcttaagatagatcagaagcctcttccaaccaccgacagtaccgtcacctcaacattctggagccacggtctggccgaaatggctggacagaggaataagctttgcgtgagcgctctggctatggatagcttcgcggaaggggtgggagccgtgtatggaatgttcgatggcgacagaaacgaggaactccccaggttgcttcaatgtaccatggctgatgtgttgctcgaggaggtgcagcaatctacaaatgacacagtttttatggccaacaccttcctcgtgtcacatcgcaagctgggaatggccggacagaagttggggtcttctgcactcttgtgctatattagacctgacaccgccgatccggcctcaagcttttccttgacggtggccaatgtagggacctgtcaggccgtgttgtgccgcggtggcaagccagtcccactgagcaaagttttttctctggagcaggaccctgaggaggcacaaagggtgaaagatcaaaaagctattattaccgagaactgggtgctgaaccagaagcatctgcaggacttccccggtgaagacaagtag

SEQ ID NO: 183788 - DNA, 3972 bp, Artificial Sequence
  derived and/or modified sequence
atgaagcggaacggcagccggaactgcctgaaccggcggagccggtttggctcacgcgagagggactggcttcgggaggacgtgaagcgcgggtgtgtgtatctttacggcgccgatacgactaccgcaaccactacgacaacaacctcatcatcttcgagctcatcctcctcatcttccgatctccatttggttctgtgtacggtagagacacccgcctcagagatttgcgcaggcgagggtcgggagtccctgtatctgcagttacacggagacctggtgaggcgccttgagccaaccgagcggccactccagattgtatatgattaccttagtagactggggtttgacgatcccgtgcgaatccaagaggaagctaccaatccagatctggggtgcatgattcgcttttacggggaaaaaccttgccacatggacagactggaccgcatactgctgtctggtatttacaatgtgcggaagggaaaaacccaactgcataaatgggccgagcgactggtggtgctctgtggcacttgtctgatcgtgtcttctgttaaagattgccagaccgggaagatgcatatcctgcctttagtaggagggaagatcgaagaggttaagcggaggcagtattccctggctttctcttccgccggtgcacaggctcagacttaccacgtgtccttcgagactctagcagagtaccaaagatggcaaagacaggcttcgaaagtggtaagccaaaggatcagtactgttgacctcagctgctattctttggaggaggtgccagaacatttgttttatagccaagatatcacctacctcaacctgagacataattttatgcagctagagcgtcccgggggacttgacactctctataagttcagtcagcttaaaggcttgaacctgtcacataacaagctgggtctttttccaattctgctttgcgaaatcagcactctgacagaattgaatctgagttgtaatggttttcatgacttgccttcacagatagggaatctactaaacctgcagacactgtgcctggacggcaatttcctcaccacccttccggaagagcttggcaacttgcagcagttaagctcactgggaatatcctttaataatttctctcagattcccgaagtgtacgaaaaactgactatgctggatcgggttgtgatggccgggaattgtttagaggtactcaatctgggggtgctgaacaggatgaaccacatcaagcacgttgatctccggatgaaccacctcaagactatggtcattgaaaacctggaaggaaataagcacattacccacgtggacctccgcgataacagactgacggacctcgaccttagttcattgtgctcccttgaacagttgcactgcgggagaaaccagttgagagagctgaccctttcaggattctccctgaggactctgtacgcctcttcaaataggctcacagcggtcaatgtttatcctgtgccaagtcttttaactttcctggatctcagtcgcaacctgttggagtgtgtgccagattgggcctgtgaagctaaaaagattgaagttttggatgtcagttacaacttattaacagaggtccctgtcagaattctgtcctcactttcacttcggaagctgatgttaggacacaaccacgtgcagaacctgcccactctagtggaacacatacctctggaagtattggatctgcagcacaacgctctcacccggctccccgacaccttgttctctaaggctctgaatctgaggtacctcaacgcttccgccaatagcctcgaatctctgcccagcgcttgtaccggcgaagaatcactctccatgctgcagctactgtaccttactaacaatctcctcactgaccagtgtattcccgtgctggtagggcacctacacctccggatactgcatctggctaacaatcaactacagacattcccagccagcaaactcaataagctggagcagctggaagagctgaatctgagcgggaacaagttgaaaaccatcccaaccaccattgccaactgcaagaggttacataccctggtagctcatagcaacaacatctccattttcccggagattctccagctgcctcagatccagttcgttgacctgagttgcaatgatcttacagaaattctcatcccagaggcccttcccgcgactttacaggacctcgacctgacaggcaacactaatctggtgctagaacataagacactggatattttctcccacatcaccacgttgaaaatcgatcagaaaccactccctacaacagatagcacggtgaccagtacattctggagtcacgggctggctgagatggcgggtcagcgcaacaagctttgcgtgtctgccctggccatggattcatttgccgaaggagtgggcgcggtctatggcatgtttgacggggaccgcaatgaggaacttccgcggttgctacagtgcaccatggccgacgtcctgctggaagaagtccagcaatccaccaacgatactgtgttcatggctaacaccttcttggtcagccaccggaagcttggtatggctggtcagaaactgggatcatctgctttgctgtgctacatacgcccggacaccgccgatcccgcctcgagcttctcacttacagtggctaacgtcggtacgtgccaggcagtgctttgccggggcggtaagcctgtacctctgtctaaagtgtttagcttggagcaagacccagaggaagcacagagagttaaagaccagaaagcaattattactgaggacaacaaggtgaatggtgtcacctgttgcacgaggatgctcgggtgcacgtatctgtacccctggatcttgcccaagcctcacattagcagtactcctctaaccatacaggacgaactcctcatcttggggaacaaagctctttgggaacacctgtcttacactgaggcagtaaatgctgtgcgccatgtgcaagacccactcgccgctgcaaagaagctttgcacacttgcacagtcgtacgggtgccaggataacgtcggggctatggtggtgtatctgaacatcggcgaggagggctgcacctgtgaaatgaatggtctgacccttcccggtcctgtcgggttcgcctctacaacgactataaaagatgcccctaagccagcaaccccaagtagtagttctggtattgcctctgagttctccagcgaaatgtcaacatccgaggtgtcatccgaagtcggttcgacagctagcgacgagcataacgcaggagggttggataccgctctcctgccacgccccgagaggcggtgctctctccacccaaccccgacttcgggtcttttccagagacagccgtcaagcgcgaccttctcctccaaccagagtgataacggcctcgacagcgacgatgatcagcccgtcgagggggtcatcacgaacggttcgaaggttgaagtcgaagtcgacatccattgctgtcgagggagggaccttgaaaatagcccgccactgatagagtcaagtccaactctttgctctgaagaacacgctcgcgggagctgcttcggaatcagaaggcagaattccgtgaacagtggtatgctgctgcccatgtctaaagaccgcatggagctacaaaagtctccctcgacaagttgtttatacgggaaaaagctctcaaacgggtctattgtgcctctggaagactcactgaatctcatcgaggtggctacagaagtccccaaacgcaaaactggctacttcgctgcaccaacccagatggagccagaagaccagtttgtggtaccccacgatctggaagaagaggtgaaagagcagatgaaacagcatcaggatagtcgactggagcctgagccacacgaggaggatcgcacagagccacccgaggaattcgacaccgccctctag

SEQ ID NO: 183789 - DNA, 2379 bp, Artificial Sequence
  derived and/or modified sequence
atgcacatcctgcccctggtcggcggaaaaattgaagaggtcaagagaagacagtacagcctagctttcagctcagctggagcacaggctcaaacataccatgtgtccttcgagaccctggctgagtaccagaggtggcagcgtcaagcaagcaaagtggtgtcccagcggattagtaccgtggacctgtcctgttattctcttgaggaagtgcctgaacacctcttttacagtcaagatatcacatacctcaacctgcgtcacaattttatgcaattggagaggccgggaggattggatactctgtataagttctcacagctgaagggcctcaacttgagccacaataagctcggtctcttcccaatactgttgtgcgagattagtacactaaccgagctgaacctgtcctgtaacggcttccacgacttacccagccaaattggtaacctgcttaatctgcagaccctgtgcctggacggcaatttcttaactacacttccagaggaactggggaatctgcaacagctgtcttccctcgggatctcctttaataacttcagtcagatccctgaggtttatgagaaactaacgatgctggaccgggtggtgatggcaggtaattgcctcgaagtgcttaacctgggtgtcctgaacaggatgaatcacattaaacacgtagacctgagaatgaaccacttgaaaactatggttatcgaaaacttagaggggaataagcacattacacatgtggatctgcgagacaaccgcttgaccgatctcgatctgtcctccctctgctccctcgagcaactgcactgcggacgaaaccagcttagagaactgaccctgagcggcttctccctgcggaccctctacgcctctagtaatcgacttactgccgtcaacgtctatccggtgccatccctgctcaccttcctggatctttcacgcaacctgctggagtgcgtgcccgattgggcttgtgaagctaagaaaatcgaggttctagatgtttcctataacctcctaactgaagtccccgtgcgcatactcagcagtttgagcttgcgaaagctgatgttggggcacaatcacgtgcagaacctgccaaccctcgtcgaacatattcccctggaggtcctcgatctgcagcacaatgcactgacccggcttcctgatactttgttctccaaagccctcaacctgagatacctgaatgccagcgcaaactcattggagtcactcccatctgcttgtacaggagaggaatcacttagcatgctacagctactgtacctcactaacaacctactgactgaccaatgcataccggtcctggtgggacacctccacctgcgaatcctgcacctggccaacaaccagctccagacgttcccagcgtccaagctgaacaaactggaacagctggaggaattaaatctttcggggaacaagctcaagacgatccctacaacaattgcgaattgtaagcgtttacacaccttagtggcacacagcaataacatcagcattttcccagaaattcttcagctaccacagattcagttcgtcgatctgtcctgcaatgacctcactgaaattctgattcccgaggctctgcctgcaaccttacaggatctggaccttaccggtaacaccaatctcgttctagagcacaagaccttagacatatttagtcacattactaccctgaaaatcgaccaaaagcccctccccacaactgacagcactgtcacctctaccttctggagccacggactggctgaaatggcgggacagagaaacaaattgtgcgtttctgcattggccatggatagctttgccgaaggggttggggctgtttatggcatgttcgatggagaccggaatgaagaactgcctaggctgctccaatgtaccatggccgacgtgctcctggaggaggtacaacagagcaccaacgacactgtgtttatggctaacaccttcctggtttctcatcgcaagctgggcatggcgggtcagaagctgggctcgtctgcactcctgtgctatattcgccctgacactgctgacccggcatcaagctttagcctgactgtggctaacgttggaacttgtcaggcagtactgtgcaggggaggcaagcccgtgccgctgtccaaagtgttcagtcttgagcaagatccggaggaagcccagcgagttaaggaccaaaaggcaatcatcaccgaggtacccgaggatctcaaagagttccaaactactgatatccccgtgcatcactgtaattttagggccgtgcttggttgcttgtgtagcgcatccgtgcttggctcctacgcaggaccagccccaaggtggagaagaacgtag

SEQ ID NO: 183790 - DNA, 3972 bp, Artificial Sequence
  derived and/or modified sequence
atgaagcggaatggttcacggaattgtctgaaccgacggtcacgcttcggcagtagggaaagagactggctcagggaagacgtaaagcggggatgtgtctacttgtacggcgctgacacaacaacggccaccactacaacaactacaagctcatcaagcagctcctcttccagttccagcgacctgcacttagtcttatgcaccgtcgagacccccgcatcagagatttgtgccggtgaaggaagggagtcactgtatctacagctgcacggagacctggtgaggagactggagccaaccgagagacccctgcagatcgtttacgactacctgtccagactgggctttgacgaccctgtcaggattcaggaagaggcaacaaatccagacctggggtgcatgatccgcttctatggtgagaagccttgtcacatggatcgactggatcggattttgctctcagggatttataacgtcaggaaaggcaaaacacagctacacaagtgggcagagcggctagtggtgttatgtgggacatgcctcatagtgtcttccgtcaaggactgtcagacaggaaaaatgcacattctgcccctggtcgggggaaaaatagaggaggtgaagcgtcgccagtactctttagccttttcatccgctggggctcaggctcagacgtatcacgtatccttcgaaacactggccgagtatcagcgctggcagcgtcaagctagcaaggtggttagccagagaatctccaccgtggacctctcatgttacagcctggaagaggtgcccgagcacttgttctatagccaggacatcacttacctgaatttgcgccataattttatgcagttagaaagacctggaggtctagacactctttacaagttctctcagctgaaaggcctcaatctctctcataataaacttgggttgtttccgatcctgttatgcgaaattagcactttgacagaactgaatttgtcttgcaacgggtttcatgacctgccttcccaaattggtaacttgctcaatctgcagacactttgtttggacggcaacttcttgaccaccctcccagaggaactggggaatctccagcagctgtcttccttgggcatttcattcaacaatttctcccagattccggaggtgtacgagaaactcaccatgttggatcgggtagtcatggcgggaaactgtttggaagttcttaatctgggcgtgttgaacaggatgaaccacatcaagcacgtagatctgcgaatgaaccatcttaagaccatggtgatcgaaaacctggaagggaacaagcatattacccatgtcgaccttagggacaacagactgacagatcttgatctgagctccctgtgcagtttggaacagttgcattgcgggagaaaccaactcagagagttaaccttatctggcttctccctgcggaccttgtacgctagtagcaacagattaaccgccgtgaacgtataccctgttccatccctgctgactttcctcgatctgtccagaaaccttctcgagtgcgtcccagattgggcatgcgaggctaaaaagatagaggtgctggatgtctcttacaacctcctgaccgaagtgcccgtgaggatcttgtcaagtctgtctcttcgcaaactcatgttagggcacaatcacgtgcagaacctgcccaccctagtggagcacatccctctggaggtcctcgatctacaacacaacgcgctgacgcgccttcccgacacactgttttcgaaagccctcaacctgcgatatctcaatgctagtgcgaactcattagagtctctgccttcagcctgtactggggaagaatcgctgtcgatgcttcagctcttgtatttgacaaataacctgcttaccgaccagtgtattcctgttctggtgggccatcttcatctcagaattttgcatctagcgaacaaccagctgcagacgtttccagcaagtaaactcaataagctggagcaattggaagagctcaacctatccggaaacaagcttaaaaccatcccaacgaccatcgctaactgcaaacggttgcacaccctggtcgcccacagcaacaatatcagtatctttccagagatcctgcagctgccacaaatacagttcgtggacctgagctgtaatgacctgacagaaattctgatcccagaggctctgccggctaccctgcaggacctcgacttaactggcaacactaacctggtgttagaacataaaacacttgacatcttctcccacatcaccaccttaaagattgatcagaagccattaccaaccactgacagtacagtgacttctacattctggtcccacgggttggccgagatggcgggtcagcggaacaagctatgcgtgagtgccctcgctatggattcattcgccgaaggcgttggggcagtgtacggcatgttcgatggagatagaaatgaagaactacccagactgcttcagtgcacgatggcagacgtgctgctcgaagaggtgcaacagagtacgaacgataccgtcttcatggctaacactttcctggtctcacatagaaagttgggtatggcagggcaaaagctcgggagtagcgccctcctctgctacatccggcctgataccgccgatcccgcttcttcattcagcctgaccgtggctaatgtcggtacttgtcaagctgtcctgtgcagaggaggcaaaccagtacccctgtcaaaggtcttctctctggaacaggacccggaggaagcacagcgggtgaaagatcaaaaagcgatcatcaccgaagataacaaagtcaacggggtgacctgctgtacacggatgctggggtgcacttacttgtacccttggattttgcctaaaccacacatctcatctacaccgctgaccatccaggacgagctcctgatactgggcaataaggctttgtgggagcatttgtcctacacagaggccgtgaatgcagttcgacacgtgcaggaccctctggcggctgctaagaaactatgtactcttgcgcagagttatggatgtcaggacaatgtcggcgcaatggttgtgtatctgaacattggcgaagagggatgcacatgcgaaatgaacgggttaactttgccgggaccagtgggctttgcttccacaactaccatcaaagacgctcctaagcccgcaaccccttcatcctcaagcggcatcgcgagtgagttctcttcggagatgtcaactagcgaggtgtcatccgaggttggctctacagcaagcgacgagcataatgcaggaggcctcgacaccgctttgttaccccgtcctgaaagaaggtgtagcctccaccccacgcctacctccggtttattccagcggcaaccctcttcagccaccttttcttctaatcagtccgacaacggactcgattctgacgacgaccaacccgtggagggtgtgatcacgaatggcagcaaggtggaggtggaggttgatatacactgttgtcgtgggcgagacctggaaaacagtcctcctctgatcgagagcagtccgacgctgtgttctgaggagcatgccagaggcagctgttttggaatccgaagacagaacagtgtgaacagcggcatgctgttgccaatgagcaaagaccggatggagctgcagaaatccccctccacaagctgcctttatgggaaaaagctgtccaacggttctatcgtccccctggaggacagtctcaatctgattgaagttgccaccgaagtgcccaagcggaagacgggttatttcgctgcccctactcagatggagccagaagaccagtttgtggtcccgcacgatttggaggaggaagtaaaagaacagatgaaacagcaccaagatagtcggttggagcctgagcctcatgaagaagatagaactgagcctccggaagaatttgacacagcgctctag

SEQ ID NO: 183791 - DNA, 2871 bp, Artificial Sequence
  derived and/or modified sequence
atgaaacgcaatggtagccgaaattgtctcaatcggagatccaggttcggcagccgcgagcgggactggctgcgtgaggatgtcaaaagaggatgtgtctacttgtatggggcagacactacgacggctactaccactactacgacgagtagcagttcctcatcctcgagctcgtccagtgatttgcacttagtactgtgcacagtcgagacacccgcttcggaaatctgcgctggggaaggacgagaatctctttatcttcaactccatggcgacctagtgcggcgactggagcccacagagcgaccgttgcagatagtttacgactatttaagtaggctgggcttcgatgaccctgttcggattcaagaggaagctacaaaccccgacctgggatgcatgatccgcttctacggcgagaagccatgccacatggatcggcttgatcggatactgctttccggcatatacaatgtccgtaaagggaaaacacagctgcataaatgggcggagcggctggtggttctctgcggcacatgcttaattgtctcttcagtcaaggactgccagacaggtaagatgcatatcctgcccctggtcggcggaaagattgaggaggtcaagcgacgccagtatagcctcgcgtttagttccgcaggcgctcaggctcagacatatcacgtgtctttcgaaactctcgcagagtatcagcgctggcagcggcaggccagcaaggtcgtgtctcagaggattagcacagtggacttaagttgctactccctggaggaggtgccggaacatctgttctactcacaagatattacatatctgaatctgcgccacaacttcatgcagctcgaacgccctgggggtcttgacaccttgtataagttttcgcagttgaagggactgaatctgagccacaacaaacttggcctgtttcctattctgctgtgcgaaatctcgactctgaccgaactaaatctgtcttgcaacggtttccacgatttaccatctcaaatcggtaacctgctgaacttgcaaacgctgtgtctggatgggaatttcctgaccactctaccagaggagctaggcaacctgcagcagctctcttcactcggcatcagcttcaacaatttcagtcagattccggaagtatacgaaaagctgaccatgcttgaccgcgttgtgatggcaggaaactgcctggaggtacttaacctgggagtactgaatcggatgaaccatatcaaacacgtagacctgcgcatgaatcatctcaagactatggttattgaaaacctcgagggaaacaaacacataacgcacgtggatcttcgcgataaccgcctcactgacctggatctctcatccttgtgtagtttggaacagctccattgcggccgaaatcagttgcgtgagttgaccctgtcgggcttttctctgagaacactctatgcatcttccaatcggctgaccgctgtcaacgtttatccggtcccttctctcttgaccttccttgatttaagtcggaacctgctggagtgtgtgccagactgggcgtgtgaggccaaaaagatagaggttttggatgtgagttataacttgctgaccgaagtacctgtacgcatcctaagcagtctgtcccttcggaagttaatgctgggacacaaccatgtgcagaacttacccacgctggtggagcatatacctctggaggtcctcgacctgcagcataatgcactaacccgacttccagatactctattcagtaaagctctgaacctgagatacctgaatgcttcagccaactcattggaatctctgcctagtgcctgcacaggggaggagtccctgtccatgctgcagctcttgtatttgacaaacaacctcttaaccgatcagtgtatccccgtactggttgggcatctgcacctccgcatcctgcacctcgctaacaaccagctacaaacctttcccgctagcaaactcaacaaactcgagcagctcgaagagctgaacctcagtggcaacaagctcaaaacaatcccgactacaattgcaaactgcaagagacttcataccctcgtagctcactcaaataatatcagtattttccccgagatcctgcaactcccccagatacaatttgttgacctgagctgcaatgatttgaccgagatcctcatccccgaggccttaccagccaccctccaggatctggacctcacgggtaacactaacttagtgctggagcacaagactctggacattttttcccatatcaccactctcaagattgaccaaaagcccttaccaacaacggattcgacagtgacctccaccttttggtcccacgggctagccgaaatggctggacaaaggaataagctctgtgtaagcgcattggcgatggactcttttgcagagggcgtgggcgcagtgtatgggatgttcgatggtgacaggaacgaggagcttccacgactcctgcagtgtactatggcagacgtcctgctcgaagaagtccaacagagcactaatgacactgtgtttatggcaaacacttttttggtgtctcacaggaagctaggcatggctgggcagaagctgggatctagcgcgctcctgtgctatattcggcctgataccgctgaccccgcaagttcattcagtctcaccgtcgccaatgtggggacatgtcaggcagtactatgcaggggtggcaagccggttcctttgagcaaagtgttcagcctggaacaagatcccgaggaggcccagagagtaaaggaccagaaggcgatcatcacggaaaattgggtcttgaatcagaaacacctccaggattttcccggagaggataaatag

SEQ ID NO: 183792 - DNA, 3972 bp, Artificial Sequence
  derived and/or modified sequence
atgaagagaaacggatcaagaaattgcttgaatagacggtctagatttggcagcagggaaagggactggctcagagaggatgttaagcgtggctgcgtctatttgtacggcgcagacacgactaccgccacaaccacaaccacaacgagtagtagctcttctagctccagctcttcgtcagacttgcatcttgtgctctgcacggtcgaaactcccgctagtgaaatctgcgctggagaaggacgtgagtcactgtatcttcagctgcacggagatctcgtacgccgattggagccaaccgaacggcctttacagattgtgtacgattatctctcccggttaggcttcgacgaccctgtgcgcatacaggaggaagccacgaatcctgatttggggtgtatgataaggttctacggcgagaaaccatgtcacatggatcgtctagataggatcttactcagcgggatctacaacgttcggaaaggcaagacacagctgcacaagtgggcagagcggttggtggtgctttgtggaacatgcctgattgtctcttcggttaaggattgccaaacaggcaagatgcacattctgccactggtgggagggaaaatcgaagaggtcaagcgcaggcagtatagcctcgccttcagcagcgcgggagctcaggctcagacataccatgtgagtttcgagaccctggcggagtatcagcgatggcagcggcaggcaagtaaagtggtgtctcagaggatctccacagtggacctgtcatgctatagtctcgaggaagttcccgagcacttgttctatagccaggatataacatacctgaacctgagacacaactttatgcagttggaacgcccaggcggactggataccctgtacaaattctctcagctgaagggcctcaatctaagccataataagcttggcctctttccgatattactttgtgagatttcgactctgacagaacttaatctgagctgtaatggcttccacgatttacccagccaaatcggcaacctcctcaacctgcaaactttatgcctggacggcaattttctgaccactctcccggaggagctcggcaatctccagcagctctccagcctggggatttctttcaataatttttcccagattccagaagtgtacgaaaaactaacgatgctggatcgagtggtgatggctggaaactgtctggaagtactgaatcttggagttctgaaccgaatgaaccatattaaacacgtggatctgagaatgaaccacctcaagacgatggtcattgaaaacctagaaggtaacaagcatataacccatgtggacctgcgcgacaatcgacttacagacttggacctgtcctctctgtgctccctagaacaactccactgcggacgcaaccagcttcgggagctgaccctctccgggttttcactccggacattgtacgcctcatcaaaccggctgacagcggtgaacgtgtacccagttccgtcgctgcttacctttttggacctgtcacgtaatctgctggagtgcgtgcccgactgggcatgtgaggccaaaaaaatcgaagttctagacgttagctataatctactcaccgaagtccctgttcggatcctgtccagtctcagtctcagaaaactcatgttgggccataatcacgttcagaacctgcccactctcgttgagcatattcctctggaagtgcttgatctgcagcataatgccttaacccgcctgcctgacactctgttctccaaagcactcaatctaagatacctcaatgcctctgctaatagtctcgaatctctcccatccgcctgtactggagaagagtcacttagcatgctgcagttactatacttgactaacaacctgttgactgaccagtgtatccccgtgctggtggggcacttgcaccttcgaattctgcatctcgccaataaccaattgcagaccttccctgcgagcaaactgaacaagctcgagcagctcgaggagctgaacctatcaggaaataagttgaagactatccccacgacaattgcaaactgcaagcgccttcacacactggtggcccactcaaataacatttcaattttccctgagattctgcagttaccccagattcagttcgtggacctcagttgtaatgaccttaccgaaattctgattcccgaagcattgcccgctaccctccaggacctggacctgacgggcaatactaatttagtgctggaacacaagacactggatattttttcccacattactaccctcaagatcgaccaaaagccactcccaacaacggattccacggtcaccagcaccttttggtctcatggacttgcagagatggctggccagagaaataagctttgtgtatctgccctggcaatggacagctttgctgagggcgtgggcgcagtgtatggaatgttcgatggggataggaacgaggagcttcccagattgctgcaatgcaccatggccgatgtgttactcgaagaggttcaacagtccaccaacgacactgtcttcatggctaacacatttctcgtatcccatcgtaaactgggcatggccggacagaaactgggtagctccgcactgctgtgttacattcgccctgacaccgccgatcccgctagttccttctctctcacagtagccaatgtaggaacctgccaggctgtgctgtgtagaggcggtaagcctgttccgctgagcaaggtgttctctctggagcaggacccagaagaagctcagcgagttaaagatcaaaaggccattatcactgaagacaacaaggtgaatggggtgacctgttgtacgcgcatgcttggatgcacatacctgtacccatggattctgcctaagccccacattagctccactcccctaactatccaagatgagctccttatcctgggtaacaaggccctgtgggagcatctcagctataccgaggccgtgaacgctgtgaggcatgtccaggaccccctggccgcagctaaaaagctttgcacccttgcccagtcatatgggtgccaggacaacgtcggcgcaatggttgtgtacttaaacatcggagaggaggggtgtacctgtgaaatgaatggtctgaccctccccggtcccgtgggatttgcgagcaccactaccatcaaagatgcaccaaaaccagccacaccctcttcatcttccggtattgcgtcagaatttagtagtgaaatgagcacttctgaagtttctagtgaagtgggttcaactgctagcgatgagcataatgccggaggtttagacaccgctctccttccaaggccggaaaggagatgctcacttcacccaacaccaacctccgggctgttccagcggcaacccagcagcgctaccttctccagtaaccaaagtgataatggcctcgactctgatgatgaccagcccgtggaaggcgtgattaccaatggatcaaaggttgaagtggaggtggatatacactgttgtagggggagagacttagagaattctcctccattgattgaatcctcgccaaccttgtgtagtgaagagcatgcacggggtagctgcttcggtatccgcaggcagaactcagttaattccggcatgctgctacccatgtctaaggatcgtatggaactgcagaagtccccgtctacctcctgcctttacgggaaaaagctgtctaatggcagtattgttcccctggaggattcgctgaatttaatagaggtggccaccgaggtacccaagcggaaaacgggctatttcgcagcacctacacaaatggagcccgaagaccagttcgtggtaccacacgatttagaagaagaagtcaaggagcagatgaagcagcatcaggattctcgcctcgagcctgagcctcacgaggaagaccgcacggaacctccagaggagtttgacacagccctctag

SEQ ID NO: 183793 - DNA, 2964 bp, Artificial Sequence
  derived and/or modified sequence
agaaatatgaaacgcaatgggagcagaaattgtttgaataggagaagtaggtttggttctcgagaaagagactggctaagagaagatgtaaagagaggctgtgtttacctttatggagcagacactaccactgccactacaaccaccaccacctcctcttcctcttcctcctcctcctcttcctctgacttacatctcgtcctttgcactgtagagacaccagcatcagaaatatgtgctggagagggaagagaaagtctttatttacagcttcatggagacctggtcaggagactggaacctactgaacgacctcttcagatcgtttatgattacttatccaggctgggatttgatgatcctgtgcgcatacaggaggaggctacaaatcctgacctcggctgtatgattcgattttatggtgaaaaaccatgccacatggatcgtttggatcgaatcctattgtctggcatctataatgtacgcaagggaaagacccagctgcataagtgggctgagcgcctagttgtcctctgtggtacctgccttatcgtttcctcagtgaaggattgtcaaactggaaagatgcacattttgcctctggttggtggaaagatagaagaagtgaagcgacggcaatactcccttgctttcagctcagcaggagcccaagctcagacctatcatgtcagcttcgagactttggccgagtaccagcgatggcaacggcaagcatccaaggtggtgtcccagcgaatcagtaccgtggatctctcgtgttacagcctcgaggaggttcctgagcatctcttctatagtcaagatattacctacctcaacttgcgacacaacttcatgcagttagaaagacccggaggcctcgatacactctacaaattttctcaactgaagggcctgaacttgtcccataataaacttgggttgtttcctatattgttatgcgagatctctaccctgactgagctcaacctttcctgtaatggatttcatgacctaccaagtcaaattggcaatctgctaaatcttcaaaccctctgtcttgatggcaactttctgactactttacctgaagaattgggaaatctacaacagctttcctccttgggaatttccttcaacaactttagtcaaattcctgaggtttatgagaaactcactatgttagatagagtggttatggcaggaaattgcctggaagtcctgaacttaggggtgctgaataggatgaaccatatcaagcatgtggatttaaggatgaaccatttgaaaaccatggttattgaaaatctggagggaaataaacacatcacccacgtggatctgcgggacaaccgactgactgacttggatcttagctccttatgcagcttggaacagctgcactgtgggcggaatcagctgagggagctaacactcagtggcttttcccttcggaccctctatgccagttccaacaggctgacagcagtgaacgtctatccagtacccagcctgctcactttcttggatctctcccgaaacctgctagagtgtgtccctgactgggcctgtgaagcaaagaagatagaagtattagatgtgagctataatcttctcacagaggttcccgtgagaattctgagtagcttgagtcttagaaaactgatgctgggacacaatcatgtgcaaaaccttccaacactggtagagcacatccccctcgaggtgctggatcttcagcataatgcactcacgaggctgccagacaccctcttctccaaggccttaaatctcagatacttgaatgcatctgcaaatagtctggagtctttaccatccgcctgcactggagaggagagtttgagtatgctgcagctgctttatctgaccaacaatctcctgacggatcagtgcatacctgtcctggtagggcacctgcacctgcgaatcttgcaccttgcaaacaatcagttacagacctttcctgcaagcaaactaaataaattggagcaattggaggaactgaacctaagtggcaacaagcttaaaaccattcccacaaccatagcaaactgtaaaaggctgcacacccttgttgcacactccaacaacatcagcattttcccagaaatactgcagttgcctcagatccagtttgtagacctaagttgcaacgacttgacagaaatcctgattccagaggctttgcctgctacattacaagaccttgacctgactggaaatacaaatctggttctggaacacaagacactggacatatttagccatatcacaaccctgaaaattgatcagaaacctttgccaaccacagattctacagttacgtcaaccttctggagccatggactggctgagatggcagggcagagaaataagctgtgtgtctcagcacttgctatggatagctttgcagagggggtgggagctgtgtatggcatgtttgatggagaccgaaatgaggagctcccgcgcctgctgcagtgtacgatggcagatgtgcttttagaagaggtacagcagtcaactaatgacacagttttcatggctaacaccttcttggtatctcacaggaaattaggaatggctggccagaagttgggctcctccgctctcctgtgctacatccgccctgacactgccgatccagcaagtagctttagcttgactgtagccaatgttggcacgtgccaagcagtcctgtgccgaggtgggaagccagtgcccctctctaaagtcttcagcctggagcaggacccagaggaggctcaaagggtgaaggaccaaaaagccatcatcacagaggttccggaagatctcaaagagttccagaccacagatattccggtgcatcactgtaacttccgggctgttctcggctgcctttgtagcgcttctgttctcggtagctacgcagggccagcaccacgctggcgccgtacatga

SEQ ID NO: 183794 - DNA, 7919 bp, Artificial Sequence
  derived and/or modified sequence
agaaatatgaaacgcaatgggagcagaaattgtttgaataggagaagtaggtttggttctcgagaaagagactggctaagagaagatgtaaagagaggctgtgtttacctttatggagcagacactaccactgccactacaaccaccaccacctcctcttcctcttcctcctcctcctcttcctctgacttacatctcgtcctttgcactgtagagacaccagcatcagaaatatgtgctggagagggaagagaaagtctttatttacagcttcatggagacctggtcaggagactggaacctactgaacgacctcttcagatcgtttatgattacttatccaggctgggatttgatgatcctgtgcgcatacaggaggaggctacaaatcctgacctcggctgtatgattcgattttatggtgaaaaaccatgccacatggatcgtttggatcgaatcctattgtctggcatctataatgtacgcaagggaaagacccagctgcataagtgggctgagcgcctagttgtcctctgtggtacctgccttatcgtttcctcagtgaaggattgtcaaactggaaagatgcacattttgcctctggttggtggaaagatagaagaagtgaagcgacggcaatactcccttgctttcagctcagcaggagcccaagctcagacctatcatgtcagcttcgagactttggccgagtaccagcgatggcaacggcaagcatccaaggtggtgtcccagcgaatcagtaccgtggatctctcgtgttacagcctcgaggaggttcctgagcatctcttctatagtcaagatattacctacctcaacttgcgacacaacttcatgcagttagaaagacccggaggcctcgatacactctacaaattttctcaactgaagggcctgaacttgtcccataataaacttgggttgtttcctatattgttatgcgagatctctaccctgactgagctcaacctttcctgtaatggatttcatgacctaccaagtcaaattggcaatctgctaaatcttcaaaccctctgtcttgatggcaactttctgactactttacctgaagaattgggaaatctacaacagctttcctccttgggaatttccttcaacaactttagtcaaattcctgaggtttatgagaaactcactatgttagatagagtggttatggcaggaaattgcctggaagtcctgaacttaggggtgctgaataggatgaaccatatcaagcatgtggatttaaggatgaaccatttgaaaaccatggttattgaaaatctggagggaaataaacacatcacccacgtggatctgcgggacaaccgactgactgacttggatcttagctccttatgcagcttggaacagctgcactgtgggcggaatcagctgagggagctaacactcagtggcttttcccttcggaccctctatgccagttccaacaggctgacagcagtgaacgtctatccagtacccagcctgctcactttcttggatctctcccgaaacctgctagagtgtgtccctgactgggcctgtgaagcaaagaagatagaagtattagatgtgagctataatcttctcacagaggttcccgtgagaattctgagtagcttgagtcttagaaaactgatgctgggacacaatcatgtgcaaaaccttccaacactggtagagcacatccccctcgaggtgctggatcttcagcataatgcactcacgaggctgccagacaccctcttctccaaggccttaaatctcagatacttgaatgcatctgcaaatagtctggagtctttaccatccgcctgcactggagaggagagtttgagtatgctgcagctgctttatctgaccaacaatctcctgacggatcagtgcatacctgtcctggtagggcacctgcacctgcgaatcttgcaccttgcaaacaatcagttacagacctttcctgcaagcaaactaaataaattggagcaattggaggaactgaacctaagtggcaacaagcttaaaaccattcccacaaccatagcaaactgtaaaaggctgcacacccttgttgcacactccaacaacatcagcattttcccagaaatactgcagttgcctcagatccagtttgtagacctaagttgcaacgacttgacagaaatcctgattccagaggctttgcctgctacattacaagaccttgacctgactggaaatacaaatctggttctggaacacaagacactggacatatttagccatatcacaaccctgaaaattgatcagaaacctttgccaaccacagattctacagttacgtcaaccttctggagccatggactggctgagatggcagggcagagaaataagctgtgtgtctcagcacttgctatggatagctttgcagagggggtgggagctgtgtatggcatgtttgatggagaccgaaatgaggagctcccgcgcctgctgcagtgtacgatggcagatgtgcttttagaagaggtacagcagtcaactaatgacacagttttcatggctaacaccttcttggtatctcacaggaaattaggaatggctggccagaagttgggctcctccgctctcctgtgctacatccgccctgacactgccgatccagcaagtagctttagcttgactgtagccaatgttggcacgtgccaagcagtcctgtgccgaggtgggaagccagtgcccctctctaaagtcttcagcctggagcaggacccagaggaggctcaaagggtgaaggaccaaaaagccatcatcacagaggacaacaaagtgaatggggtaacctgctgtacccggatgctgggctgtacatacctctacccttggatcctccccaagccccacatatcttccactccgctgaccattcaagatgagttgctgattctgggaaacaaagcattgtgggaacacttgtcctacacagaagctgtcaatgctgtacgtcacgtacaagacccattagcagctgctaagaagctgtgcacattagcgcagagctatggctgtcaggacaatgtaggggcgatggtagtttatttgaatattggtgaggaaggctgcacttgtgaaatgaatgggctcaccctcccaggtcctgtgggatttgcttcaaccaccactatcaaggatgcccctaagccagccactccatcctctagcagtgggattgcctctgagttcagcagtgagatgtccacctcagaggtgagcagtgaagtggggtccactgcttctgatgagcataatgctgggggcctggacactgccttgcttccgaggccagagcggcgctgcagcctccacccaacacccacctctgggctgtttcagcgccagccttcttctgctaccttctccagtaaccagtctgacaacggcctggacagtgatgatgaccagcccgttgagggggtcataaccaatggcagcaaggtagaggtggaagtagacatccactgctgcagggggagggatctggagaactcaccccctctcatagagagttctcctaccctgtgttctgaggaacatgctagagggtcgtgttttgggatccgaagacagaacagtgtgaatagtggcatgctcctgccaatgagcaaggacaggatggagttacagaagtctccctccacctcctgcctctatgggaagaaactctccaatggctctattgtgcccctagaggacagcctgaacctcattgaagtggccacagaagtgcccaagaggaaaactggctattttgctgcccccactcagatggaaccagaggaccagtttgttgtgcctcatgacctggaagaagaagtgaaggaacaaatgaaacagcaccaggacagccggctcgagcctgagccccatgaagaggatcggaccgagcccccggaggagttcgacacagcactatgactgccccactgggcacagtgtgggaggaggctgtgcagggttggggtagggacttgctagaggcattctgcctctacatttctttttgtttgttcgttttttttttgtttgtttgttttgagacggagtcttgctcagtcgctcaggctggagtgcaatggtggggtctcgggtcactgcagcctctgtccctgggttcaagccattctcctgtctcagcctcccgagtagctgggattacaggcacctgccattatgcccggctaagttttattttttttttttagagacggggtttcaccatgttggccaggctggtgttgaactcttgacctcaggtgatccaccctcctctgcctcccaaagtgctgtgattacaggcctcagccaccatgcccagccctgcgtctacatttctaaaccatagctgtgtggggttgaactcggagccaaaaagtgtgagagccatcaggggctggctctggataaactggtagccactatcagtgttaagtttcacatttaacctgcattggaattcccaggggtactgggaagaaagcagctgttctgtatcagtcctaccacctgccattaaccctttctctcctaggatcattttgagaatttgcctgcctgggcaggaaagggactatttctgtggaggaaaaaagtgaagattgattctctttactagttgctgctgatggatctctgtgacagagaaatcaccttatctcagactaatggggtgtgatgtgactagtcacatggcttttcattcttctctacgagaatacagcctatcaaaatgatgtctgttggaaatgtagaaccaatcaaacagataatttatgtatgtaatgtaatgagagcacttttcattgactgtgaactttttatttttgaatctgcactcgagccaatcttcttagaggcagcccggcaccttcatccataggcagagagagaactgggtgttggagacttattcgagggtataggaagggccctgtgaagttgatttaacttttggatgtcagactgtgaaagctcctgagaaacttggggtaataggatcttcttttggggatgaaaatggggaaggcgtgaggacctagactacttctccctagatcagaaaaagagaattaccccttgacaaatatgatacctgctaggtatttcccagggaaatttagggattggcgtctttccctagcatgtggaggaattggcagacagcttcctaagggcggggagcgggggcccaaggctgacactgcttgcatccacgtgaccttaagttatggcagatgactctgaaacggactgaggccaatgagaacagatggatggagcactcaggttagacttgttccttctcctatgctggaggagagggatggttctctagaatgttggaggtgagttgagagctcgcctcttgaatgttgaacagtgtactcttctgaaaactgcatattcactttatgtggtttcagaatactgggctcaatactaacataagaaagacacttcattgagaaattcttaagcttacagaaaacctatactctttgcacattccacataaccctagcaaaatgcagtttcttcatacttctgtcactttttccattggaagatttgcttaggaaaattaattcctatttattcccacaaaatgttggcattgcttgattttacccaatggggaatgtgctttgaatttttggaacacttttacaattaaaaataaagtagggccatttttaatttgtttcatcagaaactatgttaaagagagggttaaatataaatatattttcgtgtgtatttttgggaagatttttgttcaaagcaatagtcaaaatcagatgacctgtccataataattatgtgtcttcatcttctcagaggccccatgctcatatgcacgtgtcattgggatacactcttgggggatttggtacactctaatggatgtctaatgttcaacccctcgagaatctgaacttgagtccccagattgtcaaactactggtcagctattgagaattttagaactcaggtctttgatttgaagtagggaacatagtggctcacacagagtttaggtgctgttagaaagatgggaacaagagtgttttgccaccttatttttatatgggaaattttttttaatgaagaaaaaatgaaaatgaaataacaggatgatagtgatgagtgatgtaaaacatcttacttagatggcagaaccttcgggttgtagaatagtgatgtctaaaaattaaagttattttgggaatacaccactttaatagtatagtcttataaaaattattcattatggtgaacccttcttgtctgctattcgtttcccaacctacttattggaaccacctcaaaacccagttctgaaatgaccttaccaaaagtaaatgtatttattttttagtcagcagaactctgtaattccaaatgttgttctgtgtggtagaattttttttcaggaaccattaggttgtattgaaaatctttgttataggcgataccaaaactgattattcttttttgcagtctgctttaattcatgtccttctgcagttgctctgtattaaaacagggtaaaaaggccatagcccattatgaaaaatataatacaaaactctttgacctatgaggtaacttacagacattgtgttttctaaacaggctgtcagtgaaagcccgtatctgtctccaggtgaatgtaatttacttccgagtactttacccagaggatgtgttccccaggtgggcagagtacagttgatctctagcacagacagagattctggcctctgcatattctcaggtctctgtgtgtacctcccattgagtagagaagcttaagataatttctgagagaagaacactgctgattgtgggagcagtttaggagtccatggaagaaagaaaaatacatgtgtcttggcagccatggtgtatttttgtccaaatggattggaaggatatttgaatatttgaatgttggtatgacataaagctgcagtgcactatagagtcaagtcattgaattaccactcctgatacagggctttattgtactactgtgaagtgtatgtgtgcaatacattggtgagttcatttactggtgtacggaagagccagcaggagcagcgtggtcattgctgggtgctattacagttgcttgtagtgagtgctgttttccaggagatggagccagttgggtgtggcagatctactgaatatcaaatgatgctcttcttcccatgtagaccttcagcaaaagccggtacttggaagccacaggctcaccttctctatctatccaataattattaatgaagagacctccataagggagcagctggctgttatcgataaatgtaccaattattaaataattagtctccaagccattcagtgatgtcttcagcatcactataggactgtctagtgtcactttttacttccttctgggtggaggctttccgactcccaatcatgaaggcaagttaatctttccagttagtgacttttgccccatagttggggtaagcacttcctagattgagaaaaagcagctacagtcaatcctgctctgtttgcctcatttggtgatcagtcagtcacacataagttccttgtattctaaatttcatgcacttctcccagatgctatagggttttctctcactgttgccagtggatgtcatccagacagtgggctcatatcttacggttttgtgcaatcattgtcgtattgtagtcttaagactcattatagtgtatttttgatatttttgaaatgtgttaaattttttaattcaataatatgagccagagcatgttgcagcaaatctattgtttgtaaaaataacaataacaataataaataaaataaagtggaa

SEQ ID NO: 183795 - DNA, 2877 bp, Artificial Sequence
  derived and/or modified sequence
agaaatatgaaacgcaatgggagcagaaattgtttgaataggagaagtaggtttggttctcgagaaagagactggctaagagaagatgtaaagagaggctgtgtttacctttatggagcagacactaccactgccactacaaccaccaccacctcctcttcctcttcctcctcctcctcttcctctgacttacatctcgtcctttgcactgtagagacaccagcatcagaaatatgtgctggagagggaagagaaagtctttatttacagcttcatggagacctggtcaggagactggaacctactgaacgacctcttcagatcgtttatgattacttatccaggctgggatttgatgatcctgtgcgcatacaggaggaggctacaaatcctgacctcggctgtatgattcgattttatggtgaaaaaccatgccacatggatcgtttggatcgaatcctattgtctggcatctataatgtacgcaagggaaagacccagctgcataagtgggctgagcgcctagttgtcctctgtggtacctgccttatcgtttcctcagtgaaggattgtcaaactggaaagatgcacattttgcctctggttggtggaaagatagaagaagtgaagcgacggcaatactcccttgctttcagctcagcaggagcccaagctcagacctatcatgtcagcttcgagactttggccgagtaccagcgatggcaacggcaagcatccaaggtggtgtcccagcgaatcagtaccgtggatctctcgtgttacagcctcgaggaggttcctgagcatctcttctatagtcaagatattacctacctcaacttgcgacacaacttcatgcagttagaaagacccggaggcctcgatacactctacaaattttctcaactgaagggcctgaacttgtcccataataaacttgggttgtttcctatattgttatgcgagatctctaccctgactgagctcaacctttcctgtaatggatttcatgacctaccaagtcaaattggcaatctgctaaatcttcaaaccctctgtcttgatggcaactttctgactactttacctgaagaattgggaaatctacaacagctttcctccttgggaatttccttcaacaactttagtcaaattcctgaggtttatgagaaactcactatgttagatagagtggttatggcaggaaattgcctggaagtcctgaacttaggggtgctgaataggatgaaccatatcaagcatgtggatttaaggatgaaccatttgaaaaccatggttattgaaaatctggagggaaataaacacatcacccacgtggatctgcgggacaaccgactgactgacttggatcttagctccttatgcagcttggaacagctgcactgtgggcggaatcagctgagggagctaacactcagtggcttttcccttcggaccctctatgccagttccaacaggctgacagcagtgaacgtctatccagtacccagcctgctcactttcttggatctctcccgaaacctgctagagtgtgtccctgactgggcctgtgaagcaaagaagatagaagtattagatgtgagctataatcttctcacagaggttcccgtgagaattctgagtagcttgagtcttagaaaactgatgctgggacacaatcatgtgcaaaaccttccaacactggtagagcacatccccctcgaggtgctggatcttcagcataatgcactcacgaggctgccagacaccctcttctccaaggccttaaatctcagatacttgaatgcatctgcaaatagtctggagtctttaccatccgcctgcactggagaggagagtttgagtatgctgcagctgctttatctgaccaacaatctcctgacggatcagtgcatacctgtcctggtagggcacctgcacctgcgaatcttgcaccttgcaaacaatcagttacagacctttcctgcaagcaaactaaataaattggagcaattggaggaactgaacctaagtggcaacaagcttaaaaccattcccacaaccatagcaaactgtaaaaggctgcacacccttgttgcacactccaacaacatcagcattttcccagaaatactgcagttgcctcagatccagtttgtagacctaagttgcaacgacttgacagaaatcctgattccagaggctttgcctgctacattacaagaccttgacctgactggaaatacaaatctggttctggaacacaagacactggacatatttagccatatcacaaccctgaaaattgatcagaaacctttgccaaccacagattctacagttacgtcaaccttctggagccatggactggctgagatggcagggcagagaaataagctgtgtgtctcagcacttgctatggatagctttgcagagggggtgggagctgtgtatggcatgtttgatggagaccgaaatgaggagctcccgcgcctgctgcagtgtacgatggcagatgtgcttttagaagaggtacagcagtcaactaatgacacagttttcatggctaacaccttcttggtatctcacaggaaattaggaatggctggccagaagttgggctcctccgctctcctgtgctacatccgccctgacactgccgatccagcaagtagctttagcttgactgtagccaatgttggcacgtgccaagcagtcctgtgccgaggtgggaagccagtgcccctctctaaagtcttcagcctggagcaggacccagaggaggctcaaagggtgaaggaccaaaaagccatcatcacagagaattgggttcttaaccaaaagcacctgcaggattttcctggggaagataagtga

SEQ ID NO: 183796 - DNA, 2077 bp, Artificial Sequence
  derived and/or modified sequence
ctgtcctggtagggcacctgcacctgcgaatcttgcaccttgcaaacaatcagttacagacctttcctgcaagcaaactaaataaattggagcaattggaggaactgaacctaagtggcaacaagcttaaaaccattcccacaaccatagcaaactgtaaaaggctgcacacccttgttgcacactccaacaacatcagcattttcccagaaatactgcagttgcctcagatccagtttgtagacctaagttgcaacgacttgacagaaatcctgattccagaggctttgcctgctacattacaagaccttgacctgactggaaatacaaatctggttctggaacacaagacactggacatatttagccatatcacaaccctgaaaattgatcagaaacctttgccaaccacagattctacagttacgtcaaccttctggagccatggactggctgagatggcagggcagagaaataagctgtgtgtctcagcacttgctatggatagctttgcagagggggtgggagctgtgtatggcatgtttgatggagaccgaaatgaggagctcccgcgcctgctgcagtgtacgatggcagatgtgcttttagaagaggtacagcagtcaactaatgacacagttttcatggctaacaccttcttggtatctcacaggaaattaggaatggctggccagaagttgggctcctccgctctcctgtgctacatccgccctgacactgccgatccagcaagtagctttagcttgactgtagccaatgttggcacgtgccaagcagtcctgtgccgaggtgggaagccagtgcccctctctaaagtcttcagcctggagcaggacccagaggaggctcaaagggtgaaggaccaaaaagccatcatcacagagaattgggttcttaaccaaaagcacctgcaggattttcctggggaagataagtgagaacaaacacatgaaaccacattccctgacactgcaaagctatgagttaaggttccggaagatctcaaagagttccagaccacagatattccggtgcatcactgtaacttccgggctgttctcggctgcctttgtagcgcttctgttctcggtagctacgcagggccagcaccacgctggcgccgtacatgatcacgagaagacaagcaaaggtggctgctgctccgtcggtgcctgccagctggcagtccatccaggtgagacccttgcgggcatagagcctctctcttgttttgcaagtgtcggtgctattgatctgcagagccacgtggaggtaaacaccaatgcctgtgcagtagcccactgccgctaggaggctgaaggcggcctccgtgaggagccacttccctgacaacattgttcgactcttggctccttggagtaaaacacccatggtgaggacccccagacccagagaaacagccacgccaccgtatatcaggggcgagcggaggatcgtgtactgctggtccagctgccgaacctgctctagctcagtgccctcgaacgatgttttcagatcagttcctacaagaggagccacattttgttaagtggccttcgacttcattgtatggatggatttgtctattcaaccaggaccttactgatagatatttggactgaaaggaacccacaaatggcacgaggcagaggaagccaacaggccaacagactgaagatcttcttgtccgaggtcagcttttatttgttactgacagaggccccaaatccttcttaggtgtccttctgggagagggtctcctgccattcccgtggtgttcagggatgagcatgaagagaaatacaaatgaaccgagagcaggaccaccaggttcaagtccccgctttttactgccttgtcatcttggccaagccattcagtccttctaagcctcagacaatatgacaaatgaagctaagtctgccaatcttcacccacagggatgtggggaggctcaaatgaaagcaaccgtgtgatactgtgggaagttaacaacaacaacaaaaaagcaagtatgtgaaaatactctaaaaataaaataatgtacaaatgg

SEQ ID NO: 183797 - DNA, 8317 bp, Artificial Sequence
  derived and/or modified sequence
gcacaggggtatagatctaaagaagggcagaggggagatctggaaacaggctggctgactccaaatttggcccattggcaacaaaactactatcactgcgagaacgaaaagaaaaacaaaacaaagaaaagaaaagaagttaacttttaaaagtttttttctgaatcagccttgcaaataaatcataaaccgggtcacaggccatattactgcttgaagcagagcaccgaattctgataattttgctccaggaggaggcaagggaattaaaacatggctgggaggtgagcggacgttttgtacgaggttgggttgaatttgcttaagaaggtcgcacgcatctctgataaggaagagaaaaggccttgccaagagaaatatgaaacgcaatgggagcagaaattgtttgaataggagaagtaggtttggttctcgagaaagagactggctaagagaagatgtaaagagaggctgtgtttacctttatggagcagacactaccactgccactacaaccaccaccacctcctcttcctcttcctcctcctcctcttcctctgacttacatctcgtcctttgcactgtagagacaccagcatcagaaatatgtgctggagagggaagagaaagtctttatttacagcttcatggagacctggtcaggagactggaacctactgaacgacctcttcagatcgtttatgattacttatccaggctgggatttgatgatcctgtgcgcatacaggaggaggctacaaatcctgacctcggctgtatgattcgattttatggtgaaaaaccatgccacatggatcgtttggatcgaatcctattgtctggcatctataatgtacgcaagggaaagacccagctgcataagtgggctgagcgcctagttgtcctctgtggtacctgccttatcgtttcctcagtgaaggattgtcaaactggaaagatgcacattttgcctctggttggtggaaagatagaagaagtgaagcgacggcaatactcccttgctttcagctcagcaggagcccaagctcagacctatcatgtcagcttcgagactttggccgagtaccagcgatggcaacggcaagcatccaaggtggtgtcccagcgaatcagtaccgtggatctctcgtgttacagcctcgaggaggttcctgagcatctcttctatagtcaagatattacctacctcaacttgcgacacaacttcatgcagttagaaagacccggaggcctcgatacactctacaaattttctcaactgaagggcctgaacttgtcccataataaacttgggttgtttcctatattgttatgcgagatctctaccctgactgagctcaacctttcctgtaatggatttcatgacctaccaagtcaaattggcaatctgctaaatcttcaaaccctctgtcttgatggcaactttctgactactttacctgaagaattgggaaatctacaacagctttcctccttgggaatttccttcaacaactttagtcaaattcctgaggtttatgagaaactcactatgttagatagagtggttatggcaggaaattgcctggaagtcctgaacttaggggtgctgaataggatgaaccatatcaagcatgtggatttaaggatgaaccatttgaaaaccatggttattgaaaatctggagggaaataaacacatcacccacgtggatctgcgggacaaccgactgactgacttggatcttagctccttatgcagcttggaacagctgcactgtgggcggaatcagctgagggagctaacactcagtggcttttcccttcggaccctctatgccagttccaacaggctgacagcagtgaacgtctatccagtacccagcctgctcactttcttggatctctcccgaaacctgctagagtgtgtccctgactgggcctgtgaagcaaagaagatagaagtattagatgtgagctataatcttctcacagaggttcccgtgagaattctgagtagcttgagtcttagaaaactgatgctgggacacaatcatgtgcaaaaccttccaacactggtagagcacatccccctcgaggtgctggatcttcagcataatgcactcacgaggctgccagacaccctcttctccaaggccttaaatctcagatacttgaatgcatctgcaaatagtctggagtctttaccatccgcctgcactggagaggagagtttgagtatgctgcagctgctttatctgaccaacaatctcctgacggatcagtgcatacctgtcctggtagggcacctgcacctgcgaatcttgcaccttgcaaacaatcagttacagacctttcctgcaagcaaactaaataaattggagcaattggaggaactgaacctaagtggcaacaagcttaaaaccattcccacaaccatagcaaactgtaaaaggctgcacacccttgttgcacactccaacaacatcagcattttcccagaaatactgcagttgcctcagatccagtttgtagacctaagttgcaacgacttgacagaaatcctgattccagaggctttgcctgctacattacaagaccttgacctgactggaaatacaaatctggttctggaacacaagacactggacatatttagccatatcacaaccctgaaaattgatcagaaacctttgccaaccacagattctacagttacgtcaaccttctggagccatggactggctgagatggcagggcagagaaataagctgtgtgtctcagcacttgctatggatagctttgcagagggggtgggagctgtgtatggcatgtttgatggagaccgaaatgaggagctcccgcgcctgctgcagtgtacgatggcagatgtgcttttagaagaggtacagcagtcaactaatgacacagttttcatggctaacaccttcttggtatctcacaggaaattaggaatggctggccagaagttgggctcctccgctctcctgtgctacatccgccctgacactgccgatccagcaagtagctttagcttgactgtagccaatgttggcacgtgccaagcagtcctgtgccgaggtgggaagccagtgcccctctctaaagtcttcagcctggagcaggacccagaggaggctcaaagggtgaaggaccaaaaagccatcatcacagaggacaacaaagtgaatggggtaacctgctgtacccggatgctgggctgtacatacctctacccttggatcctccccaagccccacatatcttccactccgctgaccattcaagatgagttgctgattctgggaaacaaagcattgtgggaacacttgtcctacacagaagctgtcaatgctgtacgtcacgtacaagacccattagcagctgctaagaagctgtgcacattagcgcagagctatggctgtcaggacaatgtaggggcgatggtagtttatttgaatattggtgaggaaggctgcacttgtgaaatgaatgggctcaccctcccaggtcctgtgggatttgcttcaaccaccactatcaaggatgcccctaagccagccactccatcctctagcagtgggattgcctctgagttcagcagtgagatgtccacctcagaggtgagcagtgaagtggggtccactgcttctgatgagcataatgctgggggcctggacactgccttgcttccgaggccagagcggcgctgcagcctccacccaacacccacctctgggctgtttcagcgccagccttcttctgctaccttctccagtaaccagtctgacaacggcctggacagtgatgatgaccagcccgttgagggggtcataaccaatggcagcaaggtagaggtggaagtagacatccactgctgcagggggagggatctggagaactcaccccctctcatagagagttctcctaccctgtgttctgaggaacatgctagagggtcgtgttttgggatccgaagacagaacagtgtgaatagtggcatgctcctgccaatgagcaaggacaggatggagttacagaagtctccctccacctcctgcctctatgggaagaaactctccaatggctctattgtgcccctagaggacagcctgaacctcattgaagtggccacagaagtgcccaagaggaaaactggctattttgctgcccccactcagatggaaccagaggaccagtttgttgtgcctcatgacctggaagaagaagtgaaggaacaaatgaaacagcaccaggacagccggctcgagcctgagccccatgaagaggatcggaccgagcccccggaggagttcgacacagcactatgactgccccactgggcacagtgtgggaggaggctgtgcagggttggggtagggacttgctagaggcattctgcctctacatttctttttgtttgttcgttttttttttgtttgtttgttttgagacggagtcttgctcagtcgctcaggctggagtgcaatggtggggtctcgggtcactgcagcctctgtccctgggttcaagccattctcctgtctcagcctcccgagtagctgggattacaggcacctgccattatgcccggctaagttttattttttttttttagagacggggtttcaccatgttggccaggctggtgttgaactcttgacctcaggtgatccaccctcctctgcctcccaaagtgctgtgattacaggcctcagccaccatgcccagccctgcgtctacatttctaaaccatagctgtgtggggttgaactcggagccaaaaagtgtgagagccatcaggggctggctctggataaactggtagccactatcagtgttaagtttcacatttaacctgcattggaattcccaggggtactgggaagaaagcagctgttctgtatcagtcctaccacctgccattaaccctttctctcctaggatcattttgagaatttgcctgcctgggcaggaaagggactatttctgtggaggaaaaaagtgaagattgattctctttactagttgctgctgatggatctctgtgacagagaaatcaccttatctcagactaatggggtgtgatgtgactagtcacatggcttttcattcttctctacgagaatacagcctatcaaaatgatgtctgttggaaatgtagaaccaatcaaacagataatttatgtatgtaatgtaatgagagcacttttcattgactgtgaactttttatttttgaatctgcactcgagccaatcttcttagaggcagcccggcaccttcatccataggcagagagagaactgggtgttggagacttattcgagggtataggaagggccctgtgaagttgatttaacttttggatgtcagactgtgaaagctcctgagaaacttggggtaataggatcttcttttggggatgaaaatggggaaggcgtgaggacctagactacttctccctagatcagaaaaagagaattaccccttgacaaatatgatacctgctaggtatttcccagggaaatttagggattggcgtctttccctagcatgtggaggaattggcagacagcttcctaagggcggggagcgggggcccaaggctgacactgcttgcatccacgtgaccttaagttatggcagatgactctgaaacggactgaggccaatgagaacagatggatggagcactcaggttagacttgttccttctcctatgctggaggagagggatggttctctagaatgttggaggtgagttgagagctcgcctcttgaatgttgaacagtgtactcttctgaaaactgcatattcactttatgtggtttcagaatactgggctcaatactaacataagaaagacacttcattgagaaattcttaagcttacagaaaacctatactctttgcacattccacataaccctagcaaaatgcagtttcttcatacttctgtcactttttccattggaagatttgcttaggaaaattaattcctatttattcccacaaaatgttggcattgcttgattttacccaatggggaatgtgctttgaatttttggaacacttttacaattaaaaataaagtagggccatttttaatttgtttcatcagaaactatgttaaagagagggttaaatataaatatattttcgtgtgtatttttgggaagatttttgttcaaagcaatagtcaaaatcagatgacctgtccataataattatgtgtcttcatcttctcagaggccccatgctcatatgcacgtgtcattgggatacactcttgggggatttggtacactctaatggatgtctaatgttcaacccctcgagaatctgaacttgagtccccagattgtcaaactactggtcagctattgagaattttagaactcaggtctttgatttgaagtagggaacatagtggctcacacagagtttaggtgctgttagaaagatgggaacaagagtgttttgccaccttatttttatatgggaaattttttttaatgaagaaaaaatgaaaatgaaataacaggatgatagtgatgagtgatgtaaaacatcttacttagatggcagaaccttcgggttgtagaatagtgatgtctaaaaattaaagttattttgggaatacaccactttaatagtatagtcttataaaaattattcattatggtgaacccttcttgtctgctattcgtttcccaacctacttattggaaccacctcaaaacccagttctgaaatgaccttaccaaaagtaaatgtatttattttttagtcagcagaactctgtaattccaaatgttgttctgtgtggtagaattttttttcaggaaccattaggttgtattgaaaatctttgttataggcgataccaaaactgattattcttttttgcagtctgctttaattcatgtccttctgcagttgctctgtattaaaacagggtaaaaaggccatagcccattatgaaaaatataatacaaaactctttgacctatgaggtaacttacagacattgtgttttctaaacaggctgtcagtgaaagcccgtatctgtctccaggtgaatgtaatttacttccgagtactttacccagaggatgtgttccccaggtgggcagagtacagttgatctctagcacagacagagattctggcctctgcatattctcaggtctctgtgtgtacctcccattgagtagagaagcttaagataatttctgagagaagaacactgctgattgtgggagcagtttaggagtccatggaagaaagaaaaatacatgtgtcttggcagccatggtgtatttttgtccaaatggattggaaggatatttgaatatttgaatgttggtatgacataaagctgcagtgcactatagagtcaagtcattgaattaccactcctgatacagggctttattgtactactgtgaagtgtatgtgtgcaatacattggtgagttcatttactggtgtacggaagagccagcaggagcagcgtggtcattgctgggtgctattacagttgcttgtagtgagtgctgttttccaggagatggagccagttgggtgtggcagatctactgaatatcaaatgatgctcttcttcccatgtagaccttcagcaaaagccggtacttggaagccacaggctcaccttctctatctatccaataattattaatgaagagacctccataagggagcagctggctgttatcgataaatgtaccaattattaaataattagtctccaagccattcagtgatgtcttcagcatcactataggactgtctagtgtcactttttacttccttctgggtggaggctttccgactcccaatcatgaaggcaagttaatctttccagttagtgacttttgccccatagttggggtaagcacttcctagattgagaaaaagcagctacagtcaatcctgctctgtttgcctcatttggtgatcagtcagtcacacataagttccttgtattctaaatttcatgcacttctcccagatgctatagggttttctctcactgttgccagtggatgtcatccagacagtgggctcatatcttacggttttgtgcaatcattgtcgtattgtagtcttaagactcattatagtgtatttttgatatttttgaaatgtgttaaattttttaattcaataatatgagccagagcatgttgcagcaaatctattgtttgtaaaaataacaataacaataataaataaaataaagtggaatctttttcatggctttgttttaaaa

SEQ ID NO: 183798 - protein, 1087 aa, Artificial Sequence
  derived and/or modified sequence
MADHVQSLAQLENLCKQLYETTDTTTRLQAEKALVEFTNSPDCLSKCQLLLERGSSSYSQLLAATCLTKLVSRTNNPLPLEQRIDIRNYVLNYLATRPKLATFVTQALIQLYARITKLGWFDCQKDDYVFRNAITDVTRFLQDSVEYCIIGVTILSQLTNEINQADTTHPLTKHRKIASSFRDSSLFDIFTLSCNLLKQASGKNLNLNDESQHGLLMQLLKLTHNCLNFDFIGTSTDESSDDLCTVQIPTSWRSAFLDSSTLQLFFDLYHSIPPSFSPLVLSCLVQIASVRRSLFNNAERAKFLSHLVDGVKRILENPQSLSDPNNYHEFCRLLARLKSNYQLGELVKVENYPEVIRLIANFTVTSLQHWEFAPNSVHYLLSLWQRLAASVPYVKATEPHMLETYTPEVTKAYITSRLESVHIILRDGLEDPLEDTGLVQQQLDQLSTIGRCEYEKTCALLVQLFDQSAQSYQELLQSASASPMDIAVQEGRLTWLVYIIGAVIGGRVSFASTDEQDAMDGELVCRVLQLMNLTDSRLAQAGNEKLELAMLSFFEQFRKIYIGDQVQKSSKLYRRLSEVLGLNDETMVLSVFIGKIITNLKYWGRCEPITSKTLQLLNDLSIGYSSVRKLVKLSAVQFMLNNHTSEHFSFLGINNQSNLTDMRCRTTFYTALGRLLMVDLGEDEDQYEQFMLPLTAAFEAVAQMFSTNSFNEQEAKRTLVGLVRDLRGIAFAFNAKTSFMMLFEWIYPSYMPILQRAIELWYHDPACTTPVLKLMAELVHNRSQRLQFDVSSPNGILLFRETSKMITMYGNRILTLGEVPKDQVYALKLKGISICFSMLKAALSGSYVNFGVFRLYGDDALDNALQTFIKLLLSIPHSDLLDYPKLSQSYYSLLEVLTQDHMNFIASLEPHVIMYILSSISEGLTALDTMVCTGCCSCLDHIVTYLFKQLSRSTKKRTTPLNQESDRFLHIMQQHPEMIQQMLSTVLNIIIFEDCRNQWSMSRPLLGLILLNEKYFSDLRNSIVNSQPPEKQQAMHLCFENLMEGIERNLLTKNRDRFTQNLSAFRREVNDSMKNSTYGVNSNDMMS

SEQ ID NO: 183799 - protein, 1088 aa, Artificial Sequence
  derived and/or modified sequence
MRDPGRKSLAQLENLCKQLYETTDTTTRLQAEKALVEFTNSPDCLSKCQLLLERGSSSYSQLLAATCLTKLVSRTNNPLPLEQRIDIRNYVLNYLATRPKLATFVTQALIQLYARITKLGWFDCQKDDYVFRNAITDVTRFLQDSVEYCIIGVTILSQLTNEINQADTTHPLTKHRKIASSFRDSSLFDIFTLSCNLLKQASGKNLNLNDESQHGLLMQLLKLTHNCLNFDFIGTSTDESSDDLCTVQIPTSWRSAFLDSSTLQLFFDLYHSIPPSFSPLVLSCLVQIASVRRSLFNNAERAKFLSHLVDGVKRILENPQSLSDPNNYHEFCRLLARLKSNYQLGELVKVENYPEVIRLIANFTVTSLQHWEFAPNSVHYLLSLWQRLAASVPYVKATEPHMLETYTPEVTKAYITSRLESVHIILRDGLEDPLEDTGLVQQQLDQLSTIGRCEYEKTCALLVQLFDQSAQSYQELLQSASASPMDIAVQEGRLTWLVYIIGAVIGGRVSFASTDEQDAMDGELVCRVLQLMNLTDSRLAQAGNEKLELAMLSFFEQFRKIYIGDQVQKSSKLYRRLSEVLGLNDETMVLSVFIGKIITNLKYWGRCEPITSKTLQLLNDLSIGYSSVRKLVKLSAVQFMLNNHTSEHFSFLGINNQSNLTDMRCRTTFYTALGRLLMVDLGEDEDQYEQFMLPLTAAFEAVAQMFSTNSFNEQEAKRTLVGLVRDLRGIAFAFNAKTSFMMLFEWIYPSYMPILQRAIELWYHDPACTTPVLKLMAELVHNRSQRLQFDVSSPNGILLFRETSKMITMYGNRILTLGEVPKDQVYALKLKGISICFSMLKAALSGSYVNFGVFRLYGDDALDNALQTFIKLLLSIPHSDLLDYPKLSQSYYSLLEVLTQDHMNFIASLEPHVIMYILSSISEGLTALDTMVCTGCCSCLDHIVTYLFKQLSRSTKKRTTPLNQESDRFLHIMQQHPEMIQQMLSTVLNIIIFEDCRNQWSMSRPLLGLILLNEKYFSDLRNSIVNSQPPEKQQAMHLCFENLMEGIERNLLTKNRDRFTQNLSAFRREVNDSMKNSTYGVNSNDMMS

SEQ ID NO: 183800 - protein, 1096 aa, Artificial Sequence
  derived and/or modified sequence
MADHVQSLAQLENLCKQLYETTDTTTRLQAEKALVEFTNSPDCLSKCQLLLERGSSSYSQLLAATCLTKLVSRTNNPLPLEQRIDIRNYVLNYLATRPKLATFVTQALIQLYARITKLGWFDCQKDDYVFRNAITDVTRFLQDSVEYCIIGVTILSQLTNEINQVSATAFLIEADTTHPLTKHRKIASSFRDSSLFDIFTLSCNLLKQASGKNLNLNDESQHGLLMQLLKLTHNCLNFDFIGTSTDESSDDLCTVQIPTSWRSAFLDSSTLQLFFDLYHSIPPSFSPLVLSCLVQIASVRRSLFNNAERAKFLSHLVDGVKRILENPQSLSDPNNYHEFCRLLARLKSNYQLGELVKVENYPEVIRLIANFTVTSLQHWEFAPNSVHYLLSLWQRLAASVPYVKATEPHMLETYTPEVTKAYITSRLESVHIILRDGLEDPLEDTGLVQQQLDQLSTIGRCEYEKTCALLVQLFDQSAQSYQELLQSASASPMDIAVQEGRLTWLVYIIGAVIGGRVSFASTDEQDAMDGELVCRVLQLMNLTDSRLAQAGNEKLELAMLSFFEQFRKIYIGDQVQKSSKLYRRLSEVLGLNDETMVLSVFIGKIITNLKYWGRCEPITSKTLQLLNDLSIGYSSVRKLVKLSAVQFMLNNHTSEHFSFLGINNQSNLTDMRCRTTFYTALGRLLMVDLGEDEDQYEQFMLPLTAAFEAVAQMFSTNSFNEQEAKRTLVGLVRDLRGIAFAFNAKTSFMMLFEWIYPSYMPILQRAIELWYHDPACTTPVLKLMAELVHNRSQRLQFDVSSPNGILLFRETSKMITMYGNRILTLGEVPKDQVYALKLKGISICFSMLKAALSGSYVNFGVFRLYGDDALDNALQTFIKLLLSIPHSDLLDYPKLSQSYYSLLEVLTQDHMNFIASLEPHVIMYILSSISEGLTALDTMVCTGCCSCLDHIVTYLFKQLSRSTKKRTTPLNQESDRFLHIMQQHPEMIQQMLSTVLNIIIFEDCRNQWSMSRPLLGLILLNEKYFSDLRNSIVNSQPPEKQQAMHLCFENLMEGIERNLLTKNRDRFTQNLSAFRREVNDSMKNSTYGVNSNDMMS

SEQ ID NO: 183801 - DNA, 4861 bp, Artificial Sequence
  derived and/or modified sequence
gcgcagcggcgacggcgtcggcggcggcggcggcagcggctccggccgaggtgcgcgctgggggggagggggggccggagaggagcatgaatggagcaaaatggcggatcatgtgcagagcctggcccaactagagaatctgtgcaaacagctgtatgaaaccacagacacaaccactcgactccaggcagagaaagccttggttgaatttaccaacagccctgattgcctgagcaagtgccagctactcctcgaaagaggaagttcctcttactcccagttactggcagctacatgccttaccaagcttgtatcacgcacaaacaaccccctaccattggaacagcgaatagatattcggaactatgtgctcaactaccttgccactcggccgaagttggctactttcgtgacacaagcacttattcagttatatgccagaatcacaaaactgggctggtttgactgtcagaaggatgactatgtcttcagaaatgcaatcacagacgtcacaaggtttttacaggatagtgttgaatactgcatcattggtgtcacaattttatctcagctaaccaatgaaattaatcaagcagacaccacccatcctttaaccaagcacagaaaaatagcctcttcttttcgcgattcatcattatttgatatcttcacactttcctgcaatttactaaaacaggcttcaggaaagaatctaaacttgaatgatgaaagtcagcatggcttgctcatgcaactgctcaagctcactcataactgcctcaactttgacttcatcggcacttccactgatgagtcctcagacgacctgtgtacagtgcagattcccaccagctggagatcagccttcttagattcttcaaccttgcagctgttttttgacctgtatcattccatccctccttcattttcacctctggtattatcctgcttggtacagatcgcttcagtcagaagatccctgtttaacaatgcagagagggccaagtttctctctcatcttgttgatggtgttaaacgaatactggaaaacccacagagtttatcagacccaaacaattaccatgagttttgcagactactggcccgattgaagagtaactatcaactgggagaattggtaaaggtggaaaactaccctgaggtcatccgattgatagccaacttcacagtgaccagcctacagcactgggaatttgctccaaatagtgtgcactatcttctgagcctgtggcagcggctggcagcctctgtgccgtatgtcaaagccacagagccccacatgctggaaacttacactcctgaggtcaccaaagcctacatcacatcccggttggaatctgtgcacatcatactgagagatggcctggaagatcccctggaggatacggggctggtccagcagcagttggaccagctgtccaccattgggcgttgtgaatatgagaagacgtgtgcactcctcgtgcagttgtttgaccagtcggcccagtcgtaccaggagctgctacagagcgccagcgcaagcccaatggacattgcagtgcaggagggaaggctgacatggctggtttacattattggagcagtgatcggtggccgggtttcttttgccagcactgatgagcaagacgccatggatggtgagcttgtctgtcgggtgctccagctgatgaacctaacagattctcgtttggcccaggcgggtaatgagaagctagagttggccatgctgagcttttttgaacagtttcgtaagatctacattggggaccaagtgcagaaatcctctaagctgtaccgccgactctcagaagttctgggcttgaatgatgagaccatggtcctaagcgtcttcataggaaaaatcatcaccaacttgaagtactggggccgttgtgaaccaatcacctccaagacactacagcttctcaatgacctgtccattgggtacagtagcgtaaggaagctagtgaagcttagtgcggtacagttcatgctgaacaatcacacgagcgagcacttttcatttttgggtattaacaatcagtccaacctgacagacatgcggtgtcggactaccttctacacagcacttgggcgtctcctcatggtggatttaggagaggatgaagatcagtatgagcagttcatgctgccactcacagcagcatttgaggctgtggcccagatgtttagcaccaatagtttcaacgagcaggaggcaaagcgaactctagttggcctagtaagagacctgagagggatcgctttcgctttcaatgccaagaccagcttcatgatgctctttgaatggatatatccatcctatatgccaattctccaacgggcaattgagctctggtaccatgatccagcctgtactacacctgtactcaagttgatggctgaattggttcataataggtcccagcgactccagtttgatgtctcttcccccaatggcatcttactcttccgagaaaccagcaagatgataacaatgtatggcaatcgcatcctgacactaggagaggtcccaaaggatcaggtctatgctctgaagctcaagggcatctccatctgcttctccatgctgaaggctgctctcagtgggagttacgtcaatttcggagtctttcgtctctatggagacgatgccctggacaatgctctgcagaccttcatcaagctgctcctctctattcctcacagtgatctcttggattaccccaagctcagccagtcttattattcactactggaagtcctgacccaggaccatatgaactttattgcaagcctggaacctcacgtcatcatgtatattctctcttccatttctgaaggacttactgcacttgacaccatggtatgcacaggctgctgctcctgcctggaccacattgtgacatacctcttcaagcagctgtcacgtagcaccaagaagaggaccacacccctgaaccaggagagcgaccgctttctgcacatcatgcagcagcatccagagatgatccagcagatgctgtccacggtgctgaacatcatcatctttgaagactgtaggaaccagtggtctatgtcccgaccactacttggcttgatattgcttaatgaaaagtatttttctgacctaagaaacagtattgtgaacagccagccaccggagaagcagcaggccatgcacctgtgttttgagaacctgatggaaggcatcgagcgaaatcttcttacgaaaaacagagacaggttcacccagaacctgtcagcattccgtcgagaagtcaacgactcaatgaagaattccacttatggcgtgaatagcaatgacatgatgagctgacacctccttggactctacctgtacagagcagcgtccctttggtttggcccagaggggcgaacaattgcaagggagagggcctggctgatcctggctcttttctccaggggtgtggggaaaatggcaaaggtcaactagctgcttccccagggaataggggtgtgagtacactcactagggggcagggcgctgctggttcctgggggactgggtgggaagggtggtgggaggagataagagatacaaactgagactccagcctctcctcctggggccacccaagtggggagaacccctagtgtcctgccacaacctgccttgtataaacatgtacattttttcataacattttgaacaaggtttatattgactcaagtttaaaaacaaaaagtgtgactgaaaaatttttacagagtctagtgcaccaatgctgatgtgaggggttgtgtatgcgagtgaagaaaatgtgtattctggtggcctgaagctttactggacaaggatgtgtgagagtgcagagatatatttagtgacacagtagagaggcaaaaaaaaagctaaaattccaaatgtatattttttcgtattgccctgtcctcacccagaaatgatcaattcctgttactgtattaacccttgttattaggaactctaagccatgccagaacaccgtccctccccttggaccgtgtagattctgccctgggtccctagccccttgcagtgataaataactccagctaaaagtgtttggtgttcttatctccaccctctttcctactttgcttaccctcatcctcagacagatgcctcttgcttttaaaagttggatttaacgacgtgttgtagggttcttggtctgtgtgaaggcagagaccagagagaaggaagtgagcccactgctctcctgggagcaatgtgggtgagtccaccagaggccctgctgtgtgtggccaataaattttagtcttccccagccctcgaggcagtgtgtgtggatgtatgcgtgtggatatttatatatgtaccctgcactcatgaatgtatgaactggaggaagttactacagtggaagggttcttaataacaaggtctacctagcatgaagtatttaacattctcccatcccttaaaaaatatacatttttataaaatgaaaaccataataaatgttttgaatattaaaaaaaataataacctacagaggaaaattaatggagacagctatttgccttgtactttttccacaattgttgctgctagttgtacacatctctagttcagctcttgcccacgggacactcatcaattaggttttatttttatttctttcctctacccccagaaacaagcctgttaattttttttccttctcctctggcgactgtgtgatgaatcctttcttgcgtgatcaggttgcggatagacttgtaagggtgtttgctgcatacagtgtaagcattgtgaccgccaataaacttcaatggtttctactga

SEQ ID NO: 183802 - DNA, 4818 bp, Artificial Sequence
  derived and/or modified sequence
ggaaccaaagtaagagtttaaagtgcaacagaagagagtctgctgaactttagacatgagggatccagggaggaagagcctggcccaactagagaatctgtgcaaacagctgtatgaaaccacagacacaaccactcgactccaggcagagaaagccttggttgaatttaccaacagccctgattgcctgagcaagtgccagctactcctcgaaagaggaagttcctcttactcccagttactggcagctacatgccttaccaagcttgtatcacgcacaaacaaccccctaccattggaacagcgaatagatattcggaactatgtgctcaactaccttgccactcggccgaagttggctactttcgtgacacaagcacttattcagttatatgccagaatcacaaaactgggctggtttgactgtcagaaggatgactatgtcttcagaaatgcaatcacagacgtcacaaggtttttacaggatagtgttgaatactgcatcattggtgtcacaattttatctcagctaaccaatgaaattaatcaagcagacaccacccatcctttaaccaagcacagaaaaatagcctcttcttttcgcgattcatcattatttgatatcttcacactttcctgcaatttactaaaacaggcttcaggaaagaatctaaacttgaatgatgaaagtcagcatggcttgctcatgcaactgctcaagctcactcataactgcctcaactttgacttcatcggcacttccactgatgagtcctcagacgacctgtgtacagtgcagattcccaccagctggagatcagccttcttagattcttcaaccttgcagctgttttttgacctgtatcattccatccctccttcattttcacctctggtattatcctgcttggtacagatcgcttcagtcagaagatccctgtttaacaatgcagagagggccaagtttctctctcatcttgttgatggtgttaaacgaatactggaaaacccacagagtttatcagacccaaacaattaccatgagttttgcagactactggcccgattgaagagtaactatcaactgggagaattggtaaaggtggaaaactaccctgaggtcatccgattgatagccaacttcacagtgaccagcctacagcactgggaatttgctccaaatagtgtgcactatcttctgagcctgtggcagcggctggcagcctctgtgccgtatgtcaaagccacagagccccacatgctggaaacttacactcctgaggtcaccaaagcctacatcacatcccggttggaatctgtgcacatcatactgagagatggcctggaagatcccctggaggatacggggctggtccagcagcagttggaccagctgtccaccattgggcgttgtgaatatgagaagacgtgtgcactcctcgtgcagttgtttgaccagtcggcccagtcgtaccaggagctgctacagagcgccagcgcaagcccaatggacattgcagtgcaggagggaaggctgacatggctggtttacattattggagcagtgatcggtggccgggtttcttttgccagcactgatgagcaagacgccatggatggtgagcttgtctgtcgggtgctccagctgatgaacctaacagattctcgtttggcccaggcgggtaatgagaagctagagttggccatgctgagcttttttgaacagtttcgtaagatctacattggggaccaagtgcagaaatcctctaagctgtaccgccgactctcagaagttctgggcttgaatgatgagaccatggtcctaagcgtcttcataggaaaaatcatcaccaacttgaagtactggggccgttgtgaaccaatcacctccaagacactacagcttctcaatgacctgtccattgggtacagtagcgtaaggaagctagtgaagcttagtgcggtacagttcatgctgaacaatcacacgagcgagcacttttcatttttgggtattaacaatcagtccaacctgacagacatgcggtgtcggactaccttctacacagcacttgggcgtctcctcatggtggatttaggagaggatgaagatcagtatgagcagttcatgctgccactcacagcagcatttgaggctgtggcccagatgtttagcaccaatagtttcaacgagcaggaggcaaagcgaactctagttggcctagtaagagacctgagagggatcgctttcgctttcaatgccaagaccagcttcatgatgctctttgaatggatatatccatcctatatgccaattctccaacgggcaattgagctctggtaccatgatccagcctgtactacacctgtactcaagttgatggctgaattggttcataataggtcccagcgactccagtttgatgtctcttcccccaatggcatcttactcttccgagaaaccagcaagatgataacaatgtatggcaatcgcatcctgacactaggagaggtcccaaaggatcaggtctatgctctgaagctcaagggcatctccatctgcttctccatgctgaaggctgctctcagtgggagttacgtcaatttcggagtctttcgtctctatggagacgatgccctggacaatgctctgcagaccttcatcaagctgctcctctctattcctcacagtgatctcttggattaccccaagctcagccagtcttattattcactactggaagtcctgacccaggaccatatgaactttattgcaagcctggaacctcacgtcatcatgtatattctctcttccatttctgaaggacttactgcacttgacaccatggtatgcacaggctgctgctcctgcctggaccacattgtgacatacctcttcaagcagctgtcacgtagcaccaagaagaggaccacacccctgaaccaggagagcgaccgctttctgcacatcatgcagcagcatccagagatgatccagcagatgctgtccacggtgctgaacatcatcatctttgaagactgtaggaaccagtggtctatgtcccgaccactacttggcttgatattgcttaatgaaaagtatttttctgacctaagaaacagtattgtgaacagccagccaccggagaagcagcaggccatgcacctgtgttttgagaacctgatggaaggcatcgagcgaaatcttcttacgaaaaacagagacaggttcacccagaacctgtcagcattccgtcgagaagtcaacgactcaatgaagaattccacttatggcgtgaatagcaatgacatgatgagctgacacctccttggactctacctgtacagagcagcgtccctttggtttggcccagaggggcgaacaattgcaagggagagggcctggctgatcctggctcttttctccaggggtgtggggaaaatggcaaaggtcaactagctgcttccccagggaataggggtgtgagtacactcactagggggcagggcgctgctggttcctgggggactgggtgggaagggtggtgggaggagataagagatacaaactgagactccagcctctcctcctggggccacccaagtggggagaacccctagtgtcctgccacaacctgccttgtataaacatgtacattttttcataacattttgaacaaggtttatattgactcaagtttaaaaacaaaaagtgtgactgaaaaatttttacagagtctagtgcaccaatgctgatgtgaggggttgtgtatgcgagtgaagaaaatgtgtattctggtggcctgaagctttactggacaaggatgtgtgagagtgcagagatatatttagtgacacagtagagaggcaaaaaaaaagctaaaattccaaatgtatattttttcgtattgccctgtcctcacccagaaatgatcaattcctgttactgtattaacccttgttattaggaactctaagccatgccagaacaccgtccctccccttggaccgtgtagattctgccctgggtccctagccccttgcagtgataaataactccagctaaaagtgtttggtgttcttatctccaccctctttcctactttgcttaccctcatcctcagacagatgcctcttgcttttaaaagttggatttaacgacgtgttgtagggttcttggtctgtgtgaaggcagagaccagagagaaggaagtgagcccactgctctcctgggagcaatgtgggtgagtccaccagaggccctgctgtgtgtggccaataaattttagtcttccccagccctcgaggcagtgtgtgtggatgtatgcgtgtggatatttatatatgtaccctgcactcatgaatgtatgaactggaggaagttactacagtggaagggttcttaataacaaggtctacctagcatgaagtatttaacattctcccatcccttaaaaaatatacatttttataaaatgaaaaccataataaatgttttgaatattaaaaaaaataataacctacagaggaaaattaatggagacagctatttgccttgtactttttccacaattgttgctgctagttgtacacatctctagttcagctcttgcccacgggacactcatcaattaggttttatttttatttctttcctctacccccagaaacaagcctgttaattttttttccttctcctctggcgactgtgtgatgaatcctttcttgcgtgatcaggttgcggatagacttgtaagggtgtttgctgcatacagtgtaagcattgtgaccgccaataaacttcaatggtttctactg

SEQ ID NO: 183803 - DNA, 4889 bp, Artificial Sequence
  derived and/or modified sequence
aggcgcagcggcgacggcgtcggcggcggcggcggcagcggctccggccgaggtgcgcgctgggggggagggggggccggagaggagcatgaatggagcaaaatggcggatcatgtgcagagcctggcccaactagagaatctgtgcaaacagctgtatgaaaccacagacacaaccactcgactccaggcagagaaagccttggttgaatttaccaacagccctgattgcctgagcaagtgccagctactcctcgaaagaggaagttcctcttactcccagttactggcagctacatgccttaccaagcttgtatcacgcacaaacaaccccctaccattggaacagcgaatagatattcggaactatgtgctcaactaccttgccactcggccgaagttggctactttcgtgacacaagcacttattcagttatatgccagaatcacaaaactgggctggtttgactgtcagaaggatgactatgtcttcagaaatgcaatcacagacgtcacaaggtttttacaggatagtgttgaatactgcatcattggtgtcacaattttatctcagctaaccaatgaaattaatcaagtaagtgctacagccttcctcattgaagcagacaccacccatcctttaaccaagcacagaaaaatagcctcttcttttcgcgattcatcattatttgatatcttcacactttcctgcaatttactaaaacaggcttcaggaaagaatctaaacttgaatgatgaaagtcagcatggcttgctcatgcaactgctcaagctcactcataactgcctcaactttgacttcatcggcacttccactgatgagtcctcagacgacctgtgtacagtgcagattcccaccagctggagatcagccttcttagattcttcaaccttgcagctgttttttgacctgtatcattccatccctccttcattttcacctctggtattatcctgcttggtacagatcgcttcagtcagaagatccctgtttaacaatgcagagagggccaagtttctctctcatcttgttgatggtgttaaacgaatactggaaaacccacagagtttatcagacccaaacaattaccatgagttttgcagactactggcccgattgaagagtaactatcaactgggagaattggtaaaggtggaaaactaccctgaggtcatccgattgatagccaacttcacagtgaccagcctacagcactgggaatttgctccaaatagtgtgcactatcttctgagcctgtggcagcggctggcagcctctgtgccgtatgtcaaagccacagagccccacatgctggaaacttacactcctgaggtcaccaaagcctacatcacatcccggttggaatctgtgcacatcatactgagagatggcctggaagatcccctggaggatacggggctggtccagcagcagttggaccagctgtccaccattgggcgttgtgaatatgagaagacgtgtgcactcctcgtgcagttgtttgaccagtcggcccagtcgtaccaggagctgctacagagcgccagcgcaagcccaatggacattgcagtgcaggagggaaggctgacatggctggtttacattattggagcagtgatcggtggccgggtttcttttgccagcactgatgagcaagacgccatggatggtgagcttgtctgtcgggtgctccagctgatgaacctaacagattctcgtttggcccaggcgggtaatgagaagctagagttggccatgctgagcttttttgaacagtttcgtaagatctacattggggaccaagtgcagaaatcctctaagctgtaccgccgactctcagaagttctgggcttgaatgatgagaccatggtcctaagcgtcttcataggaaaaatcatcaccaacttgaagtactggggccgttgtgaaccaatcacctccaagacactacagcttctcaatgacctgtccattgggtacagtagcgtaaggaagctagtgaagcttagtgcggtacagttcatgctgaacaatcacacgagcgagcacttttcatttttgggtattaacaatcagtccaacctgacagacatgcggtgtcggactaccttctacacagcacttgggcgtctcctcatggtggatttaggagaggatgaagatcagtatgagcagttcatgctgccactcacagcagcatttgaggctgtggcccagatgtttagcaccaatagtttcaacgagcaggaggcaaagcgaactctagttggcctagtaagagacctgagagggatcgctttcgctttcaatgccaagaccagcttcatgatgctctttgaatggatatatccatcctatatgccaattctccaacgggcaattgagctctggtaccatgatccagcctgtactacacctgtactcaagttgatggctgaattggttcataataggtcccagcgactccagtttgatgtctcttcccccaatggcatcttactcttccgagaaaccagcaagatgataacaatgtatggcaatcgcatcctgacactaggagaggtcccaaaggatcaggtctatgctctgaagctcaagggcatctccatctgcttctccatgctgaaggctgctctcagtgggagttacgtcaatttcggagtctttcgtctctatggagacgatgccctggacaatgctctgcagaccttcatcaagctgctcctctctattcctcacagtgatctcttggattaccccaagctcagccagtcttattattcactactggaagtcctgacccaggaccatatgaactttattgcaagcctggaacctcacgtcatcatgtatattctctcttccatttctgaaggacttactgcacttgacaccatggtatgcacaggctgctgctcctgcctggaccacattgtgacatacctcttcaagcagctgtcacgtagcaccaagaagaggaccacacccctgaaccaggagagcgaccgctttctgcacatcatgcagcagcatccagagatgatccagcagatgctgtccacggtgctgaacatcatcatctttgaagactgtaggaaccagtggtctatgtcccgaccactacttggcttgatattgcttaatgaaaagtatttttctgacctaagaaacagtattgtgaacagccagccaccggagaagcagcaggccatgcacctgtgttttgagaacctgatggaaggcatcgagcgaaatcttcttacgaaaaacagagacaggttcacccagaacctgtcagcattccgtcgagaagtcaacgactcaatgaagaattccacttatggcgtgaatagcaatgacatgatgagctgacacctccttggactctacctgtacagagcagcgtccctttggtttggcccagaggggcgaacaattgcaagggagagggcctggctgatcctggctcttttctccaggggtgtggggaaaatggcaaaggtcaactagctgcttccccagggaataggggtgtgagtacactcactagggggcagggcgctgctggttcctgggggactgggtgggaagggtggtgggaggagataagagatacaaactgagactccagcctctcctcctggggccacccaagtggggagaacccctagtgtcctgccacaacctgccttgtataaacatgtacattttttcataacattttgaacaaggtttatattgactcaagtttaaaaacaaaaagtgtgactgaaaaatttttacagagtctagtgcaccaatgctgatgtgaggggttgtgtatgcgagtgaagaaaatgtgtattctggtggcctgaagctttactggacaaggatgtgtgagagtgcagagatatatttagtgacacagtagagaggcaaaaaaaaagctaaaattccaaatgtatattttttcgtattgccctgtcctcacccagaaatgatcaattcctgttactgtattaacccttgttattaggaactctaagccatgccagaacaccgtccctccccttggaccgtgtagattctgccctgggtccctagccccttgcagtgataaataactccagctaaaagtgtttggtgttcttatctccaccctctttcctactttgcttaccctcatcctcagacagatgcctcttgcttttaaaagttggatttaacgacgtgttgtagggttcttggtctgtgtgaaggcagagaccagagagaaggaagtgagcccactgctctcctgggagcaatgtgggtgagtccaccagaggccctgctgtgtgtggccaataaattttagtcttccccagccctcgaggcagtgtgtgtggatgtatgcgtgtggatatttatatatgtaccctgcactcatgaatgtatgaactggaggaagttactacagtggaagggttcttaataacaaggtctacctagcatgaagtatttaacattctcccatcccttaaaaaatatacatttttataaaatgaaaaccataataaatgttttgaatattaaaaaaaataataacctacagaggaaaattaatggagacagctatttgccttgtactttttccacaattgttgctgctagttgtacacatctctagttcagctcttgcccacgggacactcatcaattaggttttatttttatttctttcctctacccccagaaacaagcctgttaattttttttccttctcctctggcgactgtgtgatgaatcctttcttgcgtgatcaggttgcggatagacttgtaagggtgtttgctgcatacagtgtaagcattgtgaccgccaataaacttcaatggtttctactg

SEQ ID NO: 183804 - DNA, 3264 bp, Artificial Sequence
  derived and/or modified sequence
atggcagaccatgtccaatcgcttgcccaactggaaaacttatgtaagcagctatacgagacaaccgatacgacaactcgtctgcaagctgagaaagcgctggtggaattcaccaactctcctgactgcctgagcaaatgccaattgctgttggagcgcgggtcttctagctactctcagctgttggccgctacttgcctgactaagcttgtttcgagaactaacaacccactgccacttgagcaaaggatcgatattcggaattacgtgctgaactacttggccactagaccgaaactggccacattcgtgactcaagccctgatacagctgtacgcccggatcacaaaacttggatggttcgattgccagaaagacgactatgtgttcaggaatgctattaccgatgttacgagattcctgcaggactcagtggagtactgtatcattggcgtgacaatattaagtcaactcacgaacgagataaaccaggcagacacaactcatcctctgactaaacatcgtaaaatcgctagtagctttagggactcctccctattcgacattttcacactgtcttgtaacttgctcaaacaagccagtggcaagaacctaaacctgaacgatgagagtcagcacggccttctgatgcagcttcttaagctaacccacaactgtctgaactttgactttatcgggacaagtacagatgaaagctctgatgacctctgcaccgtgcagatcccaacatcatggaggagtgctttcctcgactctagcacactgcaactgtttttcgatctctatcatagcataccgcccagcttctcccctctcgttcttagctgcctggtccagattgcatccgttcgccgttctctattcaacaatgccgaacgcgcaaaattcctgtcacacctggtggacggtgtgaagagaatacttgagaatccacagtccctctcagaccccaataattaccacgagttctgtcgtctcctggctcgccttaagtctaactatcaactgggcgaactggtgaaagtcgaaaactaccctgaagtcatccggctgatcgccaactttacagtgaccagcctgcagcactgggaatttgcccccaattcagttcattatctgcttagcctttggcaaaggctcgccgcctcagtgccttatgtcaaggctacagaacctcatatgctggagacctacacaccagaggttaccaaagcctacatcacatccagactagaaagcgttcacatcattctccgcgacggccttgaagatccactggaagacacagggctagtgcaacagcagctggatcaactttccacaatcgggaggtgtgaatacgagaaaacctgcgctctcctggtgcagttgttcgatcagtctgcacaatcctatcaagagctcttacagagcgcaagcgcgtcaccaatggatatcgccgtgcaggaaggacgtcttacgtggttggtgtacataatcggggctgtcatcggtgggagagtttctttcgctagcaccgacgagcaagacgcaatggacggggagctcgtttgtagagtcctacaactgatgaaccttacagacagtcgccttgcccaggccggaaatgaaaagctcgagctagctatgctgtccttttttgaacagttccggaagatctacatcggcgatcaggtgcaaaagagcagtaaactataccgtcgtctcagcgaagttctgggattaaacgatgagacaatggtgctgtcggtcttcatcgggaagatcatcacaaatctgaaatactggggtagatgcgagccgattacctcaaagactttgcaacttcttaatgatctcagcattggttatagcagtgtgcgcaagctggtgaagctctcagccgtgcaattcatgcttaataatcacacatctgaacatttttcctttctggggatcaacaaccagtcaaaccttacagacatgcgatgccgcaccactttttacactgctctggggcgcctcctgatggtggatctaggagaggacgaggaccagtatgagcagtttatgttacctttgacagccgcctttgaggctgtggctcagatgttttccaccaactcgtttaacgaacaggaggcaaaacggaccctcgtcgggctcgttcgtgacttgcgcgggattgctttcgccttcaacgccaaaacctcctttatgatgctgtttgagtggatttaccctagctacatgcctatcctgcagcgcgctatagagctatggtatcacgatcctgcttgtacaacccccgttctgaagctgatggccgaactggttcataaccggtcccaacgattacagttcgacgtgagctcaccaaatggtattctcttgtttcgcgagacctccaagatgatcacaatgtatggcaaccggatcctgaccctcggggaggtgccgaaggatcaggtgtacgcgctaaaactaaagggaattagtatctgttttagcatgctgaaagccgccctttctgggtcttacgtcaattttggtgtcttcaggctctacggcgatgacgccctcgacaatgccctgcagacctttattaaactgctactgtccatcccacactccgacctgcttgattatcccaagctgagccagtcctattacagccttttggaggtgctcacacaagatcacatgaactttatcgcctccttggaaccgcacgtcatcatgtacattctgtctagcatcagcgaggggctcacagcgttagatacgatggtctgcaccggctgttgcagctgcttggatcacattgtcacttatctgttcaaacaacttagcagaagtacaaaaaagcgcacaactcctctcaaccaagagtcggacaggtttctccacatcatgcaacagcatcctgagatgatccagcagatgctgtccaccgtgctgaacattattattttcgaagactgcagaaaccaatggagtatgtccagacctctactgggcctgatcctcctgaacgagaaatattttagcgacttaaggaattcaatcgtgaactcacaaccaccagaaaaacagcaggcaatgcacttatgttttgagaatctcatggagggaatcgaacgtaatcttctcacaaaaaatagagaccgcttcacccagaacctctccgctttccggcgcgaagttaatgacagcatgaagaacagcacctatggagttaatagcaacgatatgatgtcctag

SEQ ID NO: 183805 - DNA, 3267 bp, Artificial Sequence
  derived and/or modified sequence
atgagagatcctggaagaaagtcattagctcagcttgaaaacttatgcaaacagttgtatgaaacaaccgacactacaacccgtctgcaggctgagaaggctctggtcgagttcacaaactccccagattgcctgtcaaagtgtcagctcctgttagagaggggctccagctcatactcgcagcttctggctgctacatgcctgaccaaattggtgagcaggaccaataatcctttgcccctggagcagaggatcgatattcgcaactacgtgctgaattacctcgccactcgacccaagctggcaaccttcgtgacgcaggccctcatacagttgtacgcgcgcattacaaaactcgggtggtttgactgtcagaaagatgattacgtgtttaggaacgcaattacagatgtcaccagattcctgcaggactcggttgaatattgcatcatcggcgtgacaatactttcacaactgaccaatgagatcaaccaggctgacacaactcacccgcttactaagcaccggaagattgcctctagctttcgggactcctccttgttcgatattttcactctgagctgtaacctgctgaagcaggctagcggcaagaatctgaatctgaatgacgagagtcaacacggcctcctcatgcaactcctcaagctgacacataattgcctgaattttgatttcattgggacatcgacagacgagtcatccgatgatctctgtacagttcagatcccaacctcctggcgtagtgccttcttagactccagtactttgcagttgttttttgatctgtaccactccatcccaccatcctttagcccccttgttctgtcatgtctggtacagatcgcaagcgtccggagatcccttttcaacaatgccgagcgcgctaagttcctttctcacctggttgatggggttaaacggatcttggagaacccccaatcactcagcgacccaaataattaccatgaattttgccgcttgctagctagactcaaaagcaattaccagttgggagagcttgtgaaagtcgagaactaccctgaggtcatccggcttatcgcaaattttacggttactagcctccagcactgggagttcgcccccaattctgtgcactatcttctgagcctgtggcagcggctcgccgcgtcggtaccctacgtcaaggccaccgaaccccacatgttagaaacttacacccccgaagtaactaaagcctatatcacttctcggctggagagcgtgcatatcatccttcgggacggcctggaagaccctttagaagacacgggactagtgcagcagcaactggaccagctgagcactattgggaggtgcgagtatgaaaagacttgcgccctgctcgtacagttatttgatcaatcagcgcagtcgtaccaggaactgctgcagagtgcgtctgcctctccaatggatattgccgtgcaggaggggagacttacgtggctcgtttacattattggggctgttattggcggaagagtctcatttgcttccactgatgagcaggacgccatggatggggagttggtgtgtagggtgcttcagctgatgaacttgacagacagtagactagcccaagctggaaacgaaaaattggaactggctatgctgtctttcttcgaacagtttagaaagatctatatcggggatcaagtacagaagagttcaaagctgtatcggaggctgtctgaagtgttgggactgaatgacgaaacaatggtgctaagtgtattcataggtaagatcataactaatctgaagtactggggccggtgcgaacccattacctctaaaacgctgcagctcctaaatgacctctccatcggatacagtagcgtgcgtaaactggttaagctttcagcagtccagtttatgctgaacaatcatacatctgagcacttcagcttcctaggcatcaacaaccaatctaatctgactgacatgcggtgcagaacaaccttctacaccgccctcggccgactattgatggtggatcttggagaagacgaagaccaatatgagcagtttatgttgccactaaccgctgcttttgaggcagtggctcagatgtttagtaccaacagctttaatgaacaggaagccaagcgcacactcgtcggactggtccgcgacttgagaggcattgcattcgcattcaatgccaaaacatcttttatgatgctcttcgaatggatctatccatcgtacatgcccatcttgcagagggccatcgagctatggtaccatgatccagcctgtacaaccccggtcctgaagctcatggccgaactcgtacataataggagccagaggttacagttcgatgttagcagtccgaatggcatccttctgttccgcgaaacaagtaagatgatcaccatgtacggtaacaggatcctgactctaggcgaggtccccaaagaccaggtgtatgcactcaagctaaagggaataagtatatgtttttccatgttgaaggccgccttaagcggcagctacgtgaattttggcgtattcagactctatggagatgatgctcttgacaacgccctccagactttcatcaaactcctcctaagcatcccacacagcgacctgctggattatcctaaactcagtcagtcctactactcactcttagaggtgcttacacaggaccatatgaattttattgcctctttagaaccccacgtcattatgtacattttgtcctccatctccgaaggcttaaccgccctggataccatggtctgcaccggttgttgttcgtgcctagatcacatcgtgacctatctattcaagcagctgagcagatcgacaaagaaacgcactacccctttgaatcaggaaagtgatagattcctccacataatgcagcagcatcctgagatgatccagcagatgcttagcacagtattaaacatcatcattttcgaggactgccggaatcagtggagcatgtcaagacccctcctcggactcatcctgctaaacgaaaaatacttctctgacctgcgaaattcgatagtgaattcccaaccccctgagaagcaacaggctatgcacctgtgtttcgaaaatttaatggagggtatcgagcgaaacctgctgaccaaaaacagagaccgatttacccagaacttgtcagcattcagaagagaggtaaatgatagtatgaaaaattctacctatggtgtgaactccaacgatatgatgtcatag

SEQ ID NO: 183806 - DNA, 3291 bp, Artificial Sequence
  derived and/or modified sequence
atggctgaccacgtgcagagcttggctcaacttgaaaatctctgtaaacaactgtatgagacaacggacactactacacggctccaggcagaaaaagctctagtggaattcacaaatagtccagattgtttgagcaagtgccagctgttgttggaaagggggtctagctcatacagccaactactggccgccacctgtctcacaaaactggtgagcaggaccaataacccattgcccctggaacagagaatcgatatccgaaattacgttctgaattacctcgccaccaggcctaaactggcaactttcgtgacgcaggcactgatccagctctacgcacgcattacgaagttgggttggttcgattgccagaaagacgactatgtttttcggaacgcaatcacagatgttacgcggttcctgcaggatagcgtggagtattgtattataggggtaaccatcctgtcgcagctgaccaatgagatcaatcaggtcagcgctactgcattcctgatagaggccgatactactcacccactgacaaaacatagaaagatagcttcatcattcagggactcaagtctgtttgacatcttcacattgtcatgtaacttgctcaaacaagcaagcggaaagaacctcaatcttaatgatgaatcccaacacgggcttctgatgcagctgcttaaactgacacacaattgtctcaatttcgactttatcggaacatctactgacgaatcatctgatgatctctgcaccgtgcaaattccaacaagctggcgaagcgcttttttggatagctctaccttgcagctcttctttgacctctaccactctattcctccttcttttagtccccttgtgctgtcgtgcctggtacagatcgcctctgtgaggaggtccctcttcaataacgcagagagagccaagttccttagccacttggtcgacggggtgaaacgaatactggaaaacccacagagcctgtccgatccaaacaactatcatgagttctgccggcttcttgcacgattaaagtctaactatcaactcggggaactggtgaaagtggagaactatccagaagttatacggctgatagccaattttaccgtgactagcctgcaacactgggagttcgcccctaactcagttcactatctcttgtcactctggcagagattagcggcgagcgttccctacgtgaaggctaccgaaccccacatgctcgagacatacacccccgaagttacaaaggcctacattacaagcaggcttgagagcgtccacattatactgagggatgggttggaagaccctctagaagacaccgggctggtccaacagcaactggaccagctctccacaataggaaggtgcgaatacgagaaaacatgcgccctcctcgtgcagctgttcgatcaatctgcccagagttatcaggaactcttgcaatcagctagcgccagtcccatggacatagccgtgcaggaaggaaggctgacatggttggtgtatatcataggcgcagttatcggggggcgggtcagcttcgcttccactgacgaacaggacgcaatggatggagaactggtctgtcgggtgcttcagttaatgaacctcacggactccaggctggctcaggccgggaatgaaaaacttgaactagccatgttgtctttctttgagcaattccgtaaaatctacatcggcgaccaagtgcagaaatcttcaaagctctatcgtcgcctgagtgaggtgctgggactgaatgacgagacaatggtgctgtccgtattcattgggaagatcattaccaatctcaagtactggggccggtgcgaaccgatcacttcaaagaccttgcagctgctgaatgacctttccatcggatatagtagcgtacgcaagctggtaaagctcagtgcagtgcaatttatgttgaacaatcacacgtccgagcatttttccttcctcgggattaacaatcagagcaacctgactgatatgaggtgcaggacaacattctacaccgcgctcgggcgcctgctaatggttgacttgggggaagatgaggaccagtacgagcaatttatgctaccactcacagctgctttcgaagctgtggcccagatgttttccactaactcatttaacgaacaagaagcgaagcggaccctggtcggtctggtgcgggatctccgcggcatcgcatttgcattcaatgctaagacctcttttatgatgctgtttgaatggatctacccctcctacatgccaattctgcagcgagcaatcgagttatggtatcacgatcctgcctgcaccactcctgtactcaaactcatggctgaactcgtgcacaatcggtctcaacgactgcagttcgacgtatcgtcaccaaacggtatcctgctgttccgagaaacttctaaaatgataactatgtacggaaacaggatccttaccctcggagaagtgcctaaagaccaggtctatgccctgaaattaaaagggatcagcatctgctttagcatgctgaaggcagctctcagcggcagttatgtgaacttcggggttttcagactgtacggggacgacgccctggacaacgccctgcagaccttcattaagctgctgctctccattccacactcagacctgctggactatcctaagctgagccaatcgtattattccctgctggaggttctgactcaggatcacatgaattttatcgcttcactcgagcctcatgtaattatgtacattctgtcctctatctcagagggacttacggccctggacactatggtgtgtacaggatgctgttcctgcctggatcacatcgtaacctacctgtttaaacagttgtcccggtccaccaagaagcggactacgcccctgaaccaggagtcagaccggtttcttcacatcatgcagcagcacccagagatgatccaacagatgctgagtaccgttctcaacatcattatatttgaagactgtcgcaatcaatggtctatgtcccggcccttgcttggactgattctgcttaacgaaaaatactttagcgatctccgaaacagcattgtcaacagccaaccaccggagaaacagcaggctatgcatctgtgctttgagaaccttatggagggtatcgaacgcaacctcctgactaaaaaccgcgatcggttcacacagaacctgtctgccttcagaagggaggtgaacgatagtatgaaaaattctacatatggggtgaattcaaacgatatgatgagctag

SEQ ID NO: 183807 - DNA, 3264 bp, Artificial Sequence
  derived and/or modified sequence
atggctgaccacgtgcagagcctggcccagctggagaacctgtgcaagcagctgtatgagaccacagacaccaccacccggctgcaggccgagaaggccctggtggagttcaccaacagcccagactgcctgagcaagtgccagctgctgctggagcggggcagcagcagctacagccagctgctggccgccacctgcctgaccaagctggtgtccaggaccaacaaccccctgcccctggagcagagaattgacatcagaaattatgtgctgaactacctggccacccggcccaagctggccacctttgtgacccaggccctgatccagctgtatgcccgcatcaccaagctgggctggtttgactgccagaaggatgattatgtgttcagaaatgccatcacagatgtgacccgcttcctgcaggacagcgtggagtactgcatcatcggcgtgaccatcctgagccagctgaccaatgagatcaaccaggccgacaccacccaccccctgaccaagcacaggaagatcgccagcagcttccgggacagcagcctgtttgacatcttcaccctgagctgcaacctgctgaagcaggccagcggcaagaacctgaacctgaatgatgagagccagcacggcctgctgatgcagctgctgaagctgacccacaactgcctgaactttgacttcatcggcaccagcacagatgagagcagtgatgacctgtgcaccgtgcagatccccacctcctggaggtctgccttcctggacagcagcaccctgcagctgttctttgacctgtaccacagcatccccccatccttcagccccctggtgctgagctgcctggtgcagatcgcctctgtgagaagaagcctcttcaacaatgctgagcgggccaagttcctgagccacctggtggatggagtgaagaggatcctggagaacccccagagcctgagtgaccccaacaactaccacgagttctgccgcctgctggcccggctgaagagcaactaccagctgggggagctggtgaaggtggagaactacccagaggtgatccggctgattgccaacttcaccgtgaccagcctgcagcactgggagtttgcccccaacagcgtgcactacctgctgagcctgtggcagaggctggccgcctctgtgccctacgtgaaggccacagagccccacatgctggagacctacaccccagaggtgaccaaggcctacatcaccagccggctggagagcgtgcacatcatcctgagagatggcctggaggaccccctggaggacaccggcctggtgcagcagcagctggaccagctgagcaccatcggccgctgtgaatatgagaagacctgtgccctgctggtgcagctgtttgaccagagcgcccagagctaccaggagctgctgcagagcgccagcgccagccccatggacattgctgtgcaggagggccgcctgacctggctggtgtacatcatcggggccgtcatcggcggccgggtgtcctttgccagcacagatgagcaggatgccatggatggagagctggtgtgccgggtgctgcagctgatgaacctgacagacagccggctggcccaggccggaaatgagaagctggagctggccatgctgtccttctttgagcagttcaggaagatctacatcggggaccaggtgcagaagagcagcaagctgtaccgccgcctgtctgaggtgctgggcctgaatgatgagaccatggtgctgagcgtcttcatcggcaagatcatcaccaacctgaagtactggggccgctgtgagcccatcaccagcaagaccctgcagctgctgaatgacctgagcatcggctacagctctgtgaggaagctggtgaagctgtctgctgtgcagttcatgctgaacaaccacaccagcgagcacttctccttcctgggcatcaacaaccagagcaacctgacagacatgcgctgcaggaccaccttctacacagccctgggccgcctgctgatggtggacctgggggaggatgaggaccagtatgagcagttcatgctgcccctgacagctgcctttgaggccgtggcccagatgttcagcaccaacagcttcaatgagcaggaggccaagaggaccctggtgggcctggtgcgggacctgcggggcatcgcctttgccttcaatgccaagaccagcttcatgatgctgtttgagtggatctaccccagctacatgcccatcctgcagagggccatcgagctgtggtaccatgaccctgcctgcaccacccctgtgctgaagctgatggccgagctggtgcacaacagaagccagaggctgcagtttgatgtgagcagccccaacggcatcctgctcttccgggagaccagcaagatgatcaccatgtatggcaaccgcatcctgaccctgggggaggtgcccaaggaccaggtgtatgccctgaagctgaagggcatcagcatctgcttctccatgctgaaggccgccctgagcggcagctatgtgaactttggagtcttccggctgtatggagatgatgccctggacaatgccctgcagaccttcatcaagctgctgctgagcatcccccacagcgacctgctggactaccccaagctgagccagagctactacagcctgctggaggtgctgacccaggaccacatgaacttcatcgccagcctggagccccacgtgatcatgtacatcctgagcagcatcagcgagggcctgacagccctggacaccatggtgtgcaccggctgctgcagctgcctggaccacatcgtgacctacctgttcaagcagctgagccgcagcaccaagaagaggaccacccccctgaaccaggagagtgaccgcttcctgcacatcatgcagcagcaccctgagatgatccagcagatgctgagcacagtgctgaacatcatcatctttgaggactgcaggaaccagtggagcatgagccggcccctgctgggcctcatcctgctgaatgagaagtacttcagtgacctgaggaacagcatcgtgaacagccagcccccagagaagcagcaggccatgcacctgtgctttgagaacctgatggagggcatcgagaggaacctgctgaccaagaacagagaccgcttcacccagaacctgagcgccttccggcgggaggtgaatgacagcatgaagaacagcacctacggcgtgaacagcaatgacatgatgtcctag

SEQ ID NO: 183808 - DNA, 3267 bp, Artificial Sequence
  derived and/or modified sequence
atgagggaccccggcaggaagagcctggcccagctggagaacctgtgcaagcagctgtatgagaccacagacaccaccacccggctgcaggccgagaaggccctggtggagttcaccaacagcccagactgcctgagcaagtgccagctgctgctggagcggggcagcagcagctacagccagctgctggccgccacctgcctgaccaagctggtgtccaggaccaacaaccccctgcccctggagcagagaattgacatccggaactacgtgctgaactacctggccacccggcccaagctggccacctttgtgacccaggccctgatccagctgtatgcccgcatcaccaagctgggctggtttgactgccagaaggatgattatgtgttcagaaatgccatcacagatgtgacccgcttcctgcaggacagcgtggagtactgcatcattggagtgaccatcctgagccagctgaccaatgagatcaaccaggccgacaccacccaccccctgaccaagcacaggaagatcgccagcagcttccgggacagcagcctgtttgacatcttcaccctgagctgcaacctgctgaagcaggccagcggcaagaacctgaacctgaatgatgagagccagcacggcctgctgatgcagctgctgaagctgacccacaactgcctgaactttgacttcatcggcaccagcacagatgagagcagtgatgacctgtgcaccgtgcagatccccacctcctggaggtctgccttcctggacagcagcaccctgcagctgttctttgacctgtaccacagcatcccccccagcttcagccccctggtgctgagctgcctggtgcagatcgcctctgtgcggcgcagcctcttcaacaatgctgagcgggccaagttcctgagccacctggtggatggagtgaagaggatcctggagaacccccagagcctgagtgaccccaacaactaccacgagttctgccgcctgctggcccggctgaagagcaactaccagctgggggagctggtgaaggtggagaactacccagaggtgatccgcctcatcgccaacttcaccgtgaccagcctgcagcactgggagtttgcccccaacagcgtgcactacctgctgagcctgtggcagaggctggccgcctctgtgccctacgtgaaggccacagagccccacatgctggagacctacaccccagaggtgaccaaggcctacatcaccagccggctggagagcgtgcacatcatcctgagagatggcctggaggaccccctggaggacaccggcctggtgcagcagcagctggaccagctgagcaccatcggccgctgtgaatatgagaagacctgtgccctgctggtgcagctgtttgaccagagcgcccagagctaccaggagctgctgcagagcgccagcgccagccccatggacattgctgtgcaggagggccgcctgacctggctggtgtacatcattggagctgtgattggaggccgggtgtcctttgccagcacagatgagcaggatgccatggatggagagctggtgtgccgggtgctgcagctgatgaacctgacagacagccggctggcccaggccggaaatgagaagctggagctggccatgctgtccttctttgagcagttcaggaagatctacatcggggaccaggtgcagaagagcagcaagctgtacagaaggctgtctgaggtgctgggcctgaatgatgagaccatggtgctgtctgtgttcatcggcaagatcatcaccaacctgaagtactggggccgctgtgagcccatcaccagcaagaccctgcagctgctgaatgacctgagcatcggctacagctctgtgaggaagctggtgaagctgtctgctgtgcagttcatgctgaacaaccacaccagcgagcacttctccttcctgggcatcaacaaccagagcaacctgacagacatgcgctgcaggaccaccttctacacagccctgggccgcctgctgatggtggacctgggagaagatgaggaccagtatgagcagttcatgctgcccctgacagctgcctttgaagctgtggcccagatgttcagcaccaacagcttcaatgagcaggaggccaagaggaccctggtgggcctggtgcgggacctgcggggcatcgcctttgccttcaatgccaagaccagcttcatgatgctgtttgagtggatctaccccagctacatgcccatcctgcagagggccatcgagctgtggtaccatgaccctgcctgcaccacccctgtgctgaagctgatggccgagctggtgcacaacagaagccagaggctgcagtttgatgtgagcagccccaacggcatcctgctcttccgggagaccagcaagatgatcaccatgtatggcaaccgcatcctgaccctgggggaggtgcccaaggaccaggtgtatgccctgaagctgaagggcatcagcatctgcttctccatgctgaaggccgccctgagcggcagctatgtgaactttggagtcttccggctgtatggagatgatgccctggacaatgccctgcagaccttcatcaagctgctgctgagcatcccccacagcgacctgctggactaccccaagctgagccagagctactacagcctgctggaggtgctgacccaggaccacatgaacttcatcgccagcctggagccccacgtgatcatgtacatcctgagcagcatcagcgagggcctgacagccctggacaccatggtgtgcaccggctgctgcagctgcctggaccacatcgtgacctacctgttcaagcagctgagccgcagcaccaagaagaggaccacccccctgaaccaggagagtgaccgcttcctgcacatcatgcagcagcaccctgagatgatccagcagatgctgagcacagtgctgaacatcatcatctttgaggactgcaggaaccagtggagcatgagccggcccctgctgggcctcatcctgctgaatgagaagtacttcagtgacctgagaaattccatcgtgaacagccagcccccagagaagcagcaggccatgcacctgtgctttgagaacctgatggagggcattgaaagaaacctgctgaccaagaacagagaccgcttcacccagaacctgagcgccttcagaagagaggtgaatgacagcatgaagaacagcacctatggagtgaacagcaatgacatgatgtcctag

SEQ ID NO: 183809 - DNA, 3291 bp, Artificial Sequence
  derived and/or modified sequence
atggctgaccacgtgcagagcctggcccagctggagaacctgtgcaagcagctgtatgagaccacagacaccaccacccggctgcaggccgagaaggccctggtggagttcaccaacagcccagactgcctgagcaagtgccagctgctgctggagcggggcagcagcagctacagccagctgctggccgccacctgcctgaccaagctggtgtccaggaccaacaaccccctgcccctggagcagagaattgacatcagaaattatgtgctgaactacctggccacccggcccaagctggccacctttgtgacccaggccctgatccagctgtatgcccgcatcaccaagctgggctggtttgactgccagaaggatgattatgtgttcagaaatgccatcacagatgtgacccgcttcctgcaggacagcgtggagtactgcatcatcggcgtgaccatcctgagccagctgaccaatgagatcaaccaggtgtctgccacagccttcctgattgaggccgacaccacccaccccctgaccaagcacaggaagatcgccagcagcttccgggacagcagcctgtttgacatcttcaccctgagctgcaacctgctgaagcaggccagcggcaagaacctgaacctgaatgatgagagccagcacggcctgctgatgcagctgctgaagctgacccacaactgcctgaactttgacttcatcggcaccagcacagatgagagcagtgatgacctgtgcaccgtgcagatccccacctcctggaggtctgccttcctggacagcagcaccctgcagctgttctttgacctgtaccacagcatcccccccagcttcagccccctggtgctgagctgcctggtgcagatcgcctctgtgcggcgcagcctcttcaacaatgctgagcgggccaagttcctgagccacctggtggatggagtgaagaggatcctggagaacccccagagcctgagtgaccccaacaactaccacgagttctgccgcctgctggcccggctgaagagcaactaccagctgggggagctggtgaaggtggagaactacccagaggtgatccgcctcatcgccaacttcaccgtgaccagcctgcagcactgggagtttgcccccaacagcgtgcactacctgctgagcctgtggcagaggctggccgcctctgtgccctacgtgaaggccacagagccccacatgctggagacctacaccccagaggtgaccaaggcctacatcaccagccggctggagagcgtgcacatcatcctgagagatggcctggaggaccccctggaggacaccggcctggtgcagcagcagctggaccagctgagcaccatcggccgctgtgaatatgagaagacctgtgccctgctggtgcagctgtttgaccagagcgcccagagctaccaggagctgctgcagagcgccagcgccagccccatggacattgctgtgcaggagggccgcctgacctggctggtgtacatcattggagctgtgattggaggccgggtgtcctttgccagcacagatgagcaggatgccatggatggagagctggtgtgccgggtgctgcagctgatgaacctgacagacagccggctggcccaggccggaaatgagaagctggagctggccatgctgtccttctttgagcagttcaggaagatctacatcggggaccaggtgcagaagagcagcaagctgtacagaaggctgtctgaggtgctgggcctgaatgatgagaccatggtgctgtctgtgttcatcggcaagatcatcaccaacctgaagtactggggccgctgtgagcccatcaccagcaagaccctgcagctgctgaatgacctgagcatcggctacagctctgtgaggaagctggtgaagctgtctgctgtgcagttcatgctgaacaaccacaccagcgagcacttctccttcctgggcatcaacaaccagagcaacctgacagacatgcgctgcaggaccaccttctacacagccctgggccgcctgctgatggtggacctgggagaagatgaggaccagtatgagcagttcatgctgcccctgacagctgcctttgaagctgtggcccagatgttcagcaccaacagcttcaatgagcaggaggccaagaggaccctggtgggcctggtgcgggacctgcggggcatcgcctttgccttcaatgccaagaccagcttcatgatgctgtttgagtggatctaccccagctacatgcccatcctgcagagggccatcgagctgtggtaccatgaccctgcctgcaccacccctgtgctgaagctgatggccgagctggtgcacaacagaagccagaggctgcagtttgatgtgagcagccccaacggcatcctgctcttccgggagaccagcaagatgatcaccatgtatggcaaccgcatcctgaccctgggggaggtgcccaaggaccaggtgtatgccctgaagctgaagggcatcagcatctgcttctccatgctgaaggccgccctgagcggcagctatgtgaactttggagtcttccggctgtatggagatgatgccctggacaatgccctgcagaccttcatcaagctgctgctgagcatcccccacagcgacctgctggactaccccaagctgagccagagctactacagcctgctggaggtgctgacccaggaccacatgaacttcatcgccagcctggagccccacgtgatcatgtacatcctgagcagcatcagcgagggcctgacagccctggacaccatggtgtgcaccggctgctgcagctgcctggaccacatcgtgacctacctgttcaagcagctgagccgcagcaccaagaagaggaccacccccctgaaccaggagagtgaccgcttcctgcacatcatgcagcagcaccctgagatgatccagcagatgctgagcacagtgctgaacatcatcatctttgaggactgcaggaaccagtggagcatgagccggcccctgctgggcctcatcctgctgaatgagaagtacttcagtgacctgagaaattccatcgtgaacagccagcccccagagaagcagcaggccatgcacctgtgctttgagaacctgatggagggcattgaaagaaacctgctgaccaagaacagagaccgcttcacccagaacctgagcgccttcagaagagaggtgaatgacagcatgaagaacagcacctatggagtgaacagcaatgacatgatgtcctag

SEQ ID NO: 183810 - DNA, 3264 bp, Artificial Sequence
  derived and/or modified sequence
atggccgaccacgtgcagagcctggcccagctggagaacctgtgcaagcagttatatgagaccaccgacactactacacggctccaagctgagaaggcgctcgttgaattcaccaactcacctgattgcctgagcaaatgccagcttctccttgagagaggaagcagcagctatagtcagttactggccgcaacctgccttactaaactagtctcaaggaccaataatccactgcctctcgagcagagaattgacataaggaattacgtcctgaactacctggctacacggccgaaactcgctacatttgtgacccaggcgctgatccagctgtatgcaaggattactaaactcgggtggtttgactgtcagaaagacgattatgtattcagaaatgctatcaccgacgtaactcgcttcctgcaggactctgtagaatactgtataattggcgttaccatccttagtcagctaacaaatgagatcaatcaggcagacacaacacacccactgaccaaacacaggaagattgcttcaagcttccgggacagttctctgtttgatatttttactctgagttgtaacctgctgaagcaggccagcggaaagaatctgaatctcaacgacgagtcccagcacggactactcatgcagctgctgaagctgacacacaattgtttaaatttcgacttcatcggtacatccaccgatgaatcttccgatgacctttgtaccgtgcagatccccacatcttggagatccgctttccttgatagcagcacccttcagctgttcttcgacttatatcactctatccccccttccttcagccccctggttttgtcttgccttgttcagattgcatcagtgaggcggagtttgttcaataatgcagaacgcgcaaaattcctgtcacatctggtggacggggtcaaaaggattctggaaaatcctcagagcctcagcgatcctaacaattaccacgagttctgccggcttctcgcgcggttgaagtctaattatcagctgggggaactagtgaaggttgaaaattatcccgaggtcatacgtctaatcgctaattttactgtcacctctttacagcactgggaattcgcacctaactcagtccattacttactctctctatggcagcggctggctgcctcggtgccatatgttaaagccactgaaccccacatgctggagacttataccccggaggtgaccaaagcttatatcacatcccggcttgagtctgttcacatcatcttgagagacggtctggaagacccactggaggatacaggcttggtccagcagcagctcgatcagttgagcaccatcggacgctgtgaatatgaaaagacctgtgctttgctggtgcaactgttcgatcagagtgcccaaagttatcaagaactactgcagagcgcgtctgcttcccccatggatatcgcagttcaggagggccgactcacctggctcgtctatattatcggagccgtcatcggtgggcgcgtgtcttttgccagtacggatgagcaggatgcgatggacggggaactggtttgccgcgtgctgcagctgatgaatttaacagactcgcggcttgcccaggcgggtaatgagaagctggaactggcaatgctaagcttttttgaacagtttcggaagatttacatcggagaccaggtgcagaagagtagcaaactgtatagacgtctgtccgaagttttgggcctaaatgacgaaaccatggtcctatccgttttcattggcaaaatcatcaccaatctcaaatactggggcaggtgtgaacccattactagtaaaactcttcagcttcttaacgacctatccataggctatagctcggtcaggaaactcgttaaactatctgcagttcagttcatgctcaacaaccacacaagcgagcactttagttttctcggcatcaacaatcagtctaatctcacagacatgcggtgccgcacgacattctatacagccctggggagactgctgatggtcgatctcggggaggatgaggaccaatatgagcagtttatgttaccattgactgcggccttcgaggccgtcgctcaaatgttttcgacaaattcattcaatgaacaggaggctaaacgcactctcgtgggactggtcagagatctgaggggaatagcgttcgccttcaacgctaagaccagcttcatgatgctctttgagtggatctacccctcttacatgcctatcctccagcgcgccattgagttatggtatcacgatcccgcatgcacgacacctgtactgaagctaatggcagaactggtacataatagaagtcagagactccagttcgatgtctcaagtccaaatggcatactgctgttccgagaaaccagtaaaatgattacaatgtacgggaatcgcatccttaccctgggcgaggtgcctaaggatcaggtgtacgccctgaaactgaagggaatatctatctgtttcagcatgctcaaggcagccctctcaggaagctatgtgaacttcggagtttttaggctctacggcgacgacgctctcgataatgcccttcaaaccttcatcaaactgctcttgagcatccctcactctgatctcttggactatcctaagctgtcccaaagttactacagcctgcttgaagttctgacacaggatcatatgaacttcatagcctcactggagccccacgtgatcatgtacatactaagctctataagcgaaggccttacggcattggacactatggtgtgtacaggatgctgctcatgtctcgatcatattgtgacctacctgttcaagcaactaagcaggagcactaagaagcgtaccacacctctgaatcaggagagcgaccgcttcttacacattatgcaacagcatccagagatgatacagcaaatgctgagcacggtgcttaacataattatcttcgaggactgccgcaatcagtggagcatgagccgcccacttcttggcctgatcctgctgaacgaaaaatacttttccgacttgcgaaattcaattgttaactcgcagccgcctgagaaacaacaggccatgcacctctgttttgagaacctcatggagggaatagagcggaacctgttaacaaagaatagggacaggtttacccagaatttaagcgctttccgacgggaggttaacgattctatgaaaaattctacttacggcgtgaactctaatgacatgatgagctag

SEQ ID NO: 183811 - DNA, 3267 bp, Artificial Sequence
  derived and/or modified sequence
atgcgggaccccggccggaagagcctggcccagctggagaacctgtgcaaacaactctacgaaactacagacactacaactcgcctccaggcggaaaaggccctggtcgagttcacaaatagtccggactgcttgtcaaagtgtcagctcctgttggagagaggatcaagctcttactcccagttacttgcagctacatgcttaaccaagctggtatctcgcaccaacaatcctttgccactcgagcaacgcatcgacataagaaactatgtgctgaactatctagcaacaagacctaagttggctacatttgtgactcaggcgctgatacagctgtatgctcggatcactaagctcggatggtttgactgccagaaggatgattacgtgttccggaacgccatcaccgatgtcacccgttttctgcaagacagtgtggaatactgcattatcggggtgactatactgtctcagttgaccaacgaaatcaatcaagccgataccacccatccactgaccaagcaccgcaaaatcgcttcctcctttcgggatagttccctctttgacatatttactctgtcatgcaacttgcttaaacaggcctccggcaagaacctaaacctgaacgacgaatcccagcacggtttgctgatgcagttgcttaaattgacccataattgtctgaacttcgacttcattgggacctctacagacgagagtagtgatgatctgtgcaccgtccaaatccctacttcctggagatccgccttcttagacagctcgaccctccaactgttctttgacttataccacagcatacctccatctttttcaccactcgtcctttcgtgcctcgtgcagatcgcaagcgtgagacgaagcctgttcaataacgctgagcgcgctaaattcctttcacaccttgtggacggcgtcaagaggattctcgagaatccgcagtcattgtcagacccaaacaattatcacgagttctgccggctactggctagactgaaatcaaattaccagctaggcgagctcgtcaaggtggagaactatccagaagttatccgtctcatagccaatttcacagtcacatccttgcagcattgggagttcgctccaaacagcgtgcactatctactctcgttatggcaacggttggccgcctccgtgccctatgtcaaagcgacagagcctcacatgcttgagacgtatacccccgaggttacaaaggcctatattaccagcagactggagagcgtgcacattattcttagggacggcctcgaggatcctctcgaggacaccggactggtccagcagcagctggaccagctttcaaccatcggcaggtgcgagtacgagaagacctgtgccctcttggtacaactcttcgatcagtcagcccagtcgtaccaagaactgcttcaaagcgccagcgctagcccaatggacatagcagtccaggagggaagacttacctggttggtgtacatcattggagcagtgatcggagggcgcgtgagttttgcctcaactgacgagcaggatgctatggatggagagctcgtgtgccgcgtgctgcagctgatgaacctgactgattcaagactagcacaagcgggaaatgaaaaactggaattagccatgctctctttctttgaacagtttcgcaaaatttatattggcgaccaggtccagaagtccagtaagttgtatcgacgtctgtccgaagtcctcggtctcaacgacgagactatggtcttgagcgtgtttattggcaaaattatcacaaatctgaagtactggggccgatgtgagcctataacgtccaaaactttacagcttctgaatgatttgtccattgggtacagcagcgtaagaaagctggttaagctgtccgccgtgcagtttatgcttaacaatcatacatcggaacatttctctttcttggggatcaataatcagagcaacttaaccgatatgcgctgccgtactacattttacaccgctctcggccgactgctcatggtagatctgggcgaagatgaggaccagtatgaacagttcatgctgcccctaacagcagccttcgaagcagtcgctcagatgttcagcactaattccttcaacgaacaggaagccaagcgcaccctagtcggcctagtgagggaccttagaggcatagccttcgcctttaacgccaagacctccttcatgatgctctttgaatggatctatcctagttatatgcctatccttcaacgcgcgattgaactgtggtaccacgacccagcctgtaccacaccggtcttgaaattgatggcagaactggtgcacaataggtcgcaaagactccaatttgatgtatcctccccgaatggcattcttctcttcagagagacctcaaagatgataactatgtacggaaatagaattttgacattgggcgaagtccctaaggaccaggtgtacgcacttaaactgaagggcatctctatttgcttctccatgctcaaagccgcgctttccggttcttatgtgaacttcggcgtgttccggctgtatggggatgacgctctcgacaatgccctacagacgttcatcaagctgttactgagcatcccccattccgaccttttagattacccgaaactgtcacagtcttactactcactcctcgaggtgcttacgcaggaccacatgaactttatcgcatcactggagcctcacgtgattatgtatattctgtctagcataagcgaaggactcaccgccctggacactatggtctgtaccggttgttgtagctgtttagatcatatcgttacctatctctttaagcagctttcacgttctacaaagaaacgcaccacacccctgaaccaagaatcggacaggttcctgcacatcatgcagcaacatcccgaaatgatccagcagatgctcagtacggtgcttaatatcattatttttgaggattgccgaaatcaatggtccatgtcacgtcctctgctgggcctcattttacttaacgaaaaatatttctcagacctgagaaatagtattgtgaactctcaaccccctgagaagcaacaagctatgcacctttgttttgagaacttgatggaagggatcgaacgtaacctcttaactaagaacagagacaggtttacacagaacttgagtgcttttagaagggaagttaacgatagcatgaagaatagcacctatggagtcaatagcaatgatatgatgtcatag

SEQ ID NO: 183812 - DNA, 3291 bp, Artificial Sequence
  derived and/or modified sequence
atggccgaccacgtgcagagcctggcccagctggagaacctgtgcaagcagctgtatgagactaccgacacaaccacccgactgcaagcagagaaggcccttgtggagttcaccaattccccggactgtttgtcaaagtgccagttactacttgagagagggtctagcagttactcacagctgttggcagcaacctgtttaaccaaactggtgtcacgaacaaataaccctctacctctggaacagcgcatagatattagaaactacgttctgaactacctcgcaaccaggcccaaacttgctacatttgttacccaggcccttattcaattgtacgccagaattacaaaactgggatggtttgactgccagaaggacgactacgtgtttcgaaatgctattacagatgtgacgagatttcttcaggacagtgtggaatactgtatcatcggcgtgaccatcctgtcacagcttacaaacgaaataaatcaagtcagcgccaccgcttttctcatcgaggccgatacaacacaccccttgacaaagcatagaaagattgcctcttcctttcgggattcatcccttttcgacatattcacgctctcctgtaacctcttgaagcaggcttccgggaagaacctcaacctaaatgacgaatctcaacacggacttctaatgcaactgctcaagctgacccataattgcctcaacttcgactttataggtactagtactgacgaatcgtccgacgacttgtgtaccgtacagatccctacttcatggcgctccgcgttcctggactccagtacactccagctgttttttgacttatatcactctatcccaccatctttctctcctttagtgctctcttgtctcgtacaaattgccagtgtgcgccgaagtctctttaataacgccgagagagctaagtttctgtcacatctggtcgatggcgtgaagcggatattagagaatccacagtcactctcagacccaaataattatcatgaattttgccgccttctcgcacggttgaaaagcaattaccagctcggcgaattggtaaaagtggagaactacccagaagtgatccgcctgatcgccaacttcacagtgacctctttgcagcactgggagttcgcaccaaatagcgttcattatctcctttctttatggcagcggcttgcagctagcgtgccatatgttaaagctacggagccacacatgttagagacctatactccagaggtgacgaaggcttacattactagtagactcgaatccgtgcacataatactccgagacggtctggaagatcctctggaagatactggcctcgtccagcagcagctggaccagctgtccaccatcgggagatgcgaatatgagaaaacgtgcgccttattggtgcaacttttcgaccaatccgctcaatcttatcaggagctccttcaatctgccagcgcctcgcctatggatattgccgtgcaggagggcaggctgacctggctggtctatattattggtgcagtgattggaggacgagtgtcatttgcttccactgatgagcaggacgccatggacggggaactggtatgtcgcgtactccagttaatgaatttaaccgacagtcggctggcacaggcggggaacgagaagctggaactggcaatgctaagttttttcgagcagttccggaagatctacattggcgaccaagttcaaaaatcgtccaaactgtacaggcgcttgtcagaagtgctcgggctgaacgacgagaccatggtgctcagtgtgtttatcgggaagataataaccaacctgaaatattggggaaggtgtgaacctataacctctaagacattgcagctgctcaatgacctgagcatcggatacagctctgtccggaagctggttaagctctctgcagtccagtttatgctgaataaccatacctccgagcacttcagcttccttggcatcaacaatcagtccaatttgacagacatgaggtgccgaactacattttacactgcactcgggagactgctcatggtcgacctcggggaagatgaggatcagtatgagcagttcatgctgccactcaccgccgcttttgaggcagtggcacagatgttttcgacaaatagctttaatgagcaggaggcaaagagaactttagtgggactggtaagggatctacgaggtatcgcgttcgcttttaatgcaaagactagcttcatgatgctatttgaatggatctacccatcttacatgcctatcctacagcgggcaattgaactctggtaccacgacccagcatgcactacccccgtgttaaagctaatggctgaactggttcataatcgcagccagcggctgcagttcgacgttagtagccccaacgggatactcctgtttcgggagacctccaagatgatcactatgtacggcaatcgtattctgactttgggggaagtaccgaaagatcaggtttatgctttaaagttgaaagggatcagtatctgttttagcatgttgaaagccgcgctctctggttcctacgtgaactttggagtgttcagactttatggagatgatgctctggataacgcccttcagacttttatcaagctgctgctgtctattccgcacagtgacttgctggattatccaaagctgagccagagctattacagcctgctggaagtcttaacacaggatcacatgaacttcatcgcctcactggagccccatgtaattatgtatattctcagctcgatatccgaaggcttaactgctttagataccatggtgtgtacagggtgctgcagctgcctggaccacatagtcacctacctgttcaaacagctaagccgctcgactaagaagcggactacccctcttaatcaggagtcagaccgcttccttcacatcatgcagcagcatccggaaatgatacaacagatgctctccacagtacttaacattatcattttcgaagattgtagaaaccaatggtccatgtctcggcccttattaggactcattctgctgaacgagaagtacttttccgatctccggaactctatagtgaacagtcagccacccgagaaacagcaggccatgcacctgtgctttgaaaacctgatggaggggatcgagcgcaatctcctcaccaaaaaccgagatcggttcacccaaaacctcagtgcattcagacgggaggttaatgacagcatgaaaaactcaacttatggggtgaattcgaatgatatgatgtcctag

SEQ ID NO: 183813 - DNA, 3264 bp, Artificial Sequence
  derived and/or modified sequence
atggcggaccatgtgcaaagcttggctcaactcgaaaatctgtgcaaacagctgtacgagaccacagataccacaacacggcttcaggccgagaaggccctggtggagttcactaactcccccgattgcctctctaagtgtcagctgctattggagcggggaagttcaagctactcccaactactcgctgctacctgcctgaccaagctagtctcgcgaactaataaccctttacctcttgagcagcggatcgacatcaggaattacgtgctgaactacctggccacacgcccaaagctcgcaacgttcgtcactcaggcccttatccagctgtatgctcggatcacaaagctgggctggttcgattgccagaaggacgactatgtctttcggaacgcaatcacagatgtcacccgctttttgcaggacagcgtcgaatactgtatcattggcgtgactatactgtcccagttaaccaatgagatcaatcaggccgacacaacacacccactgacgaagcacaggaagatcgctagctcttttcgagactctagcctctttgatatttttaccctgtcctgtaacctgcttaagcaagcgtcagggaaaaatctgaacttgaacgacgaaagccagcacggcctgctgatgcagcttctgaaactgacccacaactgcctgaacttcgatttcatcgggacatccacagatgaatccagtgatgacctatgcaccgtccagattcctacaagttggaggagcgcttttttagatagtagcacactgcagctgttctttgacctgtaccactccattccgccaagcttttcacccttggtgctgtcatgtctggtgcaaatagcatccgttcgtagatcattgtttaataatgctgagcgcgctaagtttcttagccacctggtggacggtgtgaagcggattttggagaacccgcagtctctcagcgatcctaacaactaccatgaattttgccggttgttggctcggctaaagtctaactaccagctaggcgagctggtcaaggtggagaactaccccgaagtgattagactgattgccaacttcactgtgacctctctccagcattgggaattcgccccaaattcagtgcactatctactcagcctctggcaaagattggccgctagtgtcccatacgtaaaagctactgagcctcacatgcttgaaacatacactcccgaagtgactaaagcgtacataacctccagactggagagcgtccatatcatcctgcgcgatggcctggaagatccacttgaggatacgggtctcgtccagcaacagctggaccagctgtccaccattggtcgctgtgagtatgagaaaacctgcgctctcttagtgcagttatttgatcagtccgcccagtcatatcaggaactactgcagagcgccagcgccagtcctatggacatcgcagtgcaagagggaaggctgacatggctggtgtacataatcggcgctgtcatcggaggcagagttagcttcgcatccactgacgagcaggacgccatggacggagaactcgtatgccgtgtgcttcagctgatgaacctgacagactctcgccttgctcaagccggaaacgaaaagctcgaactggccatgttaagttttttcgagcagttcagaaagatctatatcggtgatcaagtccagaaaagcagtaagctgtaccggaggctttccgaagtactgggactgaacgatgagacgatggtcctgagcgtattcattggaaagatcatcaccaacttaaaatattggggcaggtgcgaaccaatcacatccaagactcttcagttgctgaacgatctcagcattgggtattccagcgtgcggaaactggtaaaactttcagctgtgcaatttatgctgaataatcataccagcgagcacttttccttcttgggcattaataatcaatccaatctgaccgatatgaggtgtcgtactacattctataccgcactggggagattgcttatggtagacctcggtgaggacgaggatcagtatgagcaattcatgctcccactgactgctgcttttgaggcggtggctcagatgttcagtacaaattcctttaatgagcaggaggcaaagcgaacattagtaggtcttgtgcgcgacctgcgcggaatcgccttcgcattcaacgccaagacctcattcatgatgctgttcgaatggatctacccatcttatatgccaatcctgcagcgggctattgagctgtggtaccacgatccagcctgcactacacccgtcctgaaattgatggctgagctcgtgcataatcgctcccaacgcttgcagtttgacgttagttcaccaaacggaatactcttattccgagagacctcgaagatgattaccatgtacggtaaccgaattctcacccttggggaagtgcctaaggatcaagtgtatgctctgaagctcaagggcataagtatctgctttagcatgttgaaagcagccctcagtggatcttatgtcaactttggagtgttccgtctgtacggcgacgacgctctggataacgcgcttcagacgtttatcaagcttctgttgagcattccccatagtgacctgttagattaccccaaattgagccagagttactattctctcctagaggtcctgacccaggaccacatgaattttatcgcaagtcttgaaccgcacgtgattatgtacatcttgagcagcataagcgagggcctgaccgccctggatactatggtctgcacagggtgctgttcttgccttgatcacattgttacatacctgtttaaacagttatcaagatccacgaagaagcggactacacccctcaatcaggagagcgacaggtttctgcacatcatgcaacagcacccagaaatgattcagcagatgttgagtaccgttctgaatatcatcatctttgaggattgtagaaaccagtggagtatgtcacgcccactgctgggtctaatccttctgaatgaaaaatattttagtgacttacggaattcgattgtaaatagccagccacctgagaaacaacaggctatgcatctgtgcttcgagaacctgatggaagggatcgaaagaaatctgttaacaaagaatcgcgacagatttactcagaacctcagcgcatttcgccgtgaggtgaatgatagcatgaagaacagtacctacggtgtcaattcgaacgatatgatgagttag

SEQ ID NO: 183814 - DNA, 3267 bp, Artificial Sequence
  derived and/or modified sequence
atgcgcgaccccggaagaaaaagtctagcacagctggaaaatttgtgtaaacaactgtacgaaaccacagatactaccacgaggttacaggccgagaaggctctcgtggagttcactaacagtccagactgcctgtctaagtgtcagctgctgctcgaaaggggtagttctagctactcacagctcctcgcagccacttgtttaacaaaactggtttctaggactaataacccacttccgctggaacagcggatcgacatacggaactacgtccttaattatctggccacccgtcctaagctggcaacatttgttacacaggcattgattcagctttatgccaggatcactaaactgggatggtttgactgtcaaaaagacgactatgtgttccggaatgccataacagatgttacaaggttccttcaggactccgtcgagtattgtatcataggggtcacaattctcagccagctcacaaacgaaatcaaccaggcagacacgacacacccactcaccaagcacagaaagatagctagctcattccgggacagcagtttgttcgatatcttcaccctgagctgtaacttgcttaaacaagcctccggcaagaatttgaatctcaatgacgaaagtcagcatggcctcctcatgcagctgctcaagctgacgcacaactgtctaaatttcgacttcatcggcacatcaaccgacgagtctagtgatgatctgtgcaccgtgcagatacctacaagctggcgcagtgcttttttggacagttccactttgcagctcttctttgatctttatcactccattccacctagcttttcacctctggtcctgagctgtctggtgcagattgcctcggtgcgtcggagcctcttcaacaacgccgagcgggctaagttcctgtctcatctggtggatggtgttaagcgcatcttggagaacccacagagccttagcgacccaaacaactaccacgagttctgtaggttactagcaaggctgaaaagtaactaccagctgggggagctggttaaggtggaaaattatcctgaagtgatcaggctcatcgctaatttcaccgtgactagtctgcagcactgggaatttgcacccaatagtgtgcattaccttctctccctgtggcagcgtttggccgcatcagtcccttacgtgaaagctacggagccacacatgctcgaaacatacacccccgaagttactaaggcctacatcactagccgcctcgaatccgtgcacatcatccttagagacggactcgaagatcccctcgaggataccgggctagtgcagcagcaactggaccagctgagcacgataggtcggtgtgagtatgaaaaaacgtgcgccctgctggtccagctgtttgaccagagcgcgcagtcttaccaggaattactacaatctgcatcagctagtcccatggacattgccgtccaagaaggtcgactcacctggttggtgtacataattggggctgtgatagggggaagggtgagcttcgccagcactgatgagcaggatgctatggatggggaactggtttgccgcgtgcttcagttgatgaacctgacagacagccgcctcgcccaagctggcaatgagaagctagagctggctatgctctcctttttcgagcagtttaggaaaatctatattggggatcaggtgcagaagtcctccaaactctacaggcggctgagtgaggtgctgggactgaacgatgagacaatggtgctgtctgtgttcattgggaagatcattacgaacctcaaatattggggaagatgcgagcccatcaccagcaagactctgcaactgctgaacgaccttagcattggttatagttccgtgaggaagctggttaagttatctgccgtgcaattcatgctgaacaaccacacttccgagcatttcagttttctagggatcaacaatcagagcaacctgactgacatgcgttgtcggacaaccttttacactgccttaggccgactgttaatggtagacttgggggaggatgaggatcagtacgagcaatttatgctcccactaaccgccgcttttgaagccgttgcccagatgttttcgacgaacagctttaatgaacaagaggcgaaacgcactttggtggggctggtcagggatcttagggggatagccttcgcctttaatgcgaaaacctctttcatgatgctcttcgagtggatatacccttcctacatgccaatcctgcaacgggcaatcgaactgtggtaccatgaccccgcttgtacaactccggtgctgaagctaatggctgaactcgtgcacaatcgctcccaaagactgcaattcgacgtaagttccccaaacggtatcttgctctttcgggagacttctaagatgattacgatgtacgggaataggatcctgacactaggagaggtgccgaaggatcaggtgtatgctctcaaactaaaaggaatttccatctgcttttccatgcttaaggccgctctgtccggatcttatgtcaattttggcgttttcagactctatggcgatgacgcactcgacaacgccctgcagacatttatcaagctgcttttatccatacctcacagcgacctgctggactaccccaagctctcacagagctattatagcttgctggaggtgctgactcaggaccatatgaactttattgcgtccttggaaccccacgtaattatgtacatcctcagtagtatttcagagggtttaaccgcactggacaccatggtgtgcacgggatgctgctcctgcttagaccatatagttacctacttgttcaaacaactttcaaggtctactaagaagcgcaccactcccttaaaccaagaaagcgaccggttcctgcacattatgcaacaacatcctgagatgatccagcagatgctctctaccgtgctgaacataataatctttgaagactgtcgaaatcagtggtcgatgagtagaccgttactcgggctcattctgttaaatgagaaatacttttccgacttgcggaattctattgtcaacagtcagcccccagaaaagcaacaggcaatgcacttgtgttttgaaaacctgatggagggaatcgagagaaatcttttaactaagaatagagatagatttacccagaacctgtctgcatttagacgcgaagtgaacgactctatgaagaacagtacctatggagtgaattctaacgacatgatgtcatag

SEQ ID NO: 183815 - DNA, 3291 bp, Artificial Sequence
  derived and/or modified sequence
atggcagaccatgtacaatcgcttgcacagcttgagaatctctgcaagcagctctacgagacgacagataccactactcggcttcaagcagagaaagccttagtcgagtttacgaattcacctgattgtctgtccaaatgccagcttttgttagaacggggatccagctcatactctcaattactggctgctacatgccttacaaaactggtgtcccgcaccaataacccgctgccccttgagcaaaggatagacattcgtaattacgtcttaaactatctggctactcggccaaagcttgctacattcgtaacacaggctctgattcagctgtacgctcgcattactaaactcggatggtttgattgccagaaagatgactacgtcttcaggaacgctatcacagacgtcacacgctttctacaagattcagtagagtactgtattattggtgtgacaatcctgtctcagctgactaatgaaatcaaccaggtgtctgctaccgctttcctgatcgaggccgatacaacacaccctctgactaaacacaggaaaatagccagctccttccgtgattcctctttatttgacatctttaccctctcttgtaatctgctaaaacaagcatcggggaagaatttgaatctgaatgatgaatcacagcacggtttactgatgcagttgctgaagctaacccataattgtctgaacttcgatttcattggaacctcgaccgatgagtcaagcgacgacctgtgcacagtgcagattcccacttcctggaggtccgctttcctggactcatcaaccctgcagctgttcttcgacttatatcattcaattcctccttcattctctcctctggtgctcagctgcctcgttcagattgccagtgtgagaagatccttgttcaacaacgctgagcgtgccaagtttctttcccatctggtggatggggtgaagcggatcttggagaatccacagtcgctttccgacccaaacaattaccacgagttctgtaggcttttggcaaggctgaaaagcaactaccaactcggcgagctggtcaaggtggaaaactaccctgaagtgatccgccttatcgctaacttcaccgtgacaagccttcaacattgggagtttgctccaaactctgtgcactaccttctatcactgtggcaacggttggcggcaagcgtcccttacgtcaaagctaccgagccacatatgctggaaacttataccccagaagtcactaaagcctatataacatcccgcctggagtcagtgcatataattctgcgagacggactcgaagacccactggaggacacgggcttggtgcagcagcaattggaccagttgagcaccatcggcagatgcgagtacgaaaaaacctgtgctcttctggtgcaacttttcgaccaaagtgctcagtcctatcaagagctactccaatccgcctcagcctcaccaatggatatagctgttcaggagggccgtctgacttggttagtgtacatcatcggcgcagtcatcgggggtagagtgtcctttgcatcaacggatgagcaggatgccatggacggcgaacttgtgtgtagggtgctgcagctgatgaatctgacggactctagactagcccaagcagggaacgagaagctggaattggccatgctcagcttctttgagcagtttagaaagatatatattggggatcaggtccagaagtcatccaagctatataggcgccttagcgaggtgttgggcttaaacgatgagacaatggtcctgtctgtattcataggcaagattatcacaaacctcaagtactggggcagatgtgagcctatcacatctaagaccttacaacttctaaacgatctctcgatcggctatagcagcgtgcgcaagcttgtcaagctttctgctgtccagttcatgttgaataaccatactagcgaacatttcagcttcctcgggataaataaccaaagtaatctgactgatatgcgctgcagaaccacattttatactgctctcgggaggctgttgatggtcgacttgggggaggatgaagatcaatatgagcagtttatgctgcctttgactgccgcattcgaagcagtggcacagatgttttccaccaactccttcaacgagcaagaagctaagcgtactctggtgggtttggtccgggatctgaggggcatcgcctttgcctttaacgctaagacctctttcatgatgctgtttgagtggatatacccctcctatatgcctattcttcagcgggcaattgagctatggtaccacgatcctgcctgtaccacccccgtgctgaagctcatggccgagcttgtccacaacagatcccagcgtttacagttcgacgtcagctcgcccaatgggatcctgctattccgggagacctcaaagatgatcacgatgtatggaaatcgcatacttaccctaggagaggttcccaaagaccaagtttatgccttaaaactgaaaggcatttctatttgtttctccatgttgaaagctgctttaagcggctcttatgtgaacttcggcgtgttcaggctgtatggcgacgacgcacttgataacgctctccaaacatttataaagctgcttctttccatcccgcactcggatcttctggactatccaaagctgagccaaagctactactcgctgctggaagtgttaacccaggatcacatgaactttatcgcttcccttgaaccccatgtgatcatgtacattctaagttctattagtgagggtctgacagccctggacactatggtttgtacaggatgctgcagttgcctggatcacattgtcacttacctgtttaagcagctgagcagatcaaccaaaaagcgtaccactcccttaaatcaggaaagtgatcgattcttacacatcatgcagcagcaccccgaaatgatccagcagatgctcagtaccgtgctgaatatcattatttttgaggattgtcggaatcaatggtcaatgtctcggccattacttggactgatcctgttgaatgagaaatacttctcagatctccgaaactctatcgtgaactctcagccccctgagaagcagcaagcaatgcacctatgtttcgaaaacctcatggagggaatagaacgcaatctcctgaccaagaaccgggacagattcactcagaacctgtctgccttccgccgtgaggttaacgactccatgaagaactctacttacggcgtgaactcaaacgatatgatgtcttag

SEQ ID NO: 183816 - DNA, 3264 bp, Artificial Sequence
  derived and/or modified sequence
atggccgaccacgtgcagagcctggcccagctggagaacctgtgcaagcagctgtacgagaccaccgacaccaccaccagactgcaggccgagaaggccctggtggagttcaccaacagccccgactgcctgagcaagtgccagctgctgctggagagaggcagcagcagctacagccagctgctggccgccacctgcctgaccaagctggtgagcagaaccaacaaccccctgcccctggagcagagaatcgacatcagaaactacgtgctgaactacctggccaccagacccaagctggccaccttcgtgacccaggccctgatccagctgtacgccagaatcaccaagctgggctggttcgactgccagaaggacgactacgtgttcagaaacgccatcaccgacgtgaccagattcctgcaggacagcgtggagtactgcatcatcggcgtgaccatcctgagccagctgaccaacgagatcaaccaggccgacaccacccaccccctgaccaagcacagaaagatcgccagcagcttcagagacagcagcctgttcgacatcttcaccctgagctgcaacctgctgaagcaggccagcggcaagaacctgaacctgaacgacgagagccagcacggcctgctgatgcagctgctgaagctgacccacaactgcctgaacttcgacttcatcggcaccagcaccgacgagagcagcgacgacctgtgcaccgtgcagatccccaccagctggagaagcgccttcctggacagcagcaccctgcagctgttcttcgacctgtaccacagcatcccccccagcttcagccccctggtgctgagctgcctggtgcagatcgccagcgtgagaagaagcctgttcaacaacgccgagagagccaagttcctgagccacctggtggacggcgtgaagagaatcctggagaacccccagagcctgagcgaccccaacaactaccacgagttctgcagactgctggccagactgaagagcaactaccagctgggcgagctggtgaaggtggagaactaccccgaggtgatcagactgatcgccaacttcaccgtgaccagcctgcagcactgggagttcgcccccaacagcgtgcactacctgctgagcctgtggcagagactggccgccagcgtgccctacgtgaaggccaccgagccccacatgctggagacctacacccccgaggtgaccaaggcctacatcaccagcagactggagagcgtgcacatcatcctgagagacggcctggaggaccccctggaggacaccggcctggtgcagcagcagctggaccagctgagcaccatcggcagatgcgagtacgagaagacctgcgccctgctggtgcagctgttcgaccagagcgcccagagctaccaggagctgctgcagagcgccagcgccagccccatggacatcgccgtgcaggagggcagactgacctggctggtgtacatcatcggcgccgtgatcggcggcagagtgagcttcgccagcaccgacgagcaggacgccatggacggcgagctggtgtgcagagtgctgcagctgatgaacctgaccgacagcagactggcccaggccggcaacgagaagctggagctggccatgctgagcttcttcgagcagttcagaaagatctacatcggcgaccaggtgcagaagagcagcaagctgtacagaagactgagcgaggtgctgggcctgaacgacgagaccatggtgctgagcgtgttcatcggcaagatcatcaccaacctgaagtactggggcagatgcgagcccatcaccagcaagaccctgcagctgctgaacgacctgagcatcggctacagcagcgtgagaaagctggtgaagctgagcgccgtgcagttcatgctgaacaaccacaccagcgagcacttcagcttcctgggcatcaacaaccagagcaacctgaccgacatgagatgcagaaccaccttctacaccgccctgggcagactgctgatggtggacctgggcgaggacgaggaccagtacgagcagttcatgctgcccctgaccgccgccttcgaggccgtggcccagatgttcagcaccaacagcttcaacgagcaggaggccaagagaaccctggtgggcctggtgagagacctgagaggcatcgccttcgccttcaacgccaagaccagcttcatgatgctgttcgagtggatctaccccagctacatgcccatcctgcagagagccatcgagctgtggtaccacgaccccgcctgcaccacccccgtgctgaagctgatggccgagctggtgcacaacagaagccagagactgcagttcgacgtgagcagccccaacggcatcctgctgttcagagagaccagcaagatgatcaccatgtacggcaacagaatcctgaccctgggcgaggtgcccaaggaccaggtgtacgccctgaagctgaagggcatcagcatctgcttcagcatgctgaaggccgccctgagcggcagctacgtgaacttcggcgtgttcagactgtacggcgacgacgccctggacaacgccctgcagaccttcatcaagctgctgctgagcatcccccacagcgacctgctggactaccccaagctgagccagagctactacagcctgctggaggtgctgacccaggaccacatgaacttcatcgccagcctggagccccacgtgatcatgtacatcctgagcagcatcagcgagggcctgaccgccctggacaccatggtgtgcaccggctgctgcagctgcctggaccacatcgtgacctacctgttcaagcagctgagcagaagcaccaagaagagaaccacccccctgaaccaggagagcgacagattcctgcacatcatgcagcagcaccccgagatgatccagcagatgctgagcaccgtgctgaacatcatcatcttcgaggactgcagaaaccagtggagcatgagcagacccctgctgggcctgatcctgctgaacgagaagtacttcagcgacctgagaaacagcatcgtgaacagccagccccccgagaagcagcaggccatgcacctgtgcttcgagaacctgatggagggcatcgagagaaacctgctgaccaagaacagagacagattcacccagaacctgagcgccttcagaagagaggtgaacgacagcatgaagaacagcacctacggcgtgaacagcaacgacatgatgagctag

SEQ ID NO: 183817 - DNA, 3267 bp, Artificial Sequence
  derived and/or modified sequence
atgagagaccccggcagaaagagcctggcccagctggagaacctgtgcaagcagctgtacgagaccaccgacaccaccaccagactgcaggccgagaaggccctggtggagttcaccaacagccccgactgcctgagcaagtgccagctgctgctggagagaggcagcagcagctacagccagctgctggccgccacctgcctgaccaagctggtgagcagaaccaacaaccccctgcccctggagcagagaatcgacatcagaaactacgtgctgaactacctggccaccagacccaagctggccaccttcgtgacccaggccctgatccagctgtacgccagaatcaccaagctgggctggttcgactgccagaaggacgactacgtgttcagaaacgccatcaccgacgtgaccagattcctgcaggacagcgtggagtactgcatcatcggcgtgaccatcctgagccagctgaccaacgagatcaaccaggccgacaccacccaccccctgaccaagcacagaaagatcgccagcagcttcagagacagcagcctgttcgacatcttcaccctgagctgcaacctgctgaagcaggccagcggcaagaacctgaacctgaacgacgagagccagcacggcctgctgatgcagctgctgaagctgacccacaactgcctgaacttcgacttcatcggcaccagcaccgacgagagcagcgacgacctgtgcaccgtgcagatccccaccagctggagaagcgccttcctggacagcagcaccctgcagctgttcttcgacctgtaccacagcatcccccccagcttcagccccctggtgctgagctgcctggtgcagatcgccagcgtgagaagaagcctgttcaacaacgccgagagagccaagttcctgagccacctggtggacggcgtgaagagaatcctggagaacccccagagcctgagcgaccccaacaactaccacgagttctgcagactgctggccagactgaagagcaactaccagctgggcgagctggtgaaggtggagaactaccccgaggtgatcagactgatcgccaacttcaccgtgaccagcctgcagcactgggagttcgcccccaacagcgtgcactacctgctgagcctgtggcagagactggccgccagcgtgccctacgtgaaggccaccgagccccacatgctggagacctacacccccgaggtgaccaaggcctacatcaccagcagactggagagcgtgcacatcatcctgagagacggcctggaggaccccctggaggacaccggcctggtgcagcagcagctggaccagctgagcaccatcggcagatgcgagtacgagaagacctgcgccctgctggtgcagctgttcgaccagagcgcccagagctaccaggagctgctgcagagcgccagcgccagccccatggacatcgccgtgcaggagggcagactgacctggctggtgtacatcatcggcgccgtgatcggcggcagagtgagcttcgccagcaccgacgagcaggacgccatggacggcgagctggtgtgcagagtgctgcagctgatgaacctgaccgacagcagactggcccaggccggcaacgagaagctggagctggccatgctgagcttcttcgagcagttcagaaagatctacatcggcgaccaggtgcagaagagcagcaagctgtacagaagactgagcgaggtgctgggcctgaacgacgagaccatggtgctgagcgtgttcatcggcaagatcatcaccaacctgaagtactggggcagatgcgagcccatcaccagcaagaccctgcagctgctgaacgacctgagcatcggctacagcagcgtgagaaagctggtgaagctgagcgccgtgcagttcatgctgaacaaccacaccagcgagcacttcagcttcctgggcatcaacaaccagagcaacctgaccgacatgagatgcagaaccaccttctacaccgccctgggcagactgctgatggtggacctgggcgaggacgaggaccagtacgagcagttcatgctgcccctgaccgccgccttcgaggccgtggcccagatgttcagcaccaacagcttcaacgagcaggaggccaagagaaccctggtgggcctggtgagagacctgagaggcatcgccttcgccttcaacgccaagaccagcttcatgatgctgttcgagtggatctaccccagctacatgcccatcctgcagagagccatcgagctgtggtaccacgaccccgcctgcaccacccccgtgctgaagctgatggccgagctggtgcacaacagaagccagagactgcagttcgacgtgagcagccccaacggcatcctgctgttcagagagaccagcaagatgatcaccatgtacggcaacagaatcctgaccctgggcgaggtgcccaaggaccaggtgtacgccctgaagctgaagggcatcagcatctgcttcagcatgctgaaggccgccctgagcggcagctacgtgaacttcggcgtgttcagactgtacggcgacgacgccctggacaacgccctgcagaccttcatcaagctgctgctgagcatcccccacagcgacctgctggactaccccaagctgagccagagctactacagcctgctggaggtgctgacccaggaccacatgaacttcatcgccagcctggagccccacgtgatcatgtacatcctgagcagcatcagcgagggcctgaccgccctggacaccatggtgtgcaccggctgctgcagctgcctggaccacatcgtgacctacctgttcaagcagctgagcagaagcaccaagaagagaaccacccccctgaaccaggagagcgacagattcctgcacatcatgcagcagcaccccgagatgatccagcagatgctgagcaccgtgctgaacatcatcatcttcgaggactgcagaaaccagtggagcatgagcagacccctgctgggcctgatcctgctgaacgagaagtacttcagcgacctgagaaacagcatcgtgaacagccagccccccgagaagcagcaggccatgcacctgtgcttcgagaacctgatggagggcatcgagagaaacctgctgaccaagaacagagacagattcacccagaacctgagcgccttcagaagagaggtgaacgacagcatgaagaacagcacctacggcgtgaacagcaacgacatgatgagctag

SEQ ID NO: 183818 - DNA, 3291 bp, Artificial Sequence
  derived and/or modified sequence
atggccgaccacgtgcagagcctggcccagctggagaacctgtgcaagcagctgtacgagaccaccgacaccaccaccagactgcaggccgagaaggccctggtggagttcaccaacagccccgactgcctgagcaagtgccagctgctgctggagagaggcagcagcagctacagccagctgctggccgccacctgcctgaccaagctggtgagcagaaccaacaaccccctgcccctggagcagagaatcgacatcagaaactacgtgctgaactacctggccaccagacccaagctggccaccttcgtgacccaggccctgatccagctgtacgccagaatcaccaagctgggctggttcgactgccagaaggacgactacgtgttcagaaacgccatcaccgacgtgaccagattcctgcaggacagcgtggagtactgcatcatcggcgtgaccatcctgagccagctgaccaacgagatcaaccaggtgagcgccaccgccttcctgatcgaggccgacaccacccaccccctgaccaagcacagaaagatcgccagcagcttcagagacagcagcctgttcgacatcttcaccctgagctgcaacctgctgaagcaggccagcggcaagaacctgaacctgaacgacgagagccagcacggcctgctgatgcagctgctgaagctgacccacaactgcctgaacttcgacttcatcggcaccagcaccgacgagagcagcgacgacctgtgcaccgtgcagatccccaccagctggagaagcgccttcctggacagcagcaccctgcagctgttcttcgacctgtaccacagcatcccccccagcttcagccccctggtgctgagctgcctggtgcagatcgccagcgtgagaagaagcctgttcaacaacgccgagagagccaagttcctgagccacctggtggacggcgtgaagagaatcctggagaacccccagagcctgagcgaccccaacaactaccacgagttctgcagactgctggccagactgaagagcaactaccagctgggcgagctggtgaaggtggagaactaccccgaggtgatcagactgatcgccaacttcaccgtgaccagcctgcagcactgggagttcgcccccaacagcgtgcactacctgctgagcctgtggcagagactggccgccagcgtgccctacgtgaaggccaccgagccccacatgctggagacctacacccccgaggtgaccaaggcctacatcaccagcagactggagagcgtgcacatcatcctgagagacggcctggaggaccccctggaggacaccggcctggtgcagcagcagctggaccagctgagcaccatcggcagatgcgagtacgagaagacctgcgccctgctggtgcagctgttcgaccagagcgcccagagctaccaggagctgctgcagagcgccagcgccagccccatggacatcgccgtgcaggagggcagactgacctggctggtgtacatcatcggcgccgtgatcggcggcagagtgagcttcgccagcaccgacgagcaggacgccatggacggcgagctggtgtgcagagtgctgcagctgatgaacctgaccgacagcagactggcccaggccggcaacgagaagctggagctggccatgctgagcttcttcgagcagttcagaaagatctacatcggcgaccaggtgcagaagagcagcaagctgtacagaagactgagcgaggtgctgggcctgaacgacgagaccatggtgctgagcgtgttcatcggcaagatcatcaccaacctgaagtactggggcagatgcgagcccatcaccagcaagaccctgcagctgctgaacgacctgagcatcggctacagcagcgtgagaaagctggtgaagctgagcgccgtgcagttcatgctgaacaaccacaccagcgagcacttcagcttcctgggcatcaacaaccagagcaacctgaccgacatgagatgcagaaccaccttctacaccgccctgggcagactgctgatggtggacctgggcgaggacgaggaccagtacgagcagttcatgctgcccctgaccgccgccttcgaggccgtggcccagatgttcagcaccaacagcttcaacgagcaggaggccaagagaaccctggtgggcctggtgagagacctgagaggcatcgccttcgccttcaacgccaagaccagcttcatgatgctgttcgagtggatctaccccagctacatgcccatcctgcagagagccatcgagctgtggtaccacgaccccgcctgcaccacccccgtgctgaagctgatggccgagctggtgcacaacagaagccagagactgcagttcgacgtgagcagccccaacggcatcctgctgttcagagagaccagcaagatgatcaccatgtacggcaacagaatcctgaccctgggcgaggtgcccaaggaccaggtgtacgccctgaagctgaagggcatcagcatctgcttcagcatgctgaaggccgccctgagcggcagctacgtgaacttcggcgtgttcagactgtacggcgacgacgccctggacaacgccctgcagaccttcatcaagctgctgctgagcatcccccacagcgacctgctggactaccccaagctgagccagagctactacagcctgctggaggtgctgacccaggaccacatgaacttcatcgccagcctggagccccacgtgatcatgtacatcctgagcagcatcagcgagggcctgaccgccctggacaccatggtgtgcaccggctgctgcagctgcctggaccacatcgtgacctacctgttcaagcagctgagcagaagcaccaagaagagaaccacccccctgaaccaggagagcgacagattcctgcacatcatgcagcagcaccccgagatgatccagcagatgctgagcaccgtgctgaacatcatcatcttcgaggactgcagaaaccagtggagcatgagcagacccctgctgggcctgatcctgctgaacgagaagtacttcagcgacctgagaaacagcatcgtgaacagccagccccccgagaagcagcaggccatgcacctgtgcttcgagaacctgatggagggcatcgagagaaacctgctgaccaagaacagagacagattcacccagaacctgagcgccttcagaagagaggtgaacgacagcatgaagaacagcacctacggcgtgaacagcaacgacatgatgagctag

SEQ ID NO: 183819 - protein, 1132 aa, Artificial Sequence
  derived and/or modified sequence
MEVDTEEKRHRTRSKGVRVPVEPAIQELFSCPTPGCDGSGHVSGKYARHRSVYGCPLAKKRKTQDKQPQEPAPKRKPFAVKADSSSVDECDDSDGTEDMDEKEEDEEEEEEEEEENEDHQMNCHNTRIMQDTEKDDNNNDEYDNYDELVAKSLLNLGKIAEDAAYRARTESEMNSNTSNSLEDDSDKNENLGRKSELSLDLDSDVVRETVDSLKLLAQGHGVVLSENMNDRNYADSMSQQDSRNMNYVMLGKPMNNGLMEKMVEESDEEVCLSSLECLRNQCFDLARKLSETNPQERNPQQNMNIRQHVRPEEDFPGRTPDRNYSDMLNLMRLEEQLSPRSRVFASCAKEDGCHERDDDTTSVNSDRSEEVFDMTKGNLTLLEKAIALETERAKAMREKMAMEAGRRDNMRSYEDQSPRQLPGEDRKPKSSDSHVKKPYYDPSRTEKKESKCPTPGCDGTGHVTGLYPHHRSLSGCPHKDRVPPEILAMHESVLKCPTPGCTGRGHVNSNRNSHRSLSGCPIAAAEKLAKAQEKHQSCDVSKSSQASDRVLRPMCFVKQLEIPQYGYRNNVPTTTPRSNLAKELEKYSKTSFEYNSYDNHTYGKRAIAPKVQTRDISPKGYDDAKRYCKDPSPSSSSTSSYAPSSSSNLSCGGGSSASSTCSKSSFDYTHDMEAAHMAATAILNLSTRCREMPQNLSTKPQDLCATRNPDMEVDENGTLDLSMNKQRPRDSCCPILTPLEPMSPQQQAVMNNRCFQLGEGDCWDLPVDYTKMKPRRIDEDESKDITPEDLDPFQEALEERRYPGEVTIPSPKPKYPQCKESKKDLITLSGCPLADKSIRSMLATSSQELKCPTPGCDGSGHITGNYASHRSLSGCPRAKKSGIRIAQSKEDKEDQEPIRCPVPGCDGQGHITGKYASHRSASGCPLAAKRQKDGYLNGSQFSWKSVKTEGMSCPTPGCDGSGHVSGSFLTHRSLSGCPRATSAMKKAKLSGEQMLTIKQRASNGIENDEEIKQLDEEIKELNESNSQMEADMIKLRTQITTMESNLKTIEEENKVIEQQNESLLHELANLSQSLIHSLANIQLPHMDPINEQNFDAYVTTLTEMYTNQDRYQSPENKALLENIKQAVRGIQV

SEQ ID NO: 183820 - protein, 1184 aa, Artificial Sequence
  derived and/or modified sequence
MEVDTEEKRHRTRSKGVRVPVEPAIQELFSCPTPGCDGSGHVSGKYARHRSVYGCPLAKKRKTQDKQPQEPAPKRKPFAVKADSSSVDECDDSDGTEDMDEKEEDEGEEYSEDNDEPGDEDEEDEEGDREEEEEIEEEDEDDDEDGEDVEDEEEEEEEEEEEEEEEENEDHQMNCHNTRIMQDTEKDDNNNDEYDNYDELVAKSLLNLGKIAEDAAYRARTESEMNSNTSNSLEDDSDKNENLGRKSELSLDLDSDVVRETVDSLKLLAQGHGVVLSENMNDRNYADSMSQQDSRNMNYVMLGKPMNNGLMEKMVEESDEEVCLSSLECLRNQCFDLARKLSETNPQERNPQQNMNIRQHVRPEEDFPGRTPDRNYSDMLNLMRLEEQLSPRSRVFASCAKEDGCHERDDDTTSVNSDRSEEVFDMTKGNLTLLEKAIALETERAKAMREKMAMEAGRRDNMRSYEDQSPRQLPGEDRKPKSSDSHVKKPYYDPSRTEKKESKCPTPGCDGTGHVTGLYPHHRSLSGCPHKDRVPPEILAMHESVLKCPTPGCTGRGHVNSNRNSHRSLSGCPIAAAEKLAKAQEKHQSCDVSKSSQASDRVLRPMCFVKQLEIPQYGYRNNVPTTTPRSNLAKELEKYSKTSFEYNSYDNHTYGKRAIAPKVQTRDISPKGYDDAKRYCKDPSPSSSSTSSYAPSSSSNLSCGGGSSASSTCSKSSFDYTHDMEAAHMAATAILNLSTRCREMPQNLSTKPQDLCATRNPDMEVDENGTLDLSMNKQRPRDSCCPILTPLEPMSPQQQAVMNNRCFQLGEGDCWDLPVDYTKMKPRRIDEDESKDITPEDLDPFQEALEERRYPGEVTIPSPKPKYPQCKESKKDLITLSGCPLADKSIRSMLATSSQELKCPTPGCDGSGHITGNYASHRSLSGCPRAKKSGIRIAQSKEDKEDQEPIRCPVPGCDGQGHITGKYASHRSASGCPLAAKRQKDGYLNGSQFSWKSVKTEGMSCPTPGCDGSGHVSGSFLTHRSLSGCPRATSAMKKAKLSGEQMLTIKQRASNGIENDEEIKQLDEEIKELNESNSQMEADMIKLRTQITTMESNLKTIEEENKVIEQQNESLLHELANLSQSLIHSLANIQLPHMDPINEQNFDAYVTTLTEMYTNQDRYQSPENKALLENIKQAVRGIQV

SEQ ID NO: 183821 - DNA, 3399 bp, Artificial Sequence
  derived and/or modified sequence
atggaggtggataccgaagagaagaggcacagaaccagaagcaagggggttcgggttcccgtggagcccgcaatccaggaactgttttcttgtcccaccccaggctgtgacggctcaggccacgtgagcggcaagtacgcacggcatcgttccgtgtacggctgtcccctggcaaaaaaacgaaagactcaagataaacaacctcaggaacctgcaccgaagcggaagcccttcgctgtgaaggccgatagctccagcgtcgacgagtgtgatgactcggatggcacagaggatatggacgaaaaagaggaggacgaggaagaggaagaagaggaagaagaggaaaatgaggaccaccaaatgaattgtcataatactcgaatcatgcaggacactgagaaagatgataataacaacgatgagtacgataattacgacgagctggttgcgaagtcactcctgaatttgggaaagattgccgaggatgccgcctaccgtgcccgcactgaatcagagatgaactcaaatacctctaactccctcgaggacgattctgataagaacgagaacctgggacgaaaatccgaactatcacttgacctggatagcgacgtcgtgcgtgagacagtggattcacttaaacttcttgctcagggccatggtgtggtgttatctgaaaatatgaacgatcgtaattacgccgactcaatgtcccaacaggatagtaggaatatgaattatgtgatgctgggtaagcccatgaataatggtctgatggaaaaaatggtcgaggagagtgatgaggaggtctgcctcagctcactcgaatgcctgcgcaatcagtgttttgatctcgctaggaagttgtccgaaaccaatccccaggaacggaaccctcagcagaacatgaatattcgccagcatgtgcgacccgaagaggatttcccagggcggaccccagataggaactactccgacatgttgaacctgatgcgactcgaggagcagctgagccctcggagccgggtattcgccagctgtgcgaaagaagacggctgtcatgagagagacgatgatactacctcagtgaactcagatagatccgaggaagtctttgacatgaccaagggaaacctaacattgttagaaaaggccatagctctggagacagagagagctaaggctatgcgtgaaaagatggctatggaagcaggcagacgcgataatatgcgctcctacgaggaccaatctccccggcagctgcctggcgaggaccggaagcccaagtcgtccgactctcatgtgaaaaaaccctactacgacccatcaaggactgagaaaaaggagtccaaatgtccgacccctgggtgcgatgggactgggcatgtcactgggctgtatccccatcacaggtctctgtcaggctgtccacataaggatagggtgccccctgaaatcctggcaatgcatgaaagcgtgttaaaatgcccaactcccggttgtaccggacgcggtcatgtgaatagcaaccgaaattctcaccgatcactctccggttgccccattgcggccgctgagaagcttgcaaaagcccaggagaagcaccaatcctgtgacgtaagcaaatcctctcaggcctctgatcgcgtcctgcggcccatgtgcttcgtgaagcagcttgagattccccaatacggctatcgaaacaacgttccgacgactacgcccagatcaaacctcgccaaggaactggagaaatactcgaaaacgagctttgagtacaactcttatgacaatcacacatacggcaaaagggccatagcccctaaagttcagacacgagatatcagcccaaagggctacgacgacgcaaagcgctattgcaaagatccctcaccatcttcctcttcaacttctagttacgcacctagtagttcctccaatctgtcttgtggggggggatccagcgcaagctccacctgcagcaagtcctctttcgactatacgcacgatatggaggccgctcatatggccgcaacagccatcctcaacttatctacacgttgccgagagatgcctcaaaacctgagcaccaagccacaggacctctgtgctacccggaaccctgatatggaagtggacgagaatgggacgctggacttgtcaatgaacaaacagagacctagggactcttgctgccctatactgactccactagagccaatgtctccccagcagcaggccgttatgaataaccggtgtttccagctgggagaaggcgactgttgggatctcccagtcgactacaccaagatgaaacccagaagaatcgacgaggatgagtctaaagacatcacacccgaagatctcgacccatttcaggaagccttggaagaacgccggtatcccggggaggtgactatcccatccccaaagcccaaatatccccagtgcaaggagtcgaagaaagacctgataactctgtcaggatgccctttggcagacaagtcgattcggtcgatgctggcaaccagttcccaagagctgaaatgccccacgcccggctgtgatggaagtggccatatcacaggaaactatgcatctcaccgatccttgagtgggtgccctagggccaaaaaatcggggattcgcatagcgcaatcgaaggaggacaaggaggaccaggaacccataaggtgccccgtgcctggttgcgacgggcagggccacataaccgggaaatatgcaagtcatcgctctgcttcaggttgccctctggccgctaaacgtcagaaggacggctacctgaacgggtctcagtttagctggaagtcagtgaagacggaggggatgtcgtgcccgaccccagggtgtgacgggtcaggccacgtatcaggaagctttctgacccatcgaagcctcagcggctgccctagggctacgtcagccatgaaaaaagcaaaattgtccggcgagcagatgctcacaatcaaacagcgggcttccaatggcatagaaaacgatgaggagattaaacagctggatgaagaaataaaagagctgaatgagtctaactcccagatggaagcagacatgatcaaactgaggacccagatcaccaccatggagtctaacctcaagacaatcgaggaagagaacaaagtgattgaacaacagaatgagtcccttttgcacgagctcgcaaatctgtcccagagcctcatccactccctcgccaacattcagcttccccacatggaccctataaatgagcaaaatttcgatgcatatgtaactactctgaccgagatgtacactaatcaggaccggtatcaatcgccagagaataaggccctactggaaaacattaagcaggctgtaaggggcatacaggtctag

SEQ ID NO: 183822 - DNA, 3555 bp, Artificial Sequence
  derived and/or modified sequence
atggaggttgatacagaagagaagcgtcacaggacaagatctaaaggtgtcagggttccagtggagcctgcgattcaggaactgttctcctgccccactccggggtgtgatgggtctggtcatgtttcggggaagtacgctcgacaccggtctgtatacgggtgcccactggcgaagaaacgtaaaacacaggataagcaacctcaggagccggccccaaagcgaaaacccttcgcggttaaggccgactcgtcctctgtggatgagtgtgacgacagcgatggcaccgaggatatggacgagaaggaagaggatgaaggtgaggaatattccgaagataacgatgagcccggcgacgaagatgaggaggacgaggagggagatagggaagaggaagaggagatagaagaagaagatgaagacgacgatgaggacggcgaggacgtagaagatgaagaggaagaagaggaggaggaggaggaagaagaggaggaagaagaaaacgaagaccatcagatgaactgccacaacacccggatcatgcaagacacagagaaagatgataataataacgacgaatacgacaactacgatgagctggttgccaagagcctacttaacctcggcaaaatcgcggaggatgcagcataccgcgctcgtactgagtccgagatgaacagcaacaccagtaatagcttggaagacgattccgacaagaacgaaaatctggggagaaaaagcgagttatcactggatctggactccgacgttgtacgagaaacagttgattcactgaaacttcttgctcaaggccacggcgtggtgctctctgaaaacatgaacgatcgcaactacgctgattccatgagtcaacaggattctcgaaatatgaactacgtgatgctgggaaaaccgatgaacaacggcctgatggagaagatggtcgaggaatccgacgaggaagtgtgtcttagcagccttgagtgtttacggaaccagtgctttgatctggccaggaagctgtctgaaacgaacccccaggaacgcaacccacagcaaaatatgaacattcggcagcatgtcaggccagaggaggactttcctgggcggactcccgatcggaactactccgatatgctgaaccttatgagacttgaggagcagctatctcctaggtctcgagtatttgccagctgcgcaaaagaggacggctgtcatgagcgcgacgatgacacaacaagcgtgaattccgacaggagcgaggaggtttttgatatgaccaagggcaacctgaccctgctggaaaaagccatcgccttggaaacagagagggccaaggccatgcgagaaaaaatggccatggaggccggtcgccgggataatatgagaagttacgaagaccaatcaccgcgacagcttccaggggaggataggaaacctaagtcctccgatagccacgtgaagaaaccttactatgacccttctaggaccgagaagaaggaatccaaatgtccaacgcctgggtgtgacggtaccgggcatgtgaccggcctgtacccacatcaccggtctctcagcggctgtccacataaggatcgcgtgcctcctgagatcttggcaatgcatgaaagtgtgctaaagtgccccaccccaggctgtacgggtcgagggcacgttaacagtaatagaaactcccacaggtccctttcaggttgtcccatcgccgctgcagaaaagttggccaaggctcaggagaagcaccagagttgcgatgtgagcaaatctagccaggccagcgacagggtgttgagaccaatgtgcttcgtgaagcaactggagattccccagtacggatatagaaataacgtgcccactacaactccgcgatctaatctagccaaagagctggagaagtattccaagacgagcttcgagtacaacagctacgataaccatacatacggcaagagagccattgcgcctaaggtccaaacaagggacatctcccccaagggatacgacgacgccaaaagatattgcaaagacccctccccctcttccagtagcacatccagctatgcgcctagttcctcaagcaatttgtcttgtgggggaggctcgagtgcctcgtctacttgtagcaagtcgtccttcgattatacccatgacatggaagcagcccatatggccgccactgctattttgaatttgtccacacgctgtcgcgaaatgccccagaatctgtcgactaaaccacaggacttgtgtgctacccgtaatcccgacatggaggtggatgaaaatggaacccttgacctgtcaatgaataaacagcggccacgggactcttgctgtcctatcttgactcccctggagcccatgtctccgcagcagcaagccgttatgaacaacagatgctttcaactcggagaaggcgattgttgggatctgcccgtagattatactaagatgaagcctcgcaggattgacgaagacgaaagcaaggatattacaccagaagacctggaccctttccaagaagctttagaagagcgccgatatcctggagaggtaaccatcccgtctccaaagcccaaataccctcagtgcaaggaatcaaagaaagatctgattaccctttcggggtgcccactcgcggataaaagcattaggtccatgcttgccaccagcagtcaggagctcaagtgtcccacaccaggatgcgacgggagtgggcatattacaggtaactacgctagtcaccgatccctgtctggctgtcctcgcgcgaaaaagagcggaatcaggatcgcacaatcaaaggaggataaggaagatcaagaacctatacgttgccccgtgcccggctgcgacggacaagggcacatcacaggcaagtacgctagccacagaagcgctagtggttgtcctctggcagccaaacggcagaaggatggctatctgaatggatctcagttctcctggaaatctgtcaagactgagggcatgtcttgtcccactcccggctgcgatggcagcgggcacgtatcgggatcctttctaacccatagaagtctgagcgggtgcccccgcgccacgtcagcaatgaagaaagctaaactctctggcgaacagatgctcaccatcaagcagcgggcctctaacggcatcgagaatgatgaggaaattaagcaactggacgaagaaatcaaggagctcaacgaatctaatagccagatggaggccgacatgattaaacttcgtactcagattacaaccatggagagtaatcttaagactatcgaagaagagaataaagtaattgagcagcagaatgagtcccttctgcacgagctcgctaatctctcacagagcctcatccactcactggctaacatccagttgccccatatggatccaatcaacgaacagaactttgacgcatatgtgaccaccctgaccgaaatgtatacaaatcaggacagataccagtcaccagaaaataaagcacttctggagaatattaagcaagcagtgcgcggtatccaagtgtag

SEQ ID NO: 183823 - DNA, 3399 bp, Artificial Sequence
  derived and/or modified sequence
atggaggtggacacagaggagaagaggcacaggaccaggagcaaaggagtgcgggtgcctgtggagcccgccatccaggagctgttcagctgccccaccccaggctgtgatggcagcggccacgtgtctgggaagtatgcccggcacaggtctgtgtatggctgccccctggccaagaagaggaagacccaggacaagcagccccaggagcccgcccccaagaggaagccctttgctgtgaaggctgacagcagctctgtggatgaatgtgatgacagtgatggaacagaggacatggatgagaaggaggaggatgaggaggaggaggaggaggaggaggaggagaatgaagaccaccagatgaactgccacaacacccgcatcatgcaggacacagagaaggatgacaacaacaatgatgaatatgacaactatgatgagctggtggccaagagcctgctgaacctgggcaagattgctgaagatgctgcctaccgggccaggacagaaagtgagatgaacagcaacaccagcaacagcctggaggatgacagcgacaagaatgaaaacctgggcaggaagtctgagctgagcctggacctggacagtgatgtggtgcgggagaccgtggacagcctgaagctgctggcccagggccacggcgtggtgctgtctgagaacatgaatgacagaaattatgctgacagcatgagccagcaggacagcaggaacatgaactacgtgatgctgggcaagcccatgaacaacggcctgatggagaagatggtggaggagagtgatgaggaggtgtgcctgagcagcctggagtgcctgaggaaccagtgctttgacctggccaggaagctgtctgagaccaacccccaggagaggaacccccagcagaacatgaacatccggcagcacgtgcggcctgaggaggacttccctggccgcaccccagacaggaactacagcgacatgctgaacctgatgaggctggaggagcagctgagccccaggagccgggtgtttgccagctgtgccaaggaggatggctgccacgagagagatgatgacaccacctctgtgaacagcgacagaagtgaggaggtgtttgacatgaccaagggcaacctgaccctgctggagaaggccatcgccctggagacagagcgggccaaggccatgagggagaagatggccatggaggccggccggcgggacaacatgaggagctatgaggaccagagcccccggcagctgcccggggaggacaggaagcccaagagcagtgacagccacgtgaagaagccctactatgaccccagcaggacagagaagaaggagagcaaatgtcccaccccaggctgtgatggcaccggccacgtgacaggcctgtacccccaccacaggagcctgagcggctgcccccacaaggacagagtgcccccagagatcctggccatgcatgagagcgtgctgaagtgccccaccccaggctgcaccggccggggccacgtgaacagcaacagaaacagccacaggagcctgagcggctgccccatcgctgctgctgagaagctggccaaggcccaggagaagcaccagagctgtgatgtgtccaagagcagccaggccagtgacagagtgctgcggcccatgtgctttgtgaagcagctggagatcccccagtatggctacagaaacaacgtgcccaccaccacccccaggagcaacctggccaaggagctggagaagtacagcaagaccagctttgagtacaacagctatgacaaccacacctacggcaagagggccatcgcccccaaggtgcagacccgggacatcagccccaagggctatgatgatgccaagcgctactgcaaggaccccagccccagcagcagcagcaccagcagctatgcccccagcagcagcagcaacctgagctgtggcggcggcagcagcgccagcagcacctgcagcaagagcagctttgactacacccatgacatggaggccgcccacatggccgccacagccatcctgaacctgagcacccgctgccgggagatgccccagaacctgagcaccaagccccaggacctgtgtgccaccagaaatccagacatggaggtggatgaaaatggcaccctggacctgtccatgaacaagcagaggccccgggacagctgctgccccatcctgacccccctggagcccatgagcccccagcagcaggccgtgatgaacaaccgctgcttccagctgggggagggggactgctgggacctgcctgtggactacaccaagatgaagcccaggagaattgatgaagatgagagcaaggacatcaccccagaggacctggaccccttccaggaggccctggaggagcggcgctacccaggagaggtgaccatccccagccccaagcccaagtacccccagtgcaaggagagcaagaaggacctgatcaccctgagcggctgccccctggccgacaagagcatccgctccatgctggccaccagcagccaggagctgaagtgccccaccccaggctgtgatggcagcggccacatcactggaaattatgccagccacaggagcctgagcggctgcccccgggccaagaagagcggcatcagaattgcccagagcaaggaggacaaggaggaccaggagcccatccgctgccctgtgcccggctgtgatggccagggccacatcaccgggaagtatgccagccacaggtctgccagcggctgccccctggccgccaagaggcagaaggatggctacctgaatggcagccagttctcctggaagtctgtgaagacagagggcatgagctgccccaccccaggctgtgatggcagcggccacgtgtctggcagcttcctgacccacaggagcctgagcggctgcccccgggccaccagcgccatgaagaaggccaagctgagcggggagcagatgctgaccatcaagcagagggccagcaatggaattgaaaatgatgaggagatcaagcagctggatgaggagatcaaggagctgaatgaaagcaacagccagatggaggccgacatgatcaagctgcggacccagatcaccaccatggagagcaacctgaagaccatcgaggaggagaacaaggtgattgagcagcagaatgaaagcctgctgcacgagctggccaacctgagccagagcctcatccacagcctggccaacatccagctgccccacatggaccccatcaatgagcagaactttgatgcctacgtgaccaccctgacagagatgtacaccaaccaggaccgctaccagagccctgagaacaaggccctgctggagaacatcaagcaggccgtgcggggcatccaggtgtag

SEQ ID NO: 183824 - DNA, 3555 bp, Artificial Sequence
  derived and/or modified sequence
atggaggtggacacagaggagaagaggcacaggaccaggagcaaaggagtgcgggtgcctgtggagcccgccatccaggagctgttcagctgccccaccccaggctgtgatggcagcggccacgtgtctgggaagtatgcccggcacaggtctgtgtatggctgccccctggccaagaagaggaagacccaggacaagcagccccaggagcccgcccccaagaggaagccctttgctgtgaaggctgacagcagctctgtggatgaatgtgatgacagtgatggaacagaggacatggatgagaaggaggaggatgaaggagaggagtacagcgaggacaatgatgagcctggagatgaagatgaagaagatgaggagggggaccgggaggaggaggaggagattgaggaggaggatgaagatgatgatgaagatggagaagatgtggaggatgaggaggaggaggaggaggaggaggaggaggaggaggaggaggaggagaatgaagaccaccagatgaactgccacaacacccgcatcatgcaggacacagagaaggatgacaacaacaatgatgaatatgacaactatgatgagctggtggccaagagcctgctgaacctgggcaagattgctgaagatgctgcctaccgggccaggacagaaagtgagatgaacagcaacaccagcaacagcctggaggatgacagcgacaagaatgaaaacctgggcaggaagtctgagctgagcctggacctggacagtgatgtggtgcgggagaccgtggacagcctgaagctgctggcccagggccacggcgtggtgctgtctgagaacatgaatgacagaaattatgctgacagcatgagccagcaggacagcaggaacatgaactacgtgatgctgggcaagcccatgaacaacggcctgatggagaagatggtggaggagagtgatgaggaggtgtgcctgagcagcctggagtgcctgaggaaccagtgctttgacctggccaggaagctgtctgagaccaacccccaggagaggaacccccagcagaacatgaacatccggcagcacgtgcggcctgaggaggacttccctggccgcaccccagacaggaactacagcgacatgctgaacctgatgaggctggaggagcagctgagccccaggagccgggtgtttgccagctgtgccaaggaggatggctgccacgagagagatgatgacaccacctctgtgaacagcgacagaagtgaggaggtgtttgacatgaccaagggcaacctgaccctgctggagaaggccatcgccctggagacagagcgggccaaggccatgagggagaagatggccatggaggccggccggcgggacaacatgaggagctatgaggaccagagcccccggcagctgcccggggaggacaggaagcccaagagcagtgacagccacgtgaagaagccctactatgaccccagcaggacagagaagaaggagagcaaatgtcccaccccaggctgtgatggcaccggccacgtgacaggcctgtacccccaccacaggagcctgagcggctgcccccacaaggacagagtgcccccagagatcctggccatgcatgagagcgtgctgaagtgccccaccccaggctgcaccggccggggccacgtgaacagcaacagaaacagccacaggagcctgagcggctgccccatcgctgctgctgagaagctggccaaggcccaggagaagcaccagagctgtgatgtgtccaagagcagccaggccagtgacagagtgctgcggcccatgtgctttgtgaagcagctggagatcccccagtatggctacagaaacaacgtgcccaccaccacccccaggagcaacctggccaaggagctggagaagtacagcaagaccagctttgagtacaacagctatgacaaccacacctacggcaagagggccatcgcccccaaggtgcagacccgggacatcagccccaagggctatgatgatgccaagcgctactgcaaggaccccagccccagcagcagcagcaccagcagctatgcccccagcagcagcagcaacctgagctgtggcggcggcagcagcgccagcagcacctgcagcaagagcagctttgactacacccatgacatggaggccgcccacatggccgccacagccatcctgaacctgagcacccgctgccgggagatgccccagaacctgagcaccaagccccaggacctgtgtgccaccagaaatccagacatggaggtggatgaaaatggcaccctggacctgtccatgaacaagcagaggccccgggacagctgctgccccatcctgacccccctggagcccatgagcccccagcagcaggccgtgatgaacaaccgctgcttccagctgggggagggggactgctgggacctgcctgtggactacaccaagatgaagcccaggagaattgatgaagatgagagcaaggacatcaccccagaggacctggaccccttccaggaggccctggaggagcggcgctacccaggagaggtgaccatccccagccccaagcccaagtacccccagtgcaaggagagcaagaaggacctgatcaccctgagcggctgccccctggccgacaagagcatccgctccatgctggccaccagcagccaggagctgaagtgccccaccccaggctgtgatggcagcggccacatcactggaaattatgccagccacaggagcctgagcggctgcccccgggccaagaagagcggcatcagaattgcccagagcaaggaggacaaggaggaccaggagcccatccgctgccctgtgcccggctgtgatggccagggccacatcaccgggaagtatgccagccacaggtctgccagcggctgccccctggccgccaagaggcagaaggatggctacctgaatggcagccagttctcctggaagtctgtgaagacagagggcatgagctgccccaccccaggctgtgatggcagcggccacgtgtctggcagcttcctgacccacaggagcctgagcggctgcccccgggccaccagcgccatgaagaaggccaagctgagcggggagcagatgctgaccatcaagcagagggccagcaatggaattgaaaatgatgaggagatcaagcagctggatgaggagatcaaggagctgaatgaaagcaacagccagatggaggccgacatgatcaagctgcggacccagatcaccaccatggagagcaacctgaagaccatcgaggaggagaacaaggtgattgagcagcagaatgaaagcctgctgcacgagctggccaacctgagccagagcctcatccacagcctggccaacatccagctgccccacatggaccccatcaatgagcagaactttgatgcctacgtgaccaccctgacagagatgtacaccaaccaggaccgctaccagagccctgagaacaaggccctgctggagaacatcaagcaggccgtgcggggcatccaggtgtag

SEQ ID NO: 183825 - DNA, 6953 bp, Artificial Sequence
  derived and/or modified sequence
cagtgagagagcttttccctgcagtcttgttgaagcaccccgggttttttgctcattgttggtgggtgcattttaattttttcattccctggactatgggttatgatatccatactcactgaagacaaaaagccaccttttctgcgtcttggtggcatgcatgtgtctcatcatcctttcaaacttgtggtggaacagggttttcttccctgtctgtgtattttgagccagcacagttaccaaaattgaacttgtctttcgcttgtgagcggttgtggtcattgtgagggcgggtcatgaggaggctgtagccaaggacgaggtgtgtgcggctgttgcctggacgtttgtccaatccacgttgacatttgagggatcacagcgtgtgaaaatgaactcagaggagaattggtgaattcctatccagtgggcatcttcaaaccctggtcgacggcggaagaatatcaggtcctgagatcacccacccggcgcggcaacagtgcagagtggccacatctggtggaagaagaaaaaaatgtagttattgaattcaatcaagtgtttgcatctttcaagctatcaacaaaattccatcaagaaaggttccagttggtctcacagacgtatggatatccgaggagccacctaaagatggagaaatcaaggcatagagagattaagtgactttgccacagtcacaagctggagaggaccaggagtagagcttagagcgagcccctgactctgggcctgcgtcctgccaggagtcacgctgcctccgttcctaggagagaagacttcctgtaagatggaggtggacaccgaggagaagcggcatcgcacgcggtccaaaggggttcgagttcccgtggaaccagccatacaagagctgttcagctgtcccacccctggctgtgacggcagtggtcatgtcagtggcaaatatgcaagacacagaagtgtatatggttgtcccttggcgaaaaaaagaaaaacacaagataaacagccccaggaacctgctcctaaacgaaagccatttgccgtgaaagcagacagctcctcagtggatgagtgtgacgacagtgatgggactgaggacatggatgagaaggaggaggatgaggaggaggaggaggaagaggaagaagaaaacgaagaccatcaaatgaattgtcacaatactcgaataatgcaagacacagaaaaggatgataacaataatgacgaatatgacaattacgatgaactggtggccaagtcattgttaaacctcggcaaaatcgctgaggatgcagcctaccgggccaggactgagtcagaaatgaacagcaatacctccaatagtctggaagacgatagtgacaaaaacgaaaacctgggtcggaaaagtgagttgagtttagacttagacagtgatgttgttagagaaacagtggactcccttaaactattagcccaaggacacggtgttgtgctctcagaaaacatgaatgacagaaattatgcagacagcatgtcgcagcaagacagtagaaatatgaattacgtcatgttggggaagcccatgaacaacggactcatggaaaagatggtggaggagagcgatgaggaggtgtgtctgagcagtctggagtgtttgaggaatcagtgcttcgacctggccaggaagctcagtgagaccaacccgcaggagaggaatccgcagcagaacatgaacatccgtcagcatgtccggccagaagaggacttccccggaaggacgccggacagaaactactcggacatgctgaacctcatgcggctggaggagcagttgagcccccggtcgagagtgtttgccagctgtgcgaaggaggatgggtgtcatgagcgggacgacgataccacctctgtgaactcggacaggtctgaagaggtgttcgacatgaccaaggggaacctgaccctgctggagaaagccatcgctttggaaacggaaagagcaaaggccatgagggagaagatggccatggaagctgggaggagggacaatatgaggtcatatgaggaccagtctccgagacaacttcccggggaggacagaaagcctaaatccagtgacagccatgtcaaaaagccatactatgatccctcaagaacagaaaagaaagagagcaagtgtccaacccccgggtgtgatggaaccggccacgtaactgggctgtacccacatcaccgcagcctgtccggatgcccgcacaaagatagggtccctccagaaatccttgccatgcatgaaagtgtcctcaagtgccccactccgggctgcacggggcgcgggcatgtcaacagcaacaggaactcccaccgaagcctctccggatgcccgatcgctgcagcagagaaactggccaaggcacaggaaaagcaccagagctgcgacgtgtccaagtccagccaggcctcggaccgcgtgctcaggccaatgtgctttgtgaagcagctggagattcctcagtatggctacagaaacaatgtccccacaactacgccgcgttccaacctggccaaggagctcgagaaatattccaagacctcgtttgaatacaacagttacgacaaccatacttatggcaagcgagccatagctcccaaggtgcaaaccagggatatatcccccaaaggatatgatgatgcgaagcggtactgcaaggaccccagccccagcagcagcagcaccagcagctacgcgcccagcagcagcagcaacctgagctgcggcgggggcagcagcgccagcagcacgtgcagcaagagcagcttcgactacacgcacgacatggaggcggcccacatggcggccaccgccatcctcaacctgtccacgcgctgccgcgagatgccgcagaacctgagcaccaagccgcaggacctgtgcgccacgcggaaccctgacatggaggtggatgagaacgggaccctggacctcagcatgaacaagcagaggccgcgggacagctgctgccccatcctgacccctctggagcccatgtccccccagcagcaggcagtgatgaacaaccggtgtttccagctgggcgagggcgactgctgggacttgcccgtagactacaccaaaatgaaaccccggaggatagacgaggacgagtccaaagacattactccagaagacttggacccattccaggaggctctagaagaaagacggtatcccggggaggtgaccatcccaagtcccaaacccaagtaccctcagtgcaaggagagcaaaaaggacttaataactctgtctggctgccccctggcggacaaaagcattcgaagtatgctggccaccagctcccaagaactcaagtgccccacgcctggctgtgatggttctggacatatcaccggcaattatgcttctcatcggagcctttcaggttgcccaagagcaaagaaaagtggtatcaggatagcacagagcaaagaagataaagaagatcaagaacccatcaggtgtccggtccccgggtgcgacggccagggccacatcactgggaagtacgcgtcccatcgcagcgcctccgggtgccccttggcggccaagaggcagaaagacgggtacctgaatggctcccagttctcctggaagtcggtcaagacggaaggcatgtcctgccccacgccaggatgcgacggctcaggccacgtcagcggcagcttcctcacacaccgcagcttgtcaggatgcccgagagccacgtcagcgatgaagaaggcaaagctttctggagagcagatgctgaccatcaaacagcgggccagcaacggtatagaaaatgatgaagaaatcaaacagttagatgaagaaatcaaggagctaaatgaatccaattcccagatggaagccgatatgattaaactcagaactcagattaccacgatggagagcaacctgaagaccatcgaagaggagaacaaagtgattgagcagcagaacgagtctctcctccacgagctggcgaacctgagccagtctctgatccacagcctggctaacatccagctgccgcacatggatccaatcaatgaacaaaattttgatgcttacgtgactactttgacggaaatgtatacaaatcaagatcgttatcagagtccagaaaataaagccctactggaaaatataaagcaggctgtgagaggaattcaggtctgaacagctgctgtagtgatgaaactcttgcttaaaaaggatgcctcttgttttttgctgctgtaacttaccagaaagtgttctatatttatttctgtttgaatttgaaacagtgttatgcttacaagacttcataatgattttatgtcttgctttaaagatagtacctgcagaatagtttttgaatacacccacattttgtacgtttccatgtaagctgacatagtgttctgccatgtaatgtttatagctgctgatgtatgcacatttgggggtatatctatttctgaagaggtaagctgatcaaaataaatagagtgtaaattctttttaatgctttagtgattaaatgttttagtattttgaactgaaatggacacacaaacacacacacgcacacacagacccacagctttgaatgatcatgttgtggctgagcagccgctttttagacgttatcattttgcctcatgttggaggactttatggaatttaagaaatacattttgtgtgcatattgtttcatagcaagaattcgttgcaaaaatgctttatttttgaacaatgcttggaaatattatgtgacttttttgtttgtttgttttaggaggatggtgtatggtgggggcaataaatgaggttttttgcattccaaggaaatggcatatggattaactgtaagaaatgaaataagtaatttattgtaagacaacatcaagccatggaaacttggcagaagattcaaagcagcttaaacagcacttttaaattaactcctaagcgttacatggttgtgactatggaaactccagttaagacaggatcttatcagaggtggacaacgtgaagatttccttttccattttcaataaactttggaacaaccttctcgtatctcccctagagtttcgtgcccctctgaactgtctgttattgcaatgtagtttatcaacagaatttgtgtgttttcgatttaagctaaaagataatttaagaacatttatttccccttttcactttaaaaaattatgattattcctattattgttatgaaccttcttattttacatttgagggataaaggcaaatgatttgtgagtcttctagttactggaccgagttttctgctggatctggtgggaaggcagctcggtaaagtttccctcctgctccccccgcccgactttgactctgaatcagcatttggtcctattcagaggactcttaccacgacgtttctgttctacacttgggtggagaccagttgaccatagagcatttgcagagcctcattgtttgatttcttgtgactattctaagaatgaatgcaatcagattttaaaagtaactaaatatacttcagcacttttttgctttaaactagatcatcttagacttgtttataccttccagatttgattgttttactcccaatgactgcactatatgtatgcataagaccacttttgagcgctgtgttcccccttctgagtagtcctttgacgacgtgttgtgttttctgatgttgacttgagttccatttagtagcatctcttccttccatgtcttgatgttatgcaggaagtacagacgtactttaaatttttgttatgaaataaaaaaaagatgggttttgtaaaaataaaaaaaaaatatttttagcagaacaggacttacagggtcattgtccccacaatgtgccagtcgactatttgcacttaccttgtcctatatatccgtacggaggtgtgcaattcctcgtgtcagtagccttgtgacactgaacctggatggattatagaggagccctcacggctgatcaataatgttgcaaagggagactacagggatctcacgacgaatattctgatacaatactcaacctcggtatatatatatgtgtataaatatatgtatatcccagcggcactttatactgttcactgtacaaaagcttacagttttccacaaggactttaataactagctgggaaaagacgatgtaattatttcggggctctgcggaaccttctctgtacagcgccccctttctgttgtgctattggttgcagctgccatgctcagaatgcgttttgagagctgaagcaaggtgcttgcagtcacctgaggccgtccgtgtggcccagggccccagctgcctttagggcccccattgttcataacagcatatgcatttccccaccgcgttgtgtctgcagcttctttgccaatatagtaatgcttttagtagagtactagatagtatcagttttggattcttattgttatcacctatgtacaatggaaagggattttaagcacaaacctgctgctcatctaacgttggtacataatctcaaatcaaaagttatctgtgactattatatagggatcacaaaagtgtcacatattagaatgctgacctttcatatggattattgtgagtcatcagagtttattataacttattgttcatattcatttctaagttaatttaagtaatcatttattaagacagaattttgtataaactatttattgtgctctctgtggaactgaagtttgatttatttttgtactacacggcatgggtttgttgacactttaattttgctataaatgtgtggaatcacaagttgctgtgatacttcatttttaaattgtgaactttgtacaaattttgtcatgctggatgttaacacatcttactctaaataaacaaggtgttgccacatttgtagcacgaagg

SEQ ID NO: 183826 - DNA, 4850 bp, Artificial Sequence
  derived and/or modified sequence
tttctgcgtcttggtggcatgcatgtgtctcatcatcctttcaaacttgtggtggaacagggttttcttccctgtctgtgtattttgagccagcacagttaccaaaattgaacttgtctttcgcttgtgagcggttgtggtcattgtgagggcgggtcatgaggaggctgtagccaaggacgaggtgtgtgcggctgttgcctggacgtttgtccaatccacgttgacatttgagggatcacagcgtgtgaaaatgaactcagaggagaattggtgaattcctatccagtgggcatcttcaaaccctggtcgacggcggaagaatatcaggtcctgagatcacccacccggcgcggcaacagtgcagagtggccacatctggtggaagaagaaaaaaatgtagttattgaattcaatcaagtgtttgcatctttcaagctatcaacaaaattccatcaagaaaggttccagttggtctcacagacgtatggatatccgaggagccacctaaagatggagaaatcaaggcatagagagattaagtgactttgccacagtcacaagctggagaggaccaggagtagagcttagagcgagcccctgactctgggcctgcgtcctgccaggagtcacgctgcctccgttcctaggagagaagacttcctgtaagatggaggtggacaccgaggagaagcggcatcgcacgcggtccaaaggggttcgagttcccgtggaaccagccatacaagagctgttcagctgtcccacccctggctgtgacggcagtggtcatgtcagtggcaaatatgcaagacacagaagtgtatatggttgtcccttggcgaaaaaaagaaaaacacaagataaacagccccaggaacctgctcctaaacgaaagccatttgccgtgaaagcagacagctcctcagtggatgagtgtgacgacagtgatgggactgaggacatggatgagaaggaggaggatgagggggaggagtactccgaggacaatgatgagccaggggatgaggacgaggaggacgaggagggggaccgggaggaggaggaggagatcgaggaggaggatgaggacgatgacgaggatggagaagatgtggaggatgaagaagaggaagaggaggaggaggaggaggaggaagaggaagaagaaaacgaagaccatcaaatgaattgtcacaatactcgaataatgcaagacacagaaaaggatgataacaataatgacgaatatgacaattacgatgaactggtggccaagtcattgttaaacctcggcaaaatcgctgaggatgcagcctaccgggccaggactgagtcagaaatgaacagcaatacctccaatagtctggaagacgatagtgacaaaaacgaaaacctgggtcggaaaagtgagttgagtttagacttagacagtgatgttgttagagaaacagtggactcccttaaactattagcccaaggacacggtgttgtgctctcagaaaacatgaatgacagaaattatgcagacagcatgtcgcagcaagacagtagaaatatgaattacgtcatgttggggaagcccatgaacaacggactcatggaaaagatggtggaggagagcgatgaggaggtgtgtctgagcagtctggagtgtttgaggaatcagtgcttcgacctggccaggaagctcagtgagaccaacccgcaggagaggaatccgcagcagaacatgaacatccgtcagcatgtccggccagaagaggacttccccggaaggacgccggacagaaactactcggacatgctgaacctcatgcggctggaggagcagttgagcccccggtcgagagtgtttgccagctgtgcgaaggaggatgggtgtcatgagcgggacgacgataccacctctgtgaactcggacaggtctgaagaggtgttcgacatgaccaaggggaacctgaccctgctggagaaagccatcgctttggaaacggaaagagcaaaggccatgagggagaagatggccatggaagctgggaggagggacaatatgaggtcatatgaggaccagtctccgagacaacttcccggggaggacagaaagcctaaatccagtgacagccatgtcaaaaagccatactatgatccctcaagaacagaaaagaaagagagcaagtgtccaacccccgggtgtgatggaaccggccacgtaactgggctgtacccacatcaccgcagcctgtccggatgcccgcacaaagatagggtccctccagaaatccttgccatgcatgaaagtgtcctcaagtgccccactccgggctgcacggggcgcgggcatgtcaacagcaacaggaactcccaccgaagcctctccggatgcccgatcgctgcagcagagaaactggccaaggcacaggaaaagcaccagagctgcgacgtgtccaagtccagccaggcctcggaccgcgtgctcaggccaatgtgctttgtgaagcagctggagattcctcagtatggctacagaaacaatgtccccacaactacgccgcgttccaacctggccaaggagctcgagaaatattccaagacctcgtttgaatacaacagttacgacaaccatacttatggcaagcgagccatagctcccaaggtgcaaaccagggatatatcccccaaaggatatgatgatgcgaagcggtactgcaaggaccccagccccagcagcagcagcaccagcagctacgcgcccagcagcagcagcaacctgagctgcggcgggggcagcagcgccagcagcacgtgcagcaagagcagcttcgactacacgcacgacatggaggcggcccacatggcggccaccgccatcctcaacctgtccacgcgctgccgcgagatgccgcagaacctgagcaccaagccgcaggacctgtgcgccacgcggaaccctgacatggaggtggatgagaacgggaccctggacctcagcatgaacaagcagaggccgcgggacagctgctgccccatcctgacccctctggagcccatgtccccccagcagcaggcagtgatgaacaaccggtgtttccagctgggcgagggcgactgctgggacttgcccgtagactacaccaaaatgaaaccccggaggatagacgaggacgagtccaaagacattactccagaagacttggacccattccaggaggctctagaagaaagacggtatcccggggaggtgaccatcccaagtcccaaacccaagtaccctcagtgcaaggagagcaaaaaggacttaataactctgtctggctgccccctggcggacaaaagcattcgaagtatgctggccaccagctcccaagaactcaagtgccccacgcctggctgtgatggttctggacatatcaccggcaattatgcttctcatcggagcctttcaggttgcccaagagcaaagaaaagtggtatcaggatagcacagagcaaagaagataaagaagatcaagaacccatcaggtgtccggtccccgggtgcgacggccagggccacatcactgggaagtacgcgtcccatcgcagcgcctccgggtgccccttggcggccaagaggcagaaagacgggtacctgaatggctcccagttctcctggaagtcggtcaagacggaaggcatgtcctgccccacgccaggatgcgacggctcaggccacgtcagcggcagcttcctcacacaccgcagcttgtcaggatgcccgagagccacgtcagcgatgaagaaggcaaagctttctggagagcagatgctgaccatcaaacagcgggccagcaacggtatagaaaatgatgaagaaatcaaacagttagatgaagaaatcaaggagctaaatgaatccaattcccagatggaagccgatatgattaaactcagaactcagattaccacgatggagagcaacctgaagaccatcgaagaggagaacaaagtgattgagcagcagaacgagtctctcctccacgagctggcgaacctgagccagtctctgatccacagcctggctaacatccagctgccgcacatggatccaatcaatgaacaaaattttgatgcttacgtgactactttgacggaaatgtatacaaatcaagatcgttatcagagtccagaaaataaagccctactggaaaatataaagcaggctgtgagaggaattcaggtctgaacagctgctgtagtgatgaaactcttgcttaaaaaggatgcctcttgttttttgctgctgtaacttaccagaaagtgttctatatttatttctgtttgaatttgaaacagtgttatgcttacaagacttcataatgattttatgtcttgctttaaagatagtacctgcagaatagtttttgaatacacccacattttgtacgtttccatgtaagctgacatagtgttctgccatgtaatgtttatagctgctgatgtatgcacatttgggggtatatctatttctgaagaggtaagctgatcaaaataaatagagtgtaaattctttttaatgctttagtgattaaatgttttagtattttgaactgaaatggacacacaaacacacacacgcacacacagacccacagctttgaatgatcatgttgtggctgagcagccgctttttagacgttatcattttgcctcatgttggaggactttatggaatttaagaaatacattttgtgtgcatattgtttcatagcaagaattcgttgcaaaaatgctttatttttgaacaatgcttggaaatattatgtgacttttttgtttgtttgttttaggaggatggtgtatggtggggg

SEQ ID NO: 183827 - DNA, 3399 bp, Artificial Sequence
  derived and/or modified sequence
atggaggtggacaccgaggagaagcggcaccggacccggagcaagggggtacgggtccctgtggagcccgcaatacaggagttgttctcttgccctacgcccggctgtgatggttcgggtcacgtaagtggcaagtacgccagacatagatccgtgtacggttgtcccttagctaagaagagaaagacccaggacaagcaaccccaggagccagctcctaaaaggaaaccattcgcagtcaaggcagacagctcgtccgtggacgagtgcgacgattcagacggcactgaggatatggatgagaaggaggaagacgaggaggaagaggaggaggaagaagaagaaaacgaggatcatcaaatgaactgccataacactcggattatgcaagacactgaaaaggacgataataataatgatgaatacgataactacgatgaactggtcgccaagtctctgctcaaccttggcaagatcgccgaagacgctgcttatcgagctcggacagagtcagaaatgaactcaaatacttcaaacagtctggaggatgactccgacaagaatgaaaatctgggccggaagtcagagcttagcctcgatttggatagcgacgtggttagggaaaccgtagattctttgaaacttttggcgcagggacacggcgttgtgctctccgaaaatatgaatgaccggaactacgccgattctatgtcccaacaggacagccgtaatatgaattatgtcatgctgggcaaaccaatgaacaacggactcatggaaaaaatggttgaagaatcggacgaagaggtgtgtctgtctagtctggagtgtctgagaaaccagtgtttcgacctcgcaaggaaactcagcgagaccaaccctcaggagagaaatccgcagcagaacatgaatatcagacagcatgtaagaccagaggaggacttccctggaaggacaccagatcgtaattatagcgacatgcttaatctgatgcggctggaggagcagctgtcgccccggtcccgcgtgttcgcaagctgtgccaaagaagacggctgtcacgagcgtgatgacgacactacctctgttaatagtgacagatctgaagaagtattcgatatgactaagggcaatctaacgctgttggaaaaggccattgccctggagacagaaagggcaaaagccatgcgagagaaaatggccatggaggcagggaggcgtgataatatgcgttcgtatgaggaccagagtcctagacagctgcccggcgaggatcgaaaacccaaaagcagcgactcccacgttaagaaaccctattatgatcccagtaggaccgaaaagaaagagagtaaatgtcctacccctgggtgtgacggtactggtcacgtgaccggcttgtatcctcaccacagaagcctcagcgggtgtccccataaagatagagtgcctcccgaaatattagctatgcatgagtctgtgctaaagtgtcctaccccaggctgcaccgggcgcgggcatgtgaactccaacagaaactcacaccggagccttagcggctgcccgatcgccgctgctgagaagctcgctaaagctcaggaaaagcaccagtcctgcgatgtctcgaaatcctcccaggcctctgatagggttctgcggccaatgtgtttcgttaaacagctggagatcccgcagtatggatacagaaataatgtgccaacaaccacgccacggagtaacctggcgaaagaacttgagaagtactctaagacctccttcgagtataattcttatgataaccacacttatgggaaacgggccatcgccccaaaagtgcagactcgcgacataagtcctaagggctacgacgacgcgaaacgttattgtaaggatccatcgccttcttcttccagcacctcgagctacgcgcccagtagcagctcaaatctgtcttgcggggggggctcatctgcttcttcaacttgcagtaagagctccttcgactacactcatgatatggaggcagcgcatatggccgcaaccgccattttgaatctctcaacccgatgcagagaaatgccccagaatttaagtactaagccgcaggatctgtgcgccacccgcaaccctgatatggaagtcgatgagaatggtactctggacctgagcatgaataagcagcggccccgagacagctgctgccccattcttacgcccctcgaaccgatgtccccccagcagcaggccgtcatgaataatcggtgttttcagctgggcgaaggcgattgttgggacctgccagtggattacaccaagatgaaaccccggcgtatagatgaggatgagagcaaggatatcactcccgaagacctggacccctttcaggaagcactggaggagcggcgatacccaggtgaggtgacaatccctagtcccaagcccaagtatccacagtgtaaagagagtaaaaaggatcttatcaccctatcaggctgcccgctggccgacaaaagtattcgtagtatgctcgccacctcttcacaagagctgaagtgtccaactccgggatgcgacggttccggacatatcaccggaaattacgctagccatcggtccctgtcaggatgtcctcgcgccaagaaaagcgggatccggatcgcccagagtaaggaggataaggaggaccaggaaccaatcagatgtcctgttccagggtgcgatggccaggggcacatcaccggaaagtacgccagccaccgaagcgctagtggctgtccactggctgccaagcgccagaaggatggatacctcaacggcagccagttctcctggaaaagtgtgaagactgagggtatgtcatgcccgacacccgggtgcgatgggtctgggcatgtctctggatcattcctgacacacaggtccctgtcgggatgtccgcgagccaccagtgccatgaagaaggccaaactgtctggtgagcagatgcttacaatcaaacagagagcaagcaatggaatagaaaacgatgaggagattaaacagctagatgaagagatcaaggagctgaatgagtctaactcccagatggaagctgatatgatcaagttgaggacccagataacgacaatggagagcaacctgaagactatagaagaggagaacaaggtcatagagcaacaaaacgagtccctgctgcacgagctggccaacctgagccagagcctcatccacagtctcgccaatattcagttgccgcatatggatcctatcaacgagcagaactttgacgcctacgtcaccacgttaaccgaaatgtatacaaatcaggacagataccagagccccgaaaataaagccctgctcgagaatatcaagcaggcagtaagggggatacaggtctag

SEQ ID NO: 183828 - DNA, 3555 bp, Artificial Sequence
  derived and/or modified sequence
atggaggtggacaccgaggagaagcggcaccggacccggagcaagggcgtacgtgtaccggtggaacccgcgatccaggagttattcagctgccctacccctggttgcgatgggagtgggcacgtgtcaggaaaatatgcgaggcataggagcgtctatggatgtcctctggctaagaagagaaaaacccaagacaaacagccccaggagcctgcacccaagcggaaaccattcgctgtgaaggcggactctagctcagtggacgaatgtgacgacagcgacggaacagaggatatggacgagaaagaggaggatgagggtgaagaatatagcgaggataatgacgagcccggagacgaggatgaggaggacgaggagggcgatagggaagaagaagaagagatagaggaggaggatgaagatgacgacgaagatggcgaggacgtagaggatgaggaggaggaagaggaagaagaagaagaagaagaagaggaagaagagaacgaggaccatcagatgaactgccacaacacacgaattatgcaggataccgagaaagacgataacaacaacgacgaatacgataattacgacgagcttgtagctaagagtctgctcaatctgggaaagatagccgaggatgcggcctacagggcccgcactgaatcagaaatgaactctaatacttcaaatagtctcgaagacgatagcgacaaaaatgaaaatctgggcaggaagtctgaactgagtctggatctggacagtgatgtggtgagggagacagtcgattctttgaaactgctggcacaaggtcacggcgtggtgctgtcggaaaacatgaatgatcgcaattatgcggacagcatgagccagcaggatagcagaaacatgaattatgtcatgcttggcaagcctatgaataatggactgatggaaaaaatggtagaggagtccgatgaggaggtttgcctgtcttcgctcgagtgcctacggaatcagtgtttcgatctagccaggaaactttcagagactaatccacaagagagaaatccgcagcagaatatgaatatccgccaacacgtgcgaccagaggaggatttccctggccggacaccagaccgcaactacagtgatatgctgaacctcatgcgattggaggaacagctgagccccagatctagagtgttcgcctcctgcgccaaggaagatggatgccacgagagagatgacgacaccacatccgtgaacagcgatagatcagaagaggtcttcgatatgacaaagggtaatttgactctcttggagaaggctatcgctctggaaacagagcgtgccaaggctatgagggagaagatggctatggaagctggcaggcgggataatatgcggagttatgaagaccagtcccctagacaactccctggcgaagacaggaaaccgaagtccagtgattcccacgtaaaaaagccatattatgaccctagcagaactgagaagaaagagagcaagtgcccaacacccggctgcgatggaacaggccacgtcaccgggctttatccacaccatcgcagcctttccggatgcccccacaaagatcgggtgcctcccgagatactcgccatgcacgagagcgtgctcaagtgtcctaccccaggctgtacgggacgcggacatgtgaatagtaataggaatagccatcgaagcttaagcggctgccccatagccgcagcagaaaagttagctaaagcacaggaaaaacaccagtcttgcgacgtgtctaaatcatcacaggctagcgaccgagtgctgaggccgatgtgctttgtaaaacagctggagatccctcagtatggctatagaaataacgttcccacgacgacaccacggtcaaatctggccaaggaactggagaaatacagtaaaacgtctttcgagtataactcatatgataaccacacttatggaaagcgagctattgctcctaaagtgcaaaccagagacatctccccaaaaggatatgacgacgccaagaggtattgtaaagacccaagtccatcctccagctcgacctccagctacgcaccctcctctagttcaaacttgtcatgcggaggcggatcctcagctagctccacctgctcaaagtcttcattcgactatactcatgacatggaggccgctcacatggcagccaccgcaatcctcaatctgtccacacggtgcagagaaatgccacaaaatctgagcaccaaaccccaagatctgtgcgcaaccagaaacccagacatggaggtggatgaaaacgggacattggacctatccatgaacaagcagcgaccacgagattcatgttgtcctatcttaaccccacttgaacccatgtccccacagcagcaggctgttatgaacaatagatgctttcagctgggagaaggcgactgctgggatctacccgtggactacaccaagatgaaacctcggcgcattgacgaagatgagagcaaggatattactcccgaagacctggatccattccaagaggccttagaggagcgcagataccccggggaagttacaataccgtcccctaagcccaagtacccccagtgtaaggagtctaagaaggatctcataaccctttccggatgcccccttgctgacaaaagtattcggagcatgctcgccaccagctcccaggagttaaaatgtcctacgcccgggtgcgacggcagcggccatatcaccggcaactacgccagccataggtcgctgagtggttgcccccgtgccaaaaaatccggcattagaattgctcaatccaaggaggacaaagaggaccaagaaccaatccgatgccccgtgcccgggtgtgatggccagggtcatataaccggcaagtacgcatcccatcggagcgcttcaggctgtccattggccgctaaacggcaaaaggacggatatctcaacggcagccagtttagttggaaatccgtgaagaccgagggcatgtcctgtccaactcctggatgtgatgggagtggtcacgtgtcgggcagttttctgacgcaccggtccctctccggctgccctagagcaactagtgcaatgaagaaagcaaagcttagcggtgagcaaatgctgaccattaagcaacgcgcttcaaatggtatagaaaacgatgaagagatcaagcagctcgacgaggaaatcaaggaactgaatgagtccaacagccagatggaggcagatatgatcaagttgcgtacacagattacaaccatggagtctaatctgaagaccatcgaggaggaaaacaaggtcatcgaacaacagaatgaatccctgctgcatgagttggctaacttaagccagagcctgattcactccctggcgaacatccaattgccccatatggacccaattaacgagcagaacttcgacgcttacgtgacaactctgactgagatgtacacaaaccaggacagataccagagtcctgagaataaggcactgttggagaacatcaagcaggcagtgaggggaattcaggtctag

SEQ ID NO: 183829 - DNA, 3399 bp, Artificial Sequence
  derived and/or modified sequence
atggaagtcgataccgaggaaaagcggcatcggacgcggagcaaaggggttagagtgccggtcgagcctgcgatccaagaacttttttcttgtcctacccccggatgcgatggatccggccatgtcagcggaaaatatgcccgacacaggagtgtgtatgggtgtcctcttgccaagaaacgcaagacgcaggataagcagccccaggagcctgccccaaagaggaaacctttcgccgtgaaagctgattcctcgtccgtggatgaatgtgacgactccgatggcacagaagatatggatgagaaggaggaagatgaggaagaggaagaagaggaagaagaagaaaatgaagaccaccaaatgaattgtcataacactcggatcatgcaggacacagagaaagacgacaacaataatgatgaatatgataattacgatgagctggtcgctaaaagcctgttgaacctggggaagattgcagaggatgctgcataccgggcacgaacggaatccgagatgaattctaacacatctaactcactggaggatgacagtgataagaacgagaatctcgggagaaaatccgagctgagtctggatcttgattcagacgttgtaagagagactgtcgactctttgaaactgctggctcaaggacacggcgtagttctgagcgagaacatgaacgaccggaactacgccgactctatgtctcagcaagattcacgcaacatgaactatgtcatgctcggaaagcctatgaacaacgggttgatggagaagatggttgaggaatctgatgaggaagtctgtttatcatctctagagtgcctcagaaatcaatgcttcgacctcgctcgcaaactgagtgaaactaacccccaggaacgcaatccacagcagaacatgaacatcagacagcatgttcgacctgaggaggactttccgggacgaacgcctgatcggaattatagtgatatgctgaatctcatgcggttggaagagcagctctctcctcggagtagggtctttgcgagctgtgccaaggaggatggttgtcatgagagagatgacgacaccacttctgttaatagcgaccgctcagaggaagtgttcgatatgactaagggtaacctcacactcttagagaaggccatcgcactagaaaccgagcgggcaaaagccatgagggagaagatggctatggaggcgggtaggcgagacaacatgcggtcttacgaggaccagtcccctcggcagttgccgggtgaagaccgcaaacccaaatcatccgattcccacgtgaagaagccctattacgacccatcacgcaccgagaaaaaggagagtaagtgtccgacacccggttgcgatggcactggacacgttacaggcctgtacccacatcaccggtcactgagcggttgtccacacaaggacagagtcccgcctgaaatcctggccatgcacgaaagtgtgcttaaatgccccactcccggatgcactggacgcggacacgtgaacagtaacaggaactcgcaccggagcctgtctggatgccccatcgccgctgctgaaaagttagctaaagcccaggagaaacaccagagctgtgacgtgagcaagagcagccaggcgtcagatcgggttctccgcccaatgtgttttgtgaagcagttagaaatcccacagtacggctacaggaacaacgtgcctacaacaactccacgatccaacctggcgaaagagctcgagaagtactcgaaaacgtcctttgaatataacagctacgacaaccatacttatggcaagagggctatagctcctaaggtgcagacgagagacattagccctaagggttatgatgacgcgaagcgctactgcaaagacccttctccaagcagcagctccacaagctcttacgccccatcatcttccagcaacctgagttgtggcggaggcagttcggcttctagtacttgttcaaagtcgagcttcgattatacccatgacatggaagcagctcatatggccgcaacagccatattaaatctcagcactcggtgccgcgagatgcctcagaacctgtcaaccaagccacaggacctgtgtgctacacgcaatcctgacatggaagtggatgaaaacggcacacttgatttgagcatgaacaagcagcggcctcgcgactcgtgctgtcctatcctgaccccccttgagccgatgtccccccagcagcaggctgtgatgaataatagatgttttcaactgggtgagggtgattgctgggacctgccagtcgactacacgaagatgaaaccgaggcgtatcgatgaagacgagtcaaaggacattactcccgaggacctagaccccttccaggaggccctggaggagcgcagatacccaggggaggtgaccattcccagtcccaaaccgaagtacccacagtgtaaggagagtaagaaggatcttattaccttgtccgggtgcccacttgcagataagtctatacggtcaatgctggctaccagcagccaggagcttaagtgtcccacacccggttgcgatggctccggacatatcactggtaattacgcctctcaccgatcgcttagcggttgcccaagagctaagaaaagcggaatcaggatcgcgcagagcaaggaagataaggaggaccaagagccaattcggtgcccagtgcccggatgtgatggccagggccacatcacaggtaagtatgcctcccataggtccgcctcaggttgcccgctcgcagccaaaaggcagaaagatgggtacctaaacgggtcgcaattttcatggaaatccgtgaagacagaggggatgtcatgtccgacccctggctgtgacgggagcggccatgtgagcggaagctttttgactcacagatccctctccggatgtccgagggctacctccgccatgaaaaaagccaaattgagcggggaacaaatgctaaccatcaagcaacgcgcttctaacggcattgaaaatgatgaagaaatcaagcagttggatgaggaaataaaagagttgaacgaaagtaactcccaaatggaggccgatatgatcaagctccgcacacagattacaactatggagtctaacttgaagactattgaggaagagaataaggtcatcgaacagcagaacgagtcattgcttcacgagctcgccaacctttcccagtccttgatccacagtctcgcgaacatccagcttcctcacatggacccaatcaacgagcagaatttcgacgcgtacgttactaccctcactgaaatgtatactaaccaggatcgataccagagtccagagaataaagccctactcgagaatattaagcaggcggtaaggggcatacaggtatag

SEQ ID NO: 183830 - DNA, 3555 bp, Artificial Sequence
  derived and/or modified sequence
atggaggtcgacacagaagagaaacgacaccgcactaggagtaagggagtcagggtccctgttgaaccagctattcaggagcttttctcctgtccaacacctggctgcgatggctcgggccacgttagcggcaagtacgcgcgacataggagcgtgtatggatgtccccttgccaaaaagagaaagactcaggacaaacaaccacaggagccagcccctaagaggaagccctttgccgtcaaggccgacagctccagcgtggacgagtgtgacgacagcgacggaactgaggatatggatgagaaagaggaagacgagggcgaggagtactccgaagataacgacgaaccaggggatgaggatgaggaagacgaggagggggaccgcgaggaagaggaggagattgaggaagaggatgaggatgatgacgaggacggggaggatgtggaagacgaggaagaggaagaggaggaggaggaggaggaagaggaggaagaggagaatgaggaccaccagatgaattgccacaacacccggattatgcaggacactgaaaaggacgataataacaacgacgagtacgacaactatgatgagctggttgccaagagcctgctgaatctggggaagatcgcagaggacgccgcttatagagccaggaccgagtctgaaatgaacagtaacactagcaatagtctggaagacgactcagacaaaaacgaaaatctgggtaggaaaagcgaactgtctcttgaccttgattcggacgtggtccgcgagaccgtggactcattaaaactactggctcagggacatggcgtggtgctgtccgagaatatgaacgaccgaaattacgccgactctatgtctcaacaggattcccgcaatatgaactatgtgatgcttgggaaacccatgaacaatggactcatggagaagatggtcgaggaatcagacgaggaagtttgtctgtcctctctcgagtgcttgcgcaaccagtgttttgaccttgcacgcaaactcagtgagaccaatcctcaggagcgtaacccccagcagaacatgaatattcgccagcatgtacgaccagaagaggactttcccggtcggacccccgaccggaactattccgatatgcttaacctcatgcggctggaggagcagttgtcacctcggtcccgggtctttgccagttgcgcaaaggaagacggatgccacgagcgagatgatgacaccacatctgtgaacagcgatagatcagaggaagttttcgatatgaccaagggcaacctaactctgctagagaaagctattgcattagaaacagagcgtgctaaagctatgcgggagaagatggcaatggaggcagggcgtcgggacaatatgaggagttacgaggatcagtccccccgtcagttaccaggtgaagaccgaaagccaaagtcttcagacagtcacgtcaagaaaccatattacgacccgagtcggaccgaaaagaaagagagcaaatgccctacgcctggctgtgacggtactgggcacgtgacaggtctttacccccaccatcgaagcctttcgggctgccctcataaagaccgggtgcctcccgagatcctggcgatgcacgagtccgttctgaagtgcccaacacccggatgcaccggccgtggtcacgtgaattccaataggaattcacacaggtcattaagcgggtgtccgattgcagccgcagagaaactggccaaggctcaggagaaacaccagtcttgtgatgtctccaagtcatcacaggcttctgaccgtgttcttcgtcctatgtgtttcgtgaaacagctggagattccacagtacggttatagaaacaacgttccaactacaacacctaggagcaatctggccaaagagctagagaaatactccaaaacctcttttgagtataacagttacgacaaccatacctacggcaaacgagccatcgcccctaaagtgcagacaagagacatctcccccaaagggtatgatgatgcaaagagatactgtaaagacccctctccatcctcttcttctacgtcttcatatgctcctagctcctcttctaaccttagttgcggagggggtagttcagcatcgagcacctgttctaagtcatccttcgattacactcatgatatggaggctgcccacatggcagccaccgccattcttaatctgagtactaggtgtcgagaaatgcctcaaaatctctcgacaaagccacaggatttatgtgccaccaggaacccggatatggaggtcgacgaaaatggtacactggatttgtcaatgaacaagcagcggccacgggacagttgctgccctattctgacgcctcttgagcctatgtccccacagcagcaggcagtgatgaacaacagatgcttccagctcggcgagggcgactgctgggaccttcccgtcgactataccaaaatgaaaccaagacgaattgacgaggacgagagcaaagatattaccccagaagatttagatccctttcaggaagcactggaagagcggagataccccggtgaagtgacaataccatcccctaagccaaaatatccccaatgcaaagagagcaagaaggatctgattacactttcgggctgtcctttggctgacaagagtatcagaagcatgctggccacctccagtcaggagctgaagtgtccaacgccagggtgcgatgggagcggtcatattacgggtaattatgcctctcaccgtagtttgagcgggtgtcctcgggcaaagaagtcggggattcggattgctcagagcaaagaggataaggaagatcaggaacctatacgttgtccagttcccggttgcgacggccaggggcacatcacaggaaagtatgctagtcatcgcagtgcctcgggctgcccgctggccgcaaagcgacaaaaagatgggtacctcaatggctcccagttctcttggaagagcgtcaaaaccgaaggtatgtcttgtcccactccaggatgcgacggctccgggcatgtctctggaagctttctgacacaccggagcttatcaggctgtccacgggctacctccgcgatgaagaaagcaaaactaagtggagagcaaatgcttaccattaagcagcgagccagcaacggcatagagaatgacgaagaaatcaaacagctcgacgaagaaatcaaagaactgaacgaaagcaatagccagatggaggctgatatgatcaagttaagaacccagattacaaccatggagtccaatctgaaaacaatcgaagaggagaataaagtcatcgagcagcagaatgagagtctcctgcacgagctggcaaatcttagtcagagcctcatccacagtctggccaatatccagctccctcacatggatcccataaatgaacagaacttcgatgcgtacgtgaccacgctaacagagatgtatacgaatcaagacaggtaccaaagcccggagaataaagccctgctcgagaatatcaagcaggccgtgagagggatccaagtctag

SEQ ID NO: 183831 - DNA, 3399 bp, Artificial Sequence
  derived and/or modified sequence
atggaggtggacaccgaggagaagagacacagaaccagaagcaagggcgtgagagtgcccgtggagcccgccatccaggagctgttcagctgccccacccccggctgcgacggcagcggccacgtgagcggcaagtacgccagacacagaagcgtgtacggctgccccctggccaagaagagaaagacccaggacaagcagccccaggagcccgcccccaagagaaagcccttcgccgtgaaggccgacagcagcagcgtggacgagtgcgacgacagcgacggcaccgaggacatggacgagaaggaggaggacgaggaggaggaggaggaggaggaggaggagaacgaggaccaccagatgaactgccacaacaccagaatcatgcaggacaccgagaaggacgacaacaacaacgacgagtacgacaactacgacgagctggtggccaagagcctgctgaacctgggcaagatcgccgaggacgccgcctacagagccagaaccgagagcgagatgaacagcaacaccagcaacagcctggaggacgacagcgacaagaacgagaacctgggcagaaagagcgagctgagcctggacctggacagcgacgtggtgagagagaccgtggacagcctgaagctgctggcccagggccacggcgtggtgctgagcgagaacatgaacgacagaaactacgccgacagcatgagccagcaggacagcagaaacatgaactacgtgatgctgggcaagcccatgaacaacggcctgatggagaagatggtggaggagagcgacgaggaggtgtgcctgagcagcctggagtgcctgagaaaccagtgcttcgacctggccagaaagctgagcgagaccaacccccaggagagaaacccccagcagaacatgaacatcagacagcacgtgagacccgaggaggacttccccggcagaacccccgacagaaactacagcgacatgctgaacctgatgagactggaggagcagctgagccccagaagcagagtgttcgccagctgcgccaaggaggacggctgccacgagagagacgacgacaccaccagcgtgaacagcgacagaagcgaggaggtgttcgacatgaccaagggcaacctgaccctgctggagaaggccatcgccctggagaccgagagagccaaggccatgagagagaagatggccatggaggccggcagaagagacaacatgagaagctacgaggaccagagccccagacagctgcccggcgaggacagaaagcccaagagcagcgacagccacgtgaagaagccctactacgaccccagcagaaccgagaagaaggagagcaagtgccccacccccggctgcgacggcaccggccacgtgaccggcctgtacccccaccacagaagcctgagcggctgcccccacaaggacagagtgccccccgagatcctggccatgcacgagagcgtgctgaagtgccccacccccggctgcaccggcagaggccacgtgaacagcaacagaaacagccacagaagcctgagcggctgccccatcgccgccgccgagaagctggccaaggcccaggagaagcaccagagctgcgacgtgagcaagagcagccaggccagcgacagagtgctgagacccatgtgcttcgtgaagcagctggagatcccccagtacggctacagaaacaacgtgcccaccaccacccccagaagcaacctggccaaggagctggagaagtacagcaagaccagcttcgagtacaacagctacgacaaccacacctacggcaagagagccatcgcccccaaggtgcagaccagagacatcagccccaagggctacgacgacgccaagagatactgcaaggaccccagccccagcagcagcagcaccagcagctacgcccccagcagcagcagcaacctgagctgcggcggcggcagcagcgccagcagcacctgcagcaagagcagcttcgactacacccacgacatggaggccgcccacatggccgccaccgccatcctgaacctgagcaccagatgcagagagatgccccagaacctgagcaccaagccccaggacctgtgcgccaccagaaaccccgacatggaggtggacgagaacggcaccctggacctgagcatgaacaagcagagacccagagacagctgctgccccatcctgacccccctggagcccatgagcccccagcagcaggccgtgatgaacaacagatgcttccagctgggcgagggcgactgctgggacctgcccgtggactacaccaagatgaagcccagaagaatcgacgaggacgagagcaaggacatcacccccgaggacctggaccccttccaggaggccctggaggagagaagataccccggcgaggtgaccatccccagccccaagcccaagtacccccagtgcaaggagagcaagaaggacctgatcaccctgagcggctgccccctggccgacaagagcatcagaagcatgctggccaccagcagccaggagctgaagtgccccacccccggctgcgacggcagcggccacatcaccggcaactacgccagccacagaagcctgagcggctgccccagagccaagaagagcggcatcagaatcgcccagagcaaggaggacaaggaggaccaggagcccatcagatgccccgtgcccggctgcgacggccagggccacatcaccggcaagtacgccagccacagaagcgccagcggctgccccctggccgccaagagacagaaggacggctacctgaacggcagccagttcagctggaagagcgtgaagaccgagggcatgagctgccccacccccggctgcgacggcagcggccacgtgagcggcagcttcctgacccacagaagcctgagcggctgccccagagccaccagcgccatgaagaaggccaagctgagcggcgagcagatgctgaccatcaagcagagagccagcaacggcatcgagaacgacgaggagatcaagcagctggacgaggagatcaaggagctgaacgagagcaacagccagatggaggccgacatgatcaagctgagaacccagatcaccaccatggagagcaacctgaagaccatcgaggaggagaacaaggtgatcgagcagcagaacgagagcctgctgcacgagctggccaacctgagccagagcctgatccacagcctggccaacatccagctgccccacatggaccccatcaacgagcagaacttcgacgcctacgtgaccaccctgaccgagatgtacaccaaccaggacagataccagagccccgagaacaaggccctgctggagaacatcaagcaggccgtgagaggcatccaggtgtag

SEQ ID NO: 183832 - DNA, 3555 bp, Artificial Sequence
  derived and/or modified sequence
atggaggtggacaccgaggagaagagacacagaaccagaagcaagggcgtgagagtgcccgtggagcccgccatccaggagctgttcagctgccccacccccggctgcgacggcagcggccacgtgagcggcaagtacgccagacacagaagcgtgtacggctgccccctggccaagaagagaaagacccaggacaagcagccccaggagcccgcccccaagagaaagcccttcgccgtgaaggccgacagcagcagcgtggacgagtgcgacgacagcgacggcaccgaggacatggacgagaaggaggaggacgagggcgaggagtacagcgaggacaacgacgagcccggcgacgaggacgaggaggacgaggagggcgacagagaggaggaggaggagatcgaggaggaggacgaggacgacgacgaggacggcgaggacgtggaggacgaggaggaggaggaggaggaggaggaggaggaggaggaggaggaggagaacgaggaccaccagatgaactgccacaacaccagaatcatgcaggacaccgagaaggacgacaacaacaacgacgagtacgacaactacgacgagctggtggccaagagcctgctgaacctgggcaagatcgccgaggacgccgcctacagagccagaaccgagagcgagatgaacagcaacaccagcaacagcctggaggacgacagcgacaagaacgagaacctgggcagaaagagcgagctgagcctggacctggacagcgacgtggtgagagagaccgtggacagcctgaagctgctggcccagggccacggcgtggtgctgagcgagaacatgaacgacagaaactacgccgacagcatgagccagcaggacagcagaaacatgaactacgtgatgctgggcaagcccatgaacaacggcctgatggagaagatggtggaggagagcgacgaggaggtgtgcctgagcagcctggagtgcctgagaaaccagtgcttcgacctggccagaaagctgagcgagaccaacccccaggagagaaacccccagcagaacatgaacatcagacagcacgtgagacccgaggaggacttccccggcagaacccccgacagaaactacagcgacatgctgaacctgatgagactggaggagcagctgagccccagaagcagagtgttcgccagctgcgccaaggaggacggctgccacgagagagacgacgacaccaccagcgtgaacagcgacagaagcgaggaggtgttcgacatgaccaagggcaacctgaccctgctggagaaggccatcgccctggagaccgagagagccaaggccatgagagagaagatggccatggaggccggcagaagagacaacatgagaagctacgaggaccagagccccagacagctgcccggcgaggacagaaagcccaagagcagcgacagccacgtgaagaagccctactacgaccccagcagaaccgagaagaaggagagcaagtgccccacccccggctgcgacggcaccggccacgtgaccggcctgtacccccaccacagaagcctgagcggctgcccccacaaggacagagtgccccccgagatcctggccatgcacgagagcgtgctgaagtgccccacccccggctgcaccggcagaggccacgtgaacagcaacagaaacagccacagaagcctgagcggctgccccatcgccgccgccgagaagctggccaaggcccaggagaagcaccagagctgcgacgtgagcaagagcagccaggccagcgacagagtgctgagacccatgtgcttcgtgaagcagctggagatcccccagtacggctacagaaacaacgtgcccaccaccacccccagaagcaacctggccaaggagctggagaagtacagcaagaccagcttcgagtacaacagctacgacaaccacacctacggcaagagagccatcgcccccaaggtgcagaccagagacatcagccccaagggctacgacgacgccaagagatactgcaaggaccccagccccagcagcagcagcaccagcagctacgcccccagcagcagcagcaacctgagctgcggcggcggcagcagcgccagcagcacctgcagcaagagcagcttcgactacacccacgacatggaggccgcccacatggccgccaccgccatcctgaacctgagcaccagatgcagagagatgccccagaacctgagcaccaagccccaggacctgtgcgccaccagaaaccccgacatggaggtggacgagaacggcaccctggacctgagcatgaacaagcagagacccagagacagctgctgccccatcctgacccccctggagcccatgagcccccagcagcaggccgtgatgaacaacagatgcttccagctgggcgagggcgactgctgggacctgcccgtggactacaccaagatgaagcccagaagaatcgacgaggacgagagcaaggacatcacccccgaggacctggaccccttccaggaggccctggaggagagaagataccccggcgaggtgaccatccccagccccaagcccaagtacccccagtgcaaggagagcaagaaggacctgatcaccctgagcggctgccccctggccgacaagagcatcagaagcatgctggccaccagcagccaggagctgaagtgccccacccccggctgcgacggcagcggccacatcaccggcaactacgccagccacagaagcctgagcggctgccccagagccaagaagagcggcatcagaatcgcccagagcaaggaggacaaggaggaccaggagcccatcagatgccccgtgcccggctgcgacggccagggccacatcaccggcaagtacgccagccacagaagcgccagcggctgccccctggccgccaagagacagaaggacggctacctgaacggcagccagttcagctggaagagcgtgaagaccgagggcatgagctgccccacccccggctgcgacggcagcggccacgtgagcggcagcttcctgacccacagaagcctgagcggctgccccagagccaccagcgccatgaagaaggccaagctgagcggcgagcagatgctgaccatcaagcagagagccagcaacggcatcgagaacgacgaggagatcaagcagctggacgaggagatcaaggagctgaacgagagcaacagccagatggaggccgacatgatcaagctgagaacccagatcaccaccatggagagcaacctgaagaccatcgaggaggagaacaaggtgatcgagcagcagaacgagagcctgctgcacgagctggccaacctgagccagagcctgatccacagcctggccaacatccagctgccccacatggaccccatcaacgagcagaacttcgacgcctacgtgaccaccctgaccgagatgtacaccaaccaggacagataccagagccccgagaacaaggccctgctggagaacatcaagcaggccgtgagaggcatccaggtgtag

SEQ ID NO: 183833 - protein, 1718 aa, Artificial Sequence
  derived and/or modified sequence
MSGTSSPEAVKKLLENMQSDLRALSLECKKKFPPVKEAAESGIIKVKTIAARNTEILAALKENSSEVVQPFLMGCGTKEPKITQLCLAAIQRLMSHEVVSETAAGNIINMLWQLMENSLEELKLLQTVLVLLTTNTVVHDEALSKAIVLCFRLHFTKDNITNNTAAATVRQVVTVVFERMVAEDERHRDIIEQPVLVQGNSNRRSVSTLKPCAKDAYMLFQDLCQLVNADAPYWLVGMTEMTRTFGLELLESVLNDFPQVFLQHQEFSFLLKERVCPLVIKLFSPNIKFRQGSSTSSSPAPVEKPYFPICMRLLRVVSVLIKQFYSLLVTECEIFLSLLVKFLDADKPQWLRAVAVESIHRFCVQPQLLRSFCQSYDMKQHSTKVFRDIVNALGSFIQSLFLVPPTGNPATSNQAGNNNLGGSVSAPANSGMVGIGGGVTLLPAFEYRGTWIPILTITVQGSAKATYLEMLDKVEPPTIPEGYAMSVAFHCLLDLVRGITSMIEGELGELETECQTTTEEGSSPTQSTEQQDLQSTSDQMDKEIVSRAVWEEMVNACWCGLLAALSLLLDASTDEAATENILKAELTMAALCGRLGLVTSRDAFITAICKGSLPPHYALTVLNTTTAATLSNKSYSVQGQSVMMISPSSESHQQVVAVGQPLAVQPQGTVMLTSKNIQCMRTLLNLAHCHGAVLGTSWQLVLATLQHLVWILGLKPSSGGALKPGRAVEGPSTVLTTAVMTDLPVISNILSRLFESSQYLDDVSLHHLINALCSLSLEAMDMAYGNNKEPSLFAVAKLLETGLVNMHRIEILWRPLTGHLLEKVCQHPNSRMREWGAEALTSLIKAGLTFNHDPPLSQNQRLQLLLLNPLKEMSNINHPDIRLKQLECVLQILQSQGDSLGPGWPLVLGVMGAIRNDQGESLIRTAFQCLQLVVTDFLPTMPCTCLQIVVDVAGSFGLHNQELNISLTSIGLLWNISDYFFQRGETIEKELNKEEAAQQKQAEEKGVVLNRPFHPAPPFDCLWLCLYAKLGELCVDPRPAVRKSAGQTLFSTIGAHGTLLQHSTWHTVIWKVLFHLLDRVRESSTTADKEKIESGGGNILIHHSRDTAEKQWAETWVLTLAGVARIFNTRRYLLQPLGDFSRAWDVLLDHIQSAALSKNNEVSLAALKSFQEILQIVSPVRDSDKPETPPVVNVPVPVLIGPISGMSRPFVRTDSIGEKLGRYSSSEPPIVTDELEDLNLWWAAWNTWYRIGSESTKPPITFDKLTFIPSQPFLTALIQIFPALYQHIKTGFNMDDLQKLGVILHSAISVPISSDASPFILPSYTEAVLTSLQEAVLTALDVLQKAICVGPENMQIMYPAIFDQLLAFVEFSCKPPQYGQLETKHIANAKYNQIQLFAPAEWVALNYVPFAERSLEVVVDLYQKTACHKAVVNEKVLQNIIKTLRVPLSLKYSCPSESTWKLAVSSLLRVLSIGLPVARQHASSGKFDSMWPELANTFEDFLFTKSIPPDNLSIQEFQRNENIDVEVVQLISNEILPYANFIPKEFVGQIMTMLNKGSIHSQSSSFTEAEIDIRLREEFSKMCFETLLQFSFSNKVTTPQEGYISRMALSVLLKRSQDVLHRYIEDERLSGKCPLPRQQVTEIIFVLKAVSTLIDSLKKTQPENVDGNTWAQVIALYPTLVECITCSSSEVCSALKEALVPFKDFMQPPASRVQNGES

SEQ ID NO: 183834 - protein, 1717 aa, Artificial Sequence
  derived and/or modified sequence
MSGTSSPEAVKKLLENMQSDLRALSLECKKKFPPVKEAAESGIIKVKTIAARNTEILAALKENSSEVVQPFLMGCGTKEPKITQLCLAAIQRLMSHEVVSETAAGNIINMLWQLMENSLEELKLLQTVLVLLTTNTVVHDEALSKAIVLCFRLHFTKDNITNNTAAATVRQVVTVVFERMVAEDERHRDIIEQPVLVQGNSNRRSVSTLKPCAKDAYMLFQDLCQLVNADAPYWLVGMTEMTRTFGLELLESVLNDFPQVFLQHQEFSFLLKERVCPLVIKLFSPNIKFRQGSSTSSSPAPVEKPYFPICMRLLRVVSVLIKQFYSLLVTECEIFLSLLVKFLDADKPQWLRAVAVESIHRFCVQPQLLRSFCQSYDMKQHSTKVFRDIVNALGSFIQSLFLVPPTGNPATSNQAGNNNLGGSVSAPANSGMVGIGGGVTLLPAFEYRGTWIPILTITVQGSAKATYLEMLDKVEPPTIPEGYAMSVAFHCLLDLVRGITSMIEGELGELETECQTTTEEGSSPTQSTEQQDLQSTSDQMDKEIVSRAVWEEMVNACWCGLLAALSLLLDASTDEAATENILKAELTMAALCGRLGLVTSRDAFITAICKGSLPPHYALTVLNTTTAATLSNKSYSVQGQSVMMISPSSESHQQVVAVGQPLAVQPQGTVMLTSKNIQCMRTLLNLAHCHGAVLGTSWQLVLATLQHLVWILGLKPSSGGALKPGRAVEGPSTVLTTAVMTDLPVISNILSRLFESSQYLDDVSLHHLINALCSLSLEAMDMAYGNNKEPSLFAVAKLLETGLVNMHRIEILWRPLTGHLLEVCQHPNSRMREWGAEALTSLIKAGLTFNHDPPLSQNQRLQLLLLNPLKEMSNINHPDIRLKQLECVLQILQSQGDSLGPGWPLVLGVMGAIRNDQGESLIRTAFQCLQLVVTDFLPTMPCTCLQIVVDVAGSFGLHNQELNISLTSIGLLWNISDYFFQRGETIEKELNKEEAAQQKQAEEKGVVLNRPFHPAPPFDCLWLCLYAKLGELCVDPRPAVRKSAGQTLFSTIGAHGTLLQHSTWHTVIWKVLFHLLDRVRESSTTADKEKIESGGGNILIHHSRDTAEKQWAETWVLTLAGVARIFNTRRYLLQPLGDFSRAWDVLLDHIQSAALSKNNEVSLAALKSFQEILQIVSPVRDSDKPETPPVVNVPVPVLIGPISGMSRPFVRTDSIGEKLGRYSSSEPPIVTDELEDLNLWWAAWNTWYRIGSESTKPPITFDKLTFIPSQPFLTALIQIFPALYQHIKTGFNMDDLQKLGVILHSAISVPISSDASPFILPSYTEAVLTSLQEAVLTALDVLQKAICVGPENMQIMYPAIFDQLLAFVEFSCKPPQYGQLETKHIANAKYNQIQLFAPAEWVALNYVPFAERSLEVVVDLYQKTACHKAVVNEKVLQNIIKTLRVPLSLKYSCPSESTWKLAVSSLLRVLSIGLPVARQHASSGKFDSMWPELANTFEDFLFTKSIPPDNLSIQEFQRNENIDVEVVQLISNEILPYANFIPKEFVGQIMTMLNKGSIHSQSSSFTEAEIDIRLREEFSKMCFETLLQFSFSNKVTTPQEGYISRMALSVLLKRSQDVLHRYIEDERLSGKCPLPRQQVTEIIFVLKAVSTLIDSLKKTQPENVDGNTWAQVIALYPTLVECITCSSSEVCSALKEALVPFKDFMQPPASRVQNGES

SEQ ID NO: 183835 - DNA, 84 bp, Artificial Sequence
  derived and/or modified sequence
aaatcaataaatgtaattcagcatataaacagaaccaaagacaaaaaccacatgattatctcaatagatgcagaaaaggccttt

SEQ ID NO: 183836 - DNA, 5157 bp, Artificial Sequence
  derived and/or modified sequence
atgagcggcaccagcagccccgaggccgtgaagaagctgctggagaacatgcagagcgacctgagagccctgagcctggagtgcaagaagaagttcccccccgtgaaggaggccgccgagagcggcatcatcaaggtgaagaccatcgccgccagaaacaccgagatcctggccgccctgaaggagaacagcagcgaggtggtgcagcccttcctgatgggctgcggcaccaaggagcccaagatcacccagctgtgcctggccgccatccagagactgatgagccacgaggtggtgagcgagaccgccgccggcaacatcatcaacatgctgtggcagctgatggagaacagcctggaggagctgaagctgctgcagaccgtgctggtgctgctgaccaccaacaccgtggtgcacgacgaggccctgagcaaggccatcgtgctgtgcttcagactgcacttcaccaaggacaacatcaccaacaacaccgccgccgccaccgtgagacaggtggtgaccgtggtgttcgagagaatggtggccgaggacgagagacacagagacatcatcgagcagcccgtgctggtgcagggcaacagcaacagaagaagcgtgagcaccctgaagccctgcgccaaggacgcctacatgctgttccaggacctgtgccagctggtgaacgccgacgccccctactggctggtgggcatgaccgagatgaccagaaccttcggcctggagctgctggagagcgtgctgaacgacttcccccaggtgttcctgcagcaccaggagttcagcttcctgctgaaggagagagtgtgccccctggtgatcaagctgttcagccccaacatcaagttcagacagggcagcagcaccagcagcagccccgcccccgtggagaagccctacttccccatctgcatgagactgctgagagtggtgagcgtgctgatcaagcagttctacagcctgctggtgaccgagtgcgagatcttcctgagcctgctggtgaagttcctggacgccgacaagccccagtggctgagagccgtggccgtggagagcatccacagattctgcgtgcagccccagctgctgagaagcttctgccagagctacgacatgaagcagcacagcaccaaggtgttcagagacatcgtgaacgccctgggcagcttcatccagagcctgttcctggtgccccccaccggcaaccccgccaccagcaaccaggccggcaacaacaacctgggcggcagcgtgagcgcccccgccaacagcggcatggtgggcatcggcggcggcgtgaccctgctgcccgccttcgagtacagaggcacctggatccccatcctgaccatcaccgtgcagggcagcgccaaggccacctacctggagatgctggacaaggtggagccccccaccatccccgagggctacgccatgagcgtggccttccactgcctgctggacctggtgagaggcatcaccagcatgatcgagggcgagctgggcgagctggagaccgagtgccagaccaccaccgaggagggcagcagccccacccagagcaccgagcagcaggacctgcagagcaccagcgaccagatggacaaggagatcgtgagcagagccgtgtgggaggagatggtgaacgcctgctggtgcggcctgctggccgccctgagcctgctgctggacgccagcaccgacgaggccgccaccgagaacatcctgaaggccgagctgaccatggccgccctgtgcggcagactgggcctggtgaccagcagagacgccttcatcaccgccatctgcaagggcagcctgcccccccactacgccctgaccgtgctgaacaccaccaccgccgccaccctgagcaacaagagctacagcgtgcagggccagagcgtgatgatgatcagccccagcagcgagagccaccagcaggtggtggccgtgggccagcccctggccgtgcagccccagggcaccgtgatgctgaccagcaagaacatccagtgcatgagaaccctgctgaacctggcccactgccacggcgccgtgctgggcaccagctggcagctggtgctggccaccctgcagcacctggtgtggatcctgggcctgaagcccagcagcggcggcgccctgaagcccggcagagccgtggagggccccagcaccgtgctgaccaccgccgtgatgaccgacctgcccgtgatcagcaacatcctgagcagactgttcgagagcagccagtacctggacgacgtgagcctgcaccacctgatcaacgccctgtgcagcctgagcctggaggccatggacatggcctacggcaacaacaaggagcccagcctgttcgccgtggccaagctgctggagaccggcctggtgaacatgcacagaatcgagatcctgtggagacccctgaccggccacctgctggagaaggtgtgccagcaccccaacagcagaatgagagagtggggcgccgaggccctgaccagcctgatcaaggccggcctgaccttcaaccacgacccccccctgagccagaaccagagactgcagctgctgctgctgaaccccctgaaggagatgagcaacatcaaccaccccgacatcagactgaagcagctggagtgcgtgctgcagatcctgcagagccagggcgacagcctgggccccggctggcccctggtgctgggcgtgatgggcgccatcagaaacgaccagggcgagagcctgatcagaaccgccttccagtgcctgcagctggtggtgaccgacttcctgcccaccatgccctgcacctgcctgcagatcgtggtggacgtggccggcagcttcggcctgcacaaccaggagctgaacatcagcctgaccagcatcggcctgctgtggaacatcagcgactacttcttccagagaggcgagaccatcgagaaggagctgaacaaggaggaggccgcccagcagaagcaggccgaggagaagggcgtggtgctgaacagacccttccaccccgccccccccttcgactgcctgtggctgtgcctgtacgccaagctgggcgagctgtgcgtggaccccagacccgccgtgagaaagagcgccggccagaccctgttcagcaccatcggcgcccacggcaccctgctgcagcacagcacctggcacaccgtgatctggaaggtgctgttccacctgctggacagagtgagagagagcagcaccaccgccgacaaggagaagatcgagagcggcggcggcaacatcctgatccaccacagcagagacaccgccgagaagcagtgggccgagacctgggtgctgaccctggccggcgtggccagaatcttcaacaccagaagatacctgctgcagcccctgggcgacttcagcagagcctgggacgtgctgctggaccacatccagagcgccgccctgagcaagaacaacgaggtgagcctggccgccctgaagagcttccaggagatcctgcagatcgtgagccccgtgagagacagcgacaagcccgagaccccccccgtggtgaacgtgcccgtgcccgtgctgatcggccccatcagcggcatgagcagacccttcgtgagaaccgacagcatcggcgagaagctgggcagatacagcagcagcgagccccccatcgtgaccgacgagctggaggacctgaacctgtggtgggccgcctggaacacctggtacagaatcggcagcgagagcaccaagccccccatcaccttcgacaagctgaccttcatccccagccagcccttcctgaccgccctgatccagatcttccccgccctgtaccagcacatcaagaccggcttcaacatggacgacctgcagaagctgggcgtgatcctgcacagcgccatcagcgtgcccatcagcagcgacgccagccccttcatcctgcccagctacaccgaggccgtgctgaccagcctgcaggaggccgtgctgaccgccctggacgtgctgcagaaggccatctgcgtgggccccgagaacatgcagatcatgtaccccgccatcttcgaccagctgctggccttcgtggagttcagctgcaagcccccccagtacggccagctggagaccaagcacatcgccaacgccaagtacaaccagatccagctgttcgcccccgccgagtgggtggccctgaactacgtgcccttcgccgagagaagcctggaggtggtggtggacctgtaccagaagaccgcctgccacaaggccgtggtgaacgagaaggtgctgcagaacatcatcaagaccctgagagtgcccctgagcctgaagtacagctgccccagcgagagcacctggaagctggccgtgagcagcctgctgagagtgctgagcatcggcctgcccgtggccagacagcacgccagcagcggcaagttcgacagcatgtggcccgagctggccaacaccttcgaggacttcctgttcaccaagagcatcccccccgacaacctgagcatccaggagttccagagaaacgagaacatcgacgtggaggtggtgcagctgatcagcaacgagatcctgccctacgccaacttcatccccaaggagttcgtgggccagatcatgaccatgctgaacaagggcagcatccacagccagagcagcagcttcaccgaggccgagatcgacatcagactgagagaggagttcagcaagatgtgcttcgagaccctgctgcagttcagcttcagcaacaaggtgaccaccccccaggagggctacatcagcagaatggccctgagcgtgctgctgaagagaagccaggacgtgctgcacagatacatcgaggacgagagactgagcggcaagtgccccctgcccagacagcaggtgaccgagatcatcttcgtgctgaaggccgtgagcaccctgatcgacagcctgaagaagacccagcccgagaacgtggacggcaacacctgggcccaggtgatcgccctgtaccccaccctggtggagtgcatcacctgcagcagcagcgaggtgtgcagcgccctgaaggaggccctggtgcccttcaaggacttcatgcagccccccgccagcagagtgcagaacggcgagagctag

SEQ ID NO: 183837 - DNA, 5157 bp, Artificial Sequence
  derived and/or modified sequence
atgtcaggaacctcctcccccgaggcagtgaaaaagctgctagagaacatgcaatcagatctgagagcccttagcctcgaatgtaagaagaagttccctcctgttaaagaagccgccgagtccggcataattaaggtcaagaccatcgcagcccgcaacaccgaaatccttgccgcacttaaggaaaattcaagtgaggtggtccagccgttcctaatgggatgtggcactaaggagccaaagatcacccaactgtgtctagccgccattcagcgacttatgagtcacgaagtagtgagtgagacagctgctgggaatattatcaacatgttatggcagctgatggagaactccctggaggaactcaaactcctgcaaactgtgctagtactgctgactactaatacagtagtccacgatgaggccctctccaaagccatagtgctttgtttccgtctccatttcactaaggataatataacgaataacaccgctgcagcaacagtgcggcaggtggtgacagtagtgttcgagaggatggttgctgaggatgaacgtcacagagacattattgagcagcccgtgctggtccagggaaattcgaaccgccgttctgtttctaccctgaagccttgtgccaaagacgcatacatgctgttccaagacctgtgtcagctcgtgaatgcagacgctccatactggctggttgggatgactgaaatgacacgcaccttcgggctggagttgctggagtcagtccttaatgatttcccacaggtgtttctccagcatcaagagttctcattcttgctgaaagagcgcgtctgtcctctggtgattaagctgttctctcctaacatcaaattcagacaagggagcagcacaagctcatctcccgccccagtcgaaaagccctatttcccaatatgcatgcggctcctgagagtcgtatccgtccttatcaaacagttttactccttgcttgtcactgagtgtgagatctttctttccctcctggtgaaattcctagacgccgataagcctcagtggctacgagcggttgccgtcgagtctatccataggttttgtgtgcagccccagctactgcggtcattctgccagtcctacgacatgaagcaacactccacaaaggtgttccgagacatagtgaacgccctcgggagtttcattcaaagcctgttcctcgtgccacctactggaaaccccgcaaccagcaatcaggccggaaacaacaatctcggaggcagtgtatctgcacctgcaaattcaggcatggtgggcattggaggcggcgtgaccctcctgcctgccttcgaatacagagggacgtggatcccaatactgacgattaccgtccaaggatccgcaaaggctacatatttagagatgctcgataaggtggagccaccaaccattcccgagggctatgcgatgtctgtggcattccattgtctattggacctcgtccggggaattacgtccatgatcgaaggagagcttggagaacttgagactgagtgtcagacaactacagaggaggggagcagtccgacccaatctacggagcaacaggacctgcagagcacatcagatcagatggacaaggagatagtgagccgagcggtgtgggaggaaatggtgaacgcctgctggtgtggactgctggcagccttaagcttgctgctggatgcaagcaccgacgaggccgccacagagaatattctcaaagccgagctcacaatggctgctttgtgcgggagactggggctagttacatcccgggatgccttcattacagccatttgcaaaggcagcctccctccacactatgcactgactgttttgaataccacaactgccgccacccttagtaacaagtcctacagtgtacagggccagagtgtcatgatgatatctccctccagcgagagccaccagcaggttgtggccgtcggccaacctctggcagttcagcctcaggggaccgtcatgttgaccagcaaaaacatccagtgcatgcgaactctgctgaatctcgcccactgtcatggggccgttttgggcacctcttggcagttagtgcttgctacactgcaacaccttgtgtggattctgggtttaaaaccttcatccgggggggcattgaaacctggaagggctgtagaaggccccagtaccgtactcacgactgctgtgatgaccgaccttcccgtaataagcaacatcctgagccgactgttcgagagtagccagtaccttgacgacgtgtccctgcatcacctgatcaacgcgctctgtagtctctcactggaagctatggacatggcgtatggtaacaacaaagagccatccctctttgccgtggcgaagctcctggagactggcctcgtgaacatgcaccgaatcgagatcctgtggcggccactgacaggtcatctgcttgagaaagtgtgtcagcatcccaactcccgtatgagggagtggggagcagaggccttgacctctttgattaaagctgggctgacgttcaaccatgatcccccactctctcaaaaccagcgactccagttattgctgcttaaccccctgaaggaaatgtcaaacatcaaccatccagacatccgcttaaagcagttagaatgcgtcctccagatactccaatcacagggcgatagtttagggccaggctggcctctggttctcggtgtcatgggggcaattaggaatgatcagggcgagagcttaatccgaactgctttccagtgcctgcagctcgtagttacggacttcttgcctacaatgccctgcacatgcctgcagattgtggttgacgttgccggttccttcggtctgcacaatcaggagcttaatatatccctgacttctatcggcctgctgtggaatatcagtgattatttctttcagcgcggagagaccattgaaaaagaattaaataaggaggaagccgctcagcagaaacaagcagaggagaagggggtggtgcttaaccgcccattccaccctgcaccgcccttcgactgtctgtggttgtgtctgtatgcaaagctcggcgagctttgtgtggaccctagacctgccgtccgaaaaagtgccggtcaaaccctgtttagtaccatcggagcccacggcactttgcttcagcactctacctggcataccgtaatatggaaagtgctgttccacctacttgatcgggtgagggaatcatcgacgacagccgataaggaaaagatagagagcggcggagggaacatcttaattcaccattcacgggacaccgcagagaagcagtgggctgagacgtgggttctgacacttgctggtgttgctcggatttttaacacccgacggtatctgttgcagcccctgggggatttctcccgggcttgggacgttctgctggatcatatccagagtgcagccctctcaaaaaacaacgaggtatcattggcggcgttaaagtcttttcaggaaatcctccaaattgtcagtcctgtgagggattctgataaacctgagacaccccccgttgttaacgttccagtgcccgtacttataggtcctatctcaggtatgtctcgaccctttgttcgaacagattctataggagaaaagctcggccgctacagctcgtctgagccgcctatcgtgacagacgaactcgaagatttaaacctttggtgggccgcttggaatacgtggtacaggatcgggagcgagtctaccaaaccccccatcaccttcgataaactcacttttattccaagccagccttttctaacagcattaatccagattttcccagctctttaccagcacatcaaaacaggcttcaatatggatgatctccagaaactgggggtgatactgcactccgccattagcgtcccaatatcttcggatgcctcccctttcattctgcctagttatacagaagccgtgctcacctccctgcaggaagccgtactcaccgccctggacgtcctccagaaggccatatgcgtgggacctgaaaacatgcagatcatgtatcccgctatcttcgatcagctgttggcgttcgtggagttttcatgtaagccccctcagtatggccaactggaaactaagcacattgcaaacgctaaatataaccagatccagctatttgctcctgctgaatgggtcgctctcaattatgtgccatttgcagaacgcagcctggaagtggtcgttgatctgtaccaaaaaacagcatgccataaggcagtcgttaatgagaaagtccttcagaacatcataaaaaccctgagagtccccctgtctctgaaatacagttgtcccagcgagtcaacctggaagttggccgtttctagtctcctgcgggtgttgagcattgggctgccggtcgcgcgccagcatgctagttcagggaagtttgattcgatgtggcctgaactggccaatacattcgaggatttcctctttacaaagtccataccacccgataacttatcaatccaggagttccagagaaacgagaacattgacgttgaggtggtgcagctcatctctaacgagatcttgccctatgctaattttatccccaaagaatttgtggggcagatcatgactatgctgaacaaaggaagcattcacagtcaaagtagtagttttacagaggctgagatagatatacgcctgcgggaagagttttccaaaatgtgcttcgagactctgcttcagtttagcttcagtaacaaagtgacaactccccaggaaggctatattagccgtatggctctgtccgtgctactgaagcgatcacaagatgttctccataggtacattgaggatgaaaggctgtctgggaaatgtcccctgcctaggcaacaggtcacggaaatcatttttgtgctaaaggctgtgagcaccttgatcgactccctcaaaaaaacacagccagaaaatgttgacggcaacacttgggcacaggtaattgccctctatcccactcttgttgagtgcattacttgctcctcctcggaagtatgcagcgctctgaaagaggctctggttcctttcaaagatttcatgcagcctcctgcttcgagagtacagaacggtgagtcatag

SEQ ID NO: 183838 - DNA, 5157 bp, Artificial Sequence
  derived and/or modified sequence
atgagcggcaccagcagccctgaggccgtgaagaagctgctggagaacatgcagagcgacctgcgggccctgagcctggagtgcaagaagaagtttcctcctgtgaaggaggccgctgagagcggcatcatcaaggtgaagaccatcgccgccaggaacacagagatcctggccgccctgaaggagaacagcagcgaggtggtgcagcccttcctgatgggctgcggcaccaaggagcccaagatcacccagctgtgcctggccgccatccagaggctgatgagccatgaggtggtgtctgaaacagctgctggcaacatcatcaacatgctgtggcagctgatggagaacagcctggaggagctgaagctgctgcagacagtgctggtgctgctgaccaccaacacagtggtgcatgatgaggccctgagcaaggccatcgtgctgtgcttccggctgcacttcaccaaggacaacatcaccaacaacacagctgctgccaccgtgcggcaggtggtgacagtggtgtttgagaggatggtggctgaagatgagcggcaccgggacatcatcgagcagcctgtgctggtgcagggcaacagcaacagaagatctgtgtccaccctgaagccctgtgccaaggatgcctacatgctgttccaggacctgtgccagctggtgaatgctgatgccccctactggctggtgggcatgacagagatgaccaggaccttcggcctggagctgctggagagcgtgctgaatgacttcccccaggtgttcctgcagcaccaggagttctccttcctgctgaaggagcgggtgtgccccctggtgatcaagctgttcagccccaacatcaagttccggcagggcagcagcaccagcagcagccctgcccctgtggagaagccctacttccccatctgcatgaggctgctgcgggtggtgtctgtgctgatcaagcagttctacagcctgctggtgacagaatgtgagatcttcctgagcctgctggtgaagttcctggatgctgacaagccccagtggctgcgggctgtggccgtggagagcatccaccgcttctgtgtgcagccccagctgctgcgctccttctgccagagctatgacatgaagcagcacagcaccaaggtgttccgggacatcgtgaatgccctgggcagcttcatccagagcctcttcctggtgccccccaccggcaacccagccaccagcaaccaggccggcaacaacaacctgggcggctctgtgtctgccccagccaacagcggcatggtgggcattggaggcggcgtgaccctgctgcctgcctttgagtaccggggcacctggatccccatcctgaccatcaccgtgcagggcagcgccaaggccacctacctggagatgctggacaaggtggagccccccaccatccctgagggctacgccatgtctgtggccttccactgcctgctggacctggtgcggggcatcacctccatgattgaaggagagctgggggagctggagacagagtgccagaccaccacagaggagggcagcagccccacccagagcacagagcagcaggacctgcagagcaccagtgaccagatggacaaggagatcgtgtccagagctgtgtgggaggagatggtgaatgcctgctggtgtggcctgctggccgccctgagcctgctgctggatgccagcacagatgaggccgccacagagaacatcctgaaggccgagctgaccatggccgccctgtgtggccgcctgggcctggtgaccagcagagatgccttcatcacagccatctgcaagggcagcctgcccccccactacgccctgactgtgctgaacaccaccacagctgccaccctgagcaacaagagctacagcgtgcagggccagagcgtgatgatgatcagccccagcagcgagagccaccagcaggtggtggccgtgggccagcccctggccgtgcagccccagggcaccgtgatgctgaccagcaagaacatccagtgcatgaggaccctgctgaacctggcccactgccacggggctgtgctgggcacctcctggcagctggtgctggccaccctgcagcacctggtgtggatcctgggcctgaagcccagcagcggcggggccctgaagccaggccgggctgtggagggccccagcacagtgctgaccacagctgtgatgacagacctgcccgtcatcagcaacatcctgagccggctgtttgagagcagccagtacctggatgatgtgtccctgcaccacctgatcaatgccctgtgcagcctgagcctggaggccatggacatggcctacggcaacaacaaggagcccagcctgtttgctgtggccaagctgctggagaccggcctggtgaacatgcacagaattgagatcctgtggaggcccctgaccggccacctgctggagaaggtgtgccagcaccccaacagcaggatgagggagtggggcgctgaggccctgaccagcctcatcaaggccggcctgaccttcaaccacgacccccccctgagccagaaccagaggctgcagctgctgctgctgaaccccctgaaggagatgagcaacatcaaccacccagacatccggctgaagcagctggagtgtgtgctgcagatcctgcagagccagggcgacagcctgggccctggctggcccctggtgctgggcgtgatgggcgccatcagaaatgaccagggcgagagcctcatcagaacagccttccagtgcctgcagctggtggtgacagacttcctgcccaccatgccctgcacctgcctgcagatcgtggtggatgtggccggcagctttggcctgcacaaccaggagctgaacatcagcctgaccagcatcggcctgctgtggaacatcagtgactacttcttccagagaggagagaccatcgagaaggagctgaacaaggaggaggccgcccagcagaagcaggccgaggagaagggcgtggtgctgaaccggcccttccacccagcccccccatttgactgcctgtggctgtgcctgtatgccaagctgggggagctgtgtgtggaccccaggcctgctgtgaggaagtctgctggccagaccctcttcagcaccatcggggcccacggcaccctgctgcagcacagcacctggcacacagtcatctggaaggtgctcttccacctgctggacagagtgcgggagagcagcaccacagctgacaaggagaagattgagagcggcggcggcaacatcctgatccaccacagccgggacacagctgagaagcagtgggccgagacctgggtgctgaccctggccggcgtggcccgcatcttcaacacccggcgctacctgctgcagcccctgggggacttcagccgggcctgggatgtgctgctggaccacatccagagcgctgccctgagcaagaacaatgaggtgtccctggccgccctgaagagcttccaggagatcctgcagatcgtgtcccctgtgcgggacagcgacaagccagagaccccacctgtggtgaatgtgcctgtgcctgtgctgattggccccatcagcggcatgagccggccctttgtgaggacagacagcatcggggagaagctgggccgctacagcagcagcgagccccccatcgtgacagatgagctggaggacctgaacctgtggtgggccgcctggaacacctggtacagaattggcagcgagagcaccaagccacccatcacctttgacaagctgaccttcatccccagccagcccttcctgacagccctgatccagatcttccctgccctgtaccagcacatcaagacaggcttcaacatggatgacctgcagaagctgggcgtcatcctgcacagcgccatctctgtgcccatcagcagtgatgccagccccttcatcctgcccagctacacagaagctgtgctgaccagcctgcaggaggccgtgctgacagccctggatgtgctgcagaaggccatctgtgtgggccctgagaacatgcagatcatgtacccagccatctttgaccagctgctggcctttgtggagttcagctgcaagccaccccagtatggccagctggagaccaagcacatcgccaatgccaagtacaaccagatccagctgtttgccccagctgagtgggtggccctgaactacgtgccctttgctgagaggagcctggaggtggtggtggacctgtaccagaagacagcctgccacaaggctgtggtgaatgagaaggtgctgcagaacatcatcaagaccctgcgggtgcccctgagcctgaagtacagctgccccagcgagagcacctggaagctggccgtgagcagcctgctgcgggtgctgagcatcggcctgcctgtggcccggcagcacgccagcagcggcaagtttgacagcatgtggccagagctggccaacacctttgaggacttcctgttcaccaagagcatccccccagacaacctgagcatccaggagttccagagaaatgaaaatattgatgtggaggtggtgcagctgatcagcaatgagatcctgccctatgccaacttcatccccaaggagtttgtgggccagatcatgaccatgctgaacaagggcagcatccacagccagagcagcagcttcacagaagctgagattgacatccggctgcgggaggagttcagcaagatgtgctttgagaccctgctgcagttctccttcagcaacaaggtgaccaccccccaggagggctacatcagcaggatggccctgtctgtgctgctgaagaggagccaggatgtgctgcaccgctacattgaagatgagcggctgagcggcaagtgccccctgccccggcagcaggtgacagagatcatctttgtgctgaaggctgtgtccaccctgattgacagcctgaagaagacccagccagaaaatgtggatggcaacacctgggcccaggtgattgccctgtaccccaccctggtggagtgcatcacctgcagcagcagcgaggtgtgcagcgccctgaaggaggccctggtgcccttcaaggacttcatgcagcccccagccagccgggtgcagaatggagagagctag

SEQ ID NO: 183839 - DNA, 10382 bp, Artificial Sequence
  derived and/or modified sequence
attgtgggcgactcggctaatggcgtcggcgagtcttaggggcctggggagctggcgctgaagcttcttgccaggttggctggtgacacccggtgtggctgggccccgcggcagcggagggacctgcccgccttgtgggtttctcggccagagtcggcggagcctagcgggacggtgcgactgcggggggcgcctccgagaaaagccagaggtgttgcggggaagctgctgggggacgctcgagcaggctccgggttcgcagcccagggcccaagaagcgggctgctgaaggaccagagacaccgggagggagctgcctgtggccctaaggagctgaccgtgccagagcttgtttgtacctctcggaaattggctgggaccttggaggatcatgtccggcaccagcagccccgaggcggtgaagaagctgctggagaatatgcagagcgacttgcgcgccttgtcactggagtgcaagaagaaattcccacctgtcaaagaggctgctgaatcaggaataataaaagttaaaacaattgctgcacgaaacactgaaattttggcagcactgaaagagaacagctcagaggttgtacagccttttttaatgggttgtggaaccaaggaaccgaagatcactcagctatgtttggctgctattcagagactcatgtcacatgaagtcgtgtctgagactgcagctggaaatataattaacatgctttggcagctaatggagaatagtcttgaagaacttaagctacttcaaacagttcttgttcttttaacaaccaatacagtagttcatgatgaggcactttctaaggcaatcgttctttgttttcgactacacttcacaaaagataatattacaaataatacagctgctgctacagtgcgacaagttgttactgttgtttttgagaggatggttgctgaagatgaacgacacagagatattatagaacaaccagtactggtacaaggaaatagtaacagaagatctgtcagtaccctcaaaccttgtgctaaagatgcatatatgcttttccaggatctttgtcagttggttaatgctgatgctccttattggctagtgggcatgacagaaatgactcggacgtttggcctcgaattacttgagtcagtcctcaatgattttccgcaggtctttttacaacaccaagaatttagtttcctcctcaaagaaagggtatgtcctcttgtgataaagctcttttctccaaatataaagttcagacaaggttccagcacctcatcttctccagcaccagttgaaaaaccatattttcctatctgcatgcgtttgctgagagtagtatctgttctgattaagcagttttacagtcttttggtaactgaatgtgagatatttctgtcacttctggtgaaatttctggatgcagataaaccacagtggctacgagctgttgcggtggaatcaatacacagattctgtgtgcagcctcaactattaaggtcattttgtcagtcctatgatatgaaacagcattctaccaaggtttttcgtgatattgtaaatgcactgggatcttttatacagtccttgtttcttgtcccccctactggaaatcctgcaacaagcaaccaagctggaaacaataatttaggtggctcagtctcagcaccagctaactcaggaatggtggggattggtggaggtgttactttgctaccagcatttgaatataggggaacctggatacctattctgacaatcacagttcaaggcagtgctaaagccacctacttagaaatgttggacaaagttgagcctccaactatacctgaaggttacgccatgtctgtggcattccattgtttgctagaccttgttcgtggaatcacaagtatgattgaaggagagctaggagagcttgaaacagaatgtcaaaccaccactgaagaaggttcttcaccaacacagtcgacagaacagcaggatttacagtcaacatcagaccaaatggataaggaaattgttagtagggctgtttgggaagaaatggtgaatgcctgctggtgtggtcttcttgctgcactctcactccttcttgatgccagcacagatgaagctgccactgagaatattttaaaagctgaactgactatggctgctctttgtggaagactgggccttgtaacttcaagagatgcctttataactgcaatatgcaaaggttccctgcctccccattatgctcttactgtattgaataccaccactgcagctacactttccaacaaatcatattccgttcagggccaaagtgttatgatgataagtccatcaagtgaatctcaccaacaagttgtggcagtgggtcaacctttagcagtccagcctcaagggacagtaatgctgacttccaaaaatatccagtgtatgaggactttacttaacttggcgcattgccatggggctgttcttggaacatcatggcaacttgtcttggcaactcttcagcatcttgtgtggattctgggattaaagcctagtagtggcggtgccttgaaacctgggagagctgtagaaggacccagtacagttctaacaacagcagtgatgacagatttaccagtgatttccaatatactttcaagattgtttgaaagctcacagtatcttgatgatgtatcactgcatcatttaataaatgcactttgctccttgtctctagaagcaatggatatggcctatggaaataataaggaaccatctctttttgctgttgccaaattgttagaaactggtttagttaatatgcaccgaatagaaattctgtggagacctctgactggccatctacttgagaaggtctgccagcatccaaactctcgaatgagagaatggggagcagaagctttaacttctcttattaaagcaggattaacatttaaccatgatcctccactctcacaaaaccagaggctgcagttgcttttattgaacccgttaaaggagatgtccaatattaatcatccagatattcgactcaagcagttagaatgcgtgttgcagattctgcagagtcagggagacagtcttgggcctggatggccattagtgcttggagtcatgggagcaatcagaaatgatcaaggagaatccttgatacgaactgcattccagtgtcttcagttggttgtgacagattttctaccaacaatgccttgtacttgcctgcaaatagttgtagatgttgcaggtagctttggcctccataaccaagaactcaatattagtttaacttcaataggtttattgtggaatatttcagattattttttccaaagaggggaaactattgaaaaagaactaaataaggaagaggcagcacagcaaaagcaggcagaagagaaaggagttgttttaaatcggccattccaccctgcaccgccatttgattgcttgtggttatgtctttatgcaaaattgggtgaactatgtgtggatccccgtcctgctgtcaggaagagtgcagggcaaactctgttttctacaattggtgcgcatggaactttattacagcattcaacctggcacactgttatctggaaggtactctttcatctactggacagagttcgagagtcctctaccactgcagacaaagaaaagattgagtctggaggtggcaatattctcattcatcattcaagggacaccgccgagaagcaatgggctgagacgtgggtattaacattggctggagtagcaaggatcttcaacactagaagatatttgctgcagcctttaggagatttttcaagagcttgggatgttcttcttgaccatatacagtcagcagcactcagcaaaaacaatgaagtatctctggctgctctgaaaagcttccaggaaattttacagattgtgtcccctgtcagagactcagataagcctgagacaccacctgtagttaatgtacctgtgcctgttcttatagggcccatatcaggcatgagcaggccatttgtaagaacagattccattggagaaaaactaggaagatatagtagctctgagccacccattgttactgatgagcttgaagatttgaatctatggtgggctgcgtggaatacctggtatagaattggatctgaaagtactaagcctcctattacttttgataaactaacttttattcctagccagccttttcttacagctttaattcagatatttccagctctctaccaacacataaaaactggtttcaatatggatgacttgcaaaagttgggagtcatattgcacagtgctatttcagtcccaataagttcagatgcatccccttttattcttccatcttataccgaagcagttttgacaagtttacaggaagctgtacttacagctttagatgttctccaaaaggccatttgtgtaggaccagaaaacatgcagataatgtatccagctatatttgaccagttgttggcatttgtagaattttcctgtaaacctccacagtatggacagctggaaacaaagcacattgcaaatgcaaaatataatcagatccaactatttgcaccggcggaatgggtagccttgaattatgtgccgtttgctgaaaggtctttagaagtagttgtggatttataccaaaaaacagcgtgtcacaaagcagtggtgaatgagaaagtgctccagaatattattaagactcttagggttcctctcagtttgaagtattcctgcccttctgaaagcacatggaaactagcagtatcctctctcctcagagttctttctattgggctacctgttgcccggcagcatgcttcttctggaaaatttgacagtatgtggccagaactagccaatacttttgaagattttctctttactaaaagcatacctccagataatctctctattcaagagtttcaaagaaatgaaaatattgatgtcgaggtagttcaacttatcagcaatgagatactaccttatgccaattttattcctaaggaatttgttggtcaaataatgacaatgcttaacaagggctcaatacattctcagtcatcttcatttacagaagcagagattgatattcgtttgagagaggaattttctaaaatgtgttttgaaacattactccagttttccttcagtaataaagtcacaacacctcaagaaggctacatctcacgaatggcactctcagtgcttttaaagaggtcccaagatgtactacatcgctatatagaggatgaaagattaagtggtaaatgccctcttccaaggcaacaagtaacagaaattatatttgttttaaaagcagtcagtactcttattgattcacttaagaaaactcagcctgagaatgttgatggaaatacctgggcacaagtaattgccttatacccaactttagtagaatgcatcacctgttcttcttcagaagtctgttctgcacttaaagaggcactagttccttttaaggatttcatgcagccaccagcatccagagttcaaaatggagaatcttgaccggctacaatatatttgaaagcaggaagatagtctaaaaaatgtttgctcctaattgagtcttctgtgagaaggacatttcttactgcagataattcttggcagctgttgttggcctcctttaaattctacttacctgagttcagtaattcatattacaggcttgcacatcaacaaaggctcctgaatgaacagcagtgtaaggctttaataaattaaactgatgggagggataattaacactacagtatacatgctaccatatctccagttggtgatttaaagtgagcttatgtacagtttgtggtgtatgtgttaatgatgtactttttaaaaagaaagaagagatatttcaattcagtcagatttattagtctggtgtttttgcaccctttttcaagtacaaaatcgtactagaattttatgcaagatggtactgtaacattccatattatctataaccagcctttgttaacaaagggaactgatatacttgtgtgtataataaatggtacagttctgtataaaatagtgcatttatttaaattttaaaagtattgataatgttaaatgcttaaagctctatttattattaatacaaaattgtttgcttacatttttacttataatttgccttcatatgtggcggataagctcaccatatgatcatgcagttagcttcatgcttattttaaatgtattattagtgaccattaaacatctgaccagtaaggtcatgtgaacacagcagcaaatagtttatgatttgctgattttggagctttgaaatataggttcttaatacattgatacatattgtagcactatgacttcatcatacctcatttctttaaacagctctccaagctttcactgaagtctgtctgttttttatattggctgtctggattttaaagacttttcatattttatatttctactgattttgtttcccctaacaacatttgtcactgtctttgaattatgacccaggcaagatgatttcagattttctaaaatcttgcctgtgaggttttgttcatatcagtgcttcattttgtaatgtcttctcaagaaaaatacctatgttaactcacaagtataaaatatgtgtgtattataaaacaatgaaaagtgtatttttggagatagtcaagcatttagaagtgcagtgaacttgctgtcacggagtaaaatgctaattatgtttcactttcctagcctagtgaaaaagaaaagtgctcttgagtacaataccttaattatttcttaaaatactgactttgacctagctcactgtattttttatttaatggattatggattacagtatttttcttctgagttaaattttcataatttatgtgaagacacaaagatgtttaaaacaatgattattcataagaaatcatgatggtctcagtattattttagtgtattggaaggtctttgatcttaatagaatttataaatttcagcttctccagaataatcataaaactgcaaaaagatattataattgagtcatgattgagatacagttttgaggctattataattgtataattatttaatttgcattatctgtaaaatgtagtaaggtctttgaggggatattttttatttacatgaattactgaatttctattttattatttcacctaaaattaaggtaaaatatggcatttcataagttctgctttcagcattttccttaaagttgtaaaaaatcaagctatgtacttattttctatatttgggtgtgttaaattgaggattagaaaaatccacataatcactgataaagcattgaaacagaataacccaagggtagtgtaccgattcagtaacatgttaaaaatattgctatgcatttattcaaaggaaaatggtctgttcttgagaaataaaagatcagttgcaattaggataattaaatagttaaatatgagtcaagtgtatgcaatatacatttatatgaaccaaagcttgctttatcaggaccatgccctacagttcaaaacataaacatagtgaatgtgttaatatcatataataaggtaataaatgccagtcttagtgtgaagcaagtgggtggcccccttggtagtataattggacaggattttcctccagaatatttcctgtcaccctccaagagtcactacagtaattgattgctggcatggaacacattgcccttgtcttgttagtatgaattgggttctccagtgactagaagaactggggtgtgtgaaagtattcgatgccaggagattcaaaaaggaagctctcaaagataagatcattttatggcacaattgagtctataaccagccctttaagcagtagtaaaaatgtcctttgtcatacttactagaaatactatgagttttttttttttttttcatttgagacggagtctcgctctgtcacccaggctggaatgcagtggcacgatcttggctcactgcaacctctgcttcccgggttcaagcagtttcctgcttcagacttccaagtagctgggattacagacatgccaccatgccaggctaatttttttaatatttttagtagagatggggtttcaccattttggccattctagtcttgaactcctgacctcaggtgatctgcccgccttggcctcccaaagtgctgacattacaggcctgagccactgcgcccagccaataccatgagttttaagcctcacatcgtcacttgctgtcactgccagtgcctgttttattcatattgctggacaacagacatatgccaccaattgtatgattaataaagtctttttctggccattttgtccattataaaggaaataaactaattgttaacttgcatagattacttcttagtttcctatgctaccaccactgccaagggagaaaaaaatacatcattttgtaatgtctttagtatttctttataactagtgttaaggttttgttaattttattgtatacatttgtaacatttattaggagccttttaggttccaaaacaaacaaaaggcataaaaaagtctagcttagaaccacttttcacttgctttcatttttaattttattcacttaacagctaacatctttcttgtttcttgttttttccattatatggttatcgattcaactcttgctatattccttaaatttgtatgtatcatcagaagaaagagatgaacaatttagtgtagatattttattctggagaataatattcaattaaattatttctacagcaggccagtaacaactagattatttgtcctttctcagtataattttaaagagcattttgttttattgtcacaatttggtaccactagtcccaggtaaccattgggccaaaggatcagttgagaaacagttaaggatgaattagcataagttatggaacagtgttagaaaacaactcaaaagtatattctttattaatgaggtggtcattattacatttgtgtcaatgaagggcagtgtagttattttaaaatgactaatattttctccccaaatacagaataattcagatgggcaaccaagttttcaagagactgctgtaggtgaagtctgtctagccaaggcagaacacttacaggagtccctaactgtgccacccttggaatgggttagtgtacaggctcagaatattgtggattacagtttttcagagaaaactaccacagatgtagacaaaaatgatctctgaaagcattgccagcagccaggtatgttccttagatttccacttaggtttggcattttggcagataagctaatcttgtataaagcatcacattttactatgcttagtgttcctgggttgtatttatctacattattagagggaatttttattttaaaaaaattgtcattcatgagaagaatgggagttcatgccacatagtattttaccaatttatataaagtgggaaaagtctttaatacttcatgatcacttgaattaaagtttttgtatctctggaaagtagaatagtgctttcatttgaatgaaaagtgtttatagattcagaaagagagatgatatctttgtatcttgatttatatacagaccatttcagaggaagttaaatgtcttacaaatccaatactttctaatgctctaacagtgttggctatttaaaagaacatgtggcaagttctatatgaatattcttggtcatctcgactaattctgaggcaatgatggacagagatgctacttcttatttaactctaggcatgttgacttttcaaagcggtttccttatttctaaacagagatgatgatcaatgagttactaattctttagaggaaaaaatgcataatttgagtgtggagttgattttaatgacagggtaattcaagttgtttgataaatttattactatattgtaagagagatctttgaccatttttcttcctttttcttggacatcactttcttccctccccttctctcttttatgtttttatccttgttaaattttatgtttacgttaccatctttcttatactttcccctgatttttctcttttaattcctctttcattctctgcctcttctctttcagctctttctctaattgtgcctattccttgttcataagaagtggagctgttagtggtagaaccactgctcatggttctaccactacaaagtggaaagtagaaatactttgcactttggccactgttgcgtttttgccaaggtaaagttcccctgccattttgaaatagctgaacaagttaaagtaatatgttccaaaaactggaagtgccataaaaaactaaaaataaaaaaaaattgtgacta

SEQ ID NO: 183840 - DNA, 5157 bp, Artificial Sequence
  derived and/or modified sequence
atgagcggcaccagcagccccgaggccgtgaagaagctgctggagaatatgcagtcagatctgcgggcgctctccttggagtgcaagaaaaaatttccccccgtcaaggaggcggcagagagcggcattataaaggttaaaactattgccgcccggaacaccgagatactggccgccctgaaagagaacagtagtgaggtagtccaaccattcctcatgggatgtggcacaaaggaaccaaaaatcactcaactatgtctggctgctattcagcgcctcatgagtcatgaggttgtgagcgaaactgcagctgggaacataatcaacatgctgtggcagctgatggagaactccctcgaagagctgaaactccttcagactgtattagttctgcttaccacgaataccgtggtgcacgacgaagccctctctaaagcaatcgttctctgctttagactgcacttcacaaaagataatatcacaaacaacacagccgccgctactgtgcggcaggtcgtgacagttgttttcgaaaggatggtggcggaggacgaacgccaccgggatatcattgagcagcccgtgctagtgcagggtaatagcaaccgaaggagcgtgtctactcttaaaccatgtgccaaagatgcctacatgctcttccaagatctgtgccagttagtaaacgcggatgccccctactggctcgtggggatgactgaaatgacgaggacctttggcttagagttactggaatcagtgctgaatgatttcccccaggtcttcttacagcatcaggaattcagttttttgttgaaggaacgcgtctgccccctggtgatcaaattattcagcccaaacatcaagttccgtcagggatcttctacatcctcgtcacctgcaccagtcgagaagccatacttccctatctgtatgagactgctgagggtcgtgagcgtcctgatcaaacagttttacagcctgttggtcaccgaatgcgagatattcttgtctcttcttgtgaaattcctagacgccgacaagccgcagtggttgagggctgtggctgtggaatctatccatcgtttctgcgtccagccacagctgcttagatctttttgccagtcttatgatatgaagcaacatagcaccaaagtttttcgggatattgttaatgccctaggtagcttcatacagtctctgttcctcgttccccctacaggaaacccagccacgtccaatcaagctggcaacaacaatctgggcggttctgtctccgcccccgcaaattcgggcatggtgggcatcggtggcggggtaacactcctgcctgccttcgaatatcgcggcacctggatccctatcctgaccatcacagtgcaggggtcggcaaaggctacttatttggagatgctggacaaggttgaaccacctaccatccccgaagggtatgctatgtctgtcgcctttcactgtcttctggacctggtgaggggcattacaagtatgatcgagggggagctcggggagcttgagacagaatgccagaccacgactgaagagggctccagtcctacccagtccacagagcagcaggatttgcagtctacgtccgaccagatggataaagagatagtgagtagagccgtgtgggaggaaatggtaaatgcctgctggtgcggcctactagccgctctgtccctgctcctggacgcctcaacagacgaggccgctaccgagaatatattaaaagcagagcttacgatggcagcgctgtgcggacgtctgggcctcgtgacctctcgggacgctttcatcaccgccatctgcaaggggtctttgcccccacactatgccctcacagtgcttaacaccactaccgccgctaccctgagtaacaagtcatactccgttcagggtcagtccgtgatgatgatctctcccagctctgagtcccatcagcaggtcgtggccgtggggcagcctctggcagtgcagccacagggcacagtcatgcttacaagcaaaaacattcaatgtatgcgaacattactgaatctggcccactgtcatggcgccgtactcggcacctcctggcaactggttctggccactctccagcatctagtatggatcctgggactaaaaccctccagcggcggggccctgaaaccgggtcgggccgtggaggggcccagtactgtgttgactacagcggtgatgaccgatctgcctgtcatatcgaacatcctttcaaggttgttcgagagcagccagtatctggatgatgtctccctgcatcacttgattaatgctctctgttcattaagccttgaggcgatggacatggcctacggtaacaataaagaaccttcgctgtttgcagtggccaagctcctggagactggactggtgaacatgcaccgcatagagatcctctggagaccccttactggacacctgctggagaaggtttgccagcatcccaatagtcggatgcgtgaatggggggctgaggctctgaccagcttgattaaggccggcctgacgtttaatcatgaccctcccctcagccaaaaccagcggttgcagctgcttctattgaacccactgaaggaaatgagtaacatcaatcatcccgatattcgcctgaagcagcttgaatgtgtgttgcagattttgcagtctcagggtgattcactgggccctggctggccactggtccttggggtgatgggcgcaatccgtaatgaccaaggagagtcgctgataagaacagcatttcagtgtcttcagctggtggtcaccgattttctccctactatgccttgcacctgtctgcaaatcgttgtggacgtggctggctcgtttgggctccataaccaggagttaaatatcagccttaccagtatcggtttgctctggaatatttccgactacttcttccagagaggagagaccattgaaaaggagctgaacaaagaagaggctgcacagcagaaacaggctgaggagaaaggagtcgtattgaatcgccctttccaccccgccccccccttcgactgcctgtggctgtgcctttacgctaagcttggcgagctttgtgtcgacccccgcccggctgttaggaagtcagccggtcagaccctcttttcaacaattggggctcacggcaccttattgcagcactctacttggcacactgtcatttggaaggtcctttttcatctgctggaccgcgtcagagaatcgtcgacaaccgccgataaggagaagatcgagagcgggggtggcaacattcttatccatcatagcagagacactgcagaaaaacagtgggctgagacttgggtgcttacactggcgggcgtggcccggatcttcaacacaaggaggtacctgcttcagccactgggggatttcagccgtgcctgggacgtgttgctggatcacatccagagcgcagccctgtccaaaaataatgaagtctcacttgcggcgctgaaaagtttccaagaaatcctccagattgtctccccggtgcgggacagtgataagccagagacaccaccggttgtgaacgttccggttcccgtcttaatcggaccaatcagcgggatgagccgaccctttgtgcgcacggacagtataggcgaaaagctcggccggtattcctcaagcgaacccccaattgtgaccgacgagctagaggatctcaacctgtggtgggccgcctggaacacgtggtacaggatcgggagtgaaagtaccaaacccccgattacattcgataagctgaccttcattcccagtcaaccctttctcacagcactgatacagatcttccccgcactgtaccagcacattaaaacagggtttaacatggacgatttacagaagctgggagtgatcctacactctgctatcagtgtgccaatctcctctgatgccagcccctttatattgccaagctacactgaggccgtgctgacgtcactgcaagaagcagtcttaaccgcgctggatgtcttacaaaaggctatttgtgtggggcctgaaaatatgcaaatcatgtatcccgccattttcgatcaactgctcgcctttgtggaattcagctgcaagccacctcaatacggccagctggagacgaagcatatcgccaatgctaagtacaaccagattcagcttttcgccccggctgagtgggtggccctcaactatgtaccctttgctgagcgcagcctggaagtggtagtcgacctgtaccaaaagacagcgtgtcataaagctgtggtaaacgaaaaagtgcttcagaacatcatcaaaactctcagagtgcctctcagcctgaagtacagctgtcctagtgagtccacttggaaattggctgtctctagcctcctccgagtgctgagtataggcctgcccgttgctcggcagcatgccagctccggtaaattcgattctatgtggcctgagctggccaataccttcgaagactttttattcaccaaatctattcctcccgacaacctgtccattcaggaattccagaggaatgagaatatcgacgtggaagttgttcagctcatctctaacgaaatcctgccctatgcaaactttatcccaaaagagttcgtgggtcaaataatgaccatgcttaataagggctccattcactcacagtcttctagttttactgaggctgagattgatatccgattacgcgaggagttctccaagatgtgtttcgaaacactcttgcagtttagcttttccaacaaggtgaccaccccccaggaaggctatatctctcggatggccctctcggtcctgcttaaacgcagccaggatgtcctacatagatatattgaagacgaacgtctcagtggtaagtgtcctctgccaaggcaacaggttactgaaattatcttcgtgttaaaggcagtgtcgaccttgatagactcccttaagaagacccaaccagagaacgtggacggtaatacgtgggcacaggtgatcgcgctgtatcccacactcgtggaatgtataacttgctcctccagtgaggtctgtagcgccctgaaggaagctctcgtgccatttaaggactttatgcagccccctgccagtcgggttcagaacggcgagtcctag

SEQ ID NO: 183841 - DNA, 5156 bp, Artificial Sequence
  derived and/or modified sequence
atgtcagggacttcctcccccgaggccgtgaagaagctcttggagaacatgcagtctgacctgagggccctgagcctagagtgtaagaaaaagtttcccccagttaaagaagccgctgaatcgggaatcatcaaagtgaaaactattgccgctagaaacacggaaatcctggctgcccttaaggagaatagcagcgaagtcgtgcaaccatttctcatgggttgtgggaccaaagaacctaagatcacccagctttgtctggcagccatacagagactgatgagccacgaagtggtaagcgagaccgctgccggaaacatcattaatatgctgtggcagctgatggaaaacagcctggaagaactgaaattactccagactgtgctcgttctcctgaccacaaacacagtggttcacgacgaggccttgtctaaagccattgtgctgtgctttcgcctgcactttaccaaagacaacattacaaacaacactgccgctgccaccgtccgccaggtcgtcacagtggtcttcgagcgaatggtcgctgaggatgagaggcatagggacatcatcgagcaaccagtactcgtgcaagggaactccaacaggaggtccgtgagcacccttaagccctgtgcaaaggatgcatacatgctgttccaggacctgtgccagctagtcaatgccgatgccccttactggctagtgggcatgaccgaaatgactcgcactttcggactggaactcctagaatccgtgctcaatgactttccccaggtgttcctacagcaccaggaattcagctttctcctcaaagaacgcgtgtgtccattggtgatcaaacttttttcccctaacatcaagttccggcagggcagctctactagttcatctccagcaccagtggagaagccatacttcccaatttgtatgagactgctgagggtcgtgtcagtcctcattaaacagttttactctctgctggtgaccgaatgtgaaattttcctaagtctcctggtgaagtttctggacgctgacaaaccacagtggctgcgcgctgtggccgtagagtccatacacagattttgcgtgcagccacaactcttacgcagcttttgtcagtcttacgatatgaaacagcactccacgaaagtctttcgagatatcgtgaatgcactgggatcctttatccagtccctttttttagtgccacctactggtaacccggctactagtaaccaggccggtaataataacctcggtggcagtgtgagtgcaccagccaatagcggcatggttggtatcgggggaggagtaaccttactgccagccttcgaataccgcggtacatggataccgatcctcacaatcaccgtgcagggttccgcaaaagccacttacctagaaatgctggacaaagtagaaccacctaccataccagagggatatgctatgagtgtggcgtttcactgcttattagacctggtgagagggatcacatctatgatcgaaggagagctgggggagcttgagaccgaatgtcagacaactacggaagaaggaagttcccctacccagtctacagagcagcaggatctgcaatccaccagcgaccagatggataaggagatcgtctcccgcgcagtgtgggaggagatggtgaatgcttgttggtgtggcctgttggccgctctgagtctgcttctagatgcctcaacggatgaggcagccacggaaaatatcctgaaggccgagctcaccatggccgcattgtgcggtagactcgggctcgttacttcgagggatgcattcatcacagcaatctgtaaggggtccctgccaccccactacgcgctaacggtgttgaatactaccacggccgcaactctctcaaataagtcctactccgtccaggggcagagcgtcatgatgatcagcccatcatccgaatctcaccagcaggttgtggctgtgggccaacctctcgcagtgcaaccccaggggaccgtaatgttgaccagcaagaacattcaatgtatgcgcacgctcctcaatctggctcactgtcatggagctgtgcttggcacctcgtggcaattggtgcttgccactctccaacatctggtttggatactaggcctgaaaccctctagtggcggtgccctgaagccaggccgagcggtggaagggccaagcactgtgctgaccacagccgttatgactgacctgcctgttatcagtaatatactgagccgactctttgagagcagccaatacctggatgacgtcagcctacatcatctgattaatgctttatgttctctgagcttggaggcaatggacatggcctatgggaacaacaaggaaccctctctgtttgccgtagcaaaacttctggaaaccgggttagtcaatatgcaccgcattgaaatcctgtggagaccactgacagggcacctgttggagaaggtgtgccagcacccaaattctcgtatgcgcgagtggggcgctgaagcactcacaagtctcattaaagctggactgacctttaatcacgaccctcccctctcccagaatcagagattgcaactgcttctcctaaaccccctaaaggaaatgtctaacataaatcacccagacatacgactgaagcagctcgagtgtgttttgcagatcctccagtcacagggcgactctctgggccctggctggcccctggtgctaggggttatgggagcgattcgaaacgatcagggcgagagcttgattcggactgctttccaatgtctgcagctcgttgtgactgacttcctccccactatgccttgtacctgtctgcaaattgttgttgacgtggccggttcatttgggctacataatcaggaactgaacatctcccttacatccataggattactgtggaacataagcgactacttttttcagcggggtgaaactattgaaaaggaattgaataaggaggaggcagctcagcagaagcaagccgaggaaaagggagtcgtattgaacaggccattccatcctgctcctccctttgattgcctgtggttatgtctttacgccaaactgggggagctttgcgtcgatccccgaccagctgtgcgaaaatccgcaggacaaaccctttttagcactatcggcgcacacggcacactgctccagcacagtacctggcacacagtcatctggaaggtacttttccacctgctcgatcgcgtgcgggagtcttctaccactgcagataaggaaaaaatcgagagcggtgggggaaacattctgatacaccatagcagggataccgccgaaaagcagtgggccgagacatgggtactgactctggctggggtggctcgcatcttcaacacgcgccgttatttattacaaccattgggggacttcagtcgggcatgggacgtgctgttggaccatattcagtccgctgccctctccaaaaacaacgaggtgtccctcgccgctctcaagagtttccaggagattctacagatcgtgtcacctgtgagagatagtgataagcccgaaacgccgccagtggtgaatgtgccagtgcccgtgctgataggaccgattagtgggatgtctagaccctttgtcagaaccgactctatcggggaaaaactcgggaggtatagctcttccgaaccacccatcgttactgacgagttagaagatctgaatttatggtgggcagcctggaatacctggtacagaatagggagcgaaagcaccaagccccctataacgtttgataagctgacgtttatacctagtcaaccattcttaacagccctaatccagatatttccagcgctttatcagcatatcaagactggatttaatatggacgatctgcagaaactgggggtaattttgcattctgctatttcagtgccgataagcagcgacgcaagccctttcattctgccatcctacaccgaagctgtactgaccagcctgcaagaagctgtgctcactgctctggatgtgctacaaaaagcgatatgcgtgggtcctgaaaatatgcagatcatgtatccagcaatctttgaccaacttctggctttcgtggagttcagttgtaagccccctcaatacggccagctggaaaccaagcatattgccaacgctaagtacaaccaaattcagcttttcgcaccagctgaatgggtcgctctgaactacgtgcccttcgccgaacgctcactggaagttgtggtggacctctaccaaaaaactgcttgtcacaaagcagttgtaaatgaaaaggttctgcagaatattatcaaaactttgagggtcccgctgagcctgaagtactcatgtccgagtgagagcacttggaaactggccgtctccagtctgctgcgcgtcctatccatcgggttgcccgtcgcaagacagcacgcgagctccggtaaatttgatagcatgtggcctgagctggccaacacatttgaggattttttgttcaccaaatcgatacctcccgataacctgagcatccaagagtttcagcgtaacgagaacattgatgtcgaggtcgttcagctgataagcaatgagatcctcccttatgcaaatttcattccgaaagagttcgtgggtcagatcatgaccatgctaaataaagggagtatccattcccagtccagctcctttacagaggcagagatcgatataagacttagagaggagttcagcaaaatgtgcttcgaaacactcctgcaattcagcttcagcaacaaagtcactactccgcaagaggggtacatctcccggatggcactctccgtgcttttgaagcgttcacaagacgtgctccaccgttacatcgaggatgagcggctgtccggtaagtgtcccctgcccaggcaacaggtcacagaaattatttttgttctgaaagccgtgtccacattaattgactcactaaagaagacccaacccgaaaatgtggacgggaatacatgggcccaggtgatcgcactgtaccccaccctggtggagtgtatcacttgttcctcctcagaagtctgctccgcgctgaaggaggcacttgtccccttcaaggactttatgcaacctcctgcctcaagagttcagaacggagagtctta

SEQ ID NO: 183842 - DNA, 5154 bp, Artificial Sequence
  derived and/or modified sequence
atgagcggcaccagcagccccgaggccgtgaagaagctgctggagaacatgcagagcgacctgagagccctgagcctggagtgcaagaagaagttcccccccgtgaaggaggccgccgagagcggcatcatcaaggtgaagaccatcgccgccagaaacaccgagatcctggccgccctgaaggagaacagcagcgaggtggtgcagcccttcctgatgggctgcggcaccaaggagcccaagatcacccagctgtgcctggccgccatccagagactgatgagccacgaggtggtgagcgagaccgccgccggcaacatcatcaacatgctgtggcagctgatggagaacagcctggaggagctgaagctgctgcagaccgtgctggtgctgctgaccaccaacaccgtggtgcacgacgaggccctgagcaaggccatcgtgctgtgcttcagactgcacttcaccaaggacaacatcaccaacaacaccgccgccgccaccgtgagacaggtggtgaccgtggtgttcgagagaatggtggccgaggacgagagacacagagacatcatcgagcagcccgtgctggtgcagggcaacagcaacagaagaagcgtgagcaccctgaagccctgcgccaaggacgcctacatgctgttccaggacctgtgccagctggtgaacgccgacgccccctactggctggtgggcatgaccgagatgaccagaaccttcggcctggagctgctggagagcgtgctgaacgacttcccccaggtgttcctgcagcaccaggagttcagcttcctgctgaaggagagagtgtgccccctggtgatcaagctgttcagccccaacatcaagttcagacagggcagcagcaccagcagcagccccgcccccgtggagaagccctacttccccatctgcatgagactgctgagagtggtgagcgtgctgatcaagcagttctacagcctgctggtgaccgagtgcgagatcttcctgagcctgctggtgaagttcctggacgccgacaagccccagtggctgagagccgtggccgtggagagcatccacagattctgcgtgcagccccagctgctgagaagcttctgccagagctacgacatgaagcagcacagcaccaaggtgttcagagacatcgtgaacgccctgggcagcttcatccagagcctgttcctggtgccccccaccggcaaccccgccaccagcaaccaggccggcaacaacaacctgggcggcagcgtgagcgcccccgccaacagcggcatggtgggcatcggcggcggcgtgaccctgctgcccgccttcgagtacagaggcacctggatccccatcctgaccatcaccgtgcagggcagcgccaaggccacctacctggagatgctggacaaggtggagccccccaccatccccgagggctacgccatgagcgtggccttccactgcctgctggacctggtgagaggcatcaccagcatgatcgagggcgagctgggcgagctggagaccgagtgccagaccaccaccgaggagggcagcagccccacccagagcaccgagcagcaggacctgcagagcaccagcgaccagatggacaaggagatcgtgagcagagccgtgtgggaggagatggtgaacgcctgctggtgcggcctgctggccgccctgagcctgctgctggacgccagcaccgacgaggccgccaccgagaacatcctgaaggccgagctgaccatggccgccctgtgcggcagactgggcctggtgaccagcagagacgccttcatcaccgccatctgcaagggcagcctgcccccccactacgccctgaccgtgctgaacaccaccaccgccgccaccctgagcaacaagagctacagcgtgcagggccagagcgtgatgatgatcagccccagcagcgagagccaccagcaggtggtggccgtgggccagcccctggccgtgcagccccagggcaccgtgatgctgaccagcaagaacatccagtgcatgagaaccctgctgaacctggcccactgccacggcgccgtgctgggcaccagctggcagctggtgctggccaccctgcagcacctggtgtggatcctgggcctgaagcccagcagcggcggcgccctgaagcccggcagagccgtggagggccccagcaccgtgctgaccaccgccgtgatgaccgacctgcccgtgatcagcaacatcctgagcagactgttcgagagcagccagtacctggacgacgtgagcctgcaccacctgatcaacgccctgtgcagcctgagcctggaggccatggacatggcctacggcaacaacaaggagcccagcctgttcgccgtggccaagctgctggagaccggcctggtgaacatgcacagaatcgagatcctgtggagacccctgaccggccacctgctggaggtgtgccagcaccccaacagcagaatgagagagtggggcgccgaggccctgaccagcctgatcaaggccggcctgaccttcaaccacgacccccccctgagccagaaccagagactgcagctgctgctgctgaaccccctgaaggagatgagcaacatcaaccaccccgacatcagactgaagcagctggagtgcgtgctgcagatcctgcagagccagggcgacagcctgggccccggctggcccctggtgctgggcgtgatgggcgccatcagaaacgaccagggcgagagcctgatcagaaccgccttccagtgcctgcagctggtggtgaccgacttcctgcccaccatgccctgcacctgcctgcagatcgtggtggacgtggccggcagcttcggcctgcacaaccaggagctgaacatcagcctgaccagcatcggcctgctgtggaacatcagcgactacttcttccagagaggcgagaccatcgagaaggagctgaacaaggaggaggccgcccagcagaagcaggccgaggagaagggcgtggtgctgaacagacccttccaccccgccccccccttcgactgcctgtggctgtgcctgtacgccaagctgggcgagctgtgcgtggaccccagacccgccgtgagaaagagcgccggccagaccctgttcagcaccatcggcgcccacggcaccctgctgcagcacagcacctggcacaccgtgatctggaaggtgctgttccacctgctggacagagtgagagagagcagcaccaccgccgacaaggagaagatcgagagcggcggcggcaacatcctgatccaccacagcagagacaccgccgagaagcagtgggccgagacctgggtgctgaccctggccggcgtggccagaatcttcaacaccagaagatacctgctgcagcccctgggcgacttcagcagagcctgggacgtgctgctggaccacatccagagcgccgccctgagcaagaacaacgaggtgagcctggccgccctgaagagcttccaggagatcctgcagatcgtgagccccgtgagagacagcgacaagcccgagaccccccccgtggtgaacgtgcccgtgcccgtgctgatcggccccatcagcggcatgagcagacccttcgtgagaaccgacagcatcggcgagaagctgggcagatacagcagcagcgagccccccatcgtgaccgacgagctggaggacctgaacctgtggtgggccgcctggaacacctggtacagaatcggcagcgagagcaccaagccccccatcaccttcgacaagctgaccttcatccccagccagcccttcctgaccgccctgatccagatcttccccgccctgtaccagcacatcaagaccggcttcaacatggacgacctgcagaagctgggcgtgatcctgcacagcgccatcagcgtgcccatcagcagcgacgccagccccttcatcctgcccagctacaccgaggccgtgctgaccagcctgcaggaggccgtgctgaccgccctggacgtgctgcagaaggccatctgcgtgggccccgagaacatgcagatcatgtaccccgccatcttcgaccagctgctggccttcgtggagttcagctgcaagcccccccagtacggccagctggagaccaagcacatcgccaacgccaagtacaaccagatccagctgttcgcccccgccgagtgggtggccctgaactacgtgcccttcgccgagagaagcctggaggtggtggtggacctgtaccagaagaccgcctgccacaaggccgtggtgaacgagaaggtgctgcagaacatcatcaagaccctgagagtgcccctgagcctgaagtacagctgccccagcgagagcacctggaagctggccgtgagcagcctgctgagagtgctgagcatcggcctgcccgtggccagacagcacgccagcagcggcaagttcgacagcatgtggcccgagctggccaacaccttcgaggacttcctgttcaccaagagcatcccccccgacaacctgagcatccaggagttccagagaaacgagaacatcgacgtggaggtggtgcagctgatcagcaacgagatcctgccctacgccaacttcatccccaaggagttcgtgggccagatcatgaccatgctgaacaagggcagcatccacagccagagcagcagcttcaccgaggccgagatcgacatcagactgagagaggagttcagcaagatgtgcttcgagaccctgctgcagttcagcttcagcaacaaggtgaccaccccccaggagggctacatcagcagaatggccctgagcgtgctgctgaagagaagccaggacgtgctgcacagatacatcgaggacgagagactgagcggcaagtgccccctgcccagacagcaggtgaccgagatcatcttcgtgctgaaggccgtgagcaccctgatcgacagcctgaagaagacccagcccgagaacgtggacggcaacacctgggcccaggtgatcgccctgtaccccaccctggtggagtgcatcacctgcagcagcagcgaggtgtgcagcgccctgaaggaggccctggtgcccttcaaggacttcatgcagccccccgccagcagagtgcagaacggcgagagctag

SEQ ID NO: 183843 - DNA, 5154 bp, Artificial Sequence
  derived and/or modified sequence
atgtccgggaccagcagtcctgaagccgtcaaaaagctcctggaaaacatgcagtctgatcttagagccctgagcctcgagtgcaagaagaagttcccaccagttaaagaagctgccgaaagcggaatcatcaaggtgaaaacaatagctgcccgaaataccgagatactggctgcgcttaaggagaactcctccgaggtggtacaaccctttctgatgggctgcgggacaaaggagcccaagatcacccagttatgcctcgcagccatccagcggctgatgagtcacgaagtcgttagtgaaacagcagccgggaacatcatcaatatgttgtggcaactgatggaaaatagtcttgaggagttaaagctcctccagacagtgctggttctattgaccacaaacacggtggtgcatgacgaggccctcagcaaggccatcgtcctgtgtttcagactccactttacaaaagataacattacaaacaacacagcagccgccactgtgcgacaggttgtaacagttgtgtttgagcgaatggttgcggaagacgagaggcacagggacattattgagcaacctgtcctcgtgcagggcaattcaaacagacgcagcgtgtctactcttaagccctgcgccaaagatgcctacatgctgttccaggatctctgtcagctcgtgaatgcagacgcaccgtactggttggtcggaatgacagaaatgaccaggacgtttgggcttgagcttttggaatcggtactcaacgacttccctcaagttttcctgcagcaccaagaatttagttttctgctgaaagaaagagtgtgccccctggtgatcaagctgttcagtcctaatattaagtttagacaagggagtagtacttcttcctctccagcgcctgtcgaaaagccatacttccctatctgcatgcgtctgcttagggtagtcagcgtcctgataaagcagttctatagtctgctggtaacggagtgcgagatcttcctttccctgcttgtgaagttcctcgacgccgacaagcctcagtggctgagggccgtagccgttgagtcgatccacagattttgcgtgcagccccagctgctacggagcttttgccagagttacgacatgaagcagcactcaaccaaggtctttagagacatagtgaatgccttaggttcttttattcagagcctctttctcgtaccgcccacaggaaaccccgcaaccagtaatcaggcgggtaacaacaatttgggtgggtcagtgagcgcccccgccaacagcggaatggtaggaatcggagggggggtaactctgctcccagcttttgaatatcgaggcacctggatccccatacttacaatcaccgtgcagggttccgccaaagccacctacctggagatgctcgacaaagtcgaaccccctaccataccagagggctatgctatgagtgtggcttttcactgtctactcgacctggtgaggggtattacctcaatgatcgaaggggagctgggcgagctggaaaccgagtgccaaaccacaaccgaggagggctccagtcccacacagagtaccgaacagcaagacctacaaagcacgtcagatcagatggacaaggagattgtcagcagagctgtctgggaagaaatggttaacgcatgctggtgtggactcctcgctgcactgagcctactactcgacgcgtctacggatgaagccgcgacagagaatattctcaaggccgagttaacaatggcagcactgtgtggtaggttggggttagtgaccagcagagacgcattcattaccgctatctgcaaaggatcccttcccccgcattacgccctgacagtcctcaatacaactaccgctgccacattaagtaataaaagttatagtgtccagggccagagtgtgatgatgatctccccttcaagcgagagtcatcaacaggtggtagcagtgggacagccattggctgttcagccccaaggaaccgtgatgctgaccagcaaaaatatacaatgtatgcgcaccctgctgaatctcgctcactgccacggggctgtactgggaacaagctggcagttagtcctggccaccctgcaacatcttgtctggatccttggacttaagccatccagtggcggcgcccttaagccgggaagagccgttgagggtccctccaccgttttgaccaccgccgtcatgaccgatttgccagttatcagcaatatacttagtcgcctcttcgagtcatctcagtatctggatgatgtatcactccatcatctcatcaatgcactttgttctctttccctggaggctatggatatggcgtatggcaacaataaagaaccatccttgtttgctgttgccaaacttctggaaaccggcctggtgaatatgcaccggatagaaattctgtggagacccctgacggggcatcttctggaggtttgccaacatcccaattccagaatgagggagtggggggccgaggctctcaccagcctaatcaaggccggcctgactttcaaccacgaccccccactgagccagaaccagaggttacaactgctactgctgaaccctctgaaagagatgtctaatatcaaccaccccgatattaggctcaaacagttggaatgcgtcctgcaaattctccaatcccagggagattcgttagggccagggtggccgctggtgctgggggtgatgggtgccattcggaatgaccaaggagagtcgctgatacggaccgcttttcagtgccttcagctggtagttaccgactttttgccaactatgccctgcacatgcctgcagattgtggtcgacgtagcgggatccttcggactgcacaaccaggaactaaacatttccctgacatccatcgggttactatggaacattagcgattactttttccagcgaggtgaaaccatcgagaaagagctaaataaagaggaagccgcacagcaaaagcaggctgaagaaaagggggttgtgctgaatcgacctttccaccccgccccccctttcgattgtctctggttgtgtctttacgccaaactgggggagttatgtgtcgaccccagaccagccgttcggaaatctgcgggccagactttgtttagcactataggagctcatggcactcttctgcagcactctacttggcacacagtgatttggaaggtactgtttcatttgctggatagggttcgagaatctagcacaacggcagacaaggaaaagatcgaaagtggcggcggtaatattctgatacaccactccagagacactgccgaaaaacaatgggccgaaacgtgggtgctgacattggctggcgtggccaggatttttaacacacgtcgatatctccttcagccccttggagatttctcacgcgcatgggatgtgctcctggatcatatacagtctgctgcgttgtcaaagaacaacgaagtaagcctcgcagcccttaaaagcttccaagagatcctccagatcgtctcacccgtccgtgattccgacaagcccgaaacgccacccgttgtaaacgttcctgtccctgtgcttattggcccaatatcaggcatgtctaggccttttgtacggaccgatagcattggagagaagttggggaggtatagtagttcagagccgcctattgtcaccgacgaactcgaagatttgaatctatggtgggccgcgtggaacacttggtaccgcatagggtctgagagcactaagccccctattacattcgataagctaaccttcatccctagtcagccttttctgaccgcacttatccaaatcttccccgccttataccagcacatcaagaccgggttcaatatggacgacctccagaaacttggtgtcatcctgcactcagctatatctgtacctatatcctccgatgctagccctttcatccttccttcttacactgaagcagtgttgaccagtcttcaagaggccgtcttgacggcccttgatgtgctgcaaaaggcaatttgtgtcggcccggaaaacatgcagatcatgtatcccgcaatttttgatcaactgttggcctttgtcgaattttcatgcaaaccgccccagtacggccagttagagacgaaacacattgccaacgctaaatataatcagatccagctgttcgccccagccgaatgggtggctctgaactatgttccatttgcagaacggagtttggaagtggtcgtcgatctctaccagaaaacggcctgccacaaggccgtcgttaacgaaaaggtcctgcagaatatcataaaaacactcagggtgccgctttcactcaaatactcatgcccaagtgagtcaacttggaaactcgcggtaagctcactgctgcgtgtcttgagtattggactgcccgttgctaggcaacacgcaagttctgggaagtttgattctatgtggcccgaattagctaacacattcgaggacttcctcttcactaaaagcatccctcccgataatctgtccatccaagaatttcagaggaacgaaaacattgatgttgaagtggtgcaactgatctctaatgagattcttccctacgcaaatttcatcccgaaagaattcgtcggccagattatgacaatgctgaacaaaggatctatccatagtcagtcctcatcatttactgaagccgagattgatatccggctgcgcgaggagttctccaaaatgtgtttcgaaacactcctccagttctcttttagcaataaggtgaccacaccccaggaggggtatatctctcgtatggcattaagcgttctgcttaaaagatcccaggacgtgcttcatagatacatcgaggacgagaggctgagcggcaagtgtccactccctcgtcagcaagtgactgaaatcatcttcgtgctcaaggcggttagcactctcatcgacagcctcaagaaaacacagcccgaaaacgttgatggaaacacttgggctcaggtgatagctttatatccgacacttgtcgagtgcatcacctgttcctctagtgaagtgtgctccgctctgaaggaggccttagtgccttttaaggatttcatgcagcccccggcctcgcgagttcagaacggcgagtcctag

SEQ ID NO: 183844 - DNA, 5154 bp, Artificial Sequence
  derived and/or modified sequence
atgagcggcaccagcagccctgaggccgtgaagaagctgctggagaacatgcagagcgacctgcgggccctgagcctggagtgcaagaagaagtttcctcctgtgaaggaggccgctgagagcggcatcatcaaggtgaagaccatcgccgccaggaacacagagatcctggccgccctgaaggagaacagcagcgaggtggtgcagcccttcctgatgggctgcggcaccaaggagcccaagatcacccagctgtgcctggccgccatccagaggctgatgagccatgaggtggtgtctgaaacagctgctggcaacatcatcaacatgctgtggcagctgatggagaacagcctggaggagctgaagctgctgcagacagtgctggtgctgctgaccaccaacacagtggtgcatgatgaggccctgagcaaggccatcgtgctgtgcttccggctgcacttcaccaaggacaacatcaccaacaacacagctgctgccaccgtgcggcaggtggtgacagtggtgtttgagaggatggtggctgaagatgagcggcaccgggacatcatcgagcagcctgtgctggtgcagggcaacagcaacagaagatctgtgtccaccctgaagccctgtgccaaggatgcctacatgctgttccaggacctgtgccagctggtgaatgctgatgccccctactggctggtgggcatgacagagatgaccaggaccttcggcctggagctgctggagagcgtgctgaatgacttcccccaggtgttcctgcagcaccaggagttctccttcctgctgaaggagcgggtgtgccccctggtgatcaagctgttcagccccaacatcaagttccggcagggcagcagcaccagcagcagccctgcccctgtggagaagccctacttccccatctgcatgaggctgctgcgggtggtgtctgtgctgatcaagcagttctacagcctgctggtgacagaatgtgagatcttcctgagcctgctggtgaagttcctggatgctgacaagccccagtggctgcgggctgtggccgtggagagcatccaccgcttctgtgtgcagccccagctgctgcgctccttctgccagagctatgacatgaagcagcacagcaccaaggtgttccgggacatcgtgaatgccctgggcagcttcatccagagcctcttcctggtgccccccaccggcaacccagccaccagcaaccaggccggcaacaacaacctgggcggctctgtgtctgccccagccaacagcggcatggtgggcattggaggcggcgtgaccctgctgcctgcctttgagtaccggggcacctggatccccatcctgaccatcaccgtgcagggcagcgccaaggccacctacctggagatgctggacaaggtggagccccccaccatccctgagggctacgccatgtctgtggccttccactgcctgctggacctggtgcggggcatcacctccatgattgaaggagagctgggggagctggagacagagtgccagaccaccacagaggagggcagcagccccacccagagcacagagcagcaggacctgcagagcaccagtgaccagatggacaaggagatcgtgtccagagctgtgtgggaggagatggtgaatgcctgctggtgtggcctgctggccgccctgagcctgctgctggatgccagcacagatgaggccgccacagagaacatcctgaaggccgagctgaccatggccgccctgtgtggccgcctgggcctggtgaccagcagagatgccttcatcacagccatctgcaagggcagcctgcccccccactacgccctgactgtgctgaacaccaccacagctgccaccctgagcaacaagagctacagcgtgcagggccagagcgtgatgatgatcagccccagcagcgagagccaccagcaggtggtggccgtgggccagcccctggccgtgcagccccagggcaccgtgatgctgaccagcaagaacatccagtgcatgaggaccctgctgaacctggcccactgccacggggctgtgctgggcacctcctggcagctggtgctggccaccctgcagcacctggtgtggatcctgggcctgaagcccagcagcggcggggccctgaagccaggccgggctgtggagggccccagcacagtgctgaccacagctgtgatgacagacctgcccgtcatcagcaacatcctgagccggctgtttgagagcagccagtacctggatgatgtgtccctgcaccacctgatcaatgccctgtgcagcctgagcctggaggccatggacatggcctacggcaacaacaaggagcccagcctgtttgctgtggccaagctgctggagaccggcctggtgaacatgcacagaattgagatcctgtggaggcccctgaccggccacctgctggaggtgtgccagcaccccaacagcaggatgagggagtggggcgctgaggccctgaccagcctcatcaaggccggcctgaccttcaaccacgacccccccctgagccagaaccagaggctgcagctgctgctgctgaaccccctgaaggagatgagcaacatcaaccacccagacatccggctgaagcagctggagtgtgtgctgcagatcctgcagagccagggcgacagcctgggccctggctggcccctggtgctgggcgtgatgggcgccatcagaaatgaccagggcgagagcctcatcagaacagccttccagtgcctgcagctggtggtgacagacttcctgcccaccatgccctgcacctgcctgcagatcgtggtggatgtggccggcagctttggcctgcacaaccaggagctgaacatcagcctgaccagcatcggcctgctgtggaacatcagtgactacttcttccagagaggagagaccatcgagaaggagctgaacaaggaggaggccgcccagcagaagcaggccgaggagaagggcgtggtgctgaaccggcccttccacccagcccccccatttgactgcctgtggctgtgcctgtatgccaagctgggggagctgtgtgtggaccccaggcctgctgtgaggaagtctgctggccagaccctcttcagcaccatcggggcccacggcaccctgctgcagcacagcacctggcacacagtcatctggaaggtgctcttccacctgctggacagagtgcgggagagcagcaccacagctgacaaggagaagattgaaagtggcggcggcaacatcctgatccaccacagccgggacacagctgagaagcagtgggccgagacctgggtgctgaccctggccggcgtggcccgcatcttcaacacccggcgctacctgctgcagcccctgggggacttcagccgggcctgggatgtgctgctggaccacatccagagcgctgccctgagcaagaacaatgaggtgtccctggccgccctgaagagcttccaggagatcctgcagatcgtgtcccctgtgcgggacagcgacaagccagagaccccacctgtggtgaatgtgcctgtgcctgtgctgattggccccatcagcggcatgagccggccctttgtgaggacagacagcattggagagaagctgggccgctacagcagcagcgagccccccatcgtgacagatgagctggaggacctgaacctgtggtgggccgcctggaacacctggtaccgcatcggcagcgagagcaccaagccacccatcacctttgacaagctgaccttcatccccagccagcccttcctgacagccctgatccagatcttccctgccctgtaccagcacatcaagacaggcttcaacatggatgacctgcagaagctgggcgtcatcctgcacagcgccatctctgtgcccatcagcagtgatgccagccccttcatcctgcccagctacacagaggccgtgctgaccagcctgcaggaggccgtgctgacagccctggatgtgctgcagaaggccatctgtgtgggccctgagaacatgcagatcatgtacccagccatctttgaccagctgctggcctttgtggagttcagctgcaagccaccccagtatggccagctggagaccaagcacatcgccaatgccaagtacaaccagatccagctgtttgccccagctgagtgggtggccctgaactacgtgccctttgctgagaggagcctggaggtggtggtggacctgtaccagaagacagcctgccacaaggctgtggtgaatgagaaggtgctgcagaacatcatcaagaccctgcgggtgcccctgagcctgaagtacagctgccccagcgagagcacctggaagctggccgtgagcagcctgctgcgggtgctgagcatcggcctgcctgtggcccggcagcacgccagcagcggcaagtttgacagcatgtggccagagctggccaacacctttgaggacttcctgttcaccaagagcatccccccagacaacctgagcatccaggagttccagagaaatgaaaatattgatgtggaggtggtgcagctgatcagcaatgagatcctgccctatgccaacttcatccccaaggagtttgtgggccagatcatgaccatgctgaacaagggcagcatccacagccagagcagcagcttcacagaggccgagattgacatccggctgcgggaggagttcagcaagatgtgctttgagaccctgctgcagttctccttcagcaacaaggtgaccaccccccaggagggctacatcagcaggatggccctgtctgtgctgctgaagaggagccaggatgtgctgcaccgctacattgaagatgagcggctgtctggaaaatgtcccctgccccggcagcaggtgacagagatcatctttgtgctgaaggctgtgtccaccctgattgacagcctgaagaagacccagccagaaaatgtggatggcaacacctgggcccaggtgattgccctgtaccccaccctggtggagtgcatcacctgcagcagcagcgaggtgtgcagcgccctgaaggaggccctggtgcccttcaaggacttcatgcagcccccagccagccgggtgcagaatggagagagctag

SEQ ID NO: 183845 - DNA, 5154 bp, Artificial Sequence
  derived and/or modified sequence
atgagcggcaccagcagccccgaggccgtgaagaagctgctggagaatatgcaatccgacctcagagctttaagcctagagtgcaagaagaagtttcctcccgttaaagaggccgccgaaagcggcattattaaggtcaagacgatcgccgctcggaatacagaaattctagcggctctgaaagagaactcatctgaagtagtccaacctttccttatgggctgtggcaccaaggagccaaagatcactcaactttgtcttgcagctatacagcggttgatgtcccacgaggtcgttagcgaaaccgcagccggcaatattatcaacatgttatggcaactgatggagaattctttggaagaattaaaactgctgcagacggtactggtgcttctaaccaccaacactgtagtgcatgatgaggcactgtctaaagccatcgttttatgtttcagactccatttcacaaaagacaatattacgaataacacagccgcagccacagtccggcaggttgtgaccgtggtgtttgaacgcatggttgccgaggatgagagacaccgcgacatcattgaacagcccgtcctggtgcagggcaactctaatcggcgctctgtgtccactttaaagccctgcgccaaagacgcctatatgttatttcaggacctgtgtcagctcgtgaatgcagatgccccttattggctggtagggatgacagagatgaccagaaccttcgggttggagctactcgagagtgtcctgaacgatttcccacaagtgttcctccagcaccaggagttctccttcctcctaaaggagagggtgtgccccctggtgataaagctgttctctcccaacattaagtttaggcagggctcaagcacctcttcaagcccagcccccgtggaaaagccctacttcccaatctgtatgcgcctgctgagagtggtgtctgtgctcattaagcaattctactcacttctggtcacagagtgcgagatctttctgtccctgctagtgaagtttctggatgctgataaacctcaatggcttagagccgtggccgtggagagcattcaccggttttgtgtgcagccccaactgttacggtccttttgccagtcctatgatatgaagcagcattccaccaaggtgttcagggacatcgtgaatgccctcggttctttcatccagtccctgtttctggtgccccccacaggaaatcctgctacctctaatcaggccggaaataacaaccttggtggaagcgtgtcagctcccgccaacagcggaatggtcggcataggtgggggcgtgactctgctccccgctttcgaatatcgcggcacgtggattccaatcctaactataaccgtgcaaggcagcgctaaagccacctacttagaaatgttggacaaggtggagcctcccacaatccctgagggctacgctatgtcagtagcatttcattgcttgctggatctcgttcgcggaattaccagtatgattgagggcgagttgggagaactcgagaccgagtgccagaccacaacagaggaaggaagctctcccactcagagcacagagcagcaggaccttcagagcacctcagaccagatggacaaggaaattgtatcacgagccgtgtgggaggaaatggtgaatgcgtgttggtgcgggctgctggctgccctgagcttgctgttagatgcgagcacagacgaggctgccacagaaaacatcctgaaagcggagttgaccatggccgcattatgtggccggctgggattggttaccagcagagatgcgttcatcacagcgatttgtaagggctccctcccacctcactatgctctgacggttttgaacacgactacggcagcaactctgagcaacaagtcatattcagtccaaggccaatccgtgatgatgatctccccctcctctgagtcccatcagcaagtggtggcagttggacagccactggccgtgcaaccgcaaggaacggtcatgctaacttccaaaaatatccagtgcatgcgcacactcctaaaccttgctcactgccacggagccgtgcttggtacaagctggcaattggtcctggccaccctgcagcatctcgtctggatcctcggcctcaaaccctcaagtgggggggctctcaagcccggccgggccgtcgagggaccctctaccgttctgacgactgccgtcatgactgacctgccggtgatcagcaatatcctaagccgtctgttcgaatcttcacagtacctggacgacgtcagtctgcaccatttaataaatgctctgtgttcactctcactcgaggctatggatatggcgtatgggaataataaggaacctagtttgtttgccgtggccaaactgttggaaacgggcctggtgaacatgcaccgtatcgaaattctttggaggcccctaacagggcacttattagaggtatgccagcaccccaacagtaggatgcgcgagtggggagcggaggcccttacaagcctgattaaagccgggttgacattcaaccacgacccccccttatctcagaatcagcggctgcagctcctgctgcttaacccactgaaggaaatgtccaatataaaccacccagatatacggttgaaacagttggagtgcgtgcttcaaatcctgcagtctcagggcgattccctgggcccgggttggccattggtgctgggcgtgatgggagcaatccggaatgaccagggagagagcctaataaggacagcttttcaatgcctacaactcgtcgtcacagacttcctgccaacaatgccgtgcacctgcctccagatcgtggttgacgtagcgggctcctttggactgcataaccaagagttgaacatctctctgaccagcattggcctgttatggaacatttcagactacttcttccagagaggtgagacaatcgagaaagagttaaataaggaagaggcagctcagcagaaacaagcagaagagaaaggcgtcgtgctgaataggccctttcacccggcccccccgtttgactgcctctggttatgtctctacgcaaagctgggcgaactgtgcgtggatcctcggcctgcagtgcgaaagtctgccgggcagacgctgttcagtactattggggcacatggtaccctgcttcagcatagtacctggcataccgtcatctggaaagtgctcttccacctgttagatagggtgcgtgagtccagcaccaccgccgacaaagaaaaaatagagtccggaggcgggaatatcctgattcatcacagtagagacacagctgaaaaacagtgggccgaaacctgggtgctgacactggctggcgttgcccgcatctttaacacccgcagatatctgctacaaccactcggtgatttctcccgggcctgggatgtgctgctggatcatatccagagtgctgcactctctaaaaacaacgaagtaagtttggcggcattgaagtcatttcaggaaatcttgcagatcgtgtcgccagtgcgtgactctgacaaacccgagacgcctccagttgttaacgttcctgtcccagttctgattggccctatcagtggaatgtccagacccttcgtacggaccgactcaatcggtgagaagctggggagatactcctctagcgagcctcccattgtgactgacgagctggaagatctgaacctttggtgggccgcttggaacacttggtacaggattggctctgaaagtaccaaaccccccattaccttcgataagctaaccttcattccaagtcagccatttttgaccgcactcatccaaatcttccccgctctgtaccaacacattaaaactggcttcaatatggatgacctgcagaagttgggggtgatacttcactcggccatcagcgttcctatttcaagtgacgcttcaccgttcattttgccctcttacacagaagcggtactgaccagtctacaggaggcagtcttgacggctctggacgtgctgcagaaggccatttgcgttggccctgaaaacatgcagatcatgtatcctgctatttttgatcagctgctagcttttgtcgagttttcatgtaagcccccacagtatgggcagcttgaaactaagcatatcgccaacgccaaatacaaccagatccagctattcgctcccgctgaatgggttgctttgaactacgtcccctttgccgagcgttccctcgaggtcgtcgttgacttgtatcaaaagaccgcctgccataaggctgtggtaaatgaaaaagtgttgcaaaatatcataaagaccctcagggttcccctgagcctcaagtacagttgtccatctgagagcacatggaagctcgcagttagcagcttgttgagagtgctgagcatcgggctccccgttgccagacagcatgccagctccggaaagtttgattccatgtggccagagttggccaatacttttgaggactttctctttactaagtctatacctcctgataatcttagcatccaggagtttcaacggaatgaaaacattgacgtcgaggtagtccagttaattagcaacgagattttaccctatgctaactttatccccaaggaattcgtaggccagattatgacaatgcttaataaagggtctattcatagccagtccagttcttttactgaggctgagattgacatcaggttaagagaggaattcagcaaaatgtgcttcgaaaccctgctccagtttagcttttctaataaagtcaccactcctcaggagggatatatttcccggatggccttgtctgtcttgctgaagaggtcgcaggacgtgctgcacaggtatattgaagacgaacggctaagcgggaaatgtccccttcctcgccagcaagtcactgaaattatatttgtgttaaaggctgtgtccacacttatcgactccctgaagaagacacaacccgaaaatgtcgacggtaacacatgggcccaggtgattgctctctatccaaccctggtggaatgcatcacttgcagctcgagtgaggtttgttccgctctaaaggaggccctggtgcctttcaaagattttatgcagccgccagcttctcgtgtacagaacggggagtcttag

SEQ ID NO: 183846 - DNA, 8406 bp, Artificial Sequence
  derived and/or modified sequence
attgtgggcgactcggctaatggcgtcggcgagtcttaggggcctggggagctggcgctgaagcttcttgccaggttggctggtgacacccggtgtggctgggccccgcggcagcggagggacctgcccgccttgtgggtttctcggccagagtcggcggagcctagcgggacggtgcgactgcggggggcgcctccgagaaaagccagaggtgttgcggggaagctgctgggggacgctcgagcaggctccgggttcgcagcccagggcccaagaagcgggctgctgaaggaccagagacaccgggagggagctgcctgtggccctaaggagctgaccgtgccagagcttgtttgtacctctcggaaattggctgggaccttggaggatcatgtccggcaccagcagccccgaggcggtgaagaagctgctggagaatatgcagagcgacttgcgcgccttgtcactggagtgcaagaagaaattcccacctgtcaaagaggctgctgaatcaggaataataaaagttaaaacaattgctgcacgaaacactgaaattttggcagcactgaaagagaacagctcagaggttgtacagccttttttaatgggttgtggaaccaaggaaccgaagatcactcagctatgtttggctgctattcagagactcatgtcacatgaagtcgtgtctgagactgcagctggaaatataattaacatgctttggcagctaatggagaatagtcttgaagaacttaagctacttcaaacagttcttgttcttttaacaaccaatacagtagttcatgatgaggcactttctaaggcaatcgttctttgttttcgactacacttcacaaaagataatattacaaataatacagctgctgctacagtgcgacaagttgttactgttgtttttgagaggatggttgctgaagatgaacgacacagagatattatagaacaaccagtactggtacaaggaaatagtaacagaagatctgtcagtaccctcaaaccttgtgctaaagatgcatatatgcttttccaggatctttgtcagttggttaatgctgatgctccttattggctagtgggcatgacagaaatgactcggacgtttggcctcgaattacttgagtcagtcctcaatgattttccgcaggtctttttacaacaccaagaatttagtttcctcctcaaagaaagggtatgtcctcttgtgataaagctcttttctccaaatataaagttcagacaaggttccagcacctcatcttctccagcaccagttgaaaaaccatattttcctatctgcatgcgtttgctgagagtagtatctgttctgattaagcagttttacagtcttttggtaactgaatgtgagatatttctgtcacttctggtgaaatttctggatgcagataaaccacagtggctacgagctgttgcggtggaatcaatacacagattctgtgtgcagcctcaactattaaggtcattttgtcagtcctatgatatgaaacagcattctaccaaggtttttcgtgatattgtaaatgcactgggatcttttatacagtccttgtttcttgtcccccctactggaaatcctgcaacaagcaaccaagctggaaacaataatttaggtggctcagtctcagcaccagctaactcaggaatggtggggattggtggaggtgttactttgctaccagcatttgaatataggggaacctggatacctattctgacaatcacagttcaaggcagtgctaaagccacctacttagaaatgttggacaaagttgagcctccaactatacctgaaggttacgccatgtctgtggcattccattgtttgctagaccttgttcgtggaatcacaagtatgattgaaggagagctaggagagcttgaaacagaatgtcaaaccaccactgaagaaggttcttcaccaacacagtcgacagaacagcaggatttacagtcaacatcagaccaaatggataaggaaattgttagtagggctgtttgggaagaaatggtgaatgcctgctggtgtggtcttcttgctgcactctcactccttcttgatgccagcacagatgaagctgccactgagaatattttaaaagctgaactgactatggctgctctttgtggaagactgggccttgtaacttcaagagatgcctttataactgcaatatgcaaaggttccctgcctccccattatgctcttactgtattgaataccaccactgcagctacactttccaacaaatcatattccgttcagggccaaagtgttatgatgataagtccatcaagtgaatctcaccaacaagttgtggcagtgggtcaacctttagcagtccagcctcaagggacagtaatgctgacttccaaaaatatccagtgtatgaggactttacttaacttggcgcattgccatggggctgttcttggaacatcatggcaacttgtcttggcaactcttcagcatcttgtgtggattctgggattaaagcctagtagtggcggtgccttgaaacctgggagagctgtagaaggacccagtacagttctaacaacagcagtgatgacagatttaccagtgatttccaatatactttcaagattgtttgaaagctcacagtatcttgatgatgtatcactgcatcatttaataaatgcactttgctccttgtctctagaagcaatggatatggcctatggaaataataaggaaccatctctttttgctgttgccaaattgttagaaactggtttagttaatatgcaccgaatagaaattctgtggagacctctgactggccatctacttgaggtctgccagcatccaaactctcgaatgagagaatggggagcagaagctttaacttctcttattaaagcaggattaacatttaaccatgatcctccactctcacaaaaccagaggctgcagttgcttttattgaacccgttaaaggagatgtccaatattaatcatccagatattcgactcaagcagttagaatgcgtgttgcagattctgcagagtcagggagacagtcttgggcctggatggccattagtgcttggagtcatgggagcaatcagaaatgatcaaggagaatccttgatacgaactgcattccagtgtcttcagttggttgtgacagattttctaccaacaatgccttgtacttgcctgcaaatagttgtagatgttgcaggtagctttggcctccataaccaagaactcaatattagtttaacttcaataggtttattgtggaatatttcagattattttttccaaagaggggaaactattgaaaaagaactaaataaggaagaggcagcacagcaaaagcaggcagaagagaaaggagttgttttaaatcggccattccaccctgcaccgccatttgattgcttgtggttatgtctttatgcaaaattgggtgaactatgtgtggatccccgtcctgctgtcaggaagagtgcagggcaaactctgttttctacaattggtgcgcatggaactttattacagcattcaacctggcacactgttatctggaaggtactctttcatctactggacagagttcgagagtcctctaccactgcagacaaagaaaagattgagtctggaggtggcaatattctcattcatcattcaagggacaccgccgagaagcaatgggctgagacgtgggtattaacattggctggagtagcaaggatcttcaacactagaagatatttgctgcagcctttaggagatttttcaagagcttgggatgttcttcttgaccatatacagtcagcagcactcagcaaaaacaatgaagtatctctggctgctctgaaaagcttccaggaaattttacagattgtgtcccctgtcagagactcagataagcctgagacaccacctgtagttaatgtacctgtgcctgttcttatagggcccatatcaggcatgagcaggccatttgtaagaacagattccattggagaaaaactaggaagatatagtagctctgagccacccattgttactgatgagcttgaagatttgaatctatggtgggctgcgtggaatacctggtatagaattggatctgaaagtactaagcctcctattacttttgataaactaacttttattcctagccagccttttcttacagctttaattcagatatttccagctctctaccaacacataaaaactggtttcaatatggatgacttgcaaaagttgggagtcatattgcacagtgctatttcagtcccaataagttcagatgcatccccttttattcttccatcttataccgaagcagttttgacaagtttacaggaagctgtacttacagctttagatgttctccaaaaggccatttgtgtaggaccagaaaacatgcagataatgtatccagctatatttgaccagttgttggcatttgtagaattttcctgtaaacctccacagtatggacagctggaaacaaagcacattgcaaatgcaaaatataatcagatccaactatttgcaccggcggaatgggtagccttgaattatgtgccgtttgctgaaaggtctttagaagtagttgtggatttataccaaaaaacagcgtgtcacaaagcagtggtgaatgagaaagtgctccagaatattattaagactcttagggttcctctcagtttgaagtattcctgcccttctgaaagcacatggaaactagcagtatcctctctcctcagagttctttctattgggctacctgttgcccggcagcatgcttcttctggaaaatttgacagtatgtggccagaactagccaatacttttgaagattttctctttactaaaagcatacctccagataatctctctattcaagagtttcaaagaaatgaaaatattgatgtcgaggtagttcaacttatcagcaatgagatactaccttatgccaattttattcctaaggaatttgttggtcaaataatgacaatgcttaacaagggctcaatacattctcagtcatcttcatttacagaagcagagattgatattcgtttgagagaggaattttctaaaatgtgttttgaaacattactccagttttccttcagtaataaagtcacaacacctcaagaaggctacatctcacgaatggcactctcagtgcttttaaagaggtcccaagatgtactacatcgctatatagaggatgaaagattaagtggtaaatgccctcttccaaggcaacaagtaacagaaattatatttgttttaaaagcagtcagtactcttattgattcacttaagaaaactcagcctgagaatgttgatggaaatacctgggcacaagtaattgccttatacccaactttagtagaatgcatcacctgttcttcttcagaagtctgttctgcacttaaagaggcactagttccttttaaggatttcatgcagccaccagcatccagagttcaaaatggagaatcttgaccggctacaatatatttgaaagcaggaagatagtctaaaaaatgtttgctcctaattgagtcttctgtgagaaggacatttcttactgcagataattcttggcagctgttgttggcctcctttaaattctacttacctgagttcagtaattcatattacaggcttgcacatcaacaaaggctcctgaatgaacagcagtgtaaggctttaataaattaaactgatgggagggataattaacactacagtatacatgctaccatatctccagttggtgatttaaagtgagcttatgtacagtttgtggtgtatgtgttaatgatgtactttttaaaaagaaagaagagatatttcaattcagtcagatttattagtctggtgtttttgcaccctttttcaagtacaaaatcgtactagaattttatgcaagatggtactgtaacattccatattatctataaccagcctttgttaacaaagggaactgatatacttgtgtgtataataaatggtacagttctgtataaaatagtgcatttatttaaattttaaaagtattgataatgttaaatgcttaaagctctatttattattaatacaaaattgtttgcttacatttttacttataatttgccttcatatgtggcggataagctcaccatatgatcatgcagttagcttcatgcttattttaaatgtattattagtgaccattaaacatctgaccagtaaggtcatgtgaacacagcagcaaatagtttatgatttgctgattttggagctttgaaatataggttcttaatacattgatacatattgtagcactatgacttcatcatacctcatttctttaaacagctctccaagctttcactgaagtctgtctgttttttatattggctgtctggattttaaagacttttcatattttatatttctactgattttgtttcccctaacaacatttgtcactgtctttgaattatgacccaggcaagatgatttcagattttctaaaatcttgcctgtgaggttttgttcatatcagtgcttcattttgtaatgtcttctcaagaaaaatacctatgttaactcacaagtataaaatatgtgtgtattataaaacaatgaaaagtgtatttttggagatagtcaagcatttagaagtgcagtgaacttgctgtcacggagtaaaatgctaattatgtttcactttcctagcctagtgaaaaagaaaagtgctcttgagtacaataccttaattatttcttaaaatactgactttgacctagctcactgtattttttatttaatggattatggattacagtatttttcttctgagttaaattttcataatttatgtgaagacacaaagatgtttaaaacaatgattattcataagaaatcatgatggtctcagtattattttagtgtattggaaggtctttgatcttaatagaatttataaatttcagcttctccagaataatcataaaactgcaaaaagatattataattgagtcatgattgagatacagttttgaggctattataattgtataattatttaatttgcattatctgtaaaatgtagtaaggtctttgaggggatattttttatttacatgaattactgaatttctattttattatttcacctaaaattaaggtaaaatatggcatttcataagttctgctttcagcattttccttaaagttgtaaaaaatcaagctatgtacttattttctatatttgggtgtgttaaattgaggattagaaaaatccacataatcactgataaagcattgaaacagaataacccaagggtagtgtaccgattcagtaacatgttaaaaatattgctatgcatttattcaaaggaaaatggtctgttcttgagaaataaaagatcagttgcaattaggataattaaatagttaaatatgagtcaagtgtatgcaatatacatttatatgaaccaaagcttgctttatcaggaccatgccctacagttcaaaacataaacatagtgaatgtgttaatatcatataataaggtaataaatgccagtcttagtgtgaagcaagtgggtggcccccttggtagtataattggacaggattttcctccagaatatttcctgtcaccctccaagagtcactacagtaattgattgctggcatggaacacattgcccttgtcttgttagtatgaattgggttctccagtgactagaagaactggggtgtgtgaaagtattcgatgccaggagattcaaaaaggaagctctcaaagataagatcattttatggcacaattgagtctataaccagccctttaagcagtagtaaaaatgtcctttgtcatacttactagaaatactatgagttttttttttttttttcatttgagacggagtctcgctctgtcacccaggctggaatgcagtggcacgatcttggctcactgcaacctctgcttcccgggttcaagcagtttcctgcttcagacttccaagtagctgggattacagacatgccaccatgccaggctaatttttttaatatttttagtagagatggggtttcaccattttggccattctagtcttgaactcctgacctcaggtgatctgcccgccttggcctcccaaagtgctgacattacaggcctgagccactgcgcccagccaataccatgagttttaagcctcacatcgtcacttgctgtcactgccagtgcctgttttattcatattgctggacaacagacatatgccaccaattgtatgattaataaagtctttttctggccattttgtccattataaaggaaataaactaattgttaacttgca

SEQ ID NO: 183847 - DNA, 5153 bp, Artificial Sequence
  derived and/or modified sequence
atgtcaggaacctccagccccgaagccgtgaaaaagctgttggagaacatgcagtcagatctgcgtgccctctcattagagtgcaagaaaaagtttccaccagtgaaagaagccgcagaatcagggattattaaagttaagaccatcgctgctcgaaatactgagattctggctgccctcaaagaaaacagctctgaagtcgttcaacccttcctaatgggttgcggcactaaggagcccaaaattacccagctgtgtcttgcagccattcagcgcctgatgagtcacgaggtagtgtccgaaacagccgctgggaatattattaatatgctgtggcaactaatggagaactcactggaagagttaaaactgttacagacagtgctagtccttttgactaccaacaccgtcgttcacgatgaggccctcagtaaggccatagtattgtgctttcggctccacttcaccaaggacaatattactaataatacagcagcagccacagttcgtcaagtcgtgaccgtggttttcgaacgaatggtcgctgaggatgaacggcaccgggacataattgagcagcccgtgcttgtccaggggaattctaaccggcgatctgtttctaccctgaagccttgtgccaaagatgcctatatgctcttccaggacctgtgccagctggtgaacgctgacgccccatattggctggtgggcatgacagaaatgacacgaacatttgggctggaactgcttgaatcggtgctaaacgacttccctcaagtgttcttacagcaccaagagttctcatttcttctcaaggaacgcgtgtgtccgttggtaattaaactgttcagtccaaacatcaagttccgtcagggtagctctaccagcagcagccccgcacctgtggagaaaccttatttcccgatatgtatgaggttgcttcgcgtagtgtctgtcctcatcaaacaattttatagtcttctggttacagagtgcgagattttcctctccctgctggtgaagtttctcgatgccgacaaacctcaatggctgcgggctgtggctgttgaaagcattcaccggttctgcgtgcagcctcaattactgcgatcgttctgccaatcctatgacatgaaacagcacagtaccaaggtctttcgcgacattgtcaacgccctcggatcatttatccagtcccttttcctggtacctcccactgggaacccagctaccagcaaccaggccggtaacaacaatcttggcggatccgtgagcgcacccgctaatagcggaatggtggggattgggggtggcgttactttgcttcccgctttcgagtaccggggaacatggatccctatcctgaccataaccgtacagggcagtgccaaggctacttatctggaaatgctggataaagtggagcccccaacaattcccgaagggtatgccatgtccgttgcttttcattgccttctggacctggttcgtggcattacctctatgatagaaggggaactgggcgaactggaaacagagtgtcagaccactaccgaagagggatcctcaccgacacagtccacagaacaacaggaccttcagagcacatccgatcagatggacaaagaaattgtgagcagagccgtgtgggaagagatggtcaatgcttgctggtgcgggttgctagccgctttgtccctgttattggatgccagcacggacgaagcagctacagaaaatattttaaaggccgagctgacgatggcggctctttgtggacggttgggcctggtgacttccagagatgccttcatcaccgctatttgtaagggctccctgccaccacattacgctcttaccgtcctcaatacaaccacagctgcgactttatccaacaaaagttattctgtgcagggacaaagcgttatgatgatcagtccatcgagcgagtcccaccagcaagtggtggccgtcggacagcctcttgccgtccagccccagggcactgtgatgctgacgtccaaaaatattcagtgcatgcgaactttgcttaacttggcacactgccacggagctgtgctggggactagctggcagctcgtcctggcaacgctacagcatctggtgtggatactgggattaaaaccatcgtccgggggagctctcaaacctggtagagcagtcgagggtccctcgactgtgcttacaacggcggtgatgactgaccttccggttatatctaacatactgagccgcctgtttgagtctagccaatacctggatgacgtgtccctgcatcatcttatcaatgccctctgttctctctccctcgaagccatggatatggcgtacggcaataataaggagccctctctcttcgcggttgcgaaactcttggagacaggcctggtgaacatgcatcgtatagagattctgtggagacctcttactgggcatctcctggaggtctgtcagcacccgaattccagaatgcgcgagtggggagccgaagctctgacatctctgatcaaggcgggattgacttttaatcacgatccaccattgagtcaaaaccagcgcctgcagctgctgctgctcaaccctctaaaggagatgtccaacatcaaccaccctgatattcggctcaaacaactggagtgtgtcttacagatcttacaatcccaaggggatagcctgggtcctgggtggccattggtgctgggcgtgatgggcgctatccgaaacgaccagggggaaagtctcatcagaactgccttccagtgcctgcagctggtggtgactgactttctcccaaccatgccctgtacctgtctgcagatagttgtggacgtggccggtagcttcggattacacaaccaagaactgaacatcagcctgacttctattgggctgctgtggaatatcagcgactacttcttccagaggggagaaacaattgagaaggaactgaataaggaggaggccgctcagcagaaacaggccgaggagaaaggcgtcgtgttgaataggccgttccatcctgcccctccgttcgactgtctgtggctctgcctatatgccaaactcggagaactgtgtgtggaccctcgtcctgcggtgcgtaagtccgcaggtcagacactattctcgacgatcggcgcacacggcacactgctgcagcattcgacgtggcacactgtgatttggaaagttctgttccaccttctggacagagtgcgagagagtagcacaacagccgacaaggaaaagatcgagtccgggggagggaacatccttatccatcattctcgggataccgcagaaaagcagtgggccgaaacctgggtgctcactctagcaggcgtcgcaagaatctttaatacccgccgttacctcctccaacctctcggagactttagccgggcttgggacgtgctcctcgatcacattcagtccgccgctttaagtaaaaataatgaggtcagtctcgccgcattgaagtccttccaggaaatcctacagattgtgagtccagtacgggattcggacaagcccgagacccctcccgtggtgaacgtccccgtgcccgtattgattgggcctatttctggcatgagtcgaccgttcgtgcggactgactctattggcgaaaaattggggagatacagtagctcagagcctcctattgtgaccgacgagctggaagatctgaacctctggtgggccgcttggaatacttggtatagaatcgggagcgagagcacaaagcccccaattacgtttgataagttgaccttcatcccatcccagccattcctgacggcacttatacagattttcccggcactttaccagcatatcaaaaccggattcaacatggacgaccttcagaagttaggcgtgatcctgcatagcgctatcagtgtgcctatcagcagtgatgccagcccctttattctgccatcatatacagaagcagtgcttactagcttgcaggaggcggtgttaactgctcttgacgtgctgcagaaagcaatatgtgtcggtccagagaatatgcaaattatgtaccccgcaatcttcgatcagttgctagccttcgttgaattctcctgcaaaccccctcaatatggacaactggaaaccaaacacattgctaacgcaaaatataaccagatccaattgtttgctccagcagaatgggtcgctctgaattacgtgccgtttgctgagaggtctttagaggttgttgtggacctataccaaaagacagcctgtcacaaagctgtcgttaacgaaaaagtgctccagaatatcattaaaacccttcgagttccattgtctttaaagtattcctgccccagtgagtcgacttggaaactggccgtgtcttcactgttgcgtgttctcagcatcggcctgcctgtcgcccgacagcatgctagctcagggaaattcgatagtatgtggcccgaattggctaacacctttgaggacttcttattcacgaagtcaattcctccagataacctgtccattcaggagttccagcgaaacgaaaacatcgacgtggaggttgtgcagctcatctcaaatgagatcttgccttacgccaactttatacccaaggaatttgttggccaaattatgacaatgctcaacaagggtagtatccactctcaatcctcatccttcactgaagctgagatcgacattcggcttagagaggagttctctaaaatgtgtttcgagacactgctgcaattctctttctctaataaggttactacacctcaggagggctacatctcaagaatggctctatccgtgctgctgaaacggtcacaggacgttttacacagatacatcgaggatgaacgcctctcaggcaaatgtccactgcctaggcagcaggttacggaaatcatcttcgtgcttaaagcagtctctaccctgattgattctctgaagaaaacacagcccgagaatgtggacgggaacacatgggcccaggtaattgctctgtaccctaccctggtcgaatgtatcacttgctcttcctctgaggtgtgctccgcattaaaggaggccctggttcctttcaaagatttcatgcaacccccagcctctcgggtccagaacggcgagagcta

SEQ ID NO: 183848 - protein, 773 aa, Artificial Sequence
  derived and/or modified sequence
MGKNLKEAVKMLEDSQRRTEEENGKKLISGDIPGPLQGSGQDMVSILQLVQNLMHGDEDEEPQSPRIQNIGEQGHMALLGHSLGAYISTLDKEKLRKLTTRILSDTTLWLCRIFRYENGCAYFHEEEREGLAKICRLAIHSRYEDFVVDGFNVLYNKKPVIYLSAAARPGLGQYLCNQLGLPFPCLCRVPCNTVFGSQHQMDVAFLEKLIKDDIERGRLPLLLVANAGTAAVGHTDKIGRLKELCEQYGIWLHVEGVNLATLALGYVSSSVLAAAKCDSMTMTPGPWLGLPAVPAVTLYKHDDPALTLVAGLTSNKPTDKLRALPLWLSLQYLGLDGFVERIKHACQLSQRLQESLKKVNYIKILVEDELSSPVVVFRFFQELPGSDPVFKAVPVPNMTPSGVGRERHSCDALNRWLGEQLKQLVPASGLTVMDLEAEGTCLRFSPLMTAAVLGTRGEDVDQLVACIESKLPVLCCTLQLREEFKQEVEATAGLLYVDDPNWSGIGVVRYEHANDDKSSLKSDPEGENIHAGLLKKLNELESDLTFKIGPEYKSMKSCLYVGMASDNVDAAELVETIAATAREIEENSRLLENMTEVVRKGIQEAQVELQKASEERLLEEGVLRQIPVVGSVLNWFSPVQALQKGRTFNLTAGSLESTEPIYVYKAQGAGVTLPPTPSGSRTKQRLPGQKPFKRSLRGSDALSETSSVSHIEDLEKVERLSSGPEQITLEASSTEGHPGAPSPQHTDQTEAFQKGVPHPEDDHSQVEGPESLR

SEQ ID NO: 183849 - protein, 788 aa, Artificial Sequence
  derived and/or modified sequence
MDASLEKIADPTLAEMGKNLKEAVKMLEDSQRRTEEENGKKLISGDIPGPLQGSGQDMVSILQLVQNLMHGDEDEEPQSPRIQNIGEQGHMALLGHSLGAYISTLDKEKLRKLTTRILSDTTLWLCRIFRYENGCAYFHEEEREGLAKICRLAIHSRYEDFVVDGFNVLYNKKPVIYLSAAARPGLGQYLCNQLGLPFPCLCRVPCNTVFGSQHQMDVAFLEKLIKDDIERGRLPLLLVANAGTAAVGHTDKIGRLKELCEQYGIWLHVEGVNLATLALGYVSSSVLAAAKCDSMTMTPGPWLGLPAVPAVTLYKHDDPALTLVAGLTSNKPTDKLRALPLWLSLQYLGLDGFVERIKHACQLSQRLQESLKKVNYIKILVEDELSSPVVVFRFFQELPGSDPVFKAVPVPNMTPSGVGRERHSCDALNRWLGEQLKQLVPASGLTVMDLEAEGTCLRFSPLMTAAVLGTRGEDVDQLVACIESKLPVLCCTLQLREEFKQEVEATAGLLYVDDPNWSGIGVVRYEHANDDKSSLKSDPEGENIHAGLLKKLNELESDLTFKIGPEYKSMKSCLYVGMASDNVDAAELVETIAATAREIEENSRLLENMTEVVRKGIQEAQVELQKASEERLLEEGVLRQIPVVGSVLNWFSPVQALQKGRTFNLTAGSLESTEPIYVYKAQGAGVTLPPTPSGSRTKQRLPGQKPFKRSLRGSDALSETSSVSHIEDLEKVERLSSGPEQITLEASSTEGHPGAPSPQHTDQTEAFQKGVPHPEDDHSQVEGPESLR

SEQ ID NO: 183850 - DNA, 2367 bp, Artificial Sequence
  derived and/or modified sequence
atggatgcgtccttagaaaaaatcgccgaccctacactggcggagatgggcaaaaacctcaaggaggctgttaaaatgttggaagactcacagagacgaactgaagaggaaaacggcaaaaagctgatttccggagacattccaggccccttacagggctcaggacaggacatggtaagtatcttgcagcttgtgcagaacctgatgcacggggatgaagacgaggaaccgcagtcccctcgtatccagaatattggagaacagggtcacatggctctgctggggcactcactcggcgcatacattagcacactggataaagaaaagctgcggaaacttactaccaggattctgtcagacacaactctgtggctttgcagaatcttcaggtatgagaacggctgcgcctacttccacgaagaggagcgagagggcctcgccaaaatctgtaggcttgccattcacagtcggtatgaagactttgtcgtggacggatttaatgtcctctataacaagaagcccgtgatatatctcagcgccgccgccaggcccggactggggcaatacctctgcaaccaattgggcctaccctttccttgtctgtgcagggttccttgcaacaccgtttttggtagccagcaccaaatggacgtggccttcctggaaaagcttatcaaggatgacattgaacgcggccgcttacctctgcttctcgtggctaacgccggcaccgctgcggtcggtcacacagacaagataggaagactgaaagagttgtgtgaacagtatggtatatggctgcacgtggaaggagtgaatctcgccacactggccctcgggtacgtctcatcgtctgtgttagccgcagcaaaatgtgatagtatgaccatgactcctggtccctggctggggctgcccgcggtccctgcggtgactttgtataaacacgatgacccagccctgactctggtagctggcctgacgagtaacaaacccacggataaattaagagccttacccctctggctgtctctacaatacctcggcctggacggctttgtggagagaattaagcacgcttgtcagctcagccagaggctgcaagagagcctgaaaaaggttaactatataaaaatccttgtggaggacgagttgagctcccccgtagtggtctttagattttttcaggagctgcccggcagcgatcccgtgttcaaggctgtgcccgtgccaaatatgacccccagcggcgtgggcagagagagacatagttgtgacgcactcaaccggtggctaggggagcagctcaaacagctggtccctgctagtggactgactgtgatggatctggaggctgagggaacctgtttgagattcagcccgcttatgaccgcggccgtgctgggaacacgcggcgaagacgtggaccagctggtagcttgtatcgagagcaaactcccggtgctctgctgtaccctgcaactgcgtgaggagtttaaacaggaggtggaagccactgcaggccttctatatgtcgacgatcccaattggtccgggataggtgtggtgcggtacgaacatgccaacgacgacaaatcttctctcaaaagcgaccctgagggagaaaatatacacgctggactgttgaagaagcttaatgagcttgaatccgatcttaccttcaagattgggcctgagtataagtctatgaaatcttgcctctacgtgggcatggcctctgataacgtcgacgctgctgaattggtcgagacgatagcagctactgcaagggaaatagaagagaattcaagactgctggagaatatgacagaggtggtcagaaaaggtattcaggaggcccaagtcgaactgcagaaagcgagcgaagagagactgcttgaagagggcgtcctgcgacaaatcccagtcgttggctctgtccttaactggtttagccccgtgcaggccctccaaaagggaaggacttttaatctgaccgccgggagcttggagtccacagaacccatttacgtctataaggcccaaggcgcaggtgtgacactacctcccacaccttcagggagtaggacaaaacagcggttacccggacaaaagccttttaaaagatcactgcgcggcagcgatgccctgagcgagacatcaagcgtgagtcacatcgaggatctggaaaaggtcgaaagactaagctctggtccggagcagattacactggaggcttcatccacggaagggcatcccggcgctccctccccacagcatactgaccaaactgaagcttttcaaaagggggttccacaccccgaggatgaccatagccaagtggagggaccagaatctcttcgctag

SEQ ID NO: 183851 - DNA, 2367 bp, Artificial Sequence
  derived and/or modified sequence
atggatgccagcctggagaagattgctgaccccaccctggccgagatgggcaagaacctgaaggaggccgtgaagatgctggaggacagccagaggagaacagaggaggagaatggcaagaagctgatcagcggggacatccctggccccctgcagggcagcggccaggacatggtgtccatcctgcagctggtgcagaacctgatgcatggagatgaagatgaggagccccagagcccccgcatccagaacattggagagcagggccacatggccctgctgggccacagcctgggcgcctacatcagcaccctggacaaggagaagctgaggaagctgaccacccgcatcctgagtgacaccaccctgtggctgtgccgcatcttccgctatgaaaatggctgtgcctacttccacgaggaggagcgggagggcctggccaagatctgccgcctggccatccacagccgctatgaagattttgtggtggatggcttcaacgtgctgtacaacaagaagcctgtgatctacctgtctgctgctgcccggcccggcctgggccagtacctgtgcaaccagctgggcctgcccttcccctgcctgtgccgggtgccctgcaacacagtgtttggcagccagcaccagatggatgtggccttcctggagaagctgatcaaggatgacatcgagcggggccgcctgcccctgctgctggtggccaatgccggcacagctgctgtgggccacacagacaagattggccgcctgaaggagctgtgtgagcagtatggcatctggctgcacgtggagggcgtgaacctggccaccctggccctgggctacgtgagcagctctgtgctggccgccgccaagtgtgacagcatgaccatgaccccaggcccctggctgggcctgcctgctgtgcctgctgtgaccctgtacaagcatgatgatcctgccctgaccctggtggccggcctgaccagcaacaagcccacagacaagctgcgggccctgcccctgtggctgagcctgcagtacctgggcctggatggctttgtggagcgcatcaagcacgcctgccagctgagccagaggctgcaggagagcctgaagaaggtgaactacatcaagatcctggtggaggatgagctgagcagccctgtggtggtgttccgcttcttccaggagctgcccggcagtgaccctgtgttcaaggctgtgcctgtgcccaacatgacccccagcggcgtgggccgggagcggcacagctgtgatgccctgaaccgctggctgggggagcagctgaagcagctggtgcctgccagcggcctgactgtgatggacctggaggccgagggcacctgcctgcgcttcagccccctgatgacagctgctgtgctgggcaccagaggagaagatgtggaccagctggtggcctgcatcgagagcaagctgcctgtgctgtgctgcaccctgcagctgcgggaggagttcaagcaggaggtggaggccacagctggcctgctgtatgtggatgaccccaactggagcggcatcggcgtggtgcgctatgaacatgccaatgatgacaagagcagcctgaagagtgaccctgagggggagaacatccacgccggcctgctgaagaagctgaatgagctggagagtgacctgaccttcaagattggccctgagtacaagtccatgaagagctgcctgtatgtgggcatggccagtgacaacgtggatgctgctgagctggtggagaccatcgccgccacagcccgggagattgaggagaacagccggctgctggagaacatgacagaggtggtgaggaagggcatccaggaggcccaggtggagctgcagaaggccagcgaggagcggctgctggaggagggcgtgctgcggcagatccctgtggtgggctctgtgctgaactggttcagccctgtgcaggccctgcagaagggccgcaccttcaacctgacagctggcagcctggagagcacagagcccatctacgtgtacaaggcccagggcgctggggtgaccctgccccccaccccatctggcagcaggaccaagcagaggctgcccggccagaagcccttcaagaggagcctgcggggcagtgatgccctgtctgagaccagctctgtgagccacatcgaggacctggagaaggtggagcggctgagcagcggccctgagcagatcaccctggaggccagcagcacagagggccaccctggggcccccagcccccagcacacagaccagacagaggccttccagaagggcgtgccccacccagaagatgaccacagccaggtggagggccctgagagcctgaggtag

SEQ ID NO: 183852 - DNA, 2367 bp, Artificial Sequence
  derived and/or modified sequence
atggacgccagcctggagaagatcgccgaccccaccctggccgagatgggcaagaatttgaaagaggctgtgaagatgctcgaagacagccagcggcgaaccgaggaggaaaacggaaagaagttgattagcggtgatattccggggccactgcaaggctccggccaggatatggtctcaattctgcagctggtgcagaacctgatgcatggcgacgaagacgaggaaccccagagcccccgcatccaaaatatcggcgagcagggtcacatggctctgctcggacactcactcggtgcatacatctccacactggataaagagaagctgagaaagctcactacaagaattctgtccgatactacactatggttgtgcaggatatttcggtatgagaatggctgcgcgtattttcatgaagaggagagggaaggcttggccaaaatttgccggctcgcaatccactccagatatgaagactttgtcgtcgacggttttaacgtgctgtataacaagaagcccgtgatctacctgtctgctgcagcgcgcccaggactgggccagtatctgtgcaaccaactaggcttgccttttccatgtctgtgccgagtgccctgtaataccgtgttcggcagccagcaccaaatggatgtggcattccttgagaaattaatcaaagacgacatcgaacgcgggcgccttcctttgctcctcgttgcaaatgccggaaccgccgctgttggccacactgataagattggtcggttgaaggaattgtgcgagcagtacggaatctggctccatgtggaaggggtgaatcttgccaccctggctctgggctacgtttcatcctcggttctggctgccgcaaaatgcgatagtatgacgatgacccccggaccatggctcggactgcccgctgttcctgccgtgacgctttacaagcacgatgaccccgccctgaccttggtggctggacttacctctaacaagccgactgacaagttgcgggctctgcccctctggttatcccttcagtacttggggcttgatggatttgtcgagcgtatcaagcatgcctgccagctgagtcagcgtctgcaggagagccttaagaaagttaactatatcaaaattttagtggaggacgagctttccagccccgtggtcgtttttaggttcttccaggagcttcccggctccgaccccgttttcaaggcagtgccggtccctaatatgacaccttccggcgtgggaagggaaaggcacagctgcgatgccctaaacaggtggctgggggagcagctgaagcagctggtacctgcaagtgggctaactgtgatggacctggaggccgaagggacctgtctgcgctttagcccattgatgaccgcagccgtcctgggcacccggggagaggacgtcgatcagttggtggcttgcatagaatccaaattgcccgtgctgtgctgtactctgcaactgagagaagaatttaagcaggaagtggaggctacagctggtcttctgtacgttgatgatcccaactggtcaggtatcggagtcgttcggtacgaacacgccaacgacgacaaatcctcgcttaagagcgatcctgaaggcgagaacattcacgctggattacttaagaagctgaacgagcttgaaagcgacctgacgtttaagatcggccctgaatacaagagcatgaaaagctgcctttacgtaggaatggctagtgataatgtggatgcagccgagttggttgaaacaatagcagccactgcgcgcgagatcgaggagaattcaaggctgttagaaaacatgactgaggttgttaggaagggcattcaggaggctcaggttgagcttcaaaaggctagcgaagagagactactcgaagagggcgtgctgagacagataccagtggttgggagtgtgttaaattggttctcccccgttcaggctttgcagaagggtaggacctttaaccttacagctggatcgctggaaagcaccgaaccaatctatgtgtataaggctcagggggccggcgtaacactgccacccacacctagcggaagccgtacaaaacagagactgcccgggcagaaacccttcaagcgctcacttcgtggtagtgatgctttgagcgagaccagctccgttagtcacatagaagatctagagaaggtggaacgactcagcagcggacctgaacagatcactctcgaagcctctagcaccgaaggccatcctggagccccttccccacagcacactgaccaaacagaggccttccagaaaggggttcctcaccccgaggatgaccactcacaggtcgagggccccgagtctctccgttag

SEQ ID NO: 183853 - DNA, 2367 bp, Artificial Sequence
  derived and/or modified sequence
atggacgcttccctggaaaaaatagcagacccaaccctcgctgagatgggaaagaacctgaaggaagcggttaagatgctagaggactcccagcgaaggactgaagaagagaatggaaagaagctgatctccggcgacatccctgggccactccagggctctggccaggatatggtttcgattctacagctggttcagaacctgatgcacggagatgaggatgaggaaccgcagagccccaggattcagaatattggagagcagggacatatggcgctgctgggacactccctgggtgcctacattagcaccctagataaagagaaactccggaaattgaccacaagaattttatcagacacaactctgtggctgtgtaggatcttcaggtacgaaaacggttgtgcctactttcatgaagaagaacgcgaaggtttggctaagatttgtcgtctggccatccactcacgatacgaagacttcgtggtcgacgggtttaacgtcctgtataataaaaagcccgttatctacctctcagccgctgccagacctgggctggggcagtacctgtgtaaccaactcgggctgcctttcccatgcctctgtcgtgtgccgtgcaatacagtgtttgggagccagcaccagatggacgtagccttcctggagaagctaataaaagatgacatagagcgcggtagactgccacttcttctggtcgcaaacgctgggactgccgctgttggacataccgacaaaatcggacggctgaaagagttgtgtgaacagtatggcatttggttgcacgtagaaggtgtaaacctggcaaccctcgccctaggctatgtgtcatctagcgtactggccgctgctaagtgcgactctatgacaatgacacctgggccatggctagggctgcccgcagtccctgcagtcacactgtacaaacacgatgaccctgccctcactctggtggctggcctcacatctaacaagccaaccgacaaactcagggcactcccactatggctgagtctgcagtatctcgggctggatggattcgtcgaaagaattaagcatgcctgtcagctctcccagcggctacaagagtctctgaagaaggtcaattatatcaagattctggtcgaagatgagttgagtagtccggtggtcgttttcaggttttttcaggaacttccaggctcagatcccgtattcaaggccgtgcccgtgcctaacatgacaccctcgggggtgggtcgggaaagacactcatgtgacgcacttaatcgctggctgggggagcagctaaagcagctggtaccggcatccggccttaccgttatggatctcgaggccgaaggtacatgtctgaggttttccccactcatgacggccgctgttttaggcacccgcggagaggatgtggaccaattagtggcttgcattgaatccaaattgccggtgctgtgctgcacactccagctgagagaggaatttaagcaggaggtcgaggctaccgctgggctcctgtatgttgatgaccccaactggtcaggcattggcgtggtgcgatacgagcacgccaatgacgacaagtccagtctcaaatctgaccctgagggagagaacatacacgcgggactgctcaagaaactgaacgagctggaatccgacctgacatttaaaataggcccagaatataaatcaatgaagagctgtttatacgtcggcatggccagtgacaatgttgacgccgcagagctcgtagagactatcgctgctactgcacgggaaattgaagaaaatagccgcctcctggagaacatgactgaagtggtcaggaaaggcattcaagaggcacaggtggagctccagaaagcgagcgaggagcgattactcgaagagggggtgcttcggcaaatcccggtcgtggggtctgtcctgaattggttctctccggtccaagccctgcaaaaagggcgtacattcaacctaactgctggatccctcgaatctaccgaacctatctatgtttataaggcccaaggggcaggcgtgacccttccacccaccccaagtggctcaagaactaagcagcggctgccgggacagaagccattcaagaggtctctgagaggctctgatgccctgagcgaaacttcatcagtgtcccacattgaggacctggagaaagtggaaaggttatcttcaggcccagagcagattacactcgaggcttctagcacagagggacatcccggtgctccatcaccgcaacacactgaccaaacagaagcgtttcaaaagggagttccacacccagaagatgaccatagtcaggtagaggggccagaaagcctaagatag

SEQ ID NO: 183854 - DNA, 3875 bp, Artificial Sequence
  derived and/or modified sequence
cgggggacgtcagcgctgccagcgtggaaggagctgcggggcgcgggaggaggaagtagagcccgggaccgccaggccaccaccggccgcctcagccatggacgcgtccctggagaagatagcagaccccacgttagctgaaatgggaaaaaacttgaaggaggcagtgaagatgctggaggacagtcagagaagaacagaagaggaaaatggaaagaagctcatatccggagatattccaggcccactccagggcagtgggcaagatatggtgagcatcctccagttagttcagaatctcatgcatggagatgaagatgaggagccccagagccccagaatccaaaatattggagaacaaggtcatatggctttgttgggacatagtctgggagcttatatttcaactctggacaaagagaagctgagaaaacttacaactaggatactttcagataccaccttatggctatgcagaattttcagatatgaaaatgggtgtgcttatttccacgaagaggaaagagaaggacttgcaaagatatgtaggcttgccattcattctcgatatgaagacttcgtagtggatggcttcaatgtgttatataacaagaagcctgtcatatatcttagtgctgctgctagacctggcctgggccaatacctttgtaatcagctcggcttgcccttcccctgcttgtgccgtgtaccctgtaacactgtgtttggatcccagcatcagatggatgttgccttcctggagaaactgattaaagatgatatagagcgaggaagactgcccctgttgcttgtcgcaaatgcaggaacggcagcagtaggacacacagacaagattgggagattgaaagaactctgtgagcagtatggcatatggcttcatgtggagggtgtgaatctggcaacattggctctgggttatgtctcctcatcagtgctggctgcagccaaatgtgatagcatgacgatgactcctggcccgtggctgggtttgccagctgttcctgcggtgacactgtataaacacgatgaccctgccttgactttagttgctggtcttacatcaaataagcccacagacaaactccgtgccctgcctctgtggttatctttacaatacttgggacttgatgggtttgtggagaggatcaagcatgcctgtcaactgagtcaacggttgcaggaaagtttgaagaaagtgaattacatcaaaatcttggtggaagatgagctcagctccccagtggtggtgttcagatttttccaggaattaccaggctcagatccggtgtttaaagccgtcccagtgcccaacatgacaccttcaggagtcggccgggagaggcactcgtgtgacgcgctgaatcgctggctgggagaacagctgaagcagctggtgcctgcaagcggcctcacagtcatggatctggaagctgagggcacgtgtttgcggttcagccctttgatgaccgcagcagttttaggaactcggggagaggatgtggatcagctcgtagcctgcatagaaagcaaactgccagtgctgtgctgtacgctccagttgcgtgaagagttcaagcaggaagtggaagcaacagcaggtctcctatatgttgatgaccctaactggtctggaataggggttgtcaggtatgaacatgctaatgatgataagagcagtttgaaatcagatcccgaaggggaaaacatccatgctggactcctgaagaagttaaatgaactggaatctgacctaacctttaaaataggccctgagtataagagcatgaagagctgcctttatgtcggcatggcgagcgacaacgtcgatgctgctgagctcgtggagaccattgcggccacagcccgggagatagaggagaactcgaggcttctggaaaacatgacagaagtggttcggaaaggcattcaggaagctcaagtggagctgcagaaggcaagtgaagaacggcttctggaagagggggtgttgcggcagatccctgtagtgggctccgtgctgaattggttttctccggtccaggctttacagaagggaagaacttttaacttgacagcaggctctctggagtccacagaacccatatatgtctacaaagcacaaggtgcaggagtcacgctgcctccaacgccctcgggcagtcgcaccaagcagaggcttccaggccagaagccttttaaaaggtccctgcgaggttcagatgctttgagtgagaccagctcagtcagtcacattgaagacttagaaaaggtggagcgcctatccagtgggccggagcagatcaccctcgaggccagcagcactgagggacacccaggggctcccagccctcagcacaccgaccagaccgaggccttccagaaaggggtcccacacccagaagatgaccactcacaggtagaaggaccggagagcttaagatgagactcattgtgtggtttgagactgtactgagtattgtttcagggaagatgaagttctattggaaatgtgaactgtgccacatactaatataaattactgttgtttgtgcttcactgggattttggcacaaatatgtgcctgaaaggtaggctttctaggaggggagtcagcttgtctaacttcatgtacatgtagaaccacgtttgctgtcctactacgacttttccctaagttaccataaacacattttattcacaaaaaacacttcgaatttcaagtgtctaccagtagcacccttgctctttctaaacataagcctaagtatatgaggttgcccgtggcaactttttggtaaaacagcttttcattagcactctccaggttctctgcaacacttcacagaggcgagactggctgtatcctttgctgtcggtctttagtacgatcaagttgcaatatacagtgggactgctagacttgaaggagagcagtgattgtgggattgtaaataagagcatcagaagccctccccagctactgctcttcgtggagacttagtaaggactgtgtctacttgagctgtggcaaggctgctgtctgggactgtcctctgccacaaggccatttctcccattatataccgtttgtaaagagaaactgtaaagtctcctcctgaccatatatttttaaatactggcaaagcttttaaaattggcacacaagtacagactgtgctcatttctgtttagtatctgaaaacctgatagatgctacccttaagagcttgctcttccgtgtgctacgtagcacccacctggttaaaatctgaaaacaagtacccctttgacctgtctcccactgaagcttctactgccctggcagctcgcctgggcccaactcagaaacaggagccagcagagcactctctcacgctgatccagccgggcaccctgcttaagtcagtagaagctcgctggcactgcccgttcctacttttccgaagtactgcgtcactttgtcgtaagtaatggcccctgtgccttcttaatccagcagtcaagcttttgggagacctgaaaatgggaaaattcacactgggtttctggactgtagtattggaagccttagttatagtatattaagcctataattatactctgatttgatgggatttttgacatttacacttgtcaaaatgcagggggttttttttggtgcagatgattaaacagtcttccctatttggtgcaatgaagtatagcagataaaatgggggaggggtaaattatcaccttcaagaaaattacatgtttttatatatatttggaattgttaaattggttttgctgaaacatttcacccttgagatattatttgaatgttggtttcaataaaggttcttgaaattgtt

SEQ ID NO: 183855 - DNA, 2367 bp, Artificial Sequence
  derived and/or modified sequence
atggacgccagcctggagaagatcgccgaccccaccctggccgagatgggcaagaacctgaaggaggccgtgaagatgctggaggacagccagagaagaaccgaggaggagaacggcaagaagctgatcagcggcgacatccccggccccctgcagggcagcggccaggacatggtgagcatcctgcagctggtgcagaacctgatgcacggcgacgaggacgaggagccccagagccccagaatccagaacatcggcgagcagggccacatggccctgctgggccacagcctgggcgcctacatcagcaccctggacaaggagaagctgagaaagctgaccaccagaatcctgagcgacaccaccctgtggctgtgcagaatcttcagatacgagaacggctgcgcctacttccacgaggaggagagagagggcctggccaagatctgcagactggccatccacagcagatacgaggacttcgtggtggacggcttcaacgtgctgtacaacaagaagcccgtgatctacctgagcgccgccgccagacccggcctgggccagtacctgtgcaaccagctgggcctgcccttcccctgcctgtgcagagtgccctgcaacaccgtgttcggcagccagcaccagatggacgtggccttcctggagaagctgatcaaggacgacatcgagagaggcagactgcccctgctgctggtggccaacgccggcaccgccgccgtgggccacaccgacaagatcggcagactgaaggagctgtgcgagcagtacggcatctggctgcacgtggagggcgtgaacctggccaccctggccctgggctacgtgagcagcagcgtgctggccgccgccaagtgcgacagcatgaccatgacccccggcccctggctgggcctgcccgccgtgcccgccgtgaccctgtacaagcacgacgaccccgccctgaccctggtggccggcctgaccagcaacaagcccaccgacaagctgagagccctgcccctgtggctgagcctgcagtacctgggcctggacggcttcgtggagagaatcaagcacgcctgccagctgagccagagactgcaggagagcctgaagaaggtgaactacatcaagatcctggtggaggacgagctgagcagccccgtggtggtgttcagattcttccaggagctgcccggcagcgaccccgtgttcaaggccgtgcccgtgcccaacatgacccccagcggcgtgggcagagagagacacagctgcgacgccctgaacagatggctgggcgagcagctgaagcagctggtgcccgccagcggcctgaccgtgatggacctggaggccgagggcacctgcctgagattcagccccctgatgaccgccgccgtgctgggcaccagaggcgaggacgtggaccagctggtggcctgcatcgagagcaagctgcccgtgctgtgctgcaccctgcagctgagagaggagttcaagcaggaggtggaggccaccgccggcctgctgtacgtggacgaccccaactggagcggcatcggcgtggtgagatacgagcacgccaacgacgacaagagcagcctgaagagcgaccccgagggcgagaacatccacgccggcctgctgaagaagctgaacgagctggagagcgacctgaccttcaagatcggccccgagtacaagagcatgaagagctgcctgtacgtgggcatggccagcgacaacgtggacgccgccgagctggtggagaccatcgccgccaccgccagagagatcgaggagaacagcagactgctggagaacatgaccgaggtggtgagaaagggcatccaggaggcccaggtggagctgcagaaggccagcgaggagagactgctggaggagggcgtgctgagacagatccccgtggtgggcagcgtgctgaactggttcagccccgtgcaggccctgcagaagggcagaaccttcaacctgaccgccggcagcctggagagcaccgagcccatctacgtgtacaaggcccagggcgccggcgtgaccctgccccccacccccagcggcagcagaaccaagcagagactgcccggccagaagcccttcaagagaagcctgagaggcagcgacgccctgagcgagaccagcagcgtgagccacatcgaggacctggagaaggtggagagactgagcagcggccccgagcagatcaccctggaggccagcagcaccgagggccaccccggcgcccccagcccccagcacaccgaccagaccgaggccttccagaagggcgtgccccaccccgaggacgaccacagccaggtggagggccccgagagcctgagatag

SEQ ID NO: 183856 - protein, 1360 aa, Artificial Sequence
  derived and/or modified sequence
MASDSPARSLDEIDLSALRDPAGIFELVELVGNGTYGQVYKGRHVKTGQLAAIKVMDVTGDEEEEIKQEINMLKKYSHHRNIATYYGAFIKKNPPGMDDQLWLVMEFCGAGSVTDLIKNTKGNTLKEEWIAYICREILRGLSHLHQHKVIHRDIKGQNVLLTENAEVKLVDFGVSAQLDRTVGRRNTFIGTPYWMAPEVIACDENPDATYDFKSDLWSLGITAIEMAEGAPPLCDMHPMRALFLIPRNPAPRLKSKKWSKKFQSFIESCLVKNHSQRPATEQLMKHPFIRDQPNERQVRIQLKDHIDRTKKKRGEKDETEYEYSGSEEEEEENDSGEPSSILNLPGESTLRRDFLRLQLANKERSEALRRQQLEQQQRENEEHKRQLLAERQKRIEEQKEQRRRLEEQQRREKELRKQQEREQRRHYEEQMRREEERRRAEHEQEYIRRQLEEEQRQLEILQQQLLHEQALLLEYKRKQLEEQRQAERLQRQLKQERDYLVSLQHQRQEQRPVEKKPLYHYKEGMSPSEKPAWAKEVEERSRLNRQSSPAMPHKVANRISDPNLPPRSESFSISGVQPARTPPMLRPVDPQIPHLVAVKSQGPALTASQSVHEQPTKGLSGFQEALNVTSHRVEMPRQNSDPTSENPPLPTRIEKFDRSSWLRQEEDIPPKVPQRTTSISPALARKNSPGNGSALGPRLGSQPIRASNPDLRRTEPILESPLQRTSSGSSSSSSTPSSQPSSQGGSQPGSQAGSSERTRVRANSKSEGSPVLPHEPAKVKPEESRDITRPSRPASYKKAIDEDLTALAKELRELRIEETNRPMKKVTDYSSSSEESESSEEEEEDGESETHDGTVAVSDIPRLIPTGAPGSNEQYNVGMVGTHGLETSHADSFSGSISREGTLMIRETSGEKKRSGHSDSNGFAGHINLPDLVQQSHSPAGTPTEGLGRVSTHSQEMDSGTEYGMGSSTKASFTPFVDPRVYQTSPTDEDEEDEESSAAALFTSELLRQEQAKLNEARKISVVNVNPTNIRPHSDTPEIRKYKKRFNSEILCAALWGVNLLVGTENGLMLLDRSGQGKVYNLINRRRFQQMDVLEGLNVLVTISGKKNKLRVYYLSWLRNRILHNDPEVEKKQGWITVGDLEGCIHYKVVKYERIKFLVIALKNAVEIYAWAPKPYHKFMAFKSFADLQHKPLLVDLTVEEGQRLKVIFGSHTGFHVIDVDSGNSYDIYIPSHIQGNITPHAIVILPKTDGMEMLVCYEDEGVYVNTYGRITKDVVLQWGEMPTSVAYIHSNQIMGWGEKAIEIRSVETGHLDGVFMHKRAQRLKFLCERNDKVFFASVRSGGSSQVFFMTLNRNSMMNW

SEQ ID NO: 183857 - DNA, 3996 bp, Artificial Sequence
  derived and/or modified sequence
atggccagcgacagccccgccagaagcctggacgagatcgacctgagcgccctgagagaccccgccggcatcttcgagctggtggagctggtgggcaacggcacctacggccaggtgtacaagggcagacacgtgaagaccggccagctggccgccatcaaggtgatggacgtgaccggcgacgaggaggaggagatcaagcaggagatcaacatgctgaagaagtacagccaccacagaaacatcgccacctactacggcgccttcatcaagaagaacccccccggcatggacgaccagctgtggctggtgatggagttctgcggcgccggcagcgtgaccgacctgatcaagaacaccaagggcaacaccctgaaggaggagtggatcgcctacatctgcagagagatcctgagaggcctgagccacctgcaccagcacaaggtgatccacagagacatcaagggccagaacgtgctgctgaccgagaacgccgaggtgaagctggtggacttcggcgtgagcgcccagctggacagaaccgtgggcagaagaaacaccttcatcggcaccccctactggatggcccccgaggtgatcgcctgcgacgagaaccccgacgccacctacgacttcaagagcgacctgtggagcctgggcatcaccgccatcgagatggccgagggcgccccccccctgtgcgacatgcaccccatgagagccctgttcctgatccccagaaaccccgcccccagactgaagagcaagaagtggagcaagaagttccagagcttcatcgagagctgcctggtgaagaaccacagccagagacccgccaccgagcagctgatgaagcaccccttcatcagagaccagcccaacgagagacaggtgagaatccagctgaaggaccacatcgacagaaccaagaagaagagaggcgagaaggacgagaccgagtacgagtacagcggcagcgaggaggaggaggaggagaacgacagcggcgagcccagcagcatcctgaacctgcccggcgagagcaccctgagaagagacttcctgagactgcagctggccaacaaggagagaagcgaggccctgagaagacagcagctggagcagcagcagagagagaacgaggagcacaagagacagctgctggccgagagacagaagagaatcgaggagcagaaggagcagagaagaagactggaggagcagcagagaagagagaaggagctgagaaagcagcaggagagagagcagagaagacactacgaggagcagatgagaagagaggaggagagaagaagagccgagcacgagcaggagtacaagagaaagcagctggaggagcagagacaggccgagagactgcagagacagctgaagcaggagagagactacctggtgagcctgcagcaccagagacaggagcagagacccgtggagaagaagcccctgtaccactacaaggagggcatgagccccagcgagaagcccgcctgggccaaggaggtggaggagagaagcagactgaacagacagagcagccccgccatgccccacaaggtggccaacagaatcagcgaccccaacctgccccccagaagcgagagcttcagcatcagcggcgtgcagcccgccagaaccccccccatgctgagacccgtggacccccagatcccccacctggtggccgtgaagagccagggccccgccctgaccgccagccagagcgtgcacgagcagcccaccaagggcctgagcggcttccaggaggccctgaacgtgaccagccacagagtggagatgcccagacagaacagcgaccccaccagcgagaacccccccctgcccaccagaatcgagaagttcgacagaagcagctggctgagacaggaggaggacatcccccccaaggtgccccagagaaccaccagcatcagccccgccctggccagaaagaacagccccggcaacggcagcgccctgggccccagactgggcagccagcccatcagagccagcaaccccgacctgagaagaaccgagcccatcctggagagccccctgcagagaaccagcagcggcagcagcagcagcagcagcacccccagcagccagcccagcagccagggcggcagccagcccggcagccaggccggcagcagcgagagaaccagagtgagagccaacagcaagagcgagggcagccccgtgctgccccacgagcccgccaaggtgaagcccgaggagagcagagacatcaccagacccagcagacccgccagctacaagaaggccatcgacgaggacctgaccgccctggccaaggagctgagagagctgagaatcgaggagaccaacagacccatgaagaaggtgaccgactacagcagcagcagcgaggagagcgagagcagcgaggaggaggaggaggacggcgagagcgagacccacgacggcaccgtggccgtgagcgacatccccagactgatccccaccggcgcccccggcagcaacgagcagtacaacgtgggcatggtgggcacccacggcctggagaccagccacgccgacagcttcagcggcagcatcagcagagagggcaccctgatgatcagagagaccagcggcgagaagaagagaagcggccacagcgacagcaacggcttcgccggccacatcaacctgcccgacctggtgcagcagagccacagccccgccggcacccccaccgagggcctgggcagagtgagcacccacagccaggagatggacagcggcaccgagtacggcatgggcagcagcaccaaggccagcttcacccccttcgtggaccccagagtgtaccagaccagccccaccgacgaggacgaggaggacgaggagagcagcgccgccgccctgttcaccagcgagctgctgagacaggagcaggccaagctgaacgaggccagaaagatcagcgtggtgaacgtgaaccccaccaacatcagaccccacagcgacacccccgagatcagaaagtacaagaagagattcaacagcgagatcctgtgcgccgccctgtggggcgtgaacctgctggtgggcaccgagaacggcctgatgctgctggacagaagcggccagggcaaggtgtacaacctgatcaacagaagaagattccagcagatggacgtgctggagggcctgaacgtgctggtgaccatcagcggcaagaagaacaagctgagagtgtactacctgagctggctgagaaacagaatcctgcacaacgaccccgaggtggagaagaagcagggctggatcaccgtgggcgacctggagggctgcatccactacaaggtggtgaagtacgagagaatcaagttcctggtgatcgccctgaagaacgccgtggagatctacgcctgggcccccaagccctaccacaagttcatggccttcaagagcttcgccgacctgcagcacaagcccctgctggtggacctgaccgtggaggagggccagagactgaaggtgatcttcggcagccacaccggcttccacgtgatcgacgtggacagcggcaacagctacgacatctacatccccagccacatccagggcaacatcaccccccacgccatcgtgatcctgcccaagaccgacggcatggagatgctggtgtgctacgaggacgagggcgtgtacgtgaacacctacggcagaatcaccaaggacgtggtgctgcagtggggcgagatgcccaccagcgtggcctacatccacagcaaccagatcatgggctggggcgagaaggccatcgagatcagaagcgtggagaccggccacctggacggcgtgttcatgcacaagagagcccagagactgaagttcctgtgcgagagaaacgacaaggtgttcttcgccagcgtgagaagcggcggcagcagccaggtgttcttcatgaccctgaacagaaacagcatgatgaactggtag

SEQ ID NO: 183858 - DNA, 4017 bp, Artificial Sequence
  derived and/or modified sequence
atggccagcgacagccccgccagaagcctggacgagatcgacctgagcgccctgagagaccccgccggcatcttcgagctggtggagctggtgggcaacggcacctacggccaggtgtacaagggcagacacgtgaagaccggccagctggccgccatcaaggtgatggacgtgaccggcgacgaggaggaggagatcaagcaggagatcaacatgctgaagaagtacagccaccacagaaacatcgccacctactacggcgccttcatcaagaagaacccccccggcatggacgaccagctgtggctggtgatggagttctgcggcgccggcagcgtgaccgacctgatcaagaacaccaagggcaacaccctgaaggaggagtggatcgcctacatctgcagagagatcctgagaggcctgagccacctgcaccagcacaaggtgatccacagagacatcaagggccagaacgtgctgctgaccgagaacgccgaggtgaagatcgtggacttcggcgtgagcgcccagctggacagaaccgtgggcagaagaaacaccttcatcggcaccccctactggatggcccccgaggtgatcgcctgcgacgagaaccccgacgccacctacgacttcaagagcgacctgtggagcctgggcatcaccgccatcgagatggccgagggcgccccccccctgtgcgacatgcaccccatgagagccctgttcctgatccccagaaaccccgcccccagactgaagagcaagaagtggagcaagaagttccagagcttcatcgagagctgcctggtgaagaaccacagccagagacccgccaccgagcagctgatgaagcaccccttcatcagagaccagcccaacgagagacaggtgagaatccagctgaaggaccacatcgacagaaccaagaagaagagaggcgagaaggacgagaccgagtacgagtacagcggcagcgaggaggaggaggaggagaacgacagcggcgagcccagcagcatcctgaacctgcccggcgagagcaccctgagaagagacttcctgagactgcagctggccaacaaggagagaagcgaggccctgagaagacagcagctggagcagcagcagagagagaacgaggagcacaagagacagctgctggccgagagacagaagagaatcgaggagcagaaggagcagagaagaagactggaggagcagcagagaagagagaaggagctgagaaagcagcaggagagagagcagagaagacactacgaggagcagatgagaagagaggaggagagaagaagagccgagcacgagcaggagtacaagagaaagcagctggaggagcagagacaggccgagagactgcagagacagctgaagcaggagagagactacctggtgagcctgcagcaccagagacaggagcagagacccgtggagaagaagcccctgtaccactacaaggagggcatgagccccagcgagaagcccgcctgggccaaggaggtggaggagagaagcagactgaacagacagagcagccccgccatgccccacaaggtggccaacagaatcagcgaccccaacctgccccccagaagcgagagcttcagcatcagcggcgtgcagcccgccagaaccccccccatgctgagacccgtggacccccagatcccccacctggtggccgtgaagagccagggccccgccctgaccgccagccagagcgtgcacgagcagcccaccaagggcctgagcggcttccaggaggccctgaacgtgaccagccacagagtggagatgcccagacagaacagcgaccccaccagcgagaacccccccctgcccaccagaatcgagaagttcgacagaagcagctggctgagacaggaggaggacatcccccccaaggtgccccagagaaccaccagcatcagccccgccctggccagaaagaacagccccggcaacggcagcgccctgggccccagactgggcagccagcccatcagagccagcaaccccgacctgagaagaaccgagcccatcctggagagccccctgcagagaaccagcagcggcagcagcagcagcagcagcacccccagcagccagcccagcagccagggcggcagccagcccggcagccaggccggcagcagcgagagaaccagagtgagagccaacagcaagagcgagggcagccccgtgctgccccacgagcccgccaaggtgaagcccgaggagagcagagacatcaccagacccagcagacccgccgtgagcgccttcctgagcaagagcttcgagctgctgatctaccaggacctgaccgccctggccaaggagctgagagagctgagaatcgaggagaccaacagacccatgaagaaggtgaccgactacagcagcagcagcgaggagagcgagagcagcgaggaggaggaggaggacggcgagagcgagacccacgacggcaccgtggccgtgagcgacatccccagactgatccccaccggcgcccccggcagcaacgagcagtacaacgtgggcatggtgggcacccacggcctggagaccagccacgccgacagcttcagcggcagcatcagcagagagggcaccctgatgatcagagagaccagcggcgagaagaagagaagcggccacagcgacagcaacggcttcgccggccacatcaacctgcccgacctggtgcagcagagccacagccccgccggcacccccaccgagggcctgggcagagtgagcacccacagccaggagatggacagcggcaccgagtacggcatgggcagcagcaccaaggccagcttcacccccttcgtggaccccagagtgtaccagaccagccccaccgacgaggacgaggaggacgaggagagcagcgccgccgccctgttcaccagcgagctgctgagacaggagcaggccaagctgaacgaggccagaaagatcagcgtggtgaacgtgaaccccaccaacatcagaccccacagcgacacccccgagatcagaaagtacaagaagagattcaacagcgagatcctgtgcgccgccctgtggggcgtgaacctgctggtgggcaccgagaacggcctgatgctgctggacagaagcggccagggcaaggtgtacaacctgatcaacagaagaagattccagcagatggacgtgctggagggcctgaacgtgctggtgaccatcagcggcaagaagaacaagctgagagtgtactacctgagctggctgagaaacagaatcctgcacaacgaccccgaggtggagaagaagcagggctggatcaccgtgggcgacctggagggctgcatccactacaaggtggtgaagtacgagagaatcaagttcctggtgatcgccctgaagaacgccgtggagatctacgcctgggcccccaagccctaccacaagttcatggccttcaagagcttcgccgacctgcagcacaagcccctgctggtggacctgaccgtggaggagggccagagactgaaggtgatcttcggcagccacaccggcttccacgtgatcgacgtggacagcggcaacagctacgacatctacatccccagccacatccagggcaacatcaccccccacgccatcgtgatcctgcccaagaccgacggcatggagatgctggtgtgctacgaggacgagggcgtgtacgtgaacacctacggcagaatcaccaaggacgtggtgctgcagtggggcgagatgcccaccagcgtggcctacatccacagcaaccagatcatgggctggggcgagaaggccatcgagatcagaagcgtggagaccggccacctggacggcgtgttcatgcacaagagagcccagagactgaagttcctgtgcgagagaaacgacaaggtgttcttcgccagcgtgagaagcggcggcagcagccaggtgttcttcatgaccctgaacagaaacagcatgatgaactggtag

SEQ ID NO: 183859 - DNA, 4083 bp, Artificial Sequence
  derived and/or modified sequence
atggccagcgacagccccgccagaagcctggacgagatcgacctgagcgccctgagagaccccgccggcatcttcgagctggtggagctggtgggcaacggcacctacggccaggtgtacaagggcagacacgtgaagaccggccagctggccgccatcaaggtgatggacgtgaccggcgacgaggaggaggagatcaagcaggagatcaacatgctgaagaagtacagccaccacagaaacatcgccacctactacggcgccttcatcaagaagaacccccccggcatggacgaccagctgtggctggtgatggagttctgcggcgccggcagcgtgaccgacctgatcaagaacaccaagggcaacaccctgaaggaggagtggatcgcctacatctgcagagagatcctgagaggcctgagccacctgcaccagcacaaggtgatccacagagacatcaagggccagaacgtgctgctgaccgagaacgccgaggtgaagctggtggacttcggcgtgagcgcccagctggacagaaccgtgggcagaagaaacaccttcatcggcaccccctactggatggcccccgaggtgatcgcctgcgacgagaaccccgacgccacctacgacttcaagagcgacctgtggagcctgggcatcaccgccatcgagatggccgagggcgccccccccctgtgcgacatgcaccccatgagagccctgttcctgatccccagaaaccccgcccccagactgaagagcaagaagtggagcaagaagttccagagcttcatcgagagctgcctggtgaagaaccacagccagagacccgccaccgagcagctgatgaagcaccccttcatcagagaccagcccaacgagagacaggtgagaatccagctgaaggaccacatcgacagaaccaagaagaagagaggcgagaaggacgagaccgagtacgagtacagcggcagcgaggaggaggaggaggagaacgacagcggcgagcccagcagcatcctgaacctgcccggcgagagcaccctgagaagagacttcctgagactgcagctggccaacaaggagagaagcgaggccctgagaagacagcagctggagcagcagcagagagagaacgaggagcacaagagacagctgctggccgagagacagaagagaatcgaggagcagaaggagcagagaagaagactggaggagcagcagagaagagagaaggagctgagaaagcagcaggagagagagcagagaagacactacgaggagcagatgagaagagaggaggagagaagaagagccgagcacgagcaggagtacatcagaagacagctggaggaggagcagagacagctggagatcctgcagcagcagctgctgcacgagcaggccctgctgctggagtacaagagaaagcagctggaggagcagagacaggccgagagactgcagagacagctgaagcaggagagagactacctggtgagcctgcagcaccagagacaggagcagagacccgtggagaagaagcccctgtaccactacaaggagggcatgagccccagcgagaagcccgcctgggccaaggaggtggaggagagaagcagactgaacagacagagcagccccgccatgccccacaaggtggccaacagaatcagcgaccccaacctgccccccagaagcgagagcttcagcatcagcggcgtgcagcccgccagaaccccccccatgctgagacccgtggacccccagatcccccacctggtggccgtgaagagccagggccccgccctgaccgccagccagagcgtgcacgagcagcccaccaagggcctgagcggcttccaggaggccctgaacgtgaccagccacagagtggagatgcccagacagaacagcgaccccaccagcgagaacccccccctgcccaccagaatcgagaagttcgacagaagcagctggctgagacaggaggaggacatcccccccaaggtgccccagagaaccaccagcatcagccccgccctggccagaaagaacagccccggcaacggcagcgccctgggccccagactgggcagccagcccatcagagccagcaaccccgacctgagaagaaccgagcccatcctggagagccccctgcagagaaccagcagcggcagcagcagcagcagcagcacccccagcagccagcccagcagccagggcggcagccagcccggcagccaggccggcagcagcgagagaaccagagtgagagccaacagcaagagcgagggcagccccgtgctgccccacgagcccgccaaggtgaagcccgaggagagcagagacatcaccagacccagcagacccgccagctacaagaaggccatcgacgaggacctgaccgccctggccaaggagctgagagagctgagaatcgaggagaccaacagacccatgaagaaggtgaccgactacagcagcagcagcgaggagagcgagagcagcgaggaggaggaggaggacggcgagagcgagacccacgacggcaccgtggccgtgagcgacatccccagactgatccccaccggcgcccccggcagcaacgagcagtacaacgtgggcatggtgggcacccacggcctggagaccagccacgccgacagcttcagcggcagcatcagcagagagggcaccctgatgatcagagagaccagcggcgagaagaagagaagcggccacagcgacagcaacggcttcgccggccacatcaacctgcccgacctggtgcagcagagccacagccccgccggcacccccaccgagggcctgggcagagtgagcacccacagccaggagatggacagcggcaccgagtacggcatgggcagcagcaccaaggccagcttcacccccttcgtggaccccagagtgtaccagaccagccccaccgacgaggacgaggaggacgaggagagcagcgccgccgccctgttcaccagcgagctgctgagacaggagcaggccaagctgaacgaggccagaaagatcagcgtggtgaacgtgaaccccaccaacatcagaccccacagcgacacccccgagatcagaaagtacaagaagagattcaacagcgagatcctgtgcgccgccctgtggggcgtgaacctgctggtgggcaccgagaacggcctgatgctgctggacagaagcggccagggcaaggtgtacaacctgatcaacagaagaagattccagcagatggacgtgctggagggcctgaacgtgctggtgaccatcagcggcaagaagaacaagctgagagtgtactacctgagctggctgagaaacagaatcctgcacaacgaccccgaggtggagaagaagcagggctggatcaccgtgggcgacctggagggctgcatccactacaaggtggtgaagtacgagagaatcaagttcctggtgatcgccctgaagaacgccgtggagatctacgcctgggcccccaagccctaccacaagttcatggccttcaagagcttcgccgacctgcagcacaagcccctgctggtggacctgaccgtggaggagggccagagactgaaggtgatcttcggcagccacaccggcttccacgtgatcgacgtggacagcggcaacagctacgacatctacatccccagccacatccagggcaacatcaccccccacgccatcgtgatcctgcccaagaccgacggcatggagatgctggtgtgctacgaggacgagggcgtgtacgtgaacacctacggcagaatcaccaaggacgtggtgctgcagtggggcgagatgcccaccagcgtggcctacatccacagcaaccagatcatgggctggggcgagaaggccatcgagatcagaagcgtggagaccggccacctggacggcgtgttcatgcacaagagagcccagagactgaagttcctgtgcgagagaaacgacaaggtgttcttcgccagcgtgagaagcggcggcagcagccaggtgttcttcatgaccctgaacagaaacagcatgatgaactggtag

SEQ ID NO: 183860 - DNA, 3996 bp, Artificial Sequence
  derived and/or modified sequence
atggcgtccgactcacccgcccggtcccttgacgaaatcgatcttagtgctcttcgggatcccgcaggtatcttcgagctcgtggaattggtcggaaatggtacctatggacaggtttacaagggccgtcacgtgaaaactggccaactcgctgctatcaaggtgatggacgtcaccggggacgaagaagaggagatcaagcaggaaataaacatgctgaaaaagtactcccatcatcgaaatatcgcaacatattacggggcatttattaagaaaaacccgccaggtatggatgaccagctctggctagttatggaattttgcggagccgggtctgttaccgatttaattaaaaacacaaaagggaatacactcaaagaggagtggattgcttacatttgtagagagatcctccgaggattgtcacacctgcatcagcataaagtgattcatagggatattaaagggcaaaatgtccttctgactgagaatgcggaggtgaagctagtggactttggagtgtcagcgcagctggatcgtacagtaggaagacgtaatacctttatcggcacaccttactggatggcgcccgaggttatagcttgtgacgaaaatcctgacgccacttacgacttcaagtccgacctgtggagcctgggcataacagcgatcgagatggccgaaggagcaccaccgttgtgtgacatgcatcccatgcgggccctgttcctgataccacgcaatcctgctccacgattaaagagcaaaaagtggtccaaaaagttccaaagtttcattgagtcctgtctggtgaagaatcactcgcagcgcccagcgaccgagcagctgatgaagcacccatttatccgtgatcaacccaatgagcggcaggtccgtatccagttgaaggaccatattgatagaacaaaaaaaaagaggggagagaaggacgagacagaatatgaatacagcggctcagaagaggaggaggaggaaaacgacagcggcgaacctagctcgatcctcaacctgccaggcgaatctaccttacggcgggactttttacgcctgcaactcgctaataaagagcggtcagaggccttacgcaggcagcagcttgaacagcagcagcgtgagaatgaagaacacaagcgtcaactgctcgctgaacggcagaaacgaattgaggagcagaaggaacagcgacgcagactcgaagaacagcagcggagagaaaaagagctgagaaaacagcaggagcgagaacagcgcagacattacgaagagcaaatgcggcgcgaggaggaacgtaggcgggccgagcacgaacaggagtacaaaagaaagcagctcgaagagcaacgccaggcagagcgcctgcagcgccagctcaagcaggaaagggattatctagtgagcctgcagcatcagcgccaggagcagcgccctgttgagaaaaagcctttgtaccactataaagagggcatgagcccaagcgaaaaaccagcgtgggctaaagaggtggaggagaggagcaggcttaaccgccagtccagccccgcgatgcctcataaggtcgccaaccgcatttccgaccccaatctgccacccaggtctgaatcattctcgattagcggcgtgcagcccgctcgcacccctccaatgctccggcctgtggacccacagataccccatctggttgcagtgaagagtcagggccccgcactgactgcttcccagtccgtgcatgaacagcccacgaaggggttatcaggcttccaggaagctctgaatgtcacttcccatcgcgtcgaaatgccccgacagaatagtgatcctacatcagaaaatccccccctgcctacacgcattgagaaatttgatcggagttcctggctgcgtcaggaagaggatatcccacctaaggttccgcagcgcactacgtccattagccctgctctggctaggaagaactctcccgggaacgggtccgctctggggccacgattgggctcacaacctattagggccagtaacccagacctaaggcgcacggaacccattttggagtctcctctgcagcgaacttctagcggctcctctagttcaagtagcacgccctccagccagccttcatcccagggcgggtcccagccagggtcgcaggccggcagttctgagagaacgagagttagggccaacagtaagtccgagggctccccggtgctcccccacgaaccagctaaggtgaaacccgaggagtcccgggatattacccgcccgtcgagacctgcttcatataagaaggcaatagatgaagatctgactgccctggcaaaggaattgcgggagttacgcatcgaagagaccaaccgccctatgaaaaaagtcacagactactccagctcctcagaagagtctgaatcttctgaagaagaggaagaggacggcgaatctgagacacacgacggaacagttgcagtgagcgacatcccccggctgattcccactggagctccagggtctaatgaacagtacaacgtcggcatggtgggcactcatggccttgaaacctctcatgccgatagtttcagcggatctatctccagggaagggaccttgatgattagagaaacctccggggaaaaaaagcggagcggacactctgactcaaacggtttcgccgggcacattaacttgcctgatctggtccagcagtcacatagccccgctggcactcctacagaagggctgggccgggtgagcacccattcccaagaaatggactcaggcacagagtatggaatggggagctccaccaaggcttcatttaccccttttgtggacccccgagtttaccagacaagtccaacggacgaagacgaagaagacgaggagtcatccgctgccgcactgttcacttctgagctccttcggcaagagcaggctaaattgaatgaggccagaaaaatctctgtggtcaacgtgaatcctaccaatatacgcccgcacagcgacaccccagaaattagaaagtataaaaaacggtttaactcagaaatattgtgcgctgcgttgtggggagtgaatctgctggtaggaactgaaaacggtctcatgctgctcgataggtctgggcagggaaaggtttacaatctaataaacaggagacgcttccagcagatggacgtgctcgaaggcctaaatgtgctggtaaccattagcgggaaaaagaataaactgcgggtctattatctgtcttggctacgaaatcgaatcctgcacaacgatccggaagtcgaaaagaaacagggctggataaccgtgggtgacctggagggctgcattcattacaaggtggtcaaatacgaaaggattaaatttttggtaatagcgctcaagaacgccgtagaaatatatgcttgggcaccaaaaccgtatcataaattcatggccttcaagtccttcgctgatttgcagcataagccgctcctggtggatctgactgtagaggagggccagagattgaaagttatattcggttctcacaccggatttcatgtgatagacgttgactccggcaattcttacgatatctacattccttcacatatacaagggaacatcaccccccacgcaatcgtgattctgcccaaaaccgatgggatggagatgctcgtctgttatgaagacgagggggtgtacgtgaatacgtatgggagaatcacgaaggatgtggtactgcagtggggagaaatgcccacatctgtcgcctatattcatagcaaccaaattatgggctggggcgaaaaggccatcgagatcagaagcgttgaaactggtcacttggacggcgtttttatgcacaaaagggctcagagactgaaattcctgtgtgaacgaaatgataaggtgttttttgcgagcgttaggtccggcggctctagccaggttttttttatgacactaaacagaaacagtatgatgaactggtag

SEQ ID NO: 183861 - DNA, 4017 bp, Artificial Sequence
  derived and/or modified sequence
atggccagtgacagccccgccagatcattggacgagattgacctctccgctctgagggaccctgccggaatctttgaacttgtggaactcgtcgggaacgggacctacgggcaagtatacaaagggcgccacgtcaagacaggccagctcgcagccattaaggtcatggacgtcacaggcgatgaggaggaggaaattaagcaggaaatcaacatgttgaagaaatacagccatcaccgcaacatcgcaacatattacggcgcattcattaagaagaatcctcctggtatggatgaccagctgtggctcgtgatggaattctgtggggccggcagtgtgacagatttgatcaagaataccaaagggaatactctgaaggaagaatggatagcctatatttgcagggagatcttgcgcggcctgtcacacttgcatcagcacaaggtgatccatcgcgacatcaaaggacagaacgtgctgctgacagagaatgcagaagtaaaaattgtcgattttggagttagtgctcagttggaccggaccgttggcaggaggaacacgttcataggtaccccttattggatggcacccgaggtgatcgcttgtgacgaaaatcccgatgccacctacgactttaaaagtgatctgtggtccctgggaattactgccatcgaaatggccgagggcgcgccaccactgtgtgacatgcaccctatgcgggcactgttcttgattcctagaaatccagccccgaggctgaaaagcaagaaatggagcaaaaaatttcagtccttcatcgagagttgccttgtgaagaatcactcacaacgtccagcgactgagcagctcatgaagcaccccttcataagggaccagcccaatgaaaggcaggtgcggattcaactgaaggaccatatcgatagaactaagaagaaaagaggcgaaaaagatgaaactgagtacgagtactcaggctccgaggaggaggaggaggagaatgatagcggagaaccgagctcgatactcaatttgcctggtgaatcgaccctgcgtagggacttcctacggctccagttggccaacaaggaacggtctgaggccttgagaaggcaacagttggaacagcaacagagagagaatgaggaacacaaaaggcagctcctggccgaaaggcagaaacgcattgaggagcagaaggagcaacggaggaggctggaagagcagcagcgtcgggagaaagaactaaggaagcagcaggagcgggagcaaaggagacattacgaggaacaaatgagaagagaagaagaacggaggagggctgagcacgagcaggaatataaacgcaagcagctggaagagcagcgccaggcagagagacttcagagacagctcaagcaggagcgggactatctggtgtccctgcagcatcagcggcaagagcagaggccagtggagaagaagcctttgtaccactataaagagggcatgagccccagcgaaaaacctgcgtgggcaaaggaagtggaagagcgctcacgcctgaaccgtcaatcatctccggcaatgccacacaaggtggccaacaggatttctgatccaaacttgcccccacgctctgagtccttcagcatctctggtgtgcaacccgccagaacaccccccatgctgcggccagtggatccccaaatcccgcacctggtcgccgtcaaaagtcagggcccagccctgaccgcttcacagtccgtccacgagcagccaacaaagggactatccggattccaagaggcccttaacgtgacaagccaccgtgtggaaatgcctcgacagaactcagatcccactagcgaaaatccgccgttgccaaccagaattgagaaatttgatcgctccagctggctgagacaggaagaggacatcccgccaaaggtacctcagcgcactacaagtattagtccagctttagctcgcaagaactcccccgggaacgggtccgccttaggaccaaggctaggaagccaacctatcagggcatccaacccagaccttcggcggacagagccaatcctcgaaagccccctgcagaggacttccagtggctcctcttcttcctcaagcaccccgtcatcccagccctcctcacaagggggctcacagccgggaagtcaggcaggatcctcagagcgtacacgcgtgcgagccaactcaaagagcgagggatctcccgtgttaccccacgagcctgctaaggtgaagccagaagagagccgagatataacacgcccctctagacccgcggtctcggcatttctgagcaaatctttcgagctacttatttatcaggatctgaccgccctcgctaaagaacttcgcgaactcagaatcgaggagactaatcgaccgatgaagaaagtgactgactatagcagctctagcgaagaatccgagagtagcgaggaagaagaggaagacggcgaaagtgagacccacgacggcactgtagccgttagcgacattcccaggctgataccaactggggcgcctggaagtaatgagcagtataatgtaggcatggtcggaactcacggtctggaaacatcacatgcagatagcttctctggtagtatttctagggaagggacactgatgatcagggagacgtctggagaaaagaagcgcagcggacactcagatagcaacggattcgctgggcacattaatctgcctgacctggtacagcagtctcacagcccagccggcaccccaactgaaggtctgggaagggtgtctacccattcacaagagatggattctggcactgagtatggcatgggatcttcaacgaaagcatccttcacgccctttgtggatccgcgtgtgtaccagacttcacctaccgatgaagatgaggaagacgaggaatccagcgccgccgcactctttacgtccgagctattgaggcaggaacaggcaaagctaaacgaggcccgaaaaattagcgtggtgaatgtgaaccctacgaacattagaccccattccgatactccagagattcgtaagtacaagaaacgcttcaatagcgagatcctgtgtgctgcactctggggcgtgaatctgttggtgggcacagaaaatgggttaatgctcttggatagaagtggtcaggggaaagtctacaatttgataaatcggcggcgctttcagcagatggacgtgttggagggactaaacgtcttagtcacgattagcggaaaaaagaacaagctacgagtgtattatctgtcttggttaaggaatcgcattttgcacaacgaccctgaggtggagaaaaagcagggctggatcacggtgggcgatttggaaggctgcatccactacaaggtagtgaagtatgagaggattaagtttctggttatagctttaaaaaacgccgtggaaatctatgcttgggcccctaaaccataccataagttcatggcattcaaatcattcgccgatctccagcacaaaccactgctagtggacctgactgtggaagagggtcagcgtctcaaagtcatttttggcagccatactgggtttcacgtgattgacgtggactctggaaatagctacgacatctatataccttcccacatccagggcaatatcactcctcatgccatcgtgatcttacctaaaaccgatggaatggaaatgctggtgtgctatgaagatgaaggagtttatgttaatacctatggaagaatcacgaaggatgtggttttacagtggggcgaaatgcccaccagcgtggcttacatccactccaaccaaatcatggggtggggagagaaggcaatagagatcaggtctgtggagactggacatttggacggggtattcatgcacaagcgggctcagagactgaaattcctatgtgagcgaaatgacaaagtgtttttcgccagcgttcgatcgggaggcagctcgcaggtgttctttatgactctcaatagaaattcaatgatgaactggtag

SEQ ID NO: 183862 - DNA, 4083 bp, Artificial Sequence
  derived and/or modified sequence
atggcgtctgactcacccgcgaggagcttggatgaaatcgacctgtcagctttacgagaccctgcaggaatattcgagctcgtagaattagtagggaatgggacctacggccaagtgtacaaggggcggcacgtgaagaccggacagctggccgctattaaggttatggacgtgaccggagatgaagaagaagaaattaaacaggagattaacatgctaaaaaagtactcccaccacaggaacattgcaacctattacggcgcctttattaaaaaaaaccctccgggcatggacgaccagctatggctggttatggagttctgcggggccggatccgtcaccgacctgataaaaaacactaagggcaacaccttaaaagaggagtggatcgcctacatttgtagagagatattgcggggccttagtcatctgcatcagcacaaggtgatccaccgtgatattaaaggtcagaacgtcctccttacagaaaacgcagaggtgaagcttgtcgatttcggagtatccgcgcaattagatagaaccgtgggacggcgcaacactttcataggtaccccctactggatggcccctgaggtcatcgcctgcgacgagaaccctgacgcgacctacgatttcaagtccgacctgtggagcctgggcatcactgcaattgagatggccgaaggagccccgcccctgtgcgatatgcatccgatgcgagccctcttcttaattccccgtaaccccgcccctcgccttaagtccaagaaatggtctaagaaatttcagagctttatcgagtcttgcctcgtaaaaaatcactcccagcgacccgcaactgagcaactcatgaagcacccttttatccgggaccaacccaacgagcgtcaggtccggatacaactgaaagatcacattgacagaacaaagaaaaagagaggcgagaaggatgaaaccgagtacgagtattccggatctgaagaagaagaggaggagaatgactcgggtgaaccatcctcaattctcaacctacccggggaatccaccctgaggcgtgacttcttgcggttgcagctggcaaacaaagagagatccgaagcactgcgcagacagcagcttgaacagcagcagcgagagaacgaagaacataagaggcagctgctggccgagcgccagaagcggatcgaagagcagaaggagcagcgccggcgtctggaggagcaacagcgccgggagaaagagctcagaaaacaacaggagagagagcagcggaggcactacgaagaacagatgcgtagggaagaagaacggcgccgcgccgagcatgaacaggagtatatccgcaggcaacttgaggaggagcagaggcagctggagattctccagcagcagctcctgcacgagcaggcacttctgctcgagtacaagcgcaagcagttagaggagcagcgacaggccgagcgtttgcagaggcagctgaagcaagaacgggattatcttgtctctctgcagcaccagcgccaggaacagagacctgtggagaagaaaccactgtaccactacaaagaaggcatgagcccttctgaaaagcctgcctgggccaaagaagtggaggaacgatcccgcttgaatcggcagagttctcccgcgatgcctcacaaagtggccaatcgcatctccgatcccaacctgcctccacgctccgaaagttttagtatctccggcgtacaacccgctcgaactcccccaatgttacgtcccgtcgaccctcaaatcccgcacctggtagccgttaagtcccaggggcccgccttaacagcatcccagtctgtccatgaacagcccacgaagggactttccggtttccaggaagctttgaacgtgacatcgcatagagtggagatgccgcgacagaattccgatccaacaagcgagaatccacctttgcctacacgcatcgagaaatttgaccggtcgagctggctgcgccaggaggaggacattccccccaaggtgccccagcggaccacttcgattagccccgccctagctcggaagaatagtccaggtaacggtagcgcactgggccctcgtctgggatcgcaacccattcgggctagcaacccagatctgagacgaacggaacctatcctcgaatctcctttacaacggactagctcgggcagctccagcagctcaagcacccccagttctcagccctcctcgcagggaggcagtcagccaggttctcaagcaggctctagcgagcggactcgagtgagggctaattctaagtcggagggttcccccgtgctcccgcatgagccggctaaagtgaagcctgaggaaagccgcgacataaccaggccctccagacctgcctcttacaagaaggctatcgacgaagacctgacagctttggccaaggaactgagggagctgcgcattgaagaaacaaaccgccctatgaagaaagtgactgactattcctccagcagcgaagagagcgaaagctctgaagaggaggaagaggacggcgagagcgaaacacacgacgggaccgtggctgtcagcgacattcccaggctgataccaacaggcgccccaggaagtaatgagcaatataatgtgggaatggtgggcacccatggactggagaccagccacgccgacagcttctcaggaagcatatctcgagagggaactctcatgatccgggaaaccagcggcgaaaaaaagcgctctggccacagtgacagcaatgggtttgcgggccacataaatcttcccgacttagtgcagcaatcccatagccctgctggaacgccgactgaaggactcgggagagtgtcaactcacagccaggaaatggacagcggtacagagtatggcatgggtagttccacaaaggccagtttcaccccgtttgtggaccctagggtctatcagacctctcccacagatgaagacgaggaggatgaagaatcatctgcggctgccctgttcaccagtgaactgctacggcaggagcaggccaaattaaacgaggcaagaaagatctccgttgtgaatgtaaacccaacaaatattcgcccccatagtgataccccggagattagaaagtacaagaaacggtttaattcggaaatcctgtgtgctgccctgtggggcgtgaacctgctggtcggcactgaaaacggccttatgctcctcgaccggagcggccagggcaaggtgtacaacctaattaacaggagacggtttcagcagatggatgtgcttgagggcctcaatgtcctggtcactatctccggcaagaagaacaagcttagggtctattatctttcatggctgagaaatagaattctgcacaacgacccagaggtagaaaaaaagcagggatggataaccgtgggagatttagaaggatgcatccactataaggttgtaaagtatgaaaggatcaaatttctggtgatcgcactgaaaaatgcagtggaaatttacgcctgggcaccaaaaccctatcacaagttcatggcatttaaatctttcgcagaccttcagcacaagccactccttgtggacctcactgtggaggaggggcagagactgaaggttatcttcggtagtcacacagggttccatgtcatcgatgtcgactccggcaacagttacgatatctatatcccaagccatattcagggaaacataacgccacatgcaatagtgatattacctaaaaccgatgggatggagatgctcgtgtgctacgaggatgaaggcgtttacgtgaatacttacgggcggattactaaggacgtcgtcctgcagtggggagaaatgccaacatcagtagcatatatccattccaaccagatcatgggttggggcgagaaagcgatcgagatcaggagcgtggagactggccatcttgacggagtatttatgcataaacgcgcgcagagactgaagtttctttgcgagagaaatgataaggtcttcttcgcatccgtgaggagtggtgggtcatctcaggtcttcttcatgacattaaatagaaatagtatgatgaattggtag

SEQ ID NO: 183863 - DNA, 3996 bp, Artificial Sequence
  derived and/or modified sequence
atggccagtgacagccctgcccggagcctggatgaaattgacctgagcgccctgcgggaccctgctggcatctttgagctggtggagctggtgggcaatggcacctacggccaggtgtacaagggccgccacgtgaagacaggccagctggccgccatcaaggtgatggatgtgactggagatgaggaggaggagatcaagcaggagatcaacatgctgaagaagtacagccaccacaggaacatcgccacctactacggggccttcatcaagaagaaccccccaggcatggatgaccagctgtggctggtgatggagttctgtggggccggctctgtgacagacctgatcaagaacaccaagggcaacaccctgaaggaggagtggatcgcctacatctgccgggagatcctgcggggcctgagccacctgcaccagcacaaggtgatccaccgggacatcaagggccagaatgtgctgctgacagaaaatgctgaggtgaagctggtggactttggagtgtctgcccagctggacagaacagtgggcagaagaaacaccttcatcggcaccccctactggatggcccctgaggtgattgcctgtgatgagaacccagatgccacctatgacttcaagagtgacctgtggagcctgggcatcacagccatcgagatggccgagggcgccccacccctgtgtgacatgcaccccatgagggccctcttcctgatccccagaaatcctgccccccggctgaagagcaagaagtggagcaagaagttccagagcttcatcgagagctgcctggtgaagaaccacagccagaggcctgccacagagcagctgatgaagcaccccttcatccgggaccagcccaatgaaaggcaggtgcgcatccagctgaaggaccacatcgacaggaccaagaagaagagaggagagaaggatgaaacagaatatgagtacagcggcagcgaggaggaggaggaggagaatgattctggagagcccagcagcatcctgaacctgcctggagagagcaccctgcggcgggacttcctgcggctgcagctggccaacaaggagaggtctgaggccctgcggcggcagcagctggagcagcagcagagagaaaatgaggagcacaagaggcagctgctggccgagcggcagaagagaattgaggagcagaaggagcagaggcggcggctggaggagcagcagaggcgggagaaggagctgaggaagcagcaggagcgggagcagaggaggcactatgaggagcagatgaggcgggaggaggagcggcggcgggcagagcacgagcaggagtacaagaggaagcagctggaggagcagaggcaggccgagcggctgcagaggcagctgaagcaggagcgggactacctggtgtccctgcagcaccagaggcaggagcagaggcctgtggagaagaagcccctgtaccactacaaggagggcatgagccccagcgagaagccagcctgggccaaggaggtggaggagaggagccggctgaaccggcagagcagccctgccatgccccacaaggtggccaaccgcatcagtgaccccaacctgccccccaggtctgagagcttcagcatctctggagtgcagcctgcccggaccccacccatgctgcggcctgtggacccccagatcccccacctggtggccgtgaagagccagggccctgccctgacagccagccagagcgtgcatgagcagcccaccaagggcctgagcggcttccaggaggccctgaatgtgaccagccaccgggtggagatgccccggcagaacagcgaccccaccagcgagaacccccccctgcccacccgcatcgagaagtttgacaggagctcctggctgcggcaggaggaggacatcccccccaaggtgccccagaggaccaccagcatcagccctgccctggccaggaagaacagccctggaaatggcagcgccctgggcccccggctgggcagccagcccatccgggccagcaacccagacctgcggaggacagagcccatcctggagagccccctgcagaggaccagcagcggcagcagcagcagcagcagcacccccagcagccagcccagcagccagggcggcagccagcccggcagccaggccggcagcagcgagaggaccagggtgcgggccaacagcaagtctgagggcagccctgtgctgccccatgagcccgccaaggtgaagccagaggagagccgggacatcacccggcccagcaggcctgccagctacaagaaggccattgatgaggacctgacagccctggccaaggagctgcgggagctgagaattgaggagaccaaccggcccatgaagaaggtgacagactacagcagcagcagcgaggagagcgagagcagcgaggaggaggaggaggatggagagagcgagacccatgatggcaccgtggccgtgtctgacatccccaggctcatccccactggagcccctggcagcaatgagcagtacaacgtgggcatggtgggcacccacggcctggagaccagccatgctgacagcttcagcggcagcatcagccgggagggcaccctgatgatccgggagaccagcggggagaagaagaggagcggccacagcgacagcaatggatttgctggccacatcaacctgcctgacctggtgcagcagagccacagccctgctggcacccccacagagggcctgggccgggtgtccacccacagccaggagatggacagcggcacagaatatggcatgggcagcagcaccaaggccagcttcaccccatttgtggacccccgggtgtaccagaccagccccacagatgaagatgaagaagatgaggagagcagcgctgctgccctcttcaccagcgagctgctgcggcaggagcaggccaagctgaatgaggccaggaagatctctgtggtgaatgtgaaccccaccaacatccggccccacagcgacaccccagagatcaggaagtacaagaagcgcttcaacagcgagatcctgtgtgccgccctgtggggcgtgaacctgctggtgggcacagaaaatggcctgatgctgctggacagaagtggccagggcaaggtgtacaacctgatcaacagaagacgcttccagcagatggatgtgctggagggcctgaatgtgctggtgaccatcagcggcaagaagaacaagctgcgggtgtactacctgtcctggctgaggaaccgcatcctgcacaatgaccctgaggtggagaagaagcagggctggatcaccgtgggggacctggagggctgcatccactacaaggtggtgaagtatgagcgcatcaagttcctggtgattgccctgaagaatgctgtggagatctatgcctgggcccccaagccctaccacaagttcatggccttcaagagctttgctgacctgcagcacaagcccctgctggtggacctgactgtggaggagggccagaggctgaaggtgatcttcggcagccacacaggcttccacgtgattgatgtggacagcggcaacagctatgacatctacatccccagccacatccagggcaacatcaccccccacgccatcgtcatcctgcccaagacagatggcatggagatgctggtgtgctatgaagatgaaggagtgtatgtgaacacctacggccgcatcaccaaggatgtggtgctgcagtggggcgagatgcccacctctgtggcctacatccacagcaaccagatcatgggctggggcgagaaggccatcgagatccgctctgtggagaccggccacctggatggagtcttcatgcacaagagggcccagaggctgaagttcctgtgtgaaagaaatgacaaggtgttctttgcctctgtgcgcagcggcggcagcagccaggtgttcttcatgaccctgaacagaaattccatgatgaactggtag

SEQ ID NO: 183864 - DNA, 4017 bp, Artificial Sequence
  derived and/or modified sequence
atggccagtgacagccctgcccggagcctggatgaaattgacctgagcgccctgcgggaccctgctggcatctttgagctggtggagctggtgggcaatggcacctacggccaggtgtacaagggccgccacgtgaagacaggccagctggccgccatcaaggtgatggatgtgactggagatgaggaggaggagatcaagcaggagatcaacatgctgaagaagtacagccaccacaggaacatcgccacctactacggggccttcatcaagaagaaccccccaggcatggatgaccagctgtggctggtgatggagttctgtggggccggctctgtgacagacctgatcaagaacaccaagggcaacaccctgaaggaggagtggatcgcctacatctgccgggagatcctgcggggcctgagccacctgcaccagcacaaggtgatccaccgggacatcaagggccagaatgtgctgctgacagaaaatgctgaggtgaagatcgtggactttggagtgtctgcccagctggacagaacagtgggcagaagaaacaccttcatcggcaccccctactggatggcccctgaggtgattgcctgtgatgagaacccagatgccacctatgacttcaagagtgacctgtggagcctgggcatcacagccatcgagatggccgagggcgccccacccctgtgtgacatgcaccccatgagggccctcttcctgatccccagaaatcctgccccccggctgaagagcaagaagtggagcaagaagttccagagcttcatcgagagctgcctggtgaagaaccacagccagaggcctgccacagagcagctgatgaagcaccccttcatccgggaccagcccaatgaaaggcaggtgcgcatccagctgaaggaccacatcgacaggaccaagaagaagagaggagagaaggatgaaacagaatatgagtacagcggcagcgaggaggaggaggaggagaatgattctggagagcccagcagcatcctgaacctgcctggagagagcaccctgcggcgggacttcctgcggctgcagctggccaacaaggagaggtctgaggccctgcggcggcagcagctggagcagcagcagagagaaaatgaggagcacaagaggcagctgctggccgagcggcagaagagaattgaggagcagaaggagcagaggcggcggctggaggagcagcagaggcgggagaaggagctgaggaagcagcaggagcgggagcagaggaggcactatgaggagcagatgaggcgggaggaggagcggcggcgggcagagcacgagcaggagtacaagaggaagcagctggaggagcagaggcaggccgagcggctgcagaggcagctgaagcaggagcgggactacctggtgtccctgcagcaccagaggcaggagcagaggcctgtggagaagaagcccctgtaccactacaaggagggcatgagccccagcgagaagccagcctgggccaaggaggtggaggagaggagccggctgaaccggcagagcagccctgccatgccccacaaggtggccaaccgcatcagtgaccccaacctgccccccaggtctgagagcttcagcatctctggagtgcagcctgcccggaccccacccatgctgcggcctgtggacccccagatcccccacctggtggccgtgaagagccagggccctgccctgacagccagccagagcgtgcatgagcagcccaccaagggcctgagcggcttccaggaggccctgaatgtgaccagccaccgggtggagatgccccggcagaacagcgaccccaccagcgagaacccccccctgcccacccgcatcgagaagtttgacaggagctcctggctgcggcaggaggaggacatcccccccaaggtgccccagaggaccaccagcatcagccctgccctggccaggaagaacagccctggaaatggcagcgccctgggcccccggctgggcagccagcccatccgggccagcaacccagacctgcggaggacagagcccatcctggagagccccctgcagaggaccagcagcggcagcagcagcagcagcagcacccccagcagccagcccagcagccagggcggcagccagcccggcagccaggccggcagcagcgagaggaccagggtgcgggccaacagcaagtctgagggcagccctgtgctgccccatgagcccgccaaggtgaagccagaggagagccgggacatcacccggcccagcaggcctgctgtgtctgccttcctgagcaagagctttgagctgctgatctaccaggacctgacagccctggccaaggagctgcgggagctgcgcatcgaggagaccaaccggcccatgaagaaggtgacagactacagcagcagcagcgaggagagcgagagcagcgaggaggaggaggaggatggagagagcgagacccatgatggcaccgtggccgtgtctgacatccccaggctcatccccaccggggcccctggcagcaatgagcagtacaacgtgggcatggtgggcacccacggcctggagaccagccacgccgacagcttcagcggcagcatcagccgggagggcaccctgatgatccgggagaccagcggggagaagaagaggagcggccacagcgacagcaatggatttgctggccacatcaacctgcctgacctggtgcagcagagccacagccctgctggcacccccacagagggcctgggccgggtgtccacccacagccaggagatggattctggaacagaatatggcatgggcagcagcaccaaggccagcttcaccccatttgtggacccccgggtgtaccagaccagccccacagatgaagatgaggaggatgaggagagcagcgctgctgccctcttcaccagcgagctgctgcggcaggagcaggccaagctgaatgaggccaggaagatctctgtggtgaatgtgaaccccaccaacatccggccccacagcgacaccccagagatcaggaagtacaagaagcgcttcaacagcgagatcctgtgtgccgccctgtggggcgtgaacctgctggtgggcacagaaaatggcctgatgctgctggacaggagcggccagggcaaggtgtacaacctgatcaacagaagacgcttccagcagatggatgtgctggagggcctgaatgtgctggtgaccatcagcggcaagaagaacaagctgcgggtgtactacctgtcctggctgaggaaccgcatcctgcacaatgaccctgaggtggagaagaagcagggctggatcaccgtgggggacctggagggctgcatccactacaaggtggtgaagtatgaaagaatcaagttcctggtgattgccctgaagaatgctgtggagatctatgcctgggcccccaagccctaccacaagttcatggccttcaagagctttgctgacctgcagcacaagcccctgctggtggacctgactgtggaggagggccagaggctgaaggtgatcttcggcagccacacaggcttccacgtgattgatgtggacagcggcaacagctatgacatctacatccccagccacatccagggcaacatcacccctcatgccatcgtcatcctgcccaagacagatggcatggagatgctggtgtgctatgaagatgagggcgtgtatgtgaacacctacggccgcatcaccaaggatgtggtgctgcagtggggcgagatgcccacctctgtggcctacatccacagcaaccagatcatgggctggggcgagaaggccatcgagatccgctctgtggagaccggccacctggatggagtcttcatgcacaagagggcccagaggctgaagttcctgtgtgaaagaaatgacaaggtgttctttgcctctgtgcgcagcggcggcagcagccaggtgttcttcatgaccctgaacagaaacagcatgatgaactggtag

SEQ ID NO: 183865 - DNA, 4083 bp, Artificial Sequence
  derived and/or modified sequence
atggccagtgacagccctgcccggagcctggatgaaattgacctgagcgccctgcgggaccctgctggcatctttgagctggtggagctggtgggcaatggcacctacggccaggtgtacaagggccgccacgtgaagacaggccagctggccgccatcaaggtgatggatgtgactggagatgaggaggaggagatcaagcaggagatcaacatgctgaagaagtacagccaccacaggaacatcgccacctactacggggccttcatcaagaagaaccccccaggcatggatgaccagctgtggctggtgatggagttctgtggggccggctctgtgacagacctgatcaagaacaccaagggcaacaccctgaaggaggagtggatcgcctacatctgccgggagatcctgcggggcctgagccacctgcaccagcacaaggtgatccaccgggacatcaagggccagaatgtgctgctgacagaaaatgctgaggtgaagctggtggactttggagtgtctgcccagctggacagaacagtgggcagaagaaacaccttcatcggcaccccctactggatggcccctgaggtgattgcctgtgatgagaacccagatgccacctatgacttcaagagtgacctgtggagcctgggcatcacagccatcgagatggccgagggcgccccacccctgtgtgacatgcaccccatgagggccctcttcctgatccccagaaatcctgccccccggctgaagagcaagaagtggagcaagaagttccagagcttcatcgagagctgcctggtgaagaaccacagccagaggcctgccacagagcagctgatgaagcaccccttcatccgggaccagcccaatgaaaggcaggtgcgcatccagctgaaggaccacatcgacaggaccaagaagaagagaggagagaaggatgaaacagaatatgagtacagcggcagcgaggaggaggaggaggagaatgattctggagagcccagcagcatcctgaacctgcctggagagagcaccctgcggcgggacttcctgcggctgcagctggccaacaaggagaggtctgaggccctgcggcggcagcagctggagcagcagcagagagaaaatgaggagcacaagaggcagctgctggccgagcggcagaagagaattgaggagcagaaggagcagaggcggcggctggaggagcagcagaggcgggagaaggagctgaggaagcagcaggagcgggagcagaggaggcactatgaggagcagatgaggcgggaggaggagcggcggcgggcagagcacgagcaggagtacatccggcggcagctggaggaggagcagaggcagctggagatcctgcagcagcagctgctgcacgagcaggccctgctgctggagtacaagaggaagcagctggaggagcagaggcaggccgagcggctgcagaggcagctgaagcaggagcgggactacctggtgtccctgcagcaccagaggcaggagcagaggcctgtggagaagaagcccctgtaccactacaaggagggcatgagccccagcgagaagccagcctgggccaaggaggtggaggagaggagccggctgaaccggcagagcagccctgccatgccccacaaggtggccaaccgcatcagtgaccccaacctgcccccaagaagtgagagcttcagcatcagcggcgtgcagcctgcccggaccccacccatgctgcggcctgtggacccccagatcccccacctggtggccgtgaagagccagggccctgccctgacagccagccagagcgtgcatgagcagcccaccaagggcctgagcggcttccaggaggccctgaatgtgaccagccaccgggtggagatgccccggcagaacagcgaccccaccagtgaaaatccacccctgcccaccagaattgagaagtttgacaggagctcctggctgcggcaggaggaggacatcccccccaaggtgccccagaggaccaccagcatcagccctgccctggccaggaagaacagccctggaaatggaagtgccctgggcccccggctgggcagccagcccatccgggccagcaacccagacctgcggaggacagagcccatcctggagagccccctgcagaggaccagcagcggcagcagcagcagcagcagcacccccagcagccagcccagcagccagggcggcagccagcccggcagccaggccggcagcagcgagaggaccagggtgcgggccaacagcaagtctgagggcagccctgtgctgccccatgagcccgccaaggtgaagccagaggagagccgggacatcacccggcccagcaggcctgccagctacaagaaggccattgatgaggacctgacagccctggccaaggagctgcgggagctgcgcatcgaggagaccaaccggcccatgaagaaggtgacagactacagcagcagcagcgaggagagcgagagcagcgaggaggaggaggaggatggagagagcgagacccatgatggcaccgtggccgtgtctgacatccccaggctcatccccaccggggcccctggcagcaatgagcagtacaacgtgggcatggtgggcacccacggcctggagaccagccacgccgacagcttcagcggcagcatcagccgggagggcaccctgatgatccgggagaccagcggggagaagaagaggagcggccacagcgacagcaatggatttgctggccacatcaacctgcctgacctggtgcagcagagccacagccctgctggcacccccacagagggcctgggccgggtgtccacccacagccaggagatggattctggaacagaatatggcatgggcagcagcaccaaggccagcttcaccccatttgtggacccccgggtgtaccagaccagccccacagatgaagatgaggaggatgaggagagcagcgctgctgccctcttcaccagcgagctgctgcggcaggagcaggccaagctgaatgaggccaggaagatctctgtggtgaatgtgaaccccaccaacatccggccccacagcgacaccccagagatcaggaagtacaagaagcgcttcaacagcgagatcctgtgtgccgccctgtggggcgtgaacctgctggtgggcacagaaaatggcctgatgctgctggacaggagcggccagggcaaggtgtacaacctgatcaacagaagacgcttccagcagatggatgtgctggagggcctgaatgtgctggtgaccatcagcggcaagaagaacaagctgcgggtgtactacctgtcctggctgaggaaccgcatcctgcacaatgaccctgaggtggagaagaagcagggctggatcaccgtgggggacctggagggctgcatccactacaaggtggtgaagtatgaaagaatcaagttcctggtgattgccctgaagaatgctgtggagatctatgcctgggcccccaagccctaccacaagttcatggccttcaagagctttgctgacctgcagcacaagcccctgctggtggacctgactgtggaggagggccagaggctgaaggtgatcttcggcagccacacaggcttccacgtgattgatgtggacagcggcaacagctatgacatctacatccccagccacatccagggcaacatcacccctcatgccatcgtcatcctgcccaagacagatggcatggagatgctggtgtgctatgaagatgagggcgtgtatgtgaacacctacggccgcatcaccaaggatgtggtgctgcagtggggcgagatgcccacctctgtggcctacatccacagcaaccagatcatgggctggggcgagaaggccatcgagatccgctctgtggagaccggccacctggatggagtcttcatgcacaagagggcccagaggctgaagttcctgtgtgaaagaaatgacaaggtgttctttgcctctgtgcgcagcggcggcagcagccaggtgttcttcatgaccctgaacagaaacagcatgatgaactggtag

SEQ ID NO: 183866 - DNA, 3996 bp, Artificial Sequence
  derived and/or modified sequence
atggccagcgacagccccgcccggagcctggacgagatcgacctgtccgccttacgggatcccgccggcatatttgagcttgtagaactcgtgggcaacggaacctacggacaggtctacaaaggccgacatgtgaagacggggcaactggctgcgatcaaagtgatggacgtgacaggggacgaggaggaggagatcaagcaagagattaacatgttaaagaagtactcccaccaccggaacattgccacctactacggcgcgtttatcaaaaagaatcctccgggtatggacgaccagctatggttggtgatggagttctgcggcgccggctctgttacagacctaattaagaacaccaaaggtaatacccttaaggaagaatggattgcctatatctgcagagagatcttgcgcggccttagccacttgcatcaacataaggttatccatcgggatatcaaaggacagaacgtcttgctcaccgagaatgctgaagtgaaactggtggacttcggggtgtcagctcagttggaccggacagtcgggcggagaaatacattcataggaactccatactggatggcaccagaggtgatagcgtgtgacgagaaccctgatgctacgtatgatttcaagtcagatctgtggagcctgggcatcaccgccattgaaatggccgaaggggcacccccattatgcgatatgcatcctatgcgcgccctgttcctaattccaagaaaccccgctcctagacttaaatctaaaaagtggtccaaaaagttccagtcctttatcgaatcctgtctagtgaagaaccactcacagaggcccgccactgaacaactcatgaagcacccatttattcgggatcagcctaacgaacgccaggtcaggatccagctcaaagaccacatcgatcgtaccaaaaagaagcggggggaaaaggatgagactgaatacgagtactctggaagcgaagaagaggaggaggagaatgattccggagaacctagttcgattttgaacctacccggcgagtcaacactcaggcgtgactttttaagacttcaactggcgaacaaggaacggagcgaagctcttaggagacaacagctggagcagcaacagagagagaatgaagagcacaagcggcagctgctcgccgaaaggcagaagaggatagaagagcagaaggagcaaagacgcagattggaagaacaacagcgaagagagaaggagcttcggaaacagcaggaacgcgagcaaaggcgccattacgaagagcagatgcggagggaagaggaacgacgaagggcggagcatgagcaggagtacaagagaaaacaactggaggaacaaagacaggccgaaaggcttcagaggcagctgaagcaggagcgcgactatctcgtgagtctccaacaccagcgacaggagcagcgtcctgtcgaaaagaagcccctataccactacaaagagggcatgagtcccagcgagaaaccggcgtgggcgaaagaggtagaggagcgtagccgactcaataggcagagcagtccagccatgcctcacaaggtggcgaataggatctctgatcctaatctcccacctcgctctgaatcattttctataagcggggttcagcccgctaggacacccccaatgttgagacccgtggaccctcaaataccccatttggttgcggtgaaatcacagggtcctgcacttacagcatctcaaagcgtgcatgagcagcccactaaaggactgagcggcttccaggaagctctaaacgttacgtcacatcgtgtggaaatgccaagacaaaattccgaccccacctccgaaaatccgcccttaccaactcgaatcgaaaaattcgaccggagtagttggcttaggcaggaggaggacattccacccaaggttccgcagaggacaacttctatctcccccgccctggctcgcaagaattcccctgggaacggtagtgcactggggcccagactgggctcacagccgatccgcgcgagtaacccagacctgaggagaacggagcctatcctggagtctccattgcagcggaccagtagcgggtcatcgtcttcctccagcactccttcttctcagccaagctcccagggtggaagccaacctgggtctcaggccggctccagtgagcggaccagggtacgcgcaaactccaagtccgagggcagccctgtcttgcctcacgaacctgcaaaggtaaagcccgaggagagtagggacatcactcggcccagcagacctgccagctacaagaaggccatagacgaagatctgaccgctctggcgaaggaacttagggagctccggattgaggagaccaacagacccatgaaaaaggtaacggactattccagctcgtctgaagagtctgagtcatccgaggaagaagaagaggacggggagtcagaaacccacgatggaaccgtggccgtttctgacattcccagactcatcccgaccggtgctcccggctccaacgaacagtacaatgtgggaatggtcggtacccacggtctcgagacaagccatgccgacagtttcagcgggtccatatcccgggaggggaccctcatgatcagggagacaagcggggaaaaaaaacgaagtggacactctgatagtaatggattcgcagggcacattaatcttcctgacctggttcagcagtctcattcaccagcagggacacctacagaggggctgggcagggtgtccacacactcacaggagatggactccggtacagagtatggcatggggtcatctacaaaagcctctttcaccccatttgtggacccacgtgtgtatcaaacttcaccaacggacgaagacgaggaggatgaagagagctcggccgcagccctattcacgtccgaattgctacgacaagagcaggccaagcttaacgaggcccggaaaatctcagtggtcaatgttaatccaacaaatatcagaccccactctgatacacctgaaattcgtaaatacaagaagcggtttaactcagaaatactgtgcgccgctctctggggggtgaaccttcttgtcggcaccgagaacgggcttatgctcctggaccgcagcggtcaggggaaagtgtacaacctgatcaatcgacgcaggttccaacagatggatgttctagagggcctcaatgtgctggtgactatatcaggcaagaaaaacaagcttcgtgtctactacctgagctggctgagaaacagaatactgcataacgaccctgaggtggagaaaaaacagggctggatcacagtcggcgatctagagggctgcatccactacaaggtggttaagtacgagaggattaaattcctcgtgattgccctgaaaaacgccgtggagatttatgcttgggcaccaaagccctaccacaaatttatggcgtttaagtctttcgcagatcttcaacataagcccttgctggtggatctgactgtggaagagggccagaggctgaaggttatatttggttcccatacaggcttccacgtgatcgacgttgattcagggaatagctatgacatctatataccctcccacattcaaggtaatattaccccacatgccattgttattctcccaaaaaccgatggcatggagatgctggtgtgttatgaagacgagggagtatatgtcaacacatatgggcggattaccaaggatgtagtccttcagtggggggaaatgccaaccagtgtggcttacatccacagtaaccagatcatgggatggggggagaaagcgatcgagattcggagtgtggaaacgggacacctggatggggtgttcatgcataaacgggcacaaagactcaaattcctgtgtgaaaggaacgacaaggttttctttgcaagcgttcgcagcggaggatctagtcaggtgttttttatgaccctgaatagaaacagtatgatgaattggtag

SEQ ID NO: 183867 - DNA, 4017 bp, Artificial Sequence
  derived and/or modified sequence
atggccagcgacagccccgcccggagcctggacgagatcgacctgtccgctctgagagatcccgctggcattttcgaattagtggagttagtgggaaacgggacttacgggcaagtctacaagggtcgccatgtgaagaccggtcagctggcggcaatcaaagtgatggatgtgaccggggacgaggaggaagagatcaaacaggaaatcaacatgcttaagaagtattctcaccatagaaatattgcgacttactatggtgctttcattaagaagaatccgcctggcatggatgatcagctatggctcgtgatggaattctgcggagccgggagcgtgaccgatttaataaagaatacgaagggcaacacattaaaagaagagtggattgcttacatatgtcgagaaattttgcgcggactatcacatctgcaccagcataaagtgattcatcgcgatatcaaggggcagaacgtgctcctgaccgaaaacgcagaggtgaagatcgtagattttggggtgagtgcccagctggatcggactgtggggcgcagaaatacgttcatcggaaccccctactggatggcaccagaggtgatcgcctgcgatgaaaatccagacgctacttacgacttcaaaagcgacctttggagtttaggcatcaccgcaattgagatggccgagggggctcctcccctctgcgacatgcatcctatgcgcgcactgttcctcatcccccgcaaccccgctccacggctgaagtcaaaaaaatggtcaaagaagttccagtcattcatcgaatcctgcctggtgaaaaaccactcccagagaccagccaccgagcaattgatgaaacacccctttatccgcgaccagcctaatgaacggcaagttcggatacagctgaaagaccatatagatcggactaaaaagaaacgtggagaaaaggatgagactgagtatgaatactccggatcagaggaagaggaagaggaaaacgacagcggagaaccctcgtcgatcctgaatctacctggggaaagtaccctccgccgcgattttttgcggcttcaactggctaacaaggaacgcagtgaagctctcagacgccagcagttagagcaacagcagcgcgaaaacgaagagcataaaaggcaactccttgctgagcggcagaaacgaatagaggaacagaaggaacagcgcaggcgattggaggagcagcagaggcgcgaaaaggaacttcggaagcagcaagagcgcgagcagcggaggcattatgaagagcagatgcgaagggaagaagaacggcgacgcgccgagcatgaacaggagtacaaacgtaaacaactcgaggagcagcgccaggctgagcgtctccagcggcagctgaagcaggagcgggattatctggttagtcttcaacaccaaagacaagagcagaggccagtagagaaaaaacccttgtatcattacaaagaaggtatgagcccttcagaaaaacctgcctgggccaaggaagtcgaagagcggagcaggctgaacaggcagtcatcacctgcaatgcctcacaaggtggccaacaggatctctgaccccaatctgcctcctcggtccgagagcttctcaatttctggcgtgcagcctgctcgtactcctcctatgctgagaccagtggatccacaaatcccacacttagtagccgtgaagagccagggacctgccctaacagcatctcagtccgtccacgagcagccaactaaaggactgtctggcttccaagaggccctcaatgtcacgtcccatcgggtagagatgccaaggcagaatagtgaccccacaagtgagaatccccccctgcccacacggatcgagaagtttgataggagttcctggctgaggcaggaagaggacatccctccaaaggttcctcagcgcaccacgtcgataagtcctgccctggctagaaagaatagccctggcaatgggagcgcccttgggccaagactcggttctcagcccatcagggcaagtaatccagatctgcgacgtactgagcccattctggagtctccacttcagcgtacgagctcaggttcgagttcgtcctcctccacacctagcagccaaccaagcagtcaaggaggctcccagcctgggtcacaagccggaagctcagagcgcacgagggtgagagcgaatagtaaatcagaagggagcccagtcttgcctcatgagcccgctaaagtgaaacctgaggaatcacgggatatcactaggccatctcgaccagcagtatctgctttcctctcgaaaagctttgaattgttaatctatcaggatttgaccgcattggccaaagagcttcgagagctgaggatcgaagaaactaacaggcctatgaagaaggtgacggactactcttcctcctcagaggaaagtgagtcctcggaagaggaggaggaagacggcgagtcagaaactcatgacggaaccgtggccgtgtctgacatcccaagactgatccccactggcgcgcctggatcgaatgagcagtacaacgttggcatggtgggaactcatggtctggaaacctcccatgcagacagcttctccgggagcatcagccgcgaaggcaccctaatgataagagagacttcgggcgaaaagaagcggagcggccactcagactccaatggattcgctgggcatatcaacttgccggatctcgtccaacaatcccacagtccagctggtacacccaccgagggattaggcagggtgtcaacacattcacaggagatggatagtgggacagagtatggcatgggaagtagcaccaaagcgagttttaccccgttcgttgatccaagagtatatcagacatcgcccaccgacgaagacgaggaggacgaagagtcttcagccgcagccctgtttactagtgagctgctcaggcaggagcaggcaaagcttaatgaggctcgcaagattagcgtcgtgaatgtcaaccctaccaatatccggccccactcagacacccccgagatcagaaaatataagaagcggttcaattcggagatactatgcgcagccttgtggggcgtcaatctacttgtgggtacggagaatggcctaatgctcctcgataggtcagggcagggaaaagtttataacttaatcaacaggcgtcggtttcaacagatggacgtgctagaaggactcaacgtgctagtgacaatcagcgggaaaaagaacaaactgcgagtgtattacttatcttggttgaggaacagaatcctccacaacgaccccgaggtcgaaaagaagcagggctggatcaccgtcggggacctcgaagggtgcatccactataaagtcgtcaagtatgaacgaatcaagttcctggtgattgctctgaaaaatgccgtggagatctatgcctgggcacctaagccttaccacaaattcatggcttttaagtctttcgccgatttacagcataagccactgctggtagacctcacagtggaggaagggcagagactaaaggtcatatttggcagccacactggatttcacgtgatcgatgtggacagtgggaactcatatgacatctacatacctagccacatccagggtaatattactccacacgcaatcgtgatcttaccaaaaacagacggcatggagatgttggtgtgttatgaggacgaaggagtatatgtcaacacatacggaagaatcacaaaagacgttgtcctacagtggggtgagatgccaacctcagtggcttatatccactccaatcagattatgggctggggcgagaaagcgattgagatcaggtccgttgaaactggccacctggacggagtgttcatgcacaaacgggcgcagagactcaaattcctgtgtgagagaaacgacaaagtgttttttgcttctgtccggagcggtggatctagtcaagtgtttttcatgactttaaatcggaactcgatgatgaattggtag

SEQ ID NO: 183868 - DNA, 4083 bp, Artificial Sequence
  derived and/or modified sequence
atggccagcgacagccccgcccggagcctggacgagatcgacctgtctgccctgagagacccagctggaatcttcgagctcgtggagctggttggaaacggcacctatggccaggtgtacaaaggccgccatgtgaaaactggccagctcgctgctattaaagtgatggatgtgaccggggacgaggaggaagaaataaagcaagaaattaacatgctcaagaaatattctcaccataggaatattgccacatactacggagcatttatcaaaaagaatcctcccggtatggacgaccaactctggctggtcatggagttttgtggggccggcagtgtcaccgacctcatcaaaaataccaaaggaaataccctcaaagaagagtggatcgcgtatatatgtcgagagatcctgaggggtttatcccacctgcaccagcataaagttatccaccgtgatattaaaggccagaacgtgctacttaccgaaaacgccgaagtaaagctggtggactttggagttagtgcgcagttagataggaccgtgggacggcgcaacaccttcattgggacaccatattggatggcccctgaggtaatagcttgcgatgaaaaccccgatgcgacctatgattttaagagcgatctgtggtccctgggtattaccgccatagagatggccgagggagctccccccctgtgtgacatgcatcccatgagggctctgttcttgattccacggaacccggctcctagactaaagtctaagaagtggtcaaagaagtttcagtccttcatcgagtcatgtctggtgaagaaccacagccagcgaccagccaccgagcaactgatgaaacacccattcatccgagatcaacctaatgagaggcaggtccggatccaattaaaagaccatattgacaggacaaagaagaagcggggggagaaggatgaaactgagtacgagtactctggatcagaggaggaggaagaagaaaacgattccggagaaccaagcagcatcctcaatttgcccggcgagtctaccctcaggagagacttccttaggctgcagctcgcgaataaagagaggtccgaggcactgcgcaggcagcagctggagcagcagcagcgcgagaatgaagaacataaaagacagctgttagccgaacggcagaagcgcatcgaagagcaaaaagagcagaggcgtcgcctggaggaacagcagcggagggagaaagaactgcgcaaacagcaagagagggagcagcggaggcactacgaggagcagatgaggcgagaggaggaaaggcgcagggcagagcacgagcaagaatacataagaagacaattggaggaggaacaacgtcaactggagatcttacagcaacaattactgcacgaacaggccctcctgctggaatataagcgaaaacagttggaagagcagcggcaggcggagagactgcagcgccagctgaaacaagagcgagactatcttgtgagcttgcagcaccagcgccaagaacagcgacctgtggagaaaaaacccctgtaccactataaggagggcatgtctccaagtgagaaaccagcgtgggccaaagaagtggaagagcgatcacggctgaatagacagagctctccagctatgccccacaaggtagcaaatcgcatctccgaccccaatctcccccctcggtctgagtctttttccatcagcggagttcagcctgcgagaaccccccctatgctgcgaccggtcgacccacaaattccacacctggtcgccgtcaagtctcaagggccagccctgacagcctcccagagcgttcacgagcaaccaacaaaagggctgtccggcttccaggaggcgcttaacgtgacaagccaccgggttgagatgcctagacagaactcagaccctacgtcagagaacccacctctgcccacccggatcgagaagttcgatagaagttcttggctccgccaggaggaagatattcccccgaaggtgccacagcggactacctccatttcccctgcactggcgaggaagaattcgcccggaaatgggtctgcactgggcccacgccttggctcgcaacccatacgggcttcgaaccccgatttgcgcagaaccgagcccatcctggaatctccactgcaacggacaagcagtggttcgagctccagcagctccaccccatcttctcagccctcgtcccagggcggtagccaaccgggctctcaagccggaagtagcgaaagaacacgtgtgcgagctaatagcaaatccgaaggctctcctgttctacctcacgagccagccaaagtgaaacccgaagagagtcgggacatcactcgcccatcccggcccgccagctataaaaaagctatagacgaagatttaactgcactcgcaaaggaacttcgcgaactccgcattgaggagaccaacagacccatgaaaaaagtgaccgactactcttcatccagcgaggaatctgaaagttctgaggaagaagaagaggatggagaatctgagactcacgacggcaccgtggccgttagcgacattccaagactcataccaacaggtgccccgggttccaatgaacagtacaatgtgggtatggtcgggactcatgggttggaaacttcccatgccgactcattttccggcagtatcagccgcgagggcaccctcatgattagggaaacgagcggagagaagaagcgttcggggcattccgatagcaacggcttcgcaggtcatattaacctccctgacttggtgcaacagtcccacagccctgctgggacacctacagagggattggggcgagtgtcaacccactcccaggagatggacagcggcaccgagtacggcatggggtcctccaccaaagctagttttactcccttcgttgacccaagggtctatcagacttcacctaccgacgaggacgaggaggacgaagaaagttccgccgctgccctcttcacgtccgaattgctcagacaagagcaggcaaaacttaacgaggctcggaagatttccgtggttaacgtgaatccaaccaacatccgcccgcattccgatactcccgagataaggaagtataaaaagcgctttaattctgagatcctttgcgctgctctgtggggggtaaatctactggtgggtactgagaatggcctaatgttactggacagatctggtcaagggaaggtttataatctgattaatcgcaggcggttccagcaaatggacgtcctagaggggctgaatgttttggtgacaattagcggcaaaaaaaacaaactaagggtatattacctctcttggctacggaatcggattctccacaatgatcccgaggtcgagaaaaagcagggttggattacagtaggagacttagaaggatgtatccactacaaggtggtgaagtatgaaaggatcaaattcctggtgatcgctttgaaaaatgctgtggaaatatacgcctgggctcctaagccctatcacaagttcatggcatttaagagcttcgccgacctccagcacaagccgctgctcgtagacctgacagttgaagagggacaaagattgaaggttatttttggctctcatactggctttcacgtcatcgacgtggatagcgggaactcatatgatatatacatcccttctcacatccaggggaacatcacacctcatgccatcgtaatccttcccaaaacggacggtatggaaatgttagtgtgctacgaggatgagggcgtttatgtgaatacatacggaaggatcacaaaagatgtagtccttcagtggggtgaaatgcccacatctgtggcttatatccattccaaccagattatgggttggggtgaaaaggccatcgaaatcagaagtgtggagaccggccacctcgacggcgtctttatgcacaagcgggcccagcgcctaaagtttctctgtgaaaggaacgataaagtgttctttgcgagcgtgcgttctggcggctcgagccaggtctttttcatgacccttaatcgtaattccatgatgaactggtag

SEQ ID NO: 183869 - DNA, 3996 bp, Artificial Sequence
  derived and/or modified sequence
atggcatcagattcgccagccagatccttggacgagatagatctaagcgcactgcgcgatccagcagggattttcgagcttgttgagctggtcgggaatggcacatatggccaggtctacaagggcagacacgtgaaaacaggccaattggccgcaatcaaggtcatggacgtgaccggcgacgaagaggaagaaattaagcaagagattaacatgcttaaaaagtattcgcaccaccggaacatagctacgtactacggagccttcataaagaaaaacccccctgggatggacgatcaactgtggcttgtcatggaattttgcggagccggatccgtgactgacctaataaagaatacgaaggggaacaccctgaaggaggaatggattgcttatatctgccgtgaaattctgagagggctcagtcacctgcaccagcacaaagtaattcaccgggacattaaagggcaaaatgttctgcttactgagaacgccgaggtcaaactggtagacttcggtgtctccgcacagctggacaggacagtgggccgacgcaacaccttcatcgggactccctattggatggctcccgaggtgattgcgtgcgacgagaatcctgacgccacatacgattttaaaagcgacttatggagcctaggcatcacagcaattgagatggccgagggagctcccccactgtgcgatatgcaccctatgcgcgctctgttcttaatccctcgcaaccccgcacctcgcttaaagtccaaaaagtggagcaagaagtttcagtctttcattgagtcctgtctggttaagaaccattctcagcgaccagccaccgagcagctgatgaaacaccccttcatcagggatcagccgaacgagagacaagtacgcatacagctcaaagatcacatcgacaggacaaagaagaaacggggtgaaaaggatgagacagaatacgagtactcaggtagtgaggaggaggaagaggaaaacgacagcggagagccttcatccatactgaatctgccaggtgagagcaccctgaggagagacttcctcagactacagctggcaaacaaagagcgcagcgaagctcttaggcgacagcagttagagcagcagcagcgcgaaaacgaagagcataaacggcagttactggcagagcgacagaagcgaattgaagaacagaaggagcagaggcgacgcctcgaggaacagcaacgacgcgagaaggagttacggaagcagcaggagagggaacagcggaggcactacgaagaacagatgcggagggaagaggaacgtagaagggccgaacacgaacaggagtacaaaaggaaacagctggaagagcagcgacaggccgaacggctgcagcggcagctgaagcaggagagagattacctcgtttcactacagcaccagcgccaggaacaacgcccagtcgaaaagaagcctctgtaccactacaaggagggcatgtcaccaagtgagaaacccgcatgggctaaagaagtggaggagagatcacggctgaaccgccagtcctcccccgcaatgccccataaggttgccaaccgcatatccgatcctaatcttcctcctcggtcagaatccttctctatatctggggtgcagcctgcgcgaaccccgcctatgctcagacctgtggaccctcaaattcctcacctggtcgctgtgaaatcacaggggccagcattaactgcctcacagtctgtgcacgagcaaccaacaaaaggactgagcggcttccaagaggcactgaatgtcaccagccatagggtggagatgcccagacagaacagcgacccaacaagcgagaatccgcctctgcccaccaggattgaaaagttcgacagatccagctggctgcgccaggaagaggacattccacccaaagtgcctcagagaaccactagcatctctccggctttggccaggaagaacagtccagggaatggctccgccctagggccaagacttgggagccagcccatccgggcaagcaacccggacctgcggagaaccgagccgattctggagagcccactacagaggacctcttcagggtcatctagctcatctagcacgccctcttcccagccgagttctcagggcggaagtcagccagggagccaagctgggagctccgaaaggacccgtgtcagggccaattccaagtccgagggaagtccagtgctaccccacgagcccgcaaaagtaaaaccagaagagagtcgggacatcaccagaccaagcaggccagcctcctacaaaaaagccatagatgaagatctgaccgcactggccaaggaactacgggaactgaggattgaagagactaataggcccatgaaaaaagtcacagattattcctcatcatcagaagagtcagaatcaagtgaggaagaagaggaagatggcgagagcgagactcacgacggcacagttgccgtctccgatatcccaagactgatccctacgggcgctcctggatccaatgagcaatacaacgtggggatggtgggaactcatggcctcgaaaccagccacgccgacagcttcagcggcagcatctctcgggagggcactcttatgatccgggagacctccggtgagaaaaagaggtccggccatagtgactctaacgggttcgctggtcacattaacctcccagacctggtgcaacagtcccactcacccgctggaacgcccaccgaggggcttgggagagtgagtactcatagccaggaaatggattctgggacagaatacgggatggggagctctaccaaagccagctttacaccattcgtggacccccgagtgtaccagacttcaccaacggatgaggatgaggaggatgaggagagtagcgcggcagctttgtttacttcagagctgctgcggcaggagcaggctaaactgaatgaagctagaaagataagcgtagttaatgtaaatccaactaatataaggccgcatagcgacacccccgagatcagaaaatataaaaaaaggtttaactcggaaatcttgtgcgcagctctgtggggggtcaatctgttggtggggacagagaatggcctgatgctgttagatcgctcaggccagggcaaagtgtataatctcattaatcgcaggcgctttcagcagatggatgtgcttgagggtctgaacgttctggtgaccataagtggaaagaaaaataagctgagggtttattatctcagctggttgagaaaccgcattctccataatgatcctgaggtggagaagaaacaaggctggatcacggtgggggatctggaggggtgcattcactataaagtagtcaaatacgagcgcatcaaatttctggtgattgccctaaaaaacgcagtggagatctacgcgtgggctcccaagccctaccacaagttcatggccttcaaatccttcgctgacctccagcacaagcctttgttggttgatctgactgtcgaggagggccagaggctgaaagtcatcttcgggtctcatactggcttccatgtaatagatgtcgactcaggaaattcttacgatatatatatcccgtctcacattcagggcaatatcacacctcatgctattgtgattctcccaaaaacagatggcatggaaatgctcgtttgctacgaagacgagggcgtttacgtgaacacatatggacgtatcaccaaagacgtcgtgcttcagtggggtgagatgcctacatccgtggcctacattcacagcaaccaaataatgggttggggcgagaaggcaatcgagatcaggtccgtcgagactggacacttggacggggtctttatgcacaagagagcccagcgacttaagttcctgtgtgagcgcaacgacaaggtatttttcgcatccgtccgctctgggggttcgtcccaggtgttctttatgacactgaatagaaatagcatgatgaactggtag

SEQ ID NO: 183870 - DNA, 4017 bp, Artificial Sequence
  derived and/or modified sequence
atggccagtgactctcctgccaggtccctggatgaaattgacttatcagctctccgggaccccgctgggatctttgaactggtggagctggtcgggaatggcacatatgggcaggtgtacaagggcaggcatgtcaagacaggacagcttgctgcgataaaggttatggatgtaaccggtgatgaagaggaggagattaagcaggagattaacatgcttaaaaaatactcccaccacagaaatatcgcaacctactatggcgctttcataaagaaaaatccacctggaatggatgatcagctgtggctcgttatggagttctgtggagctgggagcgttactgacctgatcaagaacaccaagggcaacacactgaaggaagaatggatcgcctacatctgcagggaaatcctgagggggctgtcacacttgcatcagcataaagtgatccacagggacattaaaggccagaatgtgctgctgacagaaaatgccgaggttaaaatagttgactttggcgtctctgctcagctggaccgaactgtggggagaaggaacacatttatcggcactccatattggatggcccctgaggtcatcgcctgcgacgaaaatcctgacgcgacctatgatttcaagtcagacctgtggagcctgggcatcacagctatcgagatggcagagggcgcacccccactttgtgatatgcatcccatgcgcgcactgtttctgattcctaggaaccctgcgcctagactcaagagcaagaaatggtctaagaaattccagagttttatcgaatcttgcctagtcaagaaccactcccaaagacctgccaccgagcagctgatgaagcacccatttattagagaccaaccgaacgagagacaggtccggatacagctgaaagaccacatcgacagaaccaagaagaagagaggagagaaggacgaaacagagtatgagtattcaggttcagaggaggaagaagaggaaaatgacagcggagaaccctccagcatcctgaacctccctggcgagtccacccttcgaagagatttcctgcgcctccagttggctaataaggagaggtccgaggcactgcgccgacaacagctcgaacagcagcagagagaaaacgaagagcacaagcggcagctactggcggagcgccagaaacggattgaggagcagaaggagcaacggagacgactagaggagcagcagcgccgagagaaggagctgcgaaaacaacaggaacgcgagcaacggcgacactacgaagagcaaatgcgacgggaggaggagaggagacgcgctgaacacgaacaggagtacaagaggaagcaactggaagagcagcgccaagcggaacgcctgcagcgacagctgaagcaggagcgcgactatttggtgtcactgcagcaccagagacaggagcagcggcctgtggaaaagaaaccactataccactacaaggaggggatgtccccatctgaaaagcccgcttgggctaaggaggtggaggagcgtagccgccttaacagacaaagttctcccgcaatgcctcataaggtcgccaaccgtatttctgacccaaacctgcccccacggagcgaaagtttcagtattagtggggtgcagccagcaaggacaccaccgatgctgcgcccagttgatccacagatccctcacttagtggcagtgaaatcacagggcccagccctgaccgcctcccagtctgttcatgagcagccaacaaaggggctgagcggattccaggaagcactaaacgttacaagccatagggtggaaatgcctcgccagaacagcgatcctacctcagagaacccccctctgcccacaaggatcgagaaattcgataggtcatcttggctcaggcaggaggaggatattccccctaaggtcccccagcggaccaccagcatttctcctgctctcgccagaaaaaacagtcctggaaacggctcggccttgggccctcgcctcgggtcacaacctatcagagccagtaatcctgatctgcgccgtaccgagcccatattggagagcccactgcagcggacctctagtggtagttcctcttcatcctccactccgtcctcccagcctagttcccagggcggaagccagcccggaagccaggctggcagctcagagaggacccgcgttagggccaattcaaagtcagaggggtctccagtactgcctcacgagccggctaaggtgaaacccgaggaaagcagggatatcacgcgaccttcaaggcccgctgtaagtgcatttctgagcaagagtttcgaactgctgatctatcaggacttaacagcgcttgccaaagaactgcgcgaactaaggatcgaagaaacaaacaggccgatgaagaaagtgaccgactactctagctcgtcagaggagagcgagtcctccgaagaagaagaagaggatggagagtccgaaacccacgatgggaccgtagccgtgagcgacatacctagactgattcccaccggcgcacccggatcaaatgagcagtacaatgtggggatggtgggtacccacggactcgagacctcacatgcagatagcttctccggctcgatcagtcgtgaaggcactcttatgatccgagaaaccagcggagaaaaaaagaggagcgggcatagcgactctaatggatttgcaggccacattaatttgcccgatctggtgcagcaatctcactcacctgcaggcacgcccacagagggtttagggagagtgagtacacactcccaggagatggacagtggtactgagtatggaatgggaagctccactaaagcgagtttcacgccgtttgtcgacccacgggtgtatcagactagcccaaccgatgaggatgaagaagacgaggagagctccgcggcagccctgtttacaagcgaactgttacgccaggaacaggccaagcttaatgaagcaaggaagatctctgtggtgaacgtgaatccgaccaatattcggccacatagcgacaccccggaaattcgcaaatataagaagcgcttcaactctgagatcctgtgcgctgcattatggggtgtcaatctcctcgtgggaacagagaacggcctgatgttattggataggagtggacagggaaaagtgtacaacctaatcaaccgtagaaggttccagcagatggatgtcctggaaggccttaacgtcttggtgacaatttccggcaaaaaaaacaaactgcgcgtgtactatctgtcatggctccgcaaccggatattacacaacgatcctgaagtggaaaaaaagcaagggtggataacagtcggagatttggagggttgcatccactacaaagtcgtcaagtacgagagaattaaattcctcgtgatagccctgaagaacgccgtggagatatatgcctgggctccaaagccttaccataagtttatggcttttaagagtttcgcagatctccagcacaaacctcttctcgtagatctaaccgtggaggagggccagcggctcaaagttattttcggttcccacactggttttcacgtgatcgacgtggatagtggcaatagttacgacatttatatcccctctcatatccagggcaacataacaccccatgcaattgtcatccttcccaagaccgacggtatggaaatgttggtctgttacgaggatgaaggcgtgtacgttaacacctacggacggatcacaaaggacgttgtgcttcagtggggggaaatgcctacaagcgtggcttacattcattctaaccaaattatgggctggggggaaaaagcaatcgaaatcaggtctgtggagacaggtcatctggatggtgttttcatgcacaagagagcacagcgactgaaatttctgtgcgaaaggaatgacaaagtgtttttcgccagtgtccggagcggcggatcctcccaggtatttttcatgactcttaaccgtaactctatgatgaactggtag

SEQ ID NO: 183871 - DNA, 4083 bp, Artificial Sequence
  derived and/or modified sequence
atggcatcggatagccctgcacggagcttagacgaaatcgatctgtccgccttaagggacccagccggaatcttcgagctcgtcgaactggttggcaacgggacgtatggacaggtttacaaggggcgacacgtgaagacagggcagctcgcagccataaaagtcatggacgtaaccggcgatgaggaagaggagattaagcaggagattaatatgcttaaaaaatacagccatcaccggaacatagcaacgtactacggagcttttataaagaaaaacccccctggtatggatgaccagctctggttggttatggagttctgtggggctggcagcgttaccgacctcattaagaataccaagggaaacactctgaaagaggaatggatagcctacatatgcagggagattctgagggggctgagccacctccaccaacacaaagtgattcatagagatattaaaggacagaacgtcctgcttacagaaaacgctgaggtcaagcttgtcgattttggcgtgagcgcgcagcttgaccggacagtgggacgccgtaacacctttattggcaccccttattggatggccccagaggtgattgcatgcgacgagaaccctgacgctacatatgatttcaaatcggatctctggtcactgggaataactgccattgaaatggccgagggagcgcctcctctttgcgatatgcatcccatgcgggctctgttcctgatccctcggaacccggctccacggctgaaaagtaaaaaatggtcaaagaaattccagtcattcattgaatcctgtctcgttaagaatcacagtcaacgccctgccaccgaacagctcatgaaacacccctttatcagggatcagccaaacgagcgccaggtgagaatacagctcaaggatcatattgatagaacaaaaaagaaaagaggagaaaaggacgagactgagtacgagtacagtggatccgaagaagaggaggaggaaaacgatagcggagagccttcttccattcttaatctgcctggggagagtacattaagacgcgacttcttaaggctgcagttggcaaacaaagagagaagcgaggctctgaggcgtcagcaactagagcaacagcaacgcgagaacgaggagcacaaaaggcagcttttggcggagagacagaaaagaatcgaagaacagaaggaacagaggagacgcctcgaggaacagcagaggagagagaaagagttgcgcaagcagcaggagcgcgagcagagaagacactatgaggaacagatgcgtagggaagaagaacggaggcgcgctgagcacgaacaagagtacataaggcggcagctggaggaagagcagcggcagcttgagatacttcagcaacagctcttacacgagcaagcgctccttctggaatacaagaggaaacagctggaagagcagcgacaggctgagagattgcaacgccaattaaagcaggaacgggattacctcgtgtccttgcagcatcaaagacaggagcaacggccagtggagaagaagccactttatcattacaaggaaggcatgagcccaagtgagaaaccagcctgggcgaaggaagttgaagagcgaagccggctcaatcgccagagtagccccgcaatgccacacaaagtagcaaatcggatatcagatccaaatttgcctcccagaagcgagagtttcagcatcagcggcgttcagccggcacgaacacccccaatgctgaggccggtggacccacagattccccatttagtcgcggttaaatcacagggaccagccctgactgcttcacagagcgtccacgagcaacccacaaaaggcctgtctgggtttcaagaagcactgaacgtcaccagccatagagtggagatgccacgtcagaactcagatcccacaagcgagaacccacctctccccacgcggatcgagaaatttgatcgctcatcatggctgcggcaggaggaagatatcccccctaaggttccacagaggactacctccatttccccagccctcgcaagaaaaaacagtcccggaaatggtagcgccctgggaccacggctgggatctcaaccaataagagcctctaaccccgacctgcggagaacagagcctatcctggagtctcccttgcagcggacaagcagcggaagctccagctcgtctagcacgccttcaagccagccctcatctcagggcggttcacagccaggaagccaggcaggaagctccgagcgcacacgagtgcgggcaaactccaaatctgagggaagtcccgtgttaccccatgaacccgcaaaggtgaagcctgaggagtcacgcgatatcactcggccttccaggccagcgtcttacaagaaggcaatagatgaagacctcactgcgttggcaaaggaactgcgggagcttcggattgaagagaccaataggcccatgaaaaaggtcactgactactcttcctcttcagaggagagcgagtctagcgaggaagaagaggaagatggagagtccgagacacacgatgggactgtagcagtgagtgacattccaaggctgataccgacaggagccccagggtccaacgagcagtataatgttggtatggttgggacacacggtctagagactagtcatgccgattccttttcaggctccatctcccgggaaggaaccctgatgattagggagactagtggcgagaagaaaaggagcggtcactctgacagcaacggatttgcaggccacatcaatctgccagatctggtgcagcagtctcactccccagcaggcacacccaccgaagggttaggtcgggtaagcacacacagccaagaaatggattccgggacagagtatggcatggggtcctcgaccaaagcctctttcacaccttttgtggacccaagggtgtaccagacatccccaaccgatgaggacgaagaggatgaagagtctagtgctgcagcgctctttacatccgagttgcttaggcaagagcaggccaagctgaatgaagcgcgtaagatctccgtcgtgaatgtgaatcccaccaacataaggcctcacagcgatactcctgaaatccgcaaatataaaaagcggttcaatagtgagattctctgcgccgctctctggggggttaatctgctagtcggtacagagaatgggctgatgctgctggatcgcagcggacaggggaaggtgtacaatctgattaacagaaggcgatttcagcagatggatgttctggaaggactgaatgtcctcgtgactattagcggaaaaaagaataagctgagagtgtactacctgagctggttgagaaatcggatccttcacaatgatccggaggtcgaaaaaaagcaggggtggattaccgtgggagatctggaggggtgtattcactataaagtcgtgaagtacgagcggatcaagttcttagtgattgctctgaaaaatgcggtcgaaatttacgcatgggctcccaagccttaccacaaatttatggccttcaagtcgttcgcagaccttcagcacaaacctctcctcgtggacctgacggtcgaggagggtcagcgactgaaggttatcttcgggagtcacacgggattccatgtgatcgacgtggattccggcaacagctacgacatctatatccctagtcatatccaaggtaacatcacaccacatgccatagtgattctgcccaaaaccgacgggatggagatgttagtgtgttatgaggacgagggggtgtacgtgaacacttatgggaggatcactaaggacgtggtgctgcagtggggcgagatgccaacaagtgtagcatatattcatagtaatcaaatcatggggtggggagaaaaagccattgaaatccggtccgtggagaccggtcacctcgatggggtgtttatgcataagcgtgctcagcgactcaagttcctgtgcgaaaggaatgataaggtctttttcgcatccgtgaggagcggcggtagttcccaggtcttcttcatgacgcttaaccgtaatagcatgatgaattggtag

SEQ ID NO: 183872 - DNA, 3996 bp, Artificial Sequence
  derived and/or modified sequence
atggcgagcgactccccggctcgaagcctggatgaaatagatctctcggctctgagggaccccgcagggatctttgaattggtggaacttgttggaaatggaacatacgggcaagtttataagggtcgtcatgtcaaaacgggccagcttgcagccatcaaggttatggatgtcacaggggatgaagaggaagaaatcaaacaagaaattaacatgttgaagaaatattctcatcaccggaatattgctacatactatggtgcttttatcaaaaagaacccaccaggcatggatgaccaactttggttggtgatggagttttgtggtgctggctctgtcaccgacctgatcaagaacacaaaaggtaacacgttgaaagaggagtggattgcatacatctgcagggaaatcttacgggggctgagtcacctgcaccagcataaagtgattcatcgagatattaaagggcaaaatgtcttgctgactgaaaatgcagaagttaaactagtggactttggagtcagtgctcagcttgatcgaacagtgggcaggaggaatactttcattggaactccctactggatggcaccagaagttattgcctgtgatgaaaacccagatgccacatatgatttcaagagtgacttgtggtctttgggtatcaccgccattgaaatggcagaaggtgctccccctctctgtgacatgcaccccatgagagctctcttcctcatcccccggaacccagcgcctcggctgaagtctaagaagtggtcaaaaaaattccagtcatttattgagagctgcttggtaaagaatcacagccagcgaccagcaacagaacaattgatgaagcatccatttatacgagaccaacctaatgagcgacaggtccgcattcaactcaaggaccatattgatagaacaaagaagaagcgaggagaaaaagatgagacagagtatgagtacagtggaagtgaggaagaagaggaggagaatgactcaggagagcccagctccatcctgaatctgccaggggagtcgacgctgcggagggactttctgaggctgcagctggccaacaaggagcgttctgaggccctacggaggcagcagctggagcagcagcagcgggagaatgaggagcacaagcggcagctgctggccgagcgtcagaagcgcatcgaggagcagaaagagcagaggcggcggctggaggagcaacaaaggcgagagaaggagctgcggaagcagcaggagagggagcagcgccggcactatgaggagcagatgcgccgggaggaggagaggaggcgtgcggagcatgaacaggaatataagcgcaaacaattggaagaacagagacaagcagaaagactgcagaggcagctaaagcaagaaagagactacttagtttcccttcagcatcagcggcaggagcagaggcctgtggagaagaagccactgtaccattacaaagaaggaatgagtcctagtgagaagccagcatgggccaaggaggtagaagaacggtcaaggctcaaccggcaaagttcccctgccatgcctcacaaggttgccaacaggatatctgaccccaacctgcccccaaggtcggagtccttcagcattagtggagttcagcctgctcgaacaccccccatgctcagaccagtcgatccccagatcccacatctggtagctgtaaaatcccagggacctgccttgaccgcctcccagtcagtgcacgagcagcccacaaagggcctctctgggtttcaggaggctctgaacgtgacctcccaccgcgtggagatgccacgccagaactcagatcccacctcggaaaatcctcctctccccactcgcattgaaaagtttgaccgaagctcttggttacgacaggaagaagacattccaccaaaggtgcctcaaagaacaacttctatatccccagcattagccagaaagaattctcctgggaatggtagtgctctgggacccagactaggatctcaacccatcagagcaagcaaccctgatctccggagaactgagcccatcttggagagccccttgcagaggaccagcagtggcagttcctccagctccagcacccctagctcccagcccagctcccaaggaggctcccagcctggatcacaagcaggatccagtgaacgcaccagagttcgagccaacagtaagtcagaaggatcacctgtgctcccccatgagcctgcgaaggtgaaaccagaagaatccagggacattacccggcccagtcgaccagctagctacaaaaaagctatagatgaggatctgacggcattagccaaagaactaagagaactccggattgaagaaacaaaccgcccaatgaagaaggtgactgattactcctcctccagtgaggagtcagaaagtagcgaggaagaggaggaagatggagagagcgagacccatgatgggacagtggctgtcagcgacatacccagactgataccaacaggagctccaggcagcaacgagcagtacaatgtgggaatggtggggacgcatgggctggagacctctcatgcggacagtttcagcggcagtatttcaagagaaggaaccttgatgattagagagacgtctggagagaagaagcgatctggccacagtgacagcaatggctttgctggccacatcaacctccctgacctggtgcagcagagccattctccagctggaaccccgactgagggactggggcgcgtctcaacccattcccaggagatggactctgggactgaatatggcatggggagcagcaccaaagcctccttcaccccctttgtggaccccagagtataccagacgtctcccactgatgaagatgaagaggatgaggaatcatcagccgcagctctgtttactagcgaacttcttaggcaagaacaggccaaactcaatgaagcaagaaagatttcggtggtaaatgtaaacccaaccaacattcggcctcatagcgacacaccagaaatcagaaaatacaagaaacgattcaactcagaaatactttgtgcagctctgtggggtgtaaaccttctggtggggactgaaaatggcctgatgcttttggaccgaagtgggcaaggcaaagtctataatctgatcaaccggaggcgatttcagcagatggatgtgctagagggactgaatgtccttgtgacaatttcaggaaagaagaataagctacgagtttactatctttcatggttaagaaacagaatactacataatgacccagaagtagaaaagaaacaaggctggatcactgttggggacttggaaggctgtatacattataaagttgttaaatatgaaaggatcaaatttttggtgattgccttaaagaatgctgtggaaatatatgcttgggctcctaaaccgtatcataaattcatggcatttaagtcttttgcagatctccagcacaagcctctgctagttgatctcacggtagaagaaggtcaaagattaaaggttatttttggttcacacactggtttccatgtaattgatgttgattcaggaaactcttatgatatctacataccatctcatattcagggcaatatcactcctcatgctattgtcatcttgcctaaaacagatggaatggaaatgcttgtttgctatgaggatgagggggtgtatgtaaacacctatggccggataactaaggatgtggtgctccaatggggagaaatgcccacgtctgtggcctacattcattccaatcagataatgggctggggcgagaaagctattgagatccggtcagtggaaacaggacatttggatggagtatttatgcataagcgagctcaaaggttaaagtttctatgtgaaagaaatgataaggtattttttgcatccgtgcgatctggaggaagtagccaagtgtttttcatgaccctcaacagaaattccatgatgaactggtaa

SEQ ID NO: 183873 - DNA, 5740 bp, Artificial Sequence
  derived and/or modified sequence
attataacagccaatgcagccgccatccacgcacaagcaaagaagcatgtcccatttaaatacacccacgcagccccagcgcccttagccgatcggggcgctcagcccacacgcaccgctgctcggggcttggagatccgcgcaggctgggctcccggacccggcggaccgacgcgcggaggatcgggatccggcgctgtggggctggggtgggcgggggaggctgggcccggggcctctggcgcgacacccgcatgaggacgcgagtgaaatagaccaaggtggaatttccaagggaaaagcttcggggtggttttggtccatttctccagcgaagaagtagacatggcgagcgactccccggctcgaagcctggatgaaatagatctctcggctctgagggaccccgcagggatctttgaattggtggaacttgttggaaatggaacatacgggcaagtttataagggtcgtcatgtcaaaacgggccagcttgcagccatcaaggttatggatgtcacaggggatgaagaggaagaaatcaaacaagaaattaacatgttgaagaaatattctcatcaccggaatattgctacatactatggtgcttttatcaaaaagaacccaccaggcatggatgaccaactttggttggtgatggagttttgtggtgctggctctgtcaccgacctgatcaagaacacaaaaggtaacacgttgaaagaggagtggattgcatacatctgcagggaaatcttacgggggctgagtcacctgcaccagcataaagtgattcatcgagatattaaagggcaaaatgtcttgctgactgaaaatgcagaagttaaaatagtggactttggagtcagtgctcagcttgatcgaacagtgggcaggaggaatactttcattggaactccctactggatggcaccagaagttattgcctgtgatgaaaacccagatgccacatatgatttcaagagtgacttgtggtctttgggtatcaccgccattgaaatggcagaaggtgctccccctctctgtgacatgcaccccatgagagctctcttcctcatcccccggaacccagcgcctcggctgaagtctaagaagtggtcaaaaaaattccagtcatttattgagagctgcttggtaaagaatcacagccagcgaccagcaacagaacaattgatgaagcatccatttatacgagaccaacctaatgagcgacaggtccgcattcaactcaaggaccatattgatagaacaaagaagaagcgaggagaaaaagatgagacagagtatgagtacagtggaagtgaggaagaagaggaggagaatgactcaggagagcccagctccatcctgaatctgccaggggagtcgacgctgcggagggactttctgaggctgcagctggccaacaaggagcgttctgaggccctacggaggcagcagctggagcagcagcagcgggagaatgaggagcacaagcggcagctgctggccgagcgtcagaagcgcatcgaggagcagaaagagcagaggcggcggctggaggagcaacaaaggcgagagaaggagctgcggaagcagcaggagagggagcagcgccggcactatgaggagcagatgcgccgggaggaggagaggaggcgtgcggagcatgaacaggaatataagcgcaaacaattggaagaacagagacaagcagaaagactgcagaggcagctaaagcaagaaagagactacttagtttcccttcagcatcagcggcaggagcagaggcctgtggagaagaagccactgtaccattacaaagaaggaatgagtcctagtgagaagccagcatgggccaaggaggtagaagaacggtcaaggctcaaccggcaaagttcccctgccatgcctcacaaggttgccaacaggatatctgaccccaacctgcccccaaggtcggagtccttcagcattagtggagttcagcctgctcgaacaccccccatgctcagaccagtcgatccccagatcccacatctggtagctgtaaaatcccagggacctgccttgaccgcctcccagtcagtgcacgagcagcccacaaagggcctctctgggtttcaggaggctctgaacgtgacctcccaccgcgtggagatgccacgccagaactcagatcccacctcggaaaatcctcctctccccactcgcattgaaaagtttgaccgaagctcttggttacgacaggaagaagacattccaccaaaggtgcctcaaagaacaacttctatatccccagcattagccagaaagaattctcctgggaatggtagtgctctgggacccagactaggatctcaacccatcagagcaagcaaccctgatctccggagaactgagcccatcttggagagccccttgcagaggaccagcagtggcagttcctccagctccagcacccctagctcccagcccagctcccaaggaggctcccagcctggatcacaagcaggatccagtgaacgcaccagagttcgagccaacagtaagtcagaaggatcacctgtgctcccccatgagcctgcgaaggtgaaaccagaagaatccagggacattacccggcccagtcgaccagctgtgagtgcttttctctccaagagttttgaactcttaatttaccaggatctgacggcattagccaaagaactaagagaactccggattgaagaaacaaaccgcccaatgaagaaggtgactgattactcctcctccagtgaggagtcagaaagtagcgaggaagaggaggaagatggagagagcgagacccatgatgggacagtggctgtcagcgacatacccagactgataccaacaggagctccaggcagcaacgagcagtacaatgtgggaatggtggggacgcatgggctggagacctctcatgcggacagtttcagcggcagtatttcaagagaaggaaccttgatgattagagagacgtctggagagaagaagcgatctggccacagtgacagcaatggctttgctggccacatcaacctccctgacctggtgcagcagagccattctccagctggaaccccgactgagggactggggcgcgtctcaacccattcccaggagatggactctgggactgaatatggcatggggagcagcaccaaagcctccttcaccccctttgtggaccccagagtataccagacgtctcccactgatgaagatgaagaggatgaggaatcatcagccgcagctctgtttactagcgaacttcttaggcaagaacaggccaaactcaatgaagcaagaaagatttcggtggtaaatgtaaacccaaccaacattcggcctcatagcgacacaccagaaatcagaaaatacaagaaacgattcaactcagaaatactttgtgcagctctgtggggtgtaaaccttctggtggggactgaaaatggcctgatgcttttggaccgaagtgggcaaggcaaagtctataatctgatcaaccggaggcgatttcagcagatggatgtgctagagggactgaatgtccttgtgacaatttcaggaaagaagaataagctacgagtttactatctttcatggttaagaaacagaatactacataatgacccagaagtagaaaagaaacaaggctggatcactgttggggacttggaaggctgtatacattataaagttgttaaatatgaaaggatcaaatttttggtgattgccttaaagaatgctgtggaaatatatgcttgggctcctaaaccgtatcataaattcatggcatttaagtcttttgcagatctccagcacaagcctctgctagttgatctcacggtagaagaaggtcaaagattaaaggttatttttggttcacacactggtttccatgtaattgatgttgattcaggaaactcttatgatatctacataccatctcatattcagggcaatatcactcctcatgctattgtcatcttgcctaaaacagatggaatggaaatgcttgtttgctatgaggatgagggggtgtatgtaaacacctatggccggataactaaggatgtggtgctccaatggggagaaatgcccacgtctgtggcctacattcattccaatcagataatgggctggggcgagaaagctattgagatccggtcagtggaaacaggacatttggatggagtatttatgcataagcgagctcaaaggttaaagtttctatgtgaaagaaatgataaggtattttttgcatccgtgcgatctggaggaagtagccaagtgtttttcatgaccctcaacagaaattccatgatgaactggtaacagaagagcacttggcacttatcttcatggcgttatttctaatttaaaagaacataactcatgtggacttatgccagtctagaggcagaatcagaaggcttggttgaacatatcgctttccctttttcctctccctccgcccctcccagtacagtccatctttcaatgttgcagcctggttgagaaggagagaaaaaggtggcaggaatttccaggagatccccaagaatgctgccttgtctgtggacaaagatggaccatgtgcccttcggaattagggatagaaacaaatattgtgtgctcttaacgattaagctgtgttatggtgggttttcaggtttttaccttttttctttacccctttactctgcaagaatggggaaagaatgcatactgcgaaaatgagtcttttaaattctgtctgcctactagttttaagtatatggtatgttgtaaaatttccaatgatgagagacagcacaataaatgtaccttatctccttaggctgaaggccataactacatagtggagtaatttaagaactctcttgccttcaccaacccaaaaggttgctttttgatagcaactggctaatgaatttttaaaaagagaagaaaaatactagttttcccctcttttgggaaatagattttaaatggctaaactactagccttaaaactactagtctaataaaatcaactaccacttttgtgaatctgacaggccacatttttatatggccctttacagaatggagtgtgttgaacaggatactaacgccattgagttgagctggcctagcgatggagggacactctaacacaactttccctcagctattatgcaacagatcagggaaaaagatgggatgacagatggggtcagacagaaagagcttctgggaaacaagcttacatagtcttttttaaaatgcacaaagcctcccagctaagaggtcacttggtttgggcttcattaggactgagactttgttgagttctttctgggacttggagagtggatgatattcaggctctgaacattcccagcgctctcccgagggtgccactttctcaagatgaaaactgtgactgaaaaaattaataataaatgtttctgagctgcctgtgttctccctgtgtgggtgagagaagggactagactcctaagcctgcctcagatacaagaggcatcattggctccaattttagagaacttgaaagcaaggctttggacaaaattttgagaccctaatcactttaccttcctccaaattacccaacatacggtaaacaacatttgtgcagaagtatgtatgtatttagttcaggttgacttgtgtccttataaactcttactcaaatgatttgaacttt

SEQ ID NO: 183874 - DNA, 6970 bp, Artificial Sequence
  derived and/or modified sequence
attataacagccaatgcagccgccatccacgcacaagcaaagaagcatgtcccatttaaatacacccacgcagccccagcgcccttagccgatcggggcgctcagcccacacgcaccgctgctcggggcttggagatccgcgcaggctgggctcccggacccggcggaccgacgcgcggaggatcgggatccggcgctgtggggctggggtgggcgggggaggctgggcccggggcctctggcgcgacacccgcatgaggacgcgagtgaaatagaccaaggtggaatttccaagggaaaagcttcggggtggttttggtccatttctccagcgaagaagtagacatggcgagcgactccccggctcgaagcctggatgaaatagatctctcggctctgagggaccccgcagggatctttgaattggtggaacttgttggaaatggaacatacgggcaagtttataagggtcgtcatgtcaaaacgggccagcttgcagccatcaaggttatggatgtcacaggggatgaagaggaagaaatcaaacaagaaattaacatgttgaagaaatattctcatcaccggaatattgctacatactatggtgcttttatcaaaaagaacccaccaggcatggatgaccaactttggttggtgatggagttttgtggtgctggctctgtcaccgacctgatcaagaacacaaaaggtaacacgttgaaagaggagtggattgcatacatctgcagggaaatcttacgggggctgagtcacctgcaccagcataaagtgattcatcgagatattaaagggcaaaatgtcttgctgactgaaaatgcagaagttaaactagtggactttggagtcagtgctcagcttgatcgaacagtgggcaggaggaatactttcattggaactccctactggatggcaccagaagttattgcctgtgatgaaaacccagatgccacatatgatttcaagagtgacttgtggtctttgggtatcaccgccattgaaatggcagaaggtgctccccctctctgtgacatgcaccccatgagagctctcttcctcatcccccggaacccagcgcctcggctgaagtctaagaagtggtcaaaaaaattccagtcatttattgagagctgcttggtaaagaatcacagccagcgaccagcaacagaacaattgatgaagcatccatttatacgagaccaacctaatgagcgacaggtccgcattcaactcaaggaccatattgatagaacaaagaagaagcgaggagaaaaagatgagacagagtatgagtacagtggaagtgaggaagaagaggaggagaatgactcaggagagcccagctccatcctgaatctgccaggggagtcgacgctgcggagggactttctgaggctgcagctggccaacaaggagcgttctgaggccctacggaggcagcagctggagcagcagcagcgggagaatgaggagcacaagcggcagctgctggccgagcgtcagaagcgcatcgaggagcagaaagagcagaggcggcggctggaggagcaacaaaggcgagagaaggagctgcggaagcagcaggagagggagcagcgccggcactatgaggagcagatgcgccgggaggaggagaggaggcgtgcggagcatgaacaggaatacatcaggcgacagttagaggaggagcagagacagttagagatcttgcagcagcagctactgcatgaacaagctctacttctggaatataagcgcaaacaattggaagaacagagacaagcagaaagactgcagaggcagctaaagcaagaaagagactacttagtttcccttcagcatcagcggcaggagcagaggcctgtggagaagaagccactgtaccattacaaagaaggaatgagtcctagtgagaagccagcatgggccaaggaggtagaagaacggtcaaggctcaaccggcaaagttcccctgccatgcctcacaaggttgccaacaggatatctgaccccaacctgcccccaaggtcggagtccttcagcattagtggagttcagcctgctcgaacaccccccatgctcagaccagtcgatccccagatcccacatctggtagctgtaaaatcccagggacctgccttgaccgcctcccagtcagtgcacgagcagcccacaaagggcctctctgggtttcaggaggctctgaacgtgacctcccaccgcgtggagatgccacgccagaactcagatcccacctcggaaaatcctcctctccccactcgcattgaaaagtttgaccgaagctcttggttacgacaggaagaagacattccaccaaaggtgcctcaaagaacaacttctatatccccagcattagccagaaagaattctcctgggaatggtagtgctctgggacccagactaggatctcaacccatcagagcaagcaaccctgatctccggagaactgagcccatcttggagagccccttgcagaggaccagcagtggcagttcctccagctccagcacccctagctcccagcccagctcccaaggaggctcccagcctggatcacaagcaggatccagtgaacgcaccagagttcgagccaacagtaagtcagaaggatcacctgtgctcccccatgagcctgcgaaggtgaaaccagaagaatccagggacattacccggcccagtcgaccagctagctacaaaaaagctatagatgaggatctgacggcattagccaaagaactaagagaactccggattgaagaaacaaaccgcccaatgaagaaggtgactgattactcctcctccagtgaggagtcagaaagtagcgaggaagaggaggaagatggagagagcgagacccatgatgggacagtggctgtcagcgacatacccagactgataccaacaggagctccaggcagcaacgagcagtacaatgtgggaatggtggggacgcatgggctggagacctctcatgcggacagtttcagcggcagtatttcaagagaaggaaccttgatgattagagagacgtctggagagaagaagcgatctggccacagtgacagcaatggctttgctggccacatcaacctccctgacctggtgcagcagagccattctccagctggaaccccgactgagggactggggcgcgtctcaacccattcccaggagatggactctgggactgaatatggcatggggagcagcaccaaagcctccttcaccccctttgtggaccccagagtataccagacgtctcccactgatgaagatgaagaggatgaggaatcatcagccgcagctctgtttactagcgaacttcttaggcaagaacaggccaaactcaatgaagcaagaaagatttcggtggtaaatgtaaacccaaccaacattcggcctcatagcgacacaccagaaatcagaaaatacaagaaacgattcaactcagaaatactttgtgcagctctgtggggtgtaaaccttctggtggggactgaaaatggcctgatgcttttggaccgaagtgggcaaggcaaagtctataatctgatcaaccggaggcgatttcagcagatggatgtgctagagggactgaatgtccttgtgacaatttcaggaaagaagaataagctacgagtttactatctttcatggttaagaaacagaatactacataatgacccagaagtagaaaagaaacaaggctggatcactgttggggacttggaaggctgtatacattataaagttgttaaatatgaaaggatcaaatttttggtgattgccttaaagaatgctgtggaaatatatgcttgggctcctaaaccgtatcataaattcatggcatttaagtcttttgcagatctccagcacaagcctctgctagttgatctcacggtagaagaaggtcaaagattaaaggttatttttggttcacacactggtttccatgtaattgatgttgattcaggaaactcttatgatatctacataccatctcatattcagggcaatatcactcctcatgctattgtcatcttgcctaaaacagatggaatggaaatgcttgtttgctatgaggatgagggggtgtatgtaaacacctatggccggataactaaggatgtggtgctccaatggggagaaatgcccacgtctgtggcctacattcattccaatcagataatgggctggggcgagaaagctattgagatccggtcagtggaaacaggacatttggatggagtatttatgcataagcgagctcaaaggttaaagtttctatgtgaaagaaatgataaggtattttttgcatccgtgcgatctggaggaagtagccaagtgtttttcatgaccctcaacagaaattccatgatgaactggtaacagaagagcacttggcacttatcttcatggcgttatttctaatttaaaagaacataactcatgtggacttatgccagtctagaggcagaatcagaaggcttggttgaacatatcgctttccctttttcctctccctccgcccctcccagtacagtccatctttcaatgttgcagcctggttgagaaggagagaaaaaggtggcaggaatttccaggagatccccaagaatgctgccttgtctgtggacaaagatggaccatgtgcccttcggaattagggatagaaacaaatattgtgtgctcttaacgattaagctgtgttatggtgggttttcaggtttttaccttttttctttacccctttactctgcaagaatggggaaagaatgcatactgcgaaaatgagtcttttaaattctgtctgcctactagttttaagtatatggtatgttgtaaaatttccaatgatgagagacagcacaataaatgtaccttatctccttaggctgaaggccataactacatagtggagtaatttaagaactctcttgccttcaccaacccaaaaggttgctttttgatagcaactggctaatgaatttttaaaaagagaagaaaaatactagttttcccctcttttgggaaatagattttaaatggctaaactactagccttaaaactactagtctaataaaatcaactaccacttttgtgaatctgacaggccacatttttatatggccctttacagaatggagtgtgttgaacaggatactaacgccattgagttgagctggcctagcgatggagggacactctaacacaactttccctcagctattatgcaacagatcagggaaaaagatgggatgacagatggggtcagacagaaagagcttctgggaaacaagcttacatagtcttttttaaaatgcacaaagcctcccagctaagaggtcacttggtttgggcttcattaggactgagactttgttgagttctttctgggacttggagagtggatgatattcaggctctgaacattcccagcgctctcccgagggtgccactttctcaagatgaaaactgtgactgaaaaaattaataataaatgtttctgagctgcctgtgttctccctgtgtgggtgagagaagggactagactcctaagcctgcctcagatacaagaggcatcattggctccaattttagagaacttgaaagcaaggctttggacaaaattttgagaccctaatcactttaccttcctccaaattacccaacatacggtaaacaacatttgtgcagaagtatgtatgtatttagttcaggttgacttgtgtccttataaactcttactcaaatgatttgaacttttatgcgactgggattttttttttccaaagctacaagcatggccgcctgtggtatcgaggtgttgcaaacaatatctgtgttgcgcttcctgttttaacctacctcgttttgtttgtttttgtttcactgttcatcacagcagtgttatctccaggagacatatagagagctcaaccggcaatctcaggtgcatttaacatttttaaaacgaaacagtagttgaccaaatttttcttcttaaaaaattggaagtggggggaatccaatgacaaaaactaatgtggcttgtttctggagaaaataattactgtaaatggaacaacaacaacaaaaaaaactacgatcttactgactttgcctaaatacacaagcagctgatgtactattaatgagaacgaaatacacattaggaaaatggagccatttcaatctagtggtttgggcaagatggggaagagaaggggaaacattctagtttctggattacattattatgcccctcctgaaaaggtggttgtcatttgcatttatttaaagcaggtaatatgcaggaatgtaactgaggattatcttcaggcaatcagcaagatatcctcctcatggtccctttagctctcaaaagcaatgaaatcctcctgttctcatttttactgctgtggttgtgctgctgaacaatactatcttctcaaattccatgccacaaattcagcaataactttttggattgaatttaacaactactgtaattggatgctgatgtggacaaaatatattgatttcgatttcactcccgaatgtgattgccaccagctctttatattgctgctgtggtattttaaaccagaagcttctttaaattatgttgcaaactgatctttgtttttatgttttgttttgtttttatttctaagtgataagtttgaaacacacagctttaaatgatttttttattgtgggattttgggtacagttaagaaataaaagggaatcattgtgtttaaacataaggtagtttgtgaatgtattttttaaaatctagagtcattgaaacaaatcataagaaaacaatattaatgcagtcttgtttacagtatgtacagtgacataacatagaacatgagcttttctggtgccaacaacaataaaacacacgttaaacatcaa

SEQ ID NO: 183875 - protein, 3013 aa, Artificial Sequence
  derived and/or modified sequence
MSNITIDPDVKPGEYVIKSLFAEFAVQAEKKIEVVMAEPLEKLLSRSLQRGEDLQFDQLISSMSSVAEHCLPSLLRTLFDWYRRQNGTEDESYEYRPRSSTKSKGDEQQRERDYLLERRDLAVDFIFCLVLVEVLKQIPVHPVPDPLVHEVLNLAFKHFKHKEGYSGTNTGNVHIIADLYAEVIGVLAQSKFQAVRKKFVTELKELRQKEQSPHVVQSVISLIMGMKFFRVKMYPVEDFEASFQFMQECAQYFLEVKDKDIKHALAGLFVEILIPVAAAVKNEVNVPCLKNFVEMLYQTTFELSSRKKHSLALYPLITCLLCVSQKQFFLNNWHIFLQNCLSHLKNKDPKMSRVALESLYRLLWVYVIRIKCESNTVTQSRLMSIVSALFPKGSRSVVPRDTPLNIFVKIIQFIAQERLDFAMKEIIFDLLSVGKSTKTFTINPERMNIGLRVFLVIADSLQQKDGEPPMPTTGVILPSGNTLRVKKIFLNKTLTDEEAKVIGMSVYYPQVRKALDSILRHLDKEVGRPMCMTSVQMSNKEPEDMITGERKPKIDLFRTCIAAIPRLIPDGMSRTDLIELLARLTIHMDEELRALAFNTLQALMLDFPDWREDVLSGFVYFIVREVTDVHPTLLDNAVKMLVQLINQWKQAAQMHNKNQDTQHGVANGASHPPPLERSPYSNVFHVVEGFALVILCSSRPATRRLAVSVLREIRALFALLEIPKGDDELAIDVMDRLSPSILESFIHLTGADQTTLLYCPSSIDLQTLAEWNSSPISHQFDVISPSHIWIFAHVTQGQDPWIISLSSFLKQENLPKHCSTAVSYAWMFAYTRLQLLSPQVDINSPINAKKVNTTTSSDSYIGLWRNYLILCCSAATSSSSTSAGSVRCSPPETLASTPDSGYSIDSKIIGIPSPSSLFKHIVPMMRSESMEITESLVLGLGRTNPGAFRELIEELHPIIKEALERRPENMKRRRRRDILRVQLVRIFELLADAGVISHSASGGLDNETHFLNNTLLEYVDLTRQLLEAENEKDSDTLKDIRCHFSALVANIIQNVPVHQRRSIFPQQSLRHSLFMLFSHWAGPFSIMFTPLDRYSDRNMQINRHQYCALKAMSAVLCCGPVADNVGLSSDGYLYKWLDNILDSLDKKVHQLGCEAVTLLLELNPDQSNLMYWAVDRCYTGSGRVAAGCFKAIANVFQNRDYQCDTVMLLNLILFKAADSSRSIYEVAMQLLQILEPKMFRYAHKLEVQRTDGVLSQLSPLPHLYSVSYYQLSEELARAYPELTLAIFSEISQRIQTAHPAGRQVMLHYLLPWMNNIELVDLKPLPTARRHDEDEDDSLKDRELMVTSRRWLRGEGWGSPQATAMVLNNLMYMTAKYGDELAWSEVENVWTTLADGWPKNLKIILHFLISICGVNSEPSLLPYVKKVIVYLGRDKTMQLLEELVSELQLTDPVSSGVTHMDNPPYYRITSSYKIPSVTSGTTSSSNTMVAPTDGNPDNKPIKENIEESYVHLDIYSGLNSHLNRQHHRLESRYSSSSGGSYEEEKSDSMPLYSNWRLKVMEHNQGEPLPFPPAGGCWSPLVDYVPETSSPGLPLHRCNIAVILLTDLIIDHSVKVEWGSYLHLLLHAIFIGFDHCHPEVYEHCKRLLLHLLIVMGPNSNIRTVASVLLRNKEFNEPRVLTVKQVAHLDYNFTAGINDFIPDYQPSPMTDSGLSSSSTSSSISLGNNSAAISHLHTTILNEVDISVEQDGKVKTLMEFITSRKRGPLWNHEDVSAKNPSIKSAEQLTTFLKHVVSVFKQSSSEGIHLEHHLSEVALQTALSCSSRHYAGRSFQIFRALKQPLTATTLSDVLSRLVETVGDPGEDAQGFVIELLLTLESAIDTLAETMKHYDLLSALSQTSYHDPIMGNKYAANRKSTGQLNLSTSPINSSSYLGYNSNARSNSLRLSLIGDRRGDRRRSNTLDIMDGRINHSSSLARTRSLSSLREKGMYDVQSTTEPTNLMATIFWIAASLLESDYEYEYLLALRLLNKLLIHLPLDKSESREKIENVQSKLKWTNFPGLQQLFLKGFTSASTQEMTVHLLSKLISVSKHTLVDPSQLSGFPLNILCLLPHLIQHFDSPTQFCKETASRIAKVCAEEKCPTLVNLAHMMSLYSTHTYSRDCSNWINVVCRYLHDSFSDTTFNLVTYLAELLEKGLSSMQQSLLQIIYSLLSHIDLSAAPAKQFNLEIIKIIGKYVQSPYWKEALNILKLVVSRSASLVVPSDIPKTYGGDTGSPEISFTKIFNNVSKELPGKTLDFHFDISETPIIGNKYGDQHSAAGRNGKPKVIAVTRSTSSTSSGSNSNALVPVSWKRPQLSQRRTREKLMNVLSLCGPESGLPKNPSVVFSSNEDLEVGDQQTSLISTTEDINQEEEVAVEDNSSEQQFGVFKDFDFLDVELEDAEGESMDNFNWGVRRRSLDSIDKGDTPSLQEYQCSSSTPSLNLTNQEDTDESSEEEAALTASQILSRTQMLNSDSATDETIPDHPDLLLQSEDSTGSITTEEVLQIRDETPTLEASLDNANSRLPEDTTSVLKEEHVTTFEDEGSYIIQEQQESLVCQGILDLEETEMPEPLAPESYPESVCEEDVTLALKELDERCEEEEADFSGLSSQDEEEQDGFPEVQTSPLPSPFLSAIIAAFQPVAYDDEEEAWRCHVNQMLSDTDGSSAVFTFHVFSRLFQTIQRKFGEITNEAVSFLGDSLQRIGTKFKSSLEVMMLCSECPTVFVDAETLMSCGLLETLKFGVLELQEHLDTYNVKREAAEQWLDDCKRTFGAKEDMYRINTDAQQMEILAELELCRRLYKLHFQLLLLFQAYCKLINQVNTIKNEAEVINMSEELAQLESILKEAESASENEEIDISKAAQTTIETAIHSLIETLKNKEFISAVAQVKAFRSLWPSDIFGSCEDDPVQTLLHIYFHHQTLGQTGSFAVIGSNLDMSEANYKLMELNLEIRESLRMVQSYQLLAQAKPMGNMVSTGF

SEQ ID NO: 183876 - protein, 3013 aa, Artificial Sequence
  derived and/or modified sequence
MSNITIDPDVKPGEYVIKSLFAEFAVQAEKKIEVVMAEPLEKLLSRSLQRGEDLQFDQLISSMSSVAEHCLPSLLRTLFDWYRRQNGTEDESYEYRPRSSTKSKGDEQQRERDYLLERRDLAVDFIFCLVLVEVLKQIPVHPVPDPLVHEVLNLAFKHFKHKEGYSGTNTGNVHIIADLYAEVIGVLAQSKFQAVRKKFVTELKELRQKEQSPHVVQSVISLIMGMKFFRVKMYPVEDFEASFQFMQECAQYFLEVKDKDIKHALAGLFVEILIPVAAAVKNEVNVPCLKNFVEMLYQTTFELSSRKKHSLALYPLITCLLCVSQKQFFLNNWHIFLQNCLSHLKNKDPKMSRVALESLYRLLWVYVIRIKCESNTVTQSRLMSIVSALFPKGSRSVVPRDTPLNIFVKIIQFIAQERLDFAMKEIIFDLLSVGKSTKTFTINPERMNIGLRVFLVIADSLQQKDGEPPMPTTGVILPSGNTLRVKKIFLNKTLTDEEAKVIGMSVYYPQVRKALDSILRHLDKEVGRPMCMTSVQMSNKEPEDMITGERKPKIDLFRTCIAAIPRLIPDGMSRTDLIELLARLTIHMDEELRALAFNTLQALMLDFPDWREDVLSGFVYFIVREVTDVHPTLLDNAVKMLVQLINQWKQAAQMHNKNQDTQHGVANGASHPPPLERSPYSNVFHVVEGFALVILCSSRPATRRLAVSVLREIRALFALLEIPKGDDELAIDVMDRLSPSILESFIHLTGADQTTLLYCPSSIDLQTLAEWNSSPISHQFDVISPSHIWIFAHVTQGQDPWIISLSSFLKQENLPKHCSTAVSYAWMFAYTRLQLLSPQVDINSPINAKKVNTTTSSDSYIGLWRNYLILCCSAATSSSSTSAGSVRCSPPETLASTPDSGYSIDSKIIGIPSPSSLFKHIVPMMRSESMEITESLVLGLGRTNPGAFRELIEELHPIIKEALERRPENMKRRRRRDILRVQLVRIFELLADAGVISHSASGGLDNETHFLNNTLLEYVDLTRQLLEAENEKDSDTLKDIRCHFSALVANIIQNVPVHQRRSIFPQQSLRHSLFMLFSHWAGPFSIMFTPLDRYSDRNMQINRHQYCALKAMSAVLCCGPVADNVGLSSDGYLYKWLDNILDSLDKKVHQLGCEAVTLLLELNPDQSNLMYWAVDRCYTGSGRVAAGCFKAIANVFQNRDYQCDTVMLLNLILFKAADSSRSIYEVAMQLLQILEPKMFRYAHKLEVQRTDGVLSQLSPLPHLYSVSYYQLSEELARAYPELTLAIFSEISQRIQTAHPAGRQVMLHYLLPWMNNIELVDLKPLPTARRHDEDEDDSLKDRELMVTSRRWLRGEGWGSPQATAMVLNNLMYMTAKYGDELAWSEVENVWTTLADGWPKNLKIILHFLISICGVNSEPSLLPYVKKVIVYLGRDKTMQLLEELVSELQLTDPVSSGVTHMDNPPYYRITSSYKIPSVTSGTTSSSNTMVAPTDGNPDNKPIKENIEESYVHLDIYSGLNSHLNRQHHRLESRYSSSSGGSYEEEKSDSMPLYSNWRLKVMEHNQGEPLPFPPAGGCWSPLVDYVPETSSPGLPLHRCNIAVILLTDLIIDHSVKVEWGSYLHLLLHAIFIGFDHCHPEVYEHCKRLLLHLLIVMGPNSNIRTVASVLLRNKEFNEPRVLTVKQVAHLDYNFTAGINDFIPDYQPSPMTDSGLSSSSTSSSISLGNNSAAISHLHTTILNEVDISVEQDGKVKTLMEFITSRKRGPLWNHEDVSAKNPSIKSAEQLTTFLKHVVSVFKQSSSEGIHLEHHLSEVALQTALSCSSRHYAGRSFQIFRALKQPLTATTLSDVLSRLVETVGDPGEDAQGFVIELLLTLESAIDTLAETMKHYDLLSALSQTSYHDPIMGNKYAANRKSTGQLNLSTSPINSSSYLGYNSNARSNSLRLSLIGDRRGDRRRSNTLDIMDGRINHSSSLARTRSLSSLREKGMYDVQSTTEPTNLMATIFWIAASLLESDYEYEYLLALRLLNKLLIHLPLDKSESREKIENVQSKLKWTNFPGLQQLFLKGFTSASTQEMTVHLLSKLISVSKHTLVDPSQLSGFPLNILCLLPHLIQHFDSPTQFCKETASRIAKVCAEEKCPTLVNLAHMMSLYSTHTYSRDCSNWINVVCRYLHDSFSDTTFNLVTYLAELLEKGLSSMQQSLLQIIYSLLSHIDLSAAPAKQFNLEIIKIIGKYVQSPYWKEALNILKLVVSRSASLVVPSDIPKTYGGDTGSPEISFTKIFNNVSKELPGKTLDFHFDISETPIIGNKYGDQHSAAGRNGKPKVIAVTRSTSSTSSGSNSNALVPVSWKRPQLSQRRTREKLMNVLSLCGPESGLPKNPSVVFSSNEDLEVGDQQTSLISTTEDINQEEEVAVEDNSSEQQFGVFKDFDFLDVELEDAEGESMDNFNWGVRRRSLDSIDKGDTPSLQEYQCSSSTPSLNLTNQEDTDESSEEEAALTASQILSRTQMLNSDSATDETIPDHPDLLLQSEDSTGSITTEEVLQIRDETPTLEASLDNANSRLPEDTTSVLKEEHVTTFEDEGSYIIQEQQESLVCQGILDLEETEMPEPLAPESYPESVCEEDVTLALKELDERCEEEEADFSGLSSQDEEEQDGFPEVQTSPLPSPFLSAIIAAFQPVAYDDEEEAWRCHVNQMLSDTDGSSAVFTFHVFSRLFQTIQRKFGEITNEAVSFLGDSLQRIGTKFKSSLEVMMLCSECPTVFVDAETLMSCGLLETLKFGVLELQEHLDTYNVKREAAEQWLDDCKRTFGAKEDMYRINTDAQLNEILVELELCRRLYKLHFQLLLLFQAYCKLINQVNTIKNEAEVINMSEELAQLESILKEAESASENEEIDISKAAQTTIETAIHSLIETLKNKEFISAVAQVKAFRSLWPSDIFGSCEDDPVQTLLHIYFHHQTLGQTGSFAVIGSNLDMSEANYKLMELNLEIRESLRMVQSYQLLAQAKPMGNMVSTGF

SEQ ID NO: 183877 - DNA, 9042 bp, Artificial Sequence
  derived and/or modified sequence
atgagcaacatcaccatcgaccccgacgtgaagcccggcgagtacgtgatcaagagcctgttcgccgagttcgccgtgcaggccgagaagaagatcgaggtggtgatggccgagcccctggagaagctgctgagcagaagcctgcagagaggcgaggacctgcagttcgaccagctgatcagcagcatgagcagcgtggccgagcactgcctgcccagcctgctgagaaccctgttcgactggtacagaagacagaacggcaccgaggacgagagctacgagtacagacccagaagcagcaccaagagcaagggcgacgagcagcagagagagagagactacctgctggagagaagagacctggccgtggacttcatcttctgcctggtgctggtggaggtgctgaagcagatccccgtgcaccccgtgcccgaccccctggtgcacgaggtgctgaacctggccttcaagcacttcaagcacaaggagggctacagcggcaccaacaccggcaacgtgcacatcatcgccgacctgtacgccgaggtgatcggcgtgctggcccagagcaagttccaggccgtgagaaagaagttcgtgaccgagctgaaggagctgagacagaaggagcagagcccccacgtggtgcagagcgtgatcagcctgatcatgggcatgaagttcttcagagtgaagatgtaccccgtggaggacttcgaggccagcttccagttcatgcaggagtgcgcccagtacttcctggaggtgaaggacaaggacatcaagcacgccctggccggcctgttcgtggagatcctgatccccgtggccgccgccgtgaagaacgaggtgaacgtgccctgcctgaagaacttcgtggagatgctgtaccagaccaccttcgagctgagcagcagaaagaagcacagcctggccctgtaccccctgatcacctgcctgctgtgcgtgagccagaagcagttcttcctgaacaactggcacatcttcctgcagaactgcctgagccacctgaagaacaaggaccccaagatgagcagagtggccctggagagcctgtacagactgctgtgggtgtacgtgatcagaatcaagtgcgagagcaacaccgtgacccagagcagactgatgagcatcgtgagcgccctgttccccaagggcagcagaagcgtggtgcccagagacacccccctgaacatcttcgtgaagatcatccagttcatcgcccaggagagactggacttcgccatgaaggagatcatcttcgacctgctgagcgtgggcaagagcaccaagaccttcaccatcaaccccgagagaatgaacatcggcctgagagtgttcctggtgatcgccgacagcctgcagcagaaggacggcgagccccccatgcccaccaccggcgtgatcctgcccagcggcaacaccctgagagtgaagaagatcttcctgaacaagaccctgaccgacgaggaggccaaggtgatcggcatgagcgtgtactacccccaggtgagaaaggccctggacagcatcctgagacacctggacaaggaggtgggcagacccatgtgcatgaccagcgtgcagatgagcaacaaggagcccgaggacatgatcaccggcgagagaaagcccaagatcgacctgttcagaacctgcatcgccgccatccccagactgatccccgacggcatgagcagaaccgacctgatcgagctgctggccagactgaccatccacatggacgaggagctgagagccctggccttcaacaccctgcaggccctgatgctggacttccccgactggagagaggacgtgctgagcggcttcgtgtacttcatcgtgagagaggtgaccgacgtgcaccccaccctgctggacaacgccgtgaagatgctggtgcagctgatcaaccagtggaagcaggccgcccagatgcacaacaagaaccaggacacccagcacggcgtggccaacggcgccagccaccccccccccctggagagaagcccctacagcaacgtgttccacgtggtggagggcttcgccctggtgatcctgtgcagcagcagacccgccaccagaagactggccgtgagcgtgctgagagagatcagagccctgttcgccctgctggagatccccaagggcgacgacgagctggccatcgacgtgatggacagactgagccccagcatcctggagagcttcatccacctgaccggcgccgaccagaccaccctgctgtactgccccagcagcatcgacctgcagaccctggccgagtggaacagcagccccatcagccaccagttcgacgtgatcagccccagccacatctggatcttcgcccacgtgacccagggccaggacccctggatcatcagcctgagcagcttcctgaagcaggagaacctgcccaagcactgcagcaccgccgtgagctacgcctggatgttcgcctacaccagactgcagctgctgagcccccaggtggacatcaacagccccatcaacgccaagaaggtgaacaccaccaccagcagcgacagctacatcggcctgtggagaaactacctgatcctgtgctgcagcgccgccaccagcagcagcagcaccagcgccggcagcgtgagatgcagcccccccgagaccctggccagcacccccgacagcggctacagcatcgacagcaagatcatcggcatccccagccccagcagcctgttcaagcacatcgtgcccatgatgagaagcgagagcatggagatcaccgagagcctggtgctgggcctgggcagaaccaaccccggcgccttcagagagctgatcgaggagctgcaccccatcatcaaggaggccctggagagaagacccgagaacatgaagagaagaagaagaagagacatcctgagagtgcagctggtgagaatcttcgagctgctggccgacgccggcgtgatcagccacagcgccagcggcggcctggacaacgagacccacttcctgaacaacaccctgctggagtacgtggacctgaccagacagctgctggaggccgagaacgagaaggacagcgacaccctgaaggacatcagatgccacttcagcgccctggtggccaacatcatccagaacgtgcccgtgcaccagagaagaagcatcttcccccagcagagcctgagacacagcctgttcatgctgttcagccactgggccggccccttcagcatcatgttcacccccctggacagatacagcgacagaaacatgcagatcaacagacaccagtactgcgccctgaaggccatgagcgccgtgctgtgctgcggccccgtggccgacaacgtgggcctgagcagcgacggctacctgtacaagtggctggacaacatcctggacagcctggacaagaaggtgcaccagctgggctgcgaggccgtgaccctgctgctggagctgaaccccgaccagagcaacctgatgtactgggccgtggacagatgctacaccggcagcggcagagtggccgccggctgcttcaaggccatcgccaacgtgttccagaacagagactaccagtgcgacaccgtgatgctgctgaacctgatcctgttcaaggccgccgacagcagcagaagcatctacgaggtggccatgcagctgctgcagatcctggagcccaagatgttcagatacgcccacaagctggaggtgcagagaaccgacggcgtgctgagccagctgagccccctgccccacctgtacagcgtgagctactaccagctgagcgaggagctggccagagcctaccccgagctgaccctggccatcttcagcgagatcagccagagaatccagaccgcccaccccgccggcagacaggtgatgctgcactacctgctgccctggatgaacaacatcgagctggtggacctgaagcccctgcccaccgccagaagacacgacgaggacgaggacgacagcctgaaggacagagagctgatggtgaccagcagaagatggctgagaggcgagggctggggcagcccccaggccaccgccatggtgctgaacaacctgatgtacatgaccgccaagtacggcgacgagctggcctggagcgaggtggagaacgtgtggaccaccctggccgacggctggcccaagaacctgaagatcatcctgcacttcctgatcagcatctgcggcgtgaacagcgagcccagcctgctgccctacgtgaagaaggtgatcgtgtacctgggcagagacaagaccatgcagctgctggaggagctggtgagcgagctgcagctgaccgaccccgtgagcagcggcgtgacccacatggacaaccccccctactacagaatcaccagcagctacaagatccccagcgtgaccagcggcaccaccagcagcagcaacaccatggtggcccccaccgacggcaaccccgacaacaagcccatcaaggagaacatcgaggagagctacgtgcacctggacatctacagcggcctgaacagccacctgaacagacagcaccacagactggagagcagatacagcagcagcagcggcggcagctacgaggaggagaagagcgacagcatgcccctgtacagcaactggagactgaaggtgatggagcacaaccagggcgagcccctgcccttcccccccgccggcggctgctggagccccctggtggactacgtgcccgagaccagcagccccggcctgcccctgcacagatgcaacatcgccgtgatcctgctgaccgacctgatcatcgaccacagcgtgaaggtggagtggggcagctacctgcacctgctgctgcacgccatcttcatcggcttcgaccactgccaccccgaggtgtacgagcactgcaagagactgctgctgcacctgctgatcgtgatgggccccaacagcaacatcagaaccgtggccagcgtgctgctgagaaacaaggagttcaacgagcccagagtgctgaccgtgaagcaggtggcccacctggactacaacttcaccgccggcatcaacgacttcatccccgactaccagcccagccccatgaccgacagcggcctgagcagcagcagcaccagcagcagcatcagcctgggcaacaacagcgccgccatcagccacctgcacaccaccatcctgaacgaggtggacatcagcgtggagcaggacggcaaggtgaagaccctgatggagttcatcaccagcagaaagagaggccccctgtggaaccacgaggacgtgagcgccaagaaccccagcatcaagagcgccgagcagctgaccaccttcctgaagcacgtggtgagcgtgttcaagcagagcagcagcgagggcatccacctggagcaccacctgagcgaggtggccctgcagaccgccctgagctgcagcagcagacactacgccggcagaagcttccagatcttcagagccctgaagcagcccctgaccgccaccaccctgagcgacgtgctgagcagactggtggagaccgtgggcgaccccggcgaggacgcccagggcttcgtgatcgagctgctgctgaccctggagagcgccatcgacaccctggccgagaccatgaagcactacgacctgctgagcgccctgagccagaccagctaccacgaccccatcatgggcaacaagtacgccgccaacagaaagagcaccggccagctgaacctgagcaccagccccatcaacagcagcagctacctgggctacaacagcaacgccagaagcaacagcctgagactgagcctgatcggcgacagaagaggcgacagaagaagaagcaacaccctggacatcatggacggcagaatcaaccacagcagcagcctggccagaaccagaagcctgagcagcctgagagagaagggcatgtacgacgtgcagagcaccaccgagcccaccaacctgatggccaccatcttctggatcgccgccagcctgctggagagcgactacgagtacgagtacctgctggccctgagactgctgaacaagctgctgatccacctgcccctggacaagagcgagagcagagagaagatcgagaacgtgcagagcaagctgaagtggaccaacttccccggcctgcagcagctgttcctgaagggcttcaccagcgccagcacccaggagatgaccgtgcacctgctgagcaagctgatcagcgtgagcaagcacaccctggtggaccccagccagctgagcggcttccccctgaacatcctgtgcctgctgccccacctgatccagcacttcgacagccccacccagttctgcaaggagaccgccagcagaatcgccaaggtgtgcgccgaggagaagtgccccaccctggtgaacctggcccacatgatgagcctgtacagcacccacacctacagcagagactgcagcaactggatcaacgtggtgtgcagatacctgcacgacagcttcagcgacaccaccttcaacctggtgacctacctggccgagctgctggagaagggcctgagcagcatgcagcagagcctgctgcagatcatctacagcctgctgagccacatcgacctgagcgccgcccccgccaagcagttcaacctggagatcatcaagatcatcggcaagtacgtgcagagcccctactggaaggaggccctgaacatcctgaagctggtggtgagcagaagcgccagcctggtggtgcccagcgacatccccaagacctacggcggcgacaccggcagccccgagatcagcttcaccaagatcttcaacaacgtgagcaaggagctgcccggcaagaccctggacttccacttcgacatcagcgagacccccatcatcggcaacaagtacggcgaccagcacagcgccgccggcagaaacggcaagcccaaggtgatcgccgtgaccagaagcaccagcagcaccagcagcggcagcaacagcaacgccctggtgcccgtgagctggaagagaccccagctgagccagagaagaaccagagagaagctgatgaacgtgctgagcctgtgcggccccgagagcggcctgcccaagaaccccagcgtggtgttcagcagcaacgaggacctggaggtgggcgaccagcagaccagcctgatcagcaccaccgaggacatcaaccaggaggaggaggtggccgtggaggacaacagcagcgagcagcagttcggcgtgttcaaggacttcgacttcctggacgtggagctggaggacgccgagggcgagagcatggacaacttcaactggggcgtgagaagaagaagcctggacagcatcgacaagggcgacacccccagcctgcaggagtaccagtgcagcagcagcacccccagcctgaacctgaccaaccaggaggacaccgacgagagcagcgaggaggaggccgccctgaccgccagccagatcctgagcagaacccagatgctgaacagcgacagcgccaccgacgagaccatccccgaccaccccgacctgctgctgcagagcgaggacagcaccggcagcatcaccaccgaggaggtgctgcagatcagagacgagacccccaccctggaggccagcctggacaacgccaacagcagactgcccgaggacaccaccagcgtgctgaaggaggagcacgtgaccaccttcgaggacgagggcagctacatcatccaggagcagcaggagagcctggtgtgccagggcatcctggacctggaggagaccgagatgcccgagcccctggcccccgagagctaccccgagagcgtgtgcgaggaggacgtgaccctggccctgaaggagctggacgagagatgcgaggaggaggaggccgacttcagcggcctgagcagccaggacgaggaggagcaggacggcttccccgaggtgcagaccagccccctgcccagccccttcctgagcgccatcatcgccgccttccagcccgtggcctacgacgacgaggaggaggcctggagatgccacgtgaaccagatgctgagcgacaccgacggcagcagcgccgtgttcaccttccacgtgttcagcagactgttccagaccatccagagaaagttcggcgagatcaccaacgaggccgtgagcttcctgggcgacagcctgcagagaatcggcaccaagttcaagagcagcctggaggtgatgatgctgtgcagcgagtgccccaccgtgttcgtggacgccgagaccctgatgagctgcggcctgctggagaccctgaagttcggcgtgctggagctgcaggagcacctggacacctacaacgtgaagagagaggccgccgagcagtggctggacgactgcaagagaaccttcggcgccaaggaggacatgtacagaatcaacaccgacgcccagcagatggagatcctggccgagctggagctgtgcagaagactgtacaagctgcacttccagctgctgctgctgttccaggcctactgcaagctgatcaaccaggtgaacaccatcaagaacgaggccgaggtgatcaacatgagcgaggagctggcccagctggagagcatcctgaaggaggccgagagcgccagcgagaacgaggagatcgacatcagcaaggccgcccagaccaccatcgagaccgccatccacagcctgatcgagaccctgaagaacaaggagttcatcagcgccgtggcccaggtgaaggccttcagaagcctgtggcccagcgacatcttcggcagctgcgaggacgaccccgtgcagaccctgctgcacatctacttccaccaccagaccctgggccagaccggcagcttcgccgtgatcggcagcaacctggacatgagcgaggccaactacaagctgatggagctgaacctggagatcagagagagcctgagaatggtgcagagctaccagctgctggcccaggccaagcccatgggcaacatggtgagcaccggcttctag

SEQ ID NO: 183878 - DNA, 9042 bp, Artificial Sequence
  derived and/or modified sequence
atgagcaacatcaccatcgaccccgacgtgaagcccggcgagtacgtgatcaagagcctgttcgccgagttcgccgtgcaggccgagaagaagatcgaggtggtgatggccgagcccctggagaagctgctgagcagaagcctgcagagaggcgaggacctgcagttcgaccagctgatcagcagcatgagcagcgtggccgagcactgcctgcccagcctgctgagaaccctgttcgactggtacagaagacagaacggcaccgaggacgagagctacgagtacagacccagaagcagcaccaagagcaagggcgacgagcagcagagagagagagactacctgctggagagaagagacctggccgtggacttcatcttctgcctggtgctggtggaggtgctgaagcagatccccgtgcaccccgtgcccgaccccctggtgcacgaggtgctgaacctggccttcaagcacttcaagcacaaggagggctacagcggcaccaacaccggcaacgtgcacatcatcgccgacctgtacgccgaggtgatcggcgtgctggcccagagcaagttccaggccgtgagaaagaagttcgtgaccgagctgaaggagctgagacagaaggagcagagcccccacgtggtgcagagcgtgatcagcctgatcatgggcatgaagttcttcagagtgaagatgtaccccgtggaggacttcgaggccagcttccagttcatgcaggagtgcgcccagtacttcctggaggtgaaggacaaggacatcaagcacgccctggccggcctgttcgtggagatcctgatccccgtggccgccgccgtgaagaacgaggtgaacgtgccctgcctgaagaacttcgtggagatgctgtaccagaccaccttcgagctgagcagcagaaagaagcacagcctggccctgtaccccctgatcacctgcctgctgtgcgtgagccagaagcagttcttcctgaacaactggcacatcttcctgcagaactgcctgagccacctgaagaacaaggaccccaagatgagcagagtggccctggagagcctgtacagactgctgtgggtgtacgtgatcagaatcaagtgcgagagcaacaccgtgacccagagcagactgatgagcatcgtgagcgccctgttccccaagggcagcagaagcgtggtgcccagagacacccccctgaacatcttcgtgaagatcatccagttcatcgcccaggagagactggacttcgccatgaaggagatcatcttcgacctgctgagcgtgggcaagagcaccaagaccttcaccatcaaccccgagagaatgaacatcggcctgagagtgttcctggtgatcgccgacagcctgcagcagaaggacggcgagccccccatgcccaccaccggcgtgatcctgcccagcggcaacaccctgagagtgaagaagatcttcctgaacaagaccctgaccgacgaggaggccaaggtgatcggcatgagcgtgtactacccccaggtgagaaaggccctggacagcatcctgagacacctggacaaggaggtgggcagacccatgtgcatgaccagcgtgcagatgagcaacaaggagcccgaggacatgatcaccggcgagagaaagcccaagatcgacctgttcagaacctgcatcgccgccatccccagactgatccccgacggcatgagcagaaccgacctgatcgagctgctggccagactgaccatccacatggacgaggagctgagagccctggccttcaacaccctgcaggccctgatgctggacttccccgactggagagaggacgtgctgagcggcttcgtgtacttcatcgtgagagaggtgaccgacgtgcaccccaccctgctggacaacgccgtgaagatgctggtgcagctgatcaaccagtggaagcaggccgcccagatgcacaacaagaaccaggacacccagcacggcgtggccaacggcgccagccaccccccccccctggagagaagcccctacagcaacgtgttccacgtggtggagggcttcgccctggtgatcctgtgcagcagcagacccgccaccagaagactggccgtgagcgtgctgagagagatcagagccctgttcgccctgctggagatccccaagggcgacgacgagctggccatcgacgtgatggacagactgagccccagcatcctggagagcttcatccacctgaccggcgccgaccagaccaccctgctgtactgccccagcagcatcgacctgcagaccctggccgagtggaacagcagccccatcagccaccagttcgacgtgatcagccccagccacatctggatcttcgcccacgtgacccagggccaggacccctggatcatcagcctgagcagcttcctgaagcaggagaacctgcccaagcactgcagcaccgccgtgagctacgcctggatgttcgcctacaccagactgcagctgctgagcccccaggtggacatcaacagccccatcaacgccaagaaggtgaacaccaccaccagcagcgacagctacatcggcctgtggagaaactacctgatcctgtgctgcagcgccgccaccagcagcagcagcaccagcgccggcagcgtgagatgcagcccccccgagaccctggccagcacccccgacagcggctacagcatcgacagcaagatcatcggcatccccagccccagcagcctgttcaagcacatcgtgcccatgatgagaagcgagagcatggagatcaccgagagcctggtgctgggcctgggcagaaccaaccccggcgccttcagagagctgatcgaggagctgcaccccatcatcaaggaggccctggagagaagacccgagaacatgaagagaagaagaagaagagacatcctgagagtgcagctggtgagaatcttcgagctgctggccgacgccggcgtgatcagccacagcgccagcggcggcctggacaacgagacccacttcctgaacaacaccctgctggagtacgtggacctgaccagacagctgctggaggccgagaacgagaaggacagcgacaccctgaaggacatcagatgccacttcagcgccctggtggccaacatcatccagaacgtgcccgtgcaccagagaagaagcatcttcccccagcagagcctgagacacagcctgttcatgctgttcagccactgggccggccccttcagcatcatgttcacccccctggacagatacagcgacagaaacatgcagatcaacagacaccagtactgcgccctgaaggccatgagcgccgtgctgtgctgcggccccgtggccgacaacgtgggcctgagcagcgacggctacctgtacaagtggctggacaacatcctggacagcctggacaagaaggtgcaccagctgggctgcgaggccgtgaccctgctgctggagctgaaccccgaccagagcaacctgatgtactgggccgtggacagatgctacaccggcagcggcagagtggccgccggctgcttcaaggccatcgccaacgtgttccagaacagagactaccagtgcgacaccgtgatgctgctgaacctgatcctgttcaaggccgccgacagcagcagaagcatctacgaggtggccatgcagctgctgcagatcctggagcccaagatgttcagatacgcccacaagctggaggtgcagagaaccgacggcgtgctgagccagctgagccccctgccccacctgtacagcgtgagctactaccagctgagcgaggagctggccagagcctaccccgagctgaccctggccatcttcagcgagatcagccagagaatccagaccgcccaccccgccggcagacaggtgatgctgcactacctgctgccctggatgaacaacatcgagctggtggacctgaagcccctgcccaccgccagaagacacgacgaggacgaggacgacagcctgaaggacagagagctgatggtgaccagcagaagatggctgagaggcgagggctggggcagcccccaggccaccgccatggtgctgaacaacctgatgtacatgaccgccaagtacggcgacgagctggcctggagcgaggtggagaacgtgtggaccaccctggccgacggctggcccaagaacctgaagatcatcctgcacttcctgatcagcatctgcggcgtgaacagcgagcccagcctgctgccctacgtgaagaaggtgatcgtgtacctgggcagagacaagaccatgcagctgctggaggagctggtgagcgagctgcagctgaccgaccccgtgagcagcggcgtgacccacatggacaaccccccctactacagaatcaccagcagctacaagatccccagcgtgaccagcggcaccaccagcagcagcaacaccatggtggcccccaccgacggcaaccccgacaacaagcccatcaaggagaacatcgaggagagctacgtgcacctggacatctacagcggcctgaacagccacctgaacagacagcaccacagactggagagcagatacagcagcagcagcggcggcagctacgaggaggagaagagcgacagcatgcccctgtacagcaactggagactgaaggtgatggagcacaaccagggcgagcccctgcccttcccccccgccggcggctgctggagccccctggtggactacgtgcccgagaccagcagccccggcctgcccctgcacagatgcaacatcgccgtgatcctgctgaccgacctgatcatcgaccacagcgtgaaggtggagtggggcagctacctgcacctgctgctgcacgccatcttcatcggcttcgaccactgccaccccgaggtgtacgagcactgcaagagactgctgctgcacctgctgatcgtgatgggccccaacagcaacatcagaaccgtggccagcgtgctgctgagaaacaaggagttcaacgagcccagagtgctgaccgtgaagcaggtggcccacctggactacaacttcaccgccggcatcaacgacttcatccccgactaccagcccagccccatgaccgacagcggcctgagcagcagcagcaccagcagcagcatcagcctgggcaacaacagcgccgccatcagccacctgcacaccaccatcctgaacgaggtggacatcagcgtggagcaggacggcaaggtgaagaccctgatggagttcatcaccagcagaaagagaggccccctgtggaaccacgaggacgtgagcgccaagaaccccagcatcaagagcgccgagcagctgaccaccttcctgaagcacgtggtgagcgtgttcaagcagagcagcagcgagggcatccacctggagcaccacctgagcgaggtggccctgcagaccgccctgagctgcagcagcagacactacgccggcagaagcttccagatcttcagagccctgaagcagcccctgaccgccaccaccctgagcgacgtgctgagcagactggtggagaccgtgggcgaccccggcgaggacgcccagggcttcgtgatcgagctgctgctgaccctggagagcgccatcgacaccctggccgagaccatgaagcactacgacctgctgagcgccctgagccagaccagctaccacgaccccatcatgggcaacaagtacgccgccaacagaaagagcaccggccagctgaacctgagcaccagccccatcaacagcagcagctacctgggctacaacagcaacgccagaagcaacagcctgagactgagcctgatcggcgacagaagaggcgacagaagaagaagcaacaccctggacatcatggacggcagaatcaaccacagcagcagcctggccagaaccagaagcctgagcagcctgagagagaagggcatgtacgacgtgcagagcaccaccgagcccaccaacctgatggccaccatcttctggatcgccgccagcctgctggagagcgactacgagtacgagtacctgctggccctgagactgctgaacaagctgctgatccacctgcccctggacaagagcgagagcagagagaagatcgagaacgtgcagagcaagctgaagtggaccaacttccccggcctgcagcagctgttcctgaagggcttcaccagcgccagcacccaggagatgaccgtgcacctgctgagcaagctgatcagcgtgagcaagcacaccctggtggaccccagccagctgagcggcttccccctgaacatcctgtgcctgctgccccacctgatccagcacttcgacagccccacccagttctgcaaggagaccgccagcagaatcgccaaggtgtgcgccgaggagaagtgccccaccctggtgaacctggcccacatgatgagcctgtacagcacccacacctacagcagagactgcagcaactggatcaacgtggtgtgcagatacctgcacgacagcttcagcgacaccaccttcaacctggtgacctacctggccgagctgctggagaagggcctgagcagcatgcagcagagcctgctgcagatcatctacagcctgctgagccacatcgacctgagcgccgcccccgccaagcagttcaacctggagatcatcaagatcatcggcaagtacgtgcagagcccctactggaaggaggccctgaacatcctgaagctggtggtgagcagaagcgccagcctggtggtgcccagcgacatccccaagacctacggcggcgacaccggcagccccgagatcagcttcaccaagatcttcaacaacgtgagcaaggagctgcccggcaagaccctggacttccacttcgacatcagcgagacccccatcatcggcaacaagtacggcgaccagcacagcgccgccggcagaaacggcaagcccaaggtgatcgccgtgaccagaagcaccagcagcaccagcagcggcagcaacagcaacgccctggtgcccgtgagctggaagagaccccagctgagccagagaagaaccagagagaagctgatgaacgtgctgagcctgtgcggccccgagagcggcctgcccaagaaccccagcgtggtgttcagcagcaacgaggacctggaggtgggcgaccagcagaccagcctgatcagcaccaccgaggacatcaaccaggaggaggaggtggccgtggaggacaacagcagcgagcagcagttcggcgtgttcaaggacttcgacttcctggacgtggagctggaggacgccgagggcgagagcatggacaacttcaactggggcgtgagaagaagaagcctggacagcatcgacaagggcgacacccccagcctgcaggagtaccagtgcagcagcagcacccccagcctgaacctgaccaaccaggaggacaccgacgagagcagcgaggaggaggccgccctgaccgccagccagatcctgagcagaacccagatgctgaacagcgacagcgccaccgacgagaccatccccgaccaccccgacctgctgctgcagagcgaggacagcaccggcagcatcaccaccgaggaggtgctgcagatcagagacgagacccccaccctggaggccagcctggacaacgccaacagcagactgcccgaggacaccaccagcgtgctgaaggaggagcacgtgaccaccttcgaggacgagggcagctacatcatccaggagcagcaggagagcctggtgtgccagggcatcctggacctggaggagaccgagatgcccgagcccctggcccccgagagctaccccgagagcgtgtgcgaggaggacgtgaccctggccctgaaggagctggacgagagatgcgaggaggaggaggccgacttcagcggcctgagcagccaggacgaggaggagcaggacggcttccccgaggtgcagaccagccccctgcccagccccttcctgagcgccatcatcgccgccttccagcccgtggcctacgacgacgaggaggaggcctggagatgccacgtgaaccagatgctgagcgacaccgacggcagcagcgccgtgttcaccttccacgtgttcagcagactgttccagaccatccagagaaagttcggcgagatcaccaacgaggccgtgagcttcctgggcgacagcctgcagagaatcggcaccaagttcaagagcagcctggaggtgatgatgctgtgcagcgagtgccccaccgtgttcgtggacgccgagaccctgatgagctgcggcctgctggagaccctgaagttcggcgtgctggagctgcaggagcacctggacacctacaacgtgaagagagaggccgccgagcagtggctggacgactgcaagagaaccttcggcgccaaggaggacatgtacagaatcaacaccgacgcccagctgaacgagatcctggtggagctggagctgtgcagaagactgtacaagctgcacttccagctgctgctgctgttccaggcctactgcaagctgatcaaccaggtgaacaccatcaagaacgaggccgaggtgatcaacatgagcgaggagctggcccagctggagagcatcctgaaggaggccgagagcgccagcgagaacgaggagatcgacatcagcaaggccgcccagaccaccatcgagaccgccatccacagcctgatcgagaccctgaagaacaaggagttcatcagcgccgtggcccaggtgaaggccttcagaagcctgtggcccagcgacatcttcggcagctgcgaggacgaccccgtgcagaccctgctgcacatctacttccaccaccagaccctgggccagaccggcagcttcgccgtgatcggcagcaacctggacatgagcgaggccaactacaagctgatggagctgaacctggagatcagagagagcctgagaatggtgcagagctaccagctgctggcccaggccaagcccatgggcaacatggtgagcaccggcttctag

SEQ ID NO: 183879 - DNA, 9042 bp, Artificial Sequence
  derived and/or modified sequence
atgtccaatatcacgatcgaccctgacgtcaagcccggcgagtacgtaataaaaagtctctttgcagagtttgccgtacaggccgagaaaaagattgaagtggtcatggcggagcctctcgagaagcttctgagccggtcccttcagcgcggggaggatttgcaattcgaccaactgattagtagcatgagtagtgtggccgagcattgcctgccaagcttactcaggaccctgttcgattggtacaggcgtcagaatgggacggaggacgaaagctacgaatatcggcctaggtcatctaccaaaagtaagggtgacgagcaacagagggagcgcgattacttactggaacggcgggacttggccgtcgactttattttttgtctggttctggtggaagtgttgaagcagatccccgtccaccccgtgcccgacccgctagtccatgaggtcttaaatcttgctttcaagcatttcaagcacaaagaagggtactccgggactaacacaggcaatgtgcacattattgccgatctttacgccgaagtcattggcgtcttggctcagtctaaattccaggcggtaaggaagaagtttgtcaccgaactgaaggagctcaggcagaaggaacagagtcctcatgtcgtgcagtctgtgatttcccttattatgggaatgaagttctttagggtaaagatgtaccctgtggaggacttcgaggcctcgttccagttcatgcaggagtgcgcccaatactttcttgaggtgaaagataaggatatcaaacatgctcttgccgggctttttgttgaaattctgattccggttgctgctgcagtgaagaacgaggtgaatgtgccatgcctgaagaactttgtagagatgttgtaccaaaccaccttcgagctctcctccaggaaaaagcattcccttgcactctatccattgattacttgtctgctctgcgtatcccaaaagcaattcttcctcaacaattggcacatcttcctccagaactgtcttagtcatctgaaaaacaaagatcctaagatgagccgagtcgcactggagagcctttatcggttgctctgggtctatgtgatcagaatcaaatgcgagagcaataccgtgactcagagccggctgatgtcgatcgtgtctgccctgtttccgaaaggcagtcgctcggtagtacctcgcgacacacctctgaatatcttcgtgaagatcattcagtttattgcccaggaaaggctggatttcgctatgaaagagattattttcgacctcctctccgtgggcaagtctacaaagaccttcacaatcaatcctgagcgcatgaacattggcctccgcgtgttcctggtgatagcagactctttacagcagaaggacggcgagcctccaatgcccaccactggggtgattctgccgagcgggaataccctgcgggtgaagaagatatttctgaacaaaacactgacagatgaagaggcaaaagtgatcgggatgtcggtgtactaccctcaagtgcgcaaagctctggactccatcttgcgccatctcgacaaagaggtaggaagacctatgtgcatgacttctgttcaaatgtccaacaaagaacccgaggacatgatcacaggcgaaaggaaacctaagatcgacctgttccggacttgtatcgcagccatcccacgcctgatccccgatggcatgagtcggactgatttaatcgagttgctggctcggttaacaatccacatggatgaagaactgagggcactggccttcaacactttgcaggccctcatgctcgactttccagattggagagaagacgtgctctcagggtttgtgtacttcatcgtgcgggaggtaacagatgtgcacccaacgctgctcgacaatgccgtgaaaatgctggtacagctgatcaatcagtggaagcaggctgcccaaatgcacaataaaaatcaagacactcagcatggggtcgctaatggcgcctcccaccccccaccactggaaaggagcccttatagcaatgtctttcatgtggtggagggattcgccctggtgatactatgtagctcccgtcccgcaactaggcgtttggctgtctctgtgctgagagaaataagggcccttttcgctctgctggaaatccctaaaggcgatgacgagctggccatcgacgtgatggatcgcctaagtccctcaatcctggaatcatttatccacttaacaggagctgaccaaacaacactactgtactgccctagctctattgatcttcagacactcgccgaatggaactcatcaccgattagtcaccagttcgacgtcattagcccttctcacatatggatatttgcccatgttacacagggccaggatccttggataatctcgctgtcgtcctttctaaaacaggagaatttgccgaagcattgtagtacagccgtgtcatacgcatggatgtttgcatacacgcgcctgcaactgctgtcacctcaggtggatatcaattcacccattaacgccaagaaggtgaatacgaccacttccagcgattcctacataggtctgtggcgaaactacctcatactatgctgctctgcagcaacctcgagtagtagcacttccgcgggaagtgtgcgatgctctcctccagagaccctcgcctcgacccctgactcagggtactcaatcgactcaaagatcataggaatcccctctccgtcatctctgttcaagcacattgtgcccatgatgaggtcggaaagcatggagatcacggaatctcttgtgttggggttgggccgcaccaaccccggcgcgttccgcgaactaatcgaggaactgcaccccatcattaaggaagcacttgagagaaggccggagaatatgaagagacgacgcaggcgcgacatcttaagggttcagctggtccgaattttcgaactgctcgctgacgccggggtcatctcacatagcgcaagcggcggattagacaatgaaactcactttttgaacaatacattgctggagtatgtggatctgacaagacagctgcttgaagccgagaacgagaaagactctgacacgctgaaggatatcagatgccatttttccgcgttggtggctaacattatacagaatgtaccagtgcaccagaggcggagcatcttccctcagcaatcactgcggcatagtctgttcatgctgttttcccattgggctggtccgttctcaatcatgttcacaccactggatcgctactcagatagaaacatgcaaatcaatcgccatcagtactgtgcactgaaagctatgtcagccgttctgtgttgtgggcccgtggctgacaatgtggggttgtcctcagatggatacctatacaagtggctggataatatccttgatagcctggataaaaaggttcaccagctgggctgtgaggccgttaccttgttgctagaactgaacccagatcaatcgaatctcatgtattgggcagtcgatagatgttataccggaagcggacgggttgccgccggctgttttaaagccatcgccaatgtgttccagaaccgtgactaccagtgcgatactgtgatgttgttgaatttgatactcttcaaagcagccgacagctcaaggtccatttacgaagttgccatgcagcttttgcaaatcttagagccaaaaatgtttcggtatgcccacaagcttgaagtacaacgtactgacggcgtactttctcagctgagtcctttgccccatttgtacagtgtgtcatattatcagctctctgaggaattggcccgcgcctatcccgagctgactctggctatcttttcagaaatttctcaacgaattcaaacggcccatcctgccggcagacaggttatgttacattatctcctgccttggatgaacaacatcgaactcgtggatctgaagcctctgcccactgcccggaggcacgatgaagatgaagatgattccctgaaggatcgggagttaatggtgacgtccagaagatggttacgcggggagggatggggctctcctcaggccactgccatggtgttgaacaatttaatgtatatgacagctaaatatggagatgagcttgcatggtcagaagtcgaaaacgtgtggactacactggccgacggttggcccaaaaatcttaagataatccttcactttctgatctctatctgcggcgtaaacagcgagcctagcctgcttccatacgttaagaaagttatcgtgtaccttgggcgcgacaagactatgcagctgctggaagagctcgtgtctgagctccagctcactgaccccgtgtcatccggggtcacacatatggacaatcccccttactaccgtatcacatcttcatacaagatcccctctgtgacgagcggcactacctcttcttctaacaccatggtagcaccgaccgacggcaatcctgataacaaaccaattaaagaaaacatcgaggagagttacgtccacttagacatatactctgggctaaactcccacctcaatcgacaacaccatcgactcgaaagcagatattctagcagctctggaggcagctatgaagaagagaagagcgattccatgccgctgtactctaactggagactgaaggtcatggaacacaatcagggggagccgctgccttttccccccgccgggggctgctggtcacctttagtggactacgtgcccgagacaagttcccctggccttccactacaccgctgtaatattgctgtgatactgctgacagacctgataatagaccattcagtgaaagtggagtggggatcatatctgcacctgctgctgcatgcgatctttatcggctttgatcactgccaccccgaggtgtacgagcactgtaaaagactgttgttgcaccttctcattgtgatgggccccaattcaaacatacgaactgtggcctctgtactgcttcggaataaggagttcaatgagccccgcgtgctcactgttaagcaggtggctcacctggactataactttacagccggcattaacgactttatacccgattaccaacctagtcctatgactgacagcggactatccagctcttcaacgagctcctcgatcagtcttggaaataactcggccgcgattagtcacttgcacactactatcttgaatgaagtggacattagcgttgagcaagacggaaaagtgaaaacactgatggagttcattactagtcggaagcggggccctctgtggaaccatgaagatgtgtctgccaagaacccatcaataaagagcgccgagcagctcaccactttcctcaagcacgtcgtttccgtattcaaacagtcaagttctgaaggtattcacctggagcaccatctcagtgaggtcgcactccagacagcccttagttgctcgagcagacactacgccggcaggtctttccaaattttcagagccctcaaacaaccactgaccgccacaactctgagtgacgtgttgtcacgtcttgtggaaactgttggagaccccggcgaagatgcgcagggcttcgtcattgaactgctgctaaccctggagtccgctatcgacactcttgcagagaccatgaagcattacgacctcttgagcgctctctcccaaacatcttaccacgatccaatcatggggaataagtacgcagctaaccgaaagagcaccggacaactgaacttgtcaacctctcctattaacagctcatcctatcttggttataacagtaacgctcggtcaaactctctgcgactatctctcattggagatcgtcgcggggaccggcgccggtccaacactctcgacatcatggacggccggatcaaccactcgagttccctggcccggacccgctcactgagctccctcagggaaaaagggatgtacgacgtgcaatcaaccactgagcctacaaatctgatggctacaatattctggatcgcagcctctctcctcgaatccgattacgagtatgagtacctgctcgccctgagattgctgaacaaactgcttattcacctgccactagataagtcagagtcgagagagaagattgaaaatgttcagagtaaacttaagtggactaatttccctggactccagcagctgttcctgaagggttttacctctgcctccacacaagagatgaccgttcacttgctgtcaaagttaatttcagtgtctaagcacacccttgtagatccctcgcagctttcaggatttcctttgaacatcctatgcctgctgccccaccttatacaacacttcgattctcccacacagttctgcaaggaaactgcttcacgaattgcaaaagtgtgcgccgaggaaaagtgtcctaccctggtgaaccttgcacacatgatgagcctctattctactcacacttactcccgtgattgttctaattggattaatgtcgtgtgtcgttatctacatgactcctttagcgacactaccttcaacctcgtcacgtacctggccgagctgcttgagaagggcctgtcatctatgcagcagtcactgctacagataatttactctctgctcagtcatattgatctttccgcggctcctgcaaaacagtttaacctcgagatcatcaagattatagggaaatatgtgcagtccccttattggaaagaggccctgaacatcttaaaactggtggtgagtaggagcgcttcacttgtggtcccctctgatattcccaaaacttacgggggagacactggctctcctgagatcagttttacaaaaatcttcaataacgtgtctaaagaactgccagggaaaaccctggattttcatttcgacatctctgagacgcccataatcgggaacaagtatggcgaccagcattcagccgccggtaggaacggcaaacctaaagtaatcgctgtgacaaggtccacaagttctacttcctctgggtctaattcaaatgctctcgtgccagtaagctggaagagaccacagcttagtcagcgccgcacacgcgaaaaattgatgaacgtgctgtcgctgtgtggccctgagtctggactgcccaaaaatccctcagtggtattttcatctaatgaagaccttgaagtcggggaccagcagacgagtctgattagcaccactgaagatataaatcaagaggaagaggttgccgtcgaggacaacagctcagagcagcagttcggagttttcaaagatttcgattttctcgatgtggagctggaggacgccgaaggcgagagtatggataatttcaattggggagtaaggcgtagatctttagatagcatagacaaaggggatacaccctccctgcaggagtatcaatgcagttcctctacccccagcctaaatcttacaaatcaggaggacaccgatgagtctagcgaagaggaggctgctcttacggccagtcagatcttaagccgtacccagatgttaaattccgattccgctacggacgagactattcccgatcacccggaccttctgcttcagtcagaagattcaacaggcagcatcacaaccgaggaggtccttcagatcagggacgagacccccaccctggaggcctctctggataacgcaaactccaggctgcctgaggacaccacctctgtgttgaaagaagaacacgtgactactttcgaagacgagggtagctacataatccaagaacagcaggaaagcctggtgtgccagggcattcttgacctcgaggaaacagagatgccagagccactcgcccctgaatcttaccctgaatctgtatgcgaggaggatgtgaccctggccctcaaagagttggatgaacggtgtgaggaggaggaagcagatttctcaggtcttagtagtcaggatgaggaggaacaggacggttttcccgaagtgcaaacatcccccctccctagccctttcctgtccgcaattatcgccgctttccagccagtcgcctatgatgatgaggaagaggcgtggagatgccacgtgaatcagatgctgtccgacacagatggttcctctgctgtgtttactttccacgtgttcagccgactgtttcagactatccagcggaaattcggtgagataactaacgaggccgttagcttcctcggagactctctgcagaggatcggcaccaagttcaaatctagcctcgaggtcatgatgctttgcagtgaatgtcctacagtgttcgtggatgccgagaccttaatgagctgcggattgctggagacactgaaatttggcgtgctggaattgcaggagcatttagacacctacaacgtgaagcgggaggcggctgagcagtggttggatgactgtaagcgcactttcggtgctaaggaagatatgtacagaattaatacagatgcgcagcagatggagattctcgctgagctcgagctgtgtcgtcggctctacaagctacacttccaacttctcctgttgttccaggcttactgcaagttgattaaccaggtaaatacaattaaaaacgaagccgaagtgattaatatgtccgaggaactcgcccagttggaatccattctgaaggaggcggagtccgcgtcagagaacgaagaaatcgatatttccaaagctgcacagacaactatcgaaacagccattcattctctgattgaaactcttaaaaataaagagttcataagtgcggtcgcccaggtgaaggcctttcgctctctctggccctctgacatatttggtagctgcgaggatgatcctgtgcagactttgctgcacatttattttcatcaccagaccttggggcagacaggcagcttcgccgtcatcgggtccaatctggatatgtccgaagccaactataaactaatggaactgaacctcgagatccgagagtctctgcggatggtgcagagctaccagctgcttgcccaagccaaacctatgggcaacatggtgtcgacagggttctag

SEQ ID NO: 183880 - DNA, 9042 bp, Artificial Sequence
  derived and/or modified sequence
atgtccaatatcaccatagatcctgatgtgaagcccggggaatacgtgatcaagtcgctgttcgctgaattcgctgtgcaggcagagaaaaaaatagaggtggtgatggccgagccacttgaaaagcttttgtccaggtctctgcagcgcggggaagacctacagttcgaccagttgataagttctatgagctcagtcgcggaacattgtctgcccagtctcctccgcacattgttcgactggtataggcgccaaaacggaaccgaggacgagtcctacgagtataggcctcggtctagcacaaaatctaagggcgatgagcaacagcgtgaacgcgattatttgctcgaacgccgcgatctggcagttgacttcattttttgtctggtgcttgtggaggtcctgaagcagattcccgtgcatcccgttcctgacccactggtgcacgaagtgttgaacttagccttcaagcattttaaacataaagagggatactctggaaccaacactggaaacgttcacattattgcggatctgtacgccgaggtgatcggagtgctcgcacagtccaagtttcaagccgtacggaagaagttcgtgaccgagcttaaagagttgcggcaaaaagaacagtccccgcatgtggtgcagtctgtgatcagtttgataatggggatgaaattctttagagtcaaaatgtaccctgtagaggatttcgaggcttcgtttcaatttatgcaggaatgtgcccagtacttcctcgaggtgaaggataaggacatcaaacatgccctggccggactattcgtggagatcttgattcccgtcgccgcagcagtgaagaacgaggtgaacgtgccttgcctcaagaactttgttgaaatgctgtaccagacaactttcgaactgagcagtcggaagaaacactctcttgcactgtatcctctgatcacatgcctgctgtgcgttagccagaagcaattcttcttgaacaactggcacatttttctgcagaactgcttgtcacacctaaaaaataaggatcctaagatgtctcgggtggctttggagagtctgtatcgtctcctgtgggtgtatgtcatcagaataaagtgtgagtccaacacagtcacccaaagccgactcatgtccattgtgtcagctcttttccctaagggctccaggtccgtggtgcctcgcgacacccctcttaatatattcgtgaagatcatccagttcatcgctcaagaaaggcttgacttcgcaatgaaagagattatcttcgaccttctgtccgtcggaaaatctactaaaacattcactatcaatccagaacggatgaacattggcctcagggtcttcctggtcatcgcagattcgttacaacagaaggacggagagccccctatgcccaccacaggggttattctcccttcgggcaacacccttcgagtgaagaaaatttttctgaacaagactctaaccgatgaggaggcaaaagtcatcggaatgagtgtgtattacccccaggtgcgcaaagccctggacagtatattgaggcatttagacaaggaagtaggaagacccatgtgtatgacaagcgtccagatgagcaacaaagagcccgaggatatgattacaggggaacgaaagcccaaaatcgacctgtttaggacatgtatcgccgctattccacgtcttatcccagatggaatgtctcggacagacctgatcgaactgctggcaagactgaccattcacatggacgaggaactccgcgcactggcgttcaatacactgcaagcactgatgctggacttccctgattggcgggaggatgttctgagtggttttgtttacttcattgtccgggaggttactgacgtgcaccccaccctgctggataacgccgttaagatgcttgtccagctcatcaatcaatggaagcaggctgcccaaatgcacaacaaaaaccaggatacacagcatggagtggcaaatggcgcatcgcaccctccaccactggagcggagcccctattcaaatgtgtttcatgtagttgagggatttgcactagtcatcctttgcagctctcggcctgccactaggcgcctggctgtcagcgttctgagagagattagagccctcttcgctctgcttgagattccgaaaggcgacgatgaactggcaatagacgtcatggacagactgtcgccatctatactcgaatcatttatacatctgaccggcgccgaccagacaaccctcctttattgccccagcagcatcgacctgcaaactctcgcggagtggaacagctctccaatttcccatcagttcgatgtgatatcaccctcgcatatttggatattcgctcacgtcactcagggccaggatccatggattatttccctctcgtctttcctgaagcaggaaaacctgccaaagcactgctcaacggcagtaagctatgcttggatgttcgcctacaccagactgcagctgctgagcccccaggtcgacataaacagtcccatcaacgctaagaaggtgaacacaactacatccagcgacagctatattggactctggaggaattacctgatcctttgctgttctgctgctacttccagtagcagcacgagcgcaggaagcgtgcgttgttcaccccccgaaaccttggcatccactcccgacagtggatatagcatcgattcaaaaattataggcattccttctccatcttctctcttcaaacatatcgttcctatgatgcggagtgagagtatggagatcacagaaagcctcgtccttgggttgggacggacaaacccaggcgccttccgcgaactgatcgaggaactccacccgatcataaaggaggcgttagagaggaggccagagaatatgaagcgccgtcgacggagggacatcctgcgcgttcagttggtccgaatcttcgagttgctggctgacgctggtgttatctctcacagcgcaagtggaggattggacaacgagacacattttcttaataacacgctgcttgagtacgtggatttaactcgccaactgcttgaagctgagaacgagaaggacagcgatacgttgaaggacattcgatgccatttttccgctctcgtggccaacataatccagaacgtacccgtccatcagcgccgttcgattttcccacaacagagtctgcggcactcactgtttatgcttttttcacattgggctggaccattctcaattatgtttacccccttggatcgctactccgaccgaaatatgcagattaacaggcatcagtattgtgccttaaaagcgatgagcgcagtgctgtgctgtggaccggttgcggacaatgtgggcctcagctccgatggctacttgtacaaatggctcgacaacatcctcgactctcttgataaaaaggtgcatcagctaggatgtgaagctgtgaccctcttgctggagctgaatcctgatcagtctaacttgatgtattgggccgtcgatcggtgttacacaggaagcgggagagtggccgccggatgtttcaaggccatcgccaacgttttccagaaccgggactaccagtgtgataccgtgatgcttctaaacctgatcctctttaaggccgctgatagttcgcgatctatatatgaggtcgctatgcagctgcttcagattctcgagcctaagatgttccgatatgcacataaactggaggtgcagagaactgatggcgtcctgagtcagctgagccctctgccacacctgtatagcgtttcctactaccagctatctgaagaacttgcccgagcttatcctgaactcactcttgcgattttctctgaaatctcacagcgcatccagacagcccaccccgcgggacgccaggtcatgttgcactatctgttgccttggatgaacaatattgagttagtggaccttaaaccactgcctacagcgcggcgccatgatgaggacgaagatgatagccttaaagatcgggaactgatggtgacatccagacgctggctgagaggcgagggttggggctcccctcaggcgaccgccatggtactgaataatttgatgtacatgactgccaagtatggagacgaactggcctggagcgaggtcgagaacgtgtggactaccctggcagacggttggccaaaaaaccttaagattatcctgcactttctaatatcaatctgtggcgtaaattccgagcctagtttgctcccttacgtcaaaaaggttattgtgtaccttggaagggataagacaatgcaacttcttgaggaactggttagcgaactacagttgaccgaccccgtgtcatccggagtcacccacatggacaatcctccctactatcgcatcacttcctcctacaagattccttccgtgaccagtggtacgacaagctcctcaaatactatggtggctccgactgacgggaatcctgacaacaaaccgatcaaggaaaatatcgaggaatcctatgttcatctggatatctattccggtctgaatagccatttgaaccgccaacaccaccgactcgaatcaagatacagctcatcctcaggcgggtcatacgaggaggagaagtcagattctatgcccctgtattccaactggagacttaaagtgatggagcataatcagggtgagcccctgcctttccctccagccggaggctgctggagcccactggtagactacgtccctgagacttcctcacctggcttaccgctccatcgctgtaacattgctgtaatcctgttaaccgacctgatcattgatcactcagtaaaagtagaatggggcagctacctacacttgctgctccatgccatttttatcggctttgaccattgccaccctgaggtgtacgagcactgtaagaggcttctcctgcatctcctgattgtcatggggccaaattctaatattcgtacggtggcgagcgttttactgcgtaacaaagagtttaatgaacccagggtgcttacagtgaaacaggtggcgcatcttgactacaacttcaccgcagggattaatgactttatccctgattaccagccttcacccatgactgactcgggcctctccagctccagcacgtcatccagcatttcactcggcaacaattccgctgcaatttcccatctgcatacaaccattctgaatgaagtggacatcagtgtagagcaagatggcaaagtcaaaacacttatggaatttatcacctcacggaagaggggcccactttggaaccacgaggacgtgtccgccaaaaatccctctattaagagcgccgagcagttaaccacatttctcaaacacgtcgtcagtgtcttcaagcagagcagttcagagggtatccacctggagcaccacctgagcgaagtggctctacagactgcgctgtcctgctcctcacgacactacgctgggcgctctttccagattttccgggccttgaaacaacctctaaccgctaccacactgagtgatgtcttgagtaggctggttgagaccgtgggggatcctggggaggacgctcagggtttcgtcattgagctgctcctcacacttgaaagcgccatcgacacattggccgagacgatgaagcactatgatctgctgtcggcgctctcacagactagctatcacgacccgattatgggaaataaatacgccgctaatcggaagagcaccggccagttgaacttgtcgacatcacccattaattcgagttcctacctcggatacaactctaatgcgaggtccaattcattgcggctgagtctgattggcgataggcggggcgataggaggcgtagcaatactctcgacatcatggatgggcgcatcaatcattcctcttctctggcccggacccgttcactgagtagcttgcgcgaaaaggggatgtacgatgtgcagagtaccactgaaccaaccaacctcatggccacaatcttctggattgccgcctcgctgctcgagagcgattatgagtacgagtatctcctggcactacggttgctgaacaagctgcttattcatttacctctggacaagtcagaaagccgcgagaagatcgaaaacgtgcagtccaaactgaagtggacgaactttccgggcctgcagcagctttttttaaaggggttcacgtccgcctctacccaggaaatgactgtgcaccttctttcgaagttgataagtgtgagcaaacatactttggtcgaccccagtcagctctcaggctttcctctgaatatactctgtctcctcccccatctcatccagcacttcgacagtcccacccaattctgtaaggaaaccgcctcacgcattgccaaagtgtgtgctgaagaaaagtgccccactctagtgaacttggcccacatgatgtcactctattccacccacacatatagtcgggactgctccaattggattaatgtggtctgtagataccttcatgactctttctctgacaccacattcaatctggtaacttatcttgcggagctgctggagaagggactttcgtctatgcagcagagcctgctgcagatcatttattctcttctgtcacatatcgaccttagcgctgcaccagctaagcagttcaacctcgagataataaagattatcggcaaatacgtccagtctccatattggaaggaagccctaaatatcctaaagctcgtcgtttctcgaagcgcaagtctggtcgtgccctcagacatccccaagacttacgggggcgatactggttcaccggagattagcttcaccaagatctttaataacgtctctaaggagctaccggggaagaccctggactttcattttgatatttctgagacacccattatcgggaacaaatacggagatcagcattccgctgctggccgcaacggcaaacccaaagttattgctgtcacacgatccacaagtagcacttcgagcggttcgaattcgaatgcgctcgtaccggtgtcttggaagagaccccaactctctcagagaaggactcgggagaagcttatgaacgtgctcagtctatgcgggcctgaatctggcctgcctaagaacccctcagttgttttctcttcaaacgaagatctggaggtcggagaccaacagacatcattaatctctacaaccgaggacataaatcaggaggaggaggtggccgtcgaggacaattccagcgaacaacagttcggtgttttcaaagactttgacttccttgatgtcgagctggaggacgcagaaggggaaagcatggacaattttaattggggcgtgaggagaaggtcgttagactcaattgataaaggcgacaccccaagcctgcaagagtaccaatgttcctccagcacaccaagtctaaacctgacaaatcaggaagacacagacgagtcttctgaggaggaggcggctcttacggcaagccagattctgtctcgcacacagatgctgaactccgacagtgccacggatgagacgattcctgaccacccagacttacttctccagagcgaagattctactggttccattacaaccgaggaagttctgcagataagggacgaaacccccacactggaggcctcacttgataatgcgaattccaggttacccgaggatactacttcagttctcaaggaggaacacgtgacgacgtttgaagacgagggttcctatatcattcaggagcagcaggagagcctcgtctgtcaaggcattctcgatctcgaagaaacggagatgccagaacccctagcccccgaaagttaccctgagtctgtctgtgaggaggatgtaacattagctctgaaagagctggacgagagatgcgaggaagaggaggctgacttctcaggactctcatcacaggacgaggaagagcaagacggctttcccgaggtgcagactagtcccctcccaagtccgttcctcagcgctattattgccgcgttccagcccgtggcttatgatgatgaggaagaagcatggcgttgccatgttaaccagatgctctccgacaccgatggcagtagtgctgtgtttacctttcatgtgttcagtaggctttttcagacaattcagcgaaaattcggcgaaatcacgaacgaggcagtctcttttctaggcgacagcctccagcgcattggcacaaaattcaaaagttcccttgaggtgatgatgctttgttccgaatgtccaactgtttttgtggatgccgaaaccctgatgagctgcggacttctggagaccctcaaatttggcgtcttagagctccaagaacacctggatacttataatgttaagcgggaagcagctgagcagtggctcgacgattgtaaacgcacatttggagccaaagaagacatgtatagaatcaacactgacgcacaacagatggagatcctggcagagcttgagctttgtagacgcctgtacaaactccactttcagctactcttgctgtttcaagcctactgcaaactgatcaaccaggtaaacacgattaagaacgaagccgaggtgattaacatgtcagaggaactggcccaactggaaagtatcctgaaagaggctgaatcagctagtgagaatgaggaaatcgacatctccaaagctgcgcagactacaatagagaccgcgatccattcactcatcgaaacattaaaaaataaggagtttatctctgccgtcgcccaggtcaaggcgttccggtccctgtggccatctgatatcttcgggtcgtgcgaggacgaccccgttcaaaccttactgcacatttactttcatcaccaaacacttggtcaaactggcagctttgcagttattgggtccaacttagatatgagtgaagccaattacaagctaatggagctgaatttggaaatcagggaaagtctgcggatggtgcaatcttaccaacttttggcacaagcaaaaccgatgggcaacatggtctccacaggattttag

SEQ ID NO: 183881 - DNA, 9042 bp, Artificial Sequence
  derived and/or modified sequence
atgagcaacatcaccattgatcccgatgttaagcctggtgaatatgtgatcaagagtctttttgctgagttcgctgtccaggccgaaaagaaaattgaagtggtgatggcagaacctctggagaaactgctgtctcggagccttcagcgtggggaggacttacagtttgatcaattgatctctagcatgagctcagtggcagagcattgtttaccctctctcctgcgtacgttgttcgactggtacaggaggcagaatggcaccgaagacgagtcttacgagtatcgtcctagatcaagtactaaatccaaaggcgacgaacaacagcgggagcgggattacctcctggagcgtcgagacctcgccgtggattttatcttttgcctcgtgttggtggaggtgttaaagcagatcccagtccacccagtgccagatcctctggttcacgaggtcctgaatctggcattcaagcacttcaaacacaaagaagggtattctggcacgaacacaggcaacgtgcatataatcgcagacttatatgcagaggtcatcggggttttggcccaaagtaaattccaggccgtgcgaaaaaagttcgtgacggaacttaaggaactgcgtcaaaaggagcagtctcctcatgtggtgcagagcgtcatctcacttatcatgggcatgaaattcttccgcgtgaaaatgtatccagtggaagatttcgaggcttcctttcagttcatgcaggaatgtgcgcagtattttctggaggtgaaagacaaagacattaaacacgcactggcaggcctgtttgttgaaatcctcattcctgtggctgccgcggttaagaatgaggtgaatgtcccctgtctcaagaactttgtcgaaatgttatatcagaccacttttgaactgtccagccgaaagaagcattccttggcgctctatcctctgatcacctgcctgctctgtgtttcacagaaacagttttttctgaataattggcatatattcttgcagaattgcttgtctcatctgaagaacaaggatcctaagatgtcccgagtcgccctggagagtctgtacaggcttttatgggtgtacgtaatcagaatcaagtgtgaaagcaacaccgtgactcaaagtcgcctgatgtctatcgtctctgccctctttccaaagggttcacgatccgtcgtacctcgggatactcctttgaatattttcgttaagatcattcagtttatagctcaggaaagacttgactttgctatgaaagagataatcttcgacttgttgagcgtaggcaaatctacaaagacattcaccatcaaccctgaacgaatgaacatcggactgcgagtgttcctagtgatagcagacagtctacaacagaaggacggcgagccccctatgccaacaacgggggtgatacttccctctggtaacactctacgcgtgaaaaaaatcttcttgaataaaacccttacagatgaggaggcaaaagtaattggcatgtcagtgtattaccctcaagtgaggaaggctctggacagcattctgaggcatctcgacaaggaagttgggagacccatgtgtatgacaagcgtccagatgagcaacaaggagcctgaagatatgattaccggcgagcgcaagcccaagatagatctgtttagaacatgcatcgctgccatacctcgactgatacccgacggaatgagtcggaccgacctcatcgagctgctggcgaggctgaccattcacatggatgaagagctgagagctctggcctttaataccctccaggctcttatgctcgattttccagattggagggaggatgtgctaagcgggtttgtatactttatcgttcgggaagtcacagatgtgcatccaaccttactcgataatgctgtgaaaatgcttgtgcaacttatcaaccagtggaaacaggccgctcagatgcacaataaaaatcaagatacacagcacggcgttgccaacggtgcctctcatcctcctcctctagaacgctcaccgtatagtaacgtcttccatgtggtggaaggttttgcactggtgatcttgtgtagctcacgacctgccacccgtaggctggcagtttctgtactgcgggagataagggccctgtttgctctactcgaaatacccaagggtgatgatgagctagccattgacgtaatggaccgcctgtctccttccatccttgagtcattcatccacctgaccggtgcagatcagaccaccctgctgtattgcccaagtagtatcgatctccaaaccctcgctgagtggaacagctctccaatcagccaccagttcgacgtgatctctccatctcatatctggatctttgcccacgtgactcaggggcaggacccatggatcataagcctttcatcgttcctcaagcaggaaaacttgccaaagcattgtagtacagccgtgtcttacgcttggatgtttgcatatactagactgcagttgttatccccacaagtagatattaacagtccaatcaatgcgaagaaagttaacacaaccacatcaagcgattcctatatcgggctctggagaaattacctgatcctgtgctgttctgccgcaacgagtagttcctccaccagtgcagggtctgtacggtgttctccgccagaaactttagcttccactcctgatagcggatacagtattgacagtaagatcatcggcataccctccccatccagcctattcaagcatattgttcctatgatgcgctccgagtctatggaaatcactgaaagcctagtcctgggattaggccgcactaatcctggagcttttagagagctcatcgaagagttgcatcctatcattaaggaagccctggagcgcagacctgagaacatgaagaggcggcgtaggcgcgacattctgcgagtccagctggtaagaatctttgagctactcgccgatgccggggtgatctctcattccgcaagtggcggcttggataatgagacgcattttttgaacaacaccctcttagaatacgtggacctcactagacaactgctcgaggccgaaaacgaaaaagattccgatacactaaaagacattcgctgtcacttctccgcactggtcgctaacatcatacagaacgtgcctgtgcatcaacgcagaagcattttccctcagcagagtctgcgccactccctctttatgttgttttcgcactgggcaggacctttcagcataatgttcacacccctggataggtatagcgatcggaatatgcagataaatcgccaccagtattgcgcactgaaagcaatgagcgctgtcctctgttgtgggcccgtcgccgacaacgttggcctttcctctgatgggtacctgtacaaatggctggataatatcctggacagtctggataaaaaagttcaccaactgggttgtgaggctgtgacactgctcttggagctgaacccagaccaaagtaatcttatgtactgggccgtcgacaggtgctatactggctccggaagggtggccgccggctgcttcaaggccatcgccaatgtcttccagaacagggactaccagtgtgacactgtaatgcttctcaaccttatcctctttaaggctgctgactcttctaggagcatttacgaggtcgccatgcagcttttgcagattctagaacctaagatgtttcggtatgcccataagctcgaggtccagcggaccgacggggtgttatctcagttatcacctctgccccacctgtactccgtttcctattatcagctctcagaagagcttgcacgcgcctatccagagctgacattggcaattttcagcgagatttctcaacgcattcaaacggcgcacccggccggtcgccaggtcatgctgcattaccttctcccttggatgaacaacatcgaactggtcgacctcaaaccactgcccacagccaggcggcatgacgaggatgaagatgactcactcaaggatcgtgagctaatggtaacctcacggcggtggctgagaggagaagggtggggctctccgcaggccaccgcaatggtgctaaacaacttaatgtatatgaccgcgaagtacggtgatgaattagcctggagtgaagtggagaatgtgtggacgactctggcagatggttggccaaaaaacttgaagatcatcctccactttcttatatcgatttgtggggtcaactcggagccctctctgctgccgtatgtgaagaaggtaatcgtctatctcgggcgagacaaaacgatgcagttacttgaagaacttgtgagcgagctccaactgactgatcccgtcagcagcggcgttacacacatggataaccccccttattaccgcattacctctagctacaagatcccatcagttactagtggtacaacgagctcctcgaacaccatggtggcccccacagacgggaatcccgataataaacctataaaagagaacatagaggagtcttacgttcacctggacatatacagcggattaaactcccatctgaaccgccaacatcatcgcctggagtcacgatacagcagctctagtggcgggtcttacgaagaggagaagtccgacagcatgccactctatagtaactggaggctcaaggtcatggagcacaaccaaggcgagcctcttccctttccccccgccggcggctgctggtcgcccctagtcgactatgttccagagacgagcagcccgggcctccccctccaccgctgtaatatcgcggtgattctgctgaccgacctgatcattgaccactccgtgaaggtcgagtggggatcttatctgcatctcctgctgcacgccatcttcatcggctttgatcactgtcatcccgaggtgtacgaacactgtaagaggcttctgctacacctgctcatcgtcatggggcccaattcaaacatccgtactgtagcaagcgtgctcctcaggaataaagagttcaacgagcctcgtgtgctcactgtcaaacaggtggctcacctagattacaattttactgccggcatcaacgacttcatccctgactaccagcctagtcccatgaccgactctggactttcgtcctcttccacatcctcctcgatcagcctgggaaacaattcggcagcaataagccacctacacacgaccatcctgaatgaagtagatatcagtgttgaacaggacgggaaagtgaagacgctcatggagtttatcacctcccgcaaacggggcccactgtggaatcatgaggatgtatcagctaagaatccgagtattaaatctgctgaacagttgacaaccttcctaaaacacgtggtgtcagttttcaaacagtcgtcctcagaagggatccatctggagcaccacctttccgaggttgccctccaaacagctctgagctgcagttcccgtcattatgctggacgttcttttcagatctttagagccctaaaacaacccttgactgccacgaccctctccgacgtactttctcgcctggtggagacagtgggagatcccggggaggacgcccagggattcgtgatcgaactcctccttacacttgaatccgccatagatacactagcagaaacaatgaagcattatgatctactgtccgctctcagtcagacttcatatcatgacccaatcatgggtaacaagtatgccgcaaatcgcaaatcaactggccagcttaaccttagtacttcccctatcaacagctcctcctatctgggatataactccaatgccagaagtaatagcctgcgactgagtctcatcggggatcgtagaggcgaccgaagaagaagtaacactctggacattatggacggccggatcaaccacagttcctcccttgcgagaactagaagtttatccagcctccgcgaaaagggaatgtatgatgtgcagagcaccacggagccaaccaatctgatggctactattttttggatcgctgcatccctgttggagagcgactacgagtatgaatacctccttgcacttcgcctccttaacaaactgcttatccatctcccactcgacaaatctgagtcacgcgagaagatagagaacgtccagtcaaagttgaagtggaccaattttcccggccttcagcagctgttcctcaagggtttcacatcagcgtctacacaagaaatgacagtgcacttattgtcgaaacttatatcagtgagtaagcatactctcgtggatccaagccagctgtccgggttcccccttaatattctctgcctattgccccatttaatccagcatttcgactcccccacacagttttgcaaggaaacagccagccggattgcaaaggtttgtgctgaggaaaaatgtccaactttggtgaacttagcgcatatgatgtctctgtactctactcatacctactcccgggactgcagcaactggattaatgtggtctgcaggtatctccatgattccttctcagacacgacttttaatcttgtgacatatctcgctgagttgctcgaaaaaggactgtcctccatgcagcaatccctgctccagattatttattcactccttagccacatcgacctgtctgccgctcccgccaaacaatttaatctggagattataaagatcatcggcaaatacgtgcaaagtccctattggaaagaggcgctcaatattctcaagctcgtggttagccgaagcgctagcctggttgtgccatcagatatccccaagacctacggcggcgatacaggctccccagagatctccttcactaaaatctttaacaacgtgtcaaaggaactccctggcaagacacttgattttcattttgacatatctgaaacgcccataatcggaaacaagtatggggaccaacatagtgctgcgggtcgaaatggtaagcccaaagtgattgctgttacaagaagcacctcatcaaccagctccggtagcaattccaacgccctggtgcctgtaagttggaagaggccgcagctcagccagcgtagaacccgcgaaaagttgatgaacgttctctccttgtgcggccccgaaagtggcctgccaaagaacccgtccgtggtgttcagcagtaacgaggacttggaggtaggagatcagcaaactagcctgatcagtacgacagaggatattaatcaggaggaggaagtcgcggttgaggataatagttcagaacagcagttcggcgtgtttaaagatttcgattttctggacgtggagctggaggacgccgaaggggaatcaatggacaatttcaattggggagtgcgacgccggagtctggatagcatcgataaaggagatacaccctctttgcaggaatatcagtgctccagttctactcctagtttaaacctgacgaaccaggaagataccgacgaaagctctgaggaggaggccgctttgactgcgagtcagattctgagtaggacgcagatgctgaattccgactcagcaaccgatgaaacaataccagaccatcccgatcttcttcttcagagtgaggactccactggcagcataaccacagaggaggttctgcagattcgggacgaaacccccaccctcgaggccagtctcgataatgcaaattcacgattgcctgaggataccacgagcgtgctaaaggaagagcacgtgactacctttgaagacgagggctcctatatcattcaggaacagcaggaatcactagtctgtcaagggattcttgacctcgaggagacagagatgccggagcccctggcgcccgaaagctatccggagtctgtctgcgaagaagatgtcacccttgcacttaaagaactggacgagcgttgtgaggaggaggaagcggactttagcgggctatcctcgcaagacgaggaggaacaagatggatttcctgaagttcagaccagccccttgcccagtcctttcctgtcggccattatcgctgccttccagcccgtggcttacgacgacgaggaggaggcctggcgttgccatgtcaatcagatgctcagcgatacagacggctctagtgccgtgttcactttccatgtgttttcaagacttttccagaccatccagaggaagtttggtgaaatcaccaacgaagcagttagctttttgggcgactctctccagaggatcggtacaaaatttaagagcagtctggaggtgatgatgctgtgttccgaatgcccaactgtatttgtcgatgccgaaactctaatgtcctgcggtctactggaaacactcaagttcggcgttctcgaacttcaggaacacttggatacgtataatgtgaagcgtgaggccgctgagcaatggctggatgactgtaagaggaccttcggggcaaaagaggacatgtaccgtatcaacacagatgctcagctgaacgagattctggtggagctcgaactctgccggcgactatacaagctgcactttcagctgctcctgctttttcaggcctactgcaaactgatcaaccaagttaatacaatcaagaacgaagccgaggtgatcaatatgagtgaagagttggctcagttggagagcatactgaaggaagcagagagcgcctccgaaaacgaggagatcgatatttctaaggccgcccagactaccatcgagaccgctattcatagcttaatcgagaccctaaaaaacaaagagttcatttcagcggtggcacaggtcaaagctttcagatccctatggcccagcgacattttcggttcctgtgaggatgaccccgtgcagacattactgcatatttactttcaccaccagactctcggacagaccggttctttcgcggtgattggatcgaatctggatatgtctgaagcaaattataagttgatggagttaaatctcgagattcgggagagcctgaggatggtccagagttaccagctcctggcgcaggccaaacctatgggcaacatggtttcaacgggcttttag

SEQ ID NO: 183882 - DNA, 9042 bp, Artificial Sequence
  derived and/or modified sequence
atgagcaacatcaccatcgaccctgatgtgaagccaggagaatatgtgatcaagagcctgtttgctgagtttgctgtgcaggccgagaagaagattgaggtggtgatggccgagcccctggagaagctgctgagccgcagcctgcagagaggagaggacctgcagtttgaccagctgatcagctccatgagctctgtggccgagcactgcctgcccagcctgctgcggaccctgtttgactggtaccgccggcagaatggaacagaagatgagagctatgagtaccggcccaggagcagcaccaagagcaaaggagatgagcagcagcgggagcgggactacctgctggagcggcgggacctggccgtggacttcatcttctgcctggtgctggtggaggtgctgaagcagatccctgtgcaccctgtgcctgaccccctggtgcatgaggtgctgaacctggccttcaagcacttcaagcacaaggagggctacagcggcaccaacacaggaaatgtgcacatcatcgctgacctgtatgcagaggtgattggagtgctggcccagagcaagttccaggccgtgaggaagaagtttgtgacagagctgaaggagctgcggcagaaggagcagagcccccacgtggtgcagagcgtcatcagcctcatcatgggcatgaagttcttccgggtgaagatgtaccctgtggaggactttgaggccagcttccagttcatgcaggagtgtgcccagtacttcctggaggtgaaggacaaggacatcaagcacgccctggccggcctgtttgtggagatcctgatccctgtggccgctgctgtgaagaatgaggtgaatgtgccctgcctgaagaactttgtggagatgctgtaccagaccacctttgagctgagcagcaggaagaagcacagcctggccctgtaccccctcatcacctgcctgctgtgtgtgtcccagaagcagttcttcctgaacaactggcacatcttcctgcagaactgcctgagccacctgaagaacaaggaccccaagatgagccgggtggccctggagagcctgtaccgcctgctgtgggtgtatgtgatccgcatcaagtgtgagagcaacacagtgacccagagccggctgatgagcatcgtgtctgccctcttccccaagggcagccgctctgtggtgccccgggacacccccctgaacatctttgtgaagatcatccagttcatcgcccaggagcggctggactttgccatgaaggagatcatctttgacctgctgtctgtgggcaagagcaccaagaccttcaccatcaaccctgagaggatgaacatcggcctgcgggtcttcctggtgattgctgacagcctgcagcagaaggatggagagccccccatgcccaccactggagtcatcctgcccagcggcaacaccctgcgggtgaagaagatcttcctgaacaagaccctgacagatgaggaggccaaggtgattggcatgtctgtgtactacccccaggtgaggaaggccctggacagcatcctgcggcacctggacaaggaggtgggccggcccatgtgcatgacctctgtgcagatgagcaacaaggagcctgaggacatgatcactggagagaggaagcccaagattgacctcttccgcacctgcatcgccgccatccccaggctcatcccagatggcatgagcaggacagacctgattgagctgctggcccggctgaccatccacatggatgaggagctgcgggccctggccttcaacaccctgcaggccctgatgctggacttcccagactggagagaagatgtgctgagcggctttgtgtacttcatcgtgcgggaggtgacagatgtgcaccccaccctgctggacaatgctgtgaagatgctggtgcagctgatcaaccagtggaagcaggccgcccagatgcacaacaagaaccaggacacccagcacggcgtggccaatggagccagccaccccccacccctggagaggagcccctacagcaatgtgttccacgtggtggagggctttgccctggtgatcctgtgcagcagcaggcctgccacccggcggctggccgtgtctgtgctgcgggagatccgggccctgtttgccctgctggagatccccaagggagatgatgagctggccattgatgtgatggaccggctgagccccagcatcctggagagcttcatccacctgactggagctgaccagaccaccctgctgtactgccccagcagcattgacctgcagaccctggccgagtggaacagcagccccatcagccaccagtttgatgtgatcagccccagccacatctggatctttgcccacgtgacccagggccaggacccctggatcatcagcctgagcagcttcctgaagcaggagaacctgcccaagcactgcagcacagctgtgtcctatgcctggatgtttgcctacacccggctgcagctgctgagcccccaggtggacatcaacagccccatcaatgccaagaaggtgaacaccaccaccagcagtgacagctacatcggcctgtggaggaactacctgatcctgtgctgcagcgctgccaccagcagcagcagcaccagcgctggctctgtgcgctgcagccccccagagaccctggccagcaccccagacagcggctacagcattgacagcaagatcatcggcatccccagccccagcagcctcttcaagcacatcgtgcccatgatgaggtctgagagcatggagatcacagagagcctggtgctgggcctgggccgcaccaaccctggggccttccgggagctgattgaggagctgcaccccatcatcaaggaggccctggagaggaggcctgagaacatgaagagaagaagaagaagagacatcctgcgggtgcagctggtgcgcatctttgagctgctggctgatgctggggtcatcagccacagcgccagcggcggcctggacaatgagacccacttcctgaacaacaccctgctggagtatgtggacctgacccggcagctgctggaggctgaaaatgagaaggacagcgacaccctgaaggacatccgctgccacttcagcgccctggtggccaacatcatccagaatgtgcctgtgcaccagaggaggagcatcttcccccagcagagcctgcggcacagcctcttcatgctgttcagccactgggccggccccttcagcatcatgttcacccccctggaccgctacagcgacaggaacatgcagatcaacagacaccagtactgtgccctgaaggccatgtctgctgtgctgtgctgcggccctgtggccgacaacgtgggcctgagcagtgatggctacctgtacaagtggctggacaacatcctggacagcctggacaagaaggtgcaccagctgggctgtgaggccgtgaccctgctgctggagctgaacccagaccagagcaacctgatgtactgggccgtggaccgctgctacacaggcagcggccgggtggccgccggctgcttcaaggccatcgccaacgtgttccagaacagagactaccagtgtgacacagtgatgctgctgaacctgatcctcttcaaggctgctgacagcagccgcagcatctatgaggtggccatgcagctgctgcagatcctggagcccaagatgttccgctatgcccacaagctggaggtgcagaggacagatggagtgctgagccagctgagccccctgccccacctgtacagcgtgtcctactaccagctgtctgaggagctggcccgggcctacccagagctgaccctggccatcttcagcgagatcagccagaggatccagacagcccaccctgctggccggcaggtgatgctgcactacctgctgccctggatgaacaacatcgagctggtggacctgaagcccctgcccacagccaggagacatgatgaagatgaagatgacagcctgaaggaccgggagctgatggtgaccagccgccgctggctgcggggggagggctggggcagcccccaggccacagccatggtgctgaacaacctgatgtacatgacagccaagtatggagatgagctggcctggagcgaggtggagaatgtgtggaccaccctggctgatggctggcccaagaacctgaagatcatcctgcacttcctgatcagcatctgtggggtgaacagcgagcccagcctgctgccctacgtgaagaaggtgattgtgtacctgggccgggacaagaccatgcagctgctggaggagctggtgtctgagctgcagctgacagatcctgtgagcagcggcgtgacccacatggacaaccccccctactaccgcatcaccagcagctacaagatccccagcgtgaccagcggcaccaccagcagcagcaacaccatggtggcccccacagatggcaacccagacaacaagcccatcaaggagaacatcgaggagagctatgtgcacctggacatctacagcggcctgaacagccacctgaaccggcagcaccaccggctggagagccgctacagcagcagcagcggcggcagctatgaggaggagaagagtgacagcatgcccctgtacagcaactggaggctgaaggtgatggagcacaaccagggcgagcccctgcccttccccccagctgggggctgctggagccccctggtggactatgtgcctgagaccagcagccctggcctgcccctgcaccgctgcaacattgctgtgatcctgctgacagacctgatcatcgaccacagcgtgaaggtggagtggggcagctacctgcacctgctgctgcacgccatcttcatcggctttgaccactgccaccctgaggtgtatgagcactgcaagaggctgctgctgcacctgctgattgtgatgggccccaacagcaacatcagaacagtggcctctgtgctgctgaggaacaaggagttcaatgagccccgggtgctgactgtgaagcaggtggcccacctggactacaacttcaccgctggcatcaatgacttcatcccagactaccagcccagccccatgacagattctggcctgagcagcagcagcaccagcagcagcatcagcctgggcaacaacagcgctgccatcagccacctgcacaccaccatcctgaatgaggtggacatctctgtggagcaggacggcaaggtgaagaccctgatggagttcatcaccagcaggaagaggggccccctgtggaaccatgaagatgtgtctgccaagaaccccagcatcaagtctgctgagcagctgaccaccttcctgaagcacgtggtgtctgtgttcaagcagagcagcagcgagggcatccacctggagcaccacctgtctgaggtggccctgcagacagccctgagctgcagcagccgccactacgccggccgctccttccagatcttccgggccctgaagcagcccctgacagccaccaccctgagtgatgtgctgagccggctggtggagaccgtgggggaccctggagaagatgcccagggcttcgtcatcgagctgctgctgaccctggagagcgccatcgacaccctggccgagaccatgaagcactatgacctgctgagcgccctgagccagaccagctaccatgaccccatcatgggcaacaagtatgctgccaacaggaagagcacaggccagctgaacctgagcaccagccccatcaacagcagcagctacctgggctacaacagcaatgcccggagcaacagcctgcggctgagcctgattggagaccggcggggggacagaagaagaagcaacaccctggacatcatggatggccgcatcaaccacagcagcagcctggcccggaccaggagcctgagcagcctgcgggagaagggcatgtatgatgtgcagagcaccacagagcccaccaacctgatggccaccatcttctggattgctgccagcctgctggagagtgactatgaatatgagtacctgctggccctgcggctgctgaacaagctgctgatccacctgcccctggacaagtctgagagccgggagaagattgaaaatgtgcagagcaagctgaagtggaccaacttccctggcctgcagcagctgttcctgaagggcttcaccagcgccagcacccaggagatgacagtgcacctgctgagcaagctgatctctgtgtccaagcacaccctggtggaccccagccagctgagcggcttccccctgaacatcctgtgcctgctgccccacctgatccagcactttgacagccccacccagttctgcaaggagacagccagcagaattgccaaggtgtgtgccgaggagaagtgccccaccctggtgaacctggcccacatgatgagcctgtacagcacccacacctacagccgggactgcagcaactggatcaacgtggtgtgccgctacctgcatgacagcttcagtgacaccaccttcaacctggtgacctacctggccgagctgctggagaagggcctgagctccatgcagcagagcctgctgcagatcatctacagcctgctgagccacatcgacctgtctgctgccccagccaagcagttcaacctggagatcatcaagatcatcggcaagtatgtgcagagcccctactggaaggaggccctgaacatcctgaagctggtggtgagccgcagcgccagcctggtggtgcccagcgacatccccaagacctacggcggggacaccggcagccctgagatctccttcaccaagatcttcaacaacgtgtccaaggagctgcccgggaagaccctggacttccactttgacatcagcgagacccccatcatcggcaacaagtatggagaccagcacagcgctgctggaagaaatggcaagcccaaggtgattgctgtgaccaggagcaccagcagcaccagcagcggcagcaacagcaatgccctggtgcctgtgtcctggaagaggccccagctgagccagaggaggacccgggagaagctgatgaatgtgctgagcctgtgtggccctgagagcggcctgcccaagaaccccagcgtggtgttcagcagcaatgaagacctggaggtgggggaccagcagaccagcctcatcagcaccacagaggacatcaaccaggaggaggaggtggccgtggaggacaacagcagcgagcagcagtttggagtcttcaaggactttgacttcctggatgtggagctggaggatgctgagggggagagcatggacaacttcaactggggcgtgagaagaagaagcctggacagcattgacaagggggacacccccagcctgcaggagtaccagtgcagcagcagcacccccagcctgaacctgaccaaccaggaggacacagatgagagcagcgaggaggaggccgccctgacagccagccagatcctgagcaggacccagatgctgaacagcgacagcgccacagatgagaccatcccagaccacccagacctgctgctgcagagcgaggacagcacaggcagcatcaccacagaggaggtgctgcagatcagagatgagacccccaccctggaggccagcctggacaatgccaacagccggctgcctgaggacaccacctctgtgctgaaggaggagcacgtgaccacctttgaagatgagggcagctacatcatccaggagcagcaggagagcctggtgtgccagggcatcctggacctggaggagacagagatgcctgagcccctggcccctgagagctacccagagagcgtgtgtgaagaagatgtgaccctggccctgaaggagctggatgagcgctgtgaggaggaggaggccgacttcagcggcctgagcagccaggatgaggaggagcaggacggcttccctgaggtgcagaccagccccctgcccagccccttcctgagcgccatcatcgccgccttccagcctgtggcctatgatgatgaggaggaggcctggcgctgccacgtgaaccagatgctgagtgacacagatggcagcagcgctgtgttcaccttccacgtgttcagccgcctcttccagaccatccagaggaagtttggagagatcaccaatgaggccgtgtccttcctgggggacagcctgcagagaattggcaccaagttcaagagcagcctggaggtgatgatgctgtgcagtgaatgtcccaccgtgtttgtggatgctgagaccctgatgagctgtggcctgctggagaccctgaagtttggagtgctggagctgcaggagcacctggacacctacaacgtgaagcgggaggccgctgagcagtggctggatgactgcaagaggacctttggagccaaggaggacatgtaccgcatcaacacagatgcccagcagatggagatcctggccgagctggagctgtgcagaagactctacaagctgcacttccagctgctgctgctcttccaggcctactgcaagctgatcaaccaggtgaacaccatcaagaatgaagctgaggtgatcaacatgtctgaggagctggcccagctggagagcatcctgaaggaggccgagagcgcctctgaaaatgaggagattgacatcagcaaggccgcccagaccaccattgaaacagccatccacagcctgattgagaccctgaagaacaaggagttcatctctgctgtggcccaggtgaaggccttccgcagcctgtggcccagcgacatcttcggcagctgtgaagatgatcctgtgcagaccctgctgcacatctacttccaccaccagaccctgggccagacaggcagctttgctgtgattggcagcaacctggacatgtctgaggccaactacaagctgatggagctgaacctggagatccgggagagcctgaggatggtgcagagctaccagctgctggcccaggccaagcccatgggcaacatggtgtccacaggcttctag

SEQ ID NO: 183883 - DNA, 9042 bp, Artificial Sequence
  derived and/or modified sequence
atgagcaacatcaccatcgaccctgatgtgaagccaggagaatatgtgatcaagagcctgtttgctgagtttgctgtgcaggccgagaagaagattgaggtggtgatggccgagcccctggagaagctgctgagccgcagcctgcagagaggagaggacctgcagtttgaccagctgatcagctccatgagctctgtggccgagcactgcctgcccagcctgctgcggaccctgtttgactggtaccgccggcagaatggaacagaagatgagagctatgagtaccggcccaggagcagcaccaagagcaaaggagatgagcagcagcgggagcgggactacctgctggagcggcgggacctggccgtggacttcatcttctgcctggtgctggtggaggtgctgaagcagatccctgtgcaccctgtgcctgaccccctggtgcatgaggtgctgaacctggccttcaagcacttcaagcacaaggagggctacagcggcaccaacacaggaaatgtgcacatcatcgctgacctgtatgcagaggtgattggagtgctggcccagagcaagttccaggccgtgaggaagaagtttgtgacagagctgaaggagctgcggcagaaggagcagagcccccacgtggtgcagagcgtcatcagcctcatcatgggcatgaagttcttccgggtgaagatgtaccctgtggaggactttgaggccagcttccagttcatgcaggagtgtgcccagtacttcctggaggtgaaggacaaggacatcaagcacgccctggccggcctgtttgtggagatcctgatccctgtggccgctgctgtgaagaatgaggtgaatgtgccctgcctgaagaactttgtggagatgctgtaccagaccacctttgagctgagcagcaggaagaagcacagcctggccctgtaccccctcatcacctgcctgctgtgtgtgtcccagaagcagttcttcctgaacaactggcacatcttcctgcagaactgcctgagccacctgaagaacaaggaccccaagatgagccgggtggccctggagagcctgtaccgcctgctgtgggtgtatgtgatccgcatcaagtgtgagagcaacacagtgacccagagccggctgatgagcatcgtgtctgccctcttccccaagggcagccgctctgtggtgccccgggacacccccctgaacatctttgtgaagatcatccagttcatcgcccaggagcggctggactttgccatgaaggagatcatctttgacctgctgtctgtgggcaagagcaccaagaccttcaccatcaaccctgagaggatgaacatcggcctgcgggtcttcctggtgattgctgacagcctgcagcagaaggatggagagccccccatgcccaccactggagtcatcctgcccagcggcaacaccctgcgggtgaagaagatcttcctgaacaagaccctgacagatgaggaggccaaggtgattggcatgtctgtgtactacccccaggtgaggaaggccctggacagcatcctgcggcacctggacaaggaggtgggccggcccatgtgcatgacctctgtgcagatgagcaacaaggagcctgaggacatgatcactggagagaggaagcccaagattgacctcttccgcacctgcatcgccgccatccccaggctcatcccagatggcatgagcaggacagacctgattgagctgctggcccggctgaccatccacatggatgaggagctgcgggccctggccttcaacaccctgcaggccctgatgctggacttcccagactggagagaagatgtgctgagcggctttgtgtacttcatcgtgcgggaggtgacagatgtgcaccccaccctgctggacaatgctgtgaagatgctggtgcagctgatcaaccagtggaagcaggccgcccagatgcacaacaagaaccaggacacccagcacggcgtggccaatggagccagccaccccccacccctggagaggagcccctacagcaatgtgttccacgtggtggagggctttgccctggtgatcctgtgcagcagcaggcctgccacccggcggctggccgtgtctgtgctgcgggagatccgggccctgtttgccctgctggagatccccaagggagatgatgagctggccattgatgtgatggaccggctgagccccagcatcctggagagcttcatccacctgactggagctgaccagaccaccctgctgtactgccccagcagcattgacctgcagaccctggccgagtggaacagcagccccatcagccaccagtttgatgtgatcagccccagccacatctggatctttgcccacgtgacccagggccaggacccctggatcatcagcctgagcagcttcctgaagcaggagaacctgcccaagcactgcagcacagctgtgtcctatgcctggatgtttgcctacacccggctgcagctgctgagcccccaggtggacatcaacagccccatcaatgccaagaaggtgaacaccaccaccagcagtgacagctacatcggcctgtggaggaactacctgatcctgtgctgcagcgctgccaccagcagcagcagcaccagcgctggctctgtgcgctgcagccccccagagaccctggccagcaccccagacagcggctacagcattgacagcaagatcatcggcatccccagccccagcagcctcttcaagcacatcgtgcccatgatgaggtctgagagcatggagatcacagagagcctggtgctgggcctgggccgcaccaaccctggggccttccgggagctgattgaggagctgcaccccatcatcaaggaggccctggagaggaggcctgagaacatgaagagaagaagaagaagagacatcctgcgggtgcagctggtgcgcatctttgagctgctggctgatgctggggtcatcagccacagcgccagcggcggcctggacaatgagacccacttcctgaacaacaccctgctggagtatgtggacctgacccggcagctgctggaggctgaaaatgagaaggacagcgacaccctgaaggacatccgctgccacttcagcgccctggtggccaacatcatccagaatgtgcctgtgcaccagaggaggagcatcttcccccagcagagcctgcggcacagcctcttcatgctgttcagccactgggccggccccttcagcatcatgttcacccccctggaccgctacagcgacaggaacatgcagatcaacagacaccagtactgtgccctgaaggccatgtctgctgtgctgtgctgcggccctgtggccgacaacgtgggcctgagcagtgatggctacctgtacaagtggctggacaacatcctggacagcctggacaagaaggtgcaccagctgggctgtgaggccgtgaccctgctgctggagctgaacccagaccagagcaacctgatgtactgggccgtggaccgctgctacacaggcagcggccgggtggccgccggctgcttcaaggccatcgccaacgtgttccagaacagagactaccagtgtgacacagtgatgctgctgaacctgatcctcttcaaggctgctgacagcagccgcagcatctatgaggtggccatgcagctgctgcagatcctggagcccaagatgttccgctatgcccacaagctggaggtgcagaggacagatggagtgctgagccagctgagccccctgccccacctgtacagcgtgtcctactaccagctgtctgaggagctggcccgggcctacccagagctgaccctggccatcttcagcgagatcagccagaggatccagacagcccaccctgctggccggcaggtgatgctgcactacctgctgccctggatgaacaacatcgagctggtggacctgaagcccctgcccacagccaggagacatgatgaagatgaagatgacagcctgaaggaccgggagctgatggtgaccagccgccgctggctgcggggggagggctggggcagcccccaggccacagccatggtgctgaacaacctgatgtacatgacagccaagtatggagatgagctggcctggagcgaggtggagaatgtgtggaccaccctggctgatggctggcccaagaacctgaagatcatcctgcacttcctgatcagcatctgtggggtgaacagcgagcccagcctgctgccctacgtgaagaaggtgattgtgtacctgggccgggacaagaccatgcagctgctggaggagctggtgtctgagctgcagctgacagatcctgtgagcagcggcgtgacccacatggacaaccccccctactaccgcatcaccagcagctacaagatccccagcgtgaccagcggcaccaccagcagcagcaacaccatggtggcccccacagatggcaacccagacaacaagcccatcaaggagaacatcgaggagagctatgtgcacctggacatctacagcggcctgaacagccacctgaaccggcagcaccaccggctggagagccgctacagcagcagcagcggcggcagctatgaggaggagaagagtgacagcatgcccctgtacagcaactggaggctgaaggtgatggagcacaaccagggcgagcccctgcccttccccccagctgggggctgctggagccccctggtggactatgtgcctgagaccagcagccctggcctgcccctgcaccgctgcaacattgctgtgatcctgctgacagacctgatcatcgaccacagcgtgaaggtggagtggggcagctacctgcacctgctgctgcacgccatcttcatcggctttgaccactgccaccctgaggtgtatgagcactgcaagaggctgctgctgcacctgctgattgtgatgggccccaacagcaacatcagaacagtggcctctgtgctgctgaggaacaaggagttcaatgagccccgggtgctgactgtgaagcaggtggcccacctggactacaacttcaccgctggcatcaatgacttcatcccagactaccagcccagccccatgacagattctggcctgagcagcagcagcaccagcagcagcatcagcctgggcaacaacagcgctgccatcagccacctgcacaccaccatcctgaatgaggtggacatctctgtggagcaggacggcaaggtgaagaccctgatggagttcatcaccagcaggaagaggggccccctgtggaaccatgaagatgtgtctgccaagaaccccagcatcaagtctgctgagcagctgaccaccttcctgaagcacgtggtgtctgtgttcaagcagagcagcagcgagggcatccacctggagcaccacctgtctgaggtggccctgcagacagccctgagctgcagcagccgccactacgccggccgctccttccagatcttccgggccctgaagcagcccctgacagccaccaccctgagtgatgtgctgagccggctggtggagaccgtgggggaccctggagaagatgcccagggcttcgtcatcgagctgctgctgaccctggagagcgccatcgacaccctggccgagaccatgaagcactatgacctgctgagcgccctgagccagaccagctaccatgaccccatcatgggcaacaagtatgctgccaacaggaagagcacaggccagctgaacctgagcaccagccccatcaacagcagcagctacctgggctacaacagcaatgcccggagcaacagcctgcggctgagcctgattggagaccggcggggggacagaagaagaagcaacaccctggacatcatggatggccgcatcaaccacagcagcagcctggcccggaccaggagcctgagcagcctgcgggagaagggcatgtatgatgtgcagagcaccacagagcccaccaacctgatggccaccatcttctggattgctgccagcctgctggagagtgactatgaatatgagtacctgctggccctgcggctgctgaacaagctgctgatccacctgcccctggacaagtctgagagccgggagaagattgaaaatgtgcagagcaagctgaagtggaccaacttccctggcctgcagcagctgttcctgaagggcttcaccagcgccagcacccaggagatgacagtgcacctgctgagcaagctgatctctgtgtccaagcacaccctggtggaccccagccagctgagcggcttccccctgaacatcctgtgcctgctgccccacctgatccagcactttgacagccccacccagttctgcaaggagacagccagcagaattgccaaggtgtgtgccgaggagaagtgccccaccctggtgaacctggcccacatgatgagcctgtacagcacccacacctacagccgggactgcagcaactggatcaacgtggtgtgccgctacctgcatgacagcttcagtgacaccaccttcaacctggtgacctacctggccgagctgctggagaagggcctgagctccatgcagcagagcctgctgcagatcatctacagcctgctgagccacatcgacctgtctgctgccccagccaagcagttcaacctggagatcatcaagatcatcggcaagtatgtgcagagcccctactggaaggaggccctgaacatcctgaagctggtggtgagccgcagcgccagcctggtggtgcccagcgacatccccaagacctacggcggggacaccggcagccctgagatctccttcaccaagatcttcaacaacgtgtccaaggagctgcccgggaagaccctggacttccactttgacatcagcgagacccccatcatcggcaacaagtatggagaccagcacagcgctgctggaagaaatggcaagcccaaggtgattgctgtgaccaggagcaccagcagcaccagcagcggcagcaacagcaatgccctggtgcctgtgtcctggaagaggccccagctgagccagaggaggacccgggagaagctgatgaatgtgctgagcctgtgtggccctgagagcggcctgcccaagaaccccagcgtggtgttcagcagcaatgaagacctggaggtgggggaccagcagaccagcctcatcagcaccacagaggacatcaaccaggaggaggaggtggccgtggaggacaacagcagcgagcagcagtttggagtcttcaaggactttgacttcctggatgtggagctggaggatgctgagggggagagcatggacaacttcaactggggcgtgagaagaagaagcctggacagcattgacaagggggacacccccagcctgcaggagtaccagtgcagcagcagcacccccagcctgaacctgaccaaccaggaggacacagatgagagcagcgaggaggaggccgccctgacagccagccagatcctgagcaggacccagatgctgaacagcgacagcgccacagatgagaccatcccagaccacccagacctgctgctgcagagcgaggacagcacaggcagcatcaccacagaggaggtgctgcagatcagagatgagacccccaccctggaggccagcctggacaatgccaacagccggctgcctgaggacaccacctctgtgctgaaggaggagcacgtgaccacctttgaagatgagggcagctacatcatccaggagcagcaggagagcctggtgtgccagggcatcctggacctggaggagacagagatgcctgagcccctggcccctgagagctacccagagagcgtgtgtgaagaagatgtgaccctggccctgaaggagctggatgagcgctgtgaggaggaggaggccgacttcagcggcctgagcagccaggatgaggaggagcaggacggcttccctgaggtgcagaccagccccctgcccagccccttcctgagcgccatcatcgccgccttccagcctgtggcctatgatgatgaggaggaggcctggcgctgccacgtgaaccagatgctgagtgacacagatggcagcagcgctgtgttcaccttccacgtgttcagccgcctcttccagaccatccagaggaagtttggagagatcaccaatgaggccgtgtccttcctgggggacagcctgcagagaattggcaccaagttcaagagcagcctggaggtgatgatgctgtgcagtgaatgtcccaccgtgtttgtggatgctgagaccctgatgagctgtggcctgctggagaccctgaagtttggagtgctggagctgcaggagcacctggacacctacaacgtgaagcgggaggccgctgagcagtggctggatgactgcaagaggacctttggagccaaggaggacatgtaccgcatcaacacagatgcccagctgaatgagatcctggtggagctggagctgtgcagaagactctacaagctgcacttccagctgctgctgctcttccaggcctactgcaagctgatcaaccaggtgaacaccatcaagaatgaagctgaggtgatcaacatgtctgaggagctggcccagctggagagcatcctgaaggaggccgagagcgcctctgaaaatgaggagattgacatcagcaaggccgcccagaccaccattgaaacagccatccacagcctgattgagaccctgaagaacaaggagttcatctctgctgtggcccaggtgaaggccttccgcagcctgtggcccagcgacatcttcggcagctgtgaagatgatcctgtgcagaccctgctgcacatctacttccaccaccagaccctgggccagacaggcagctttgctgtgattggcagcaacctggacatgtctgaggccaactacaagctgatggagctgaacctggagatccgggagagcctgaggatggtgcagagctaccagctgctggcccaggccaagcccatgggcaacatggtgtccacaggcttctag

SEQ ID NO: 183884 - DNA, 11706 bp, Artificial Sequence
  derived and/or modified sequence
gaagacctcgcagcacagccgggcgcccgtcgggctctgggagagagcgagagagaaatccggttaaaatcagagtcggagggaggtttaaccacagatcggttccgatcggattattccttaaaggggacgcgccattgtcaagagaacggagccaggggcccgagggcggggaccggcggcgctggaggagcgaggcagctgtactaggactgggaacggcctagaacattccatattctgcttcacacacggtgactcactcactactgctttgtaccagtgtgcccactcgagtgcctgtaaagtacaagctccagatcaaaaaagcttctagatggatcctttccaaacttggtgtcttttctacaaactctgtgcctcaacaaccatttctaagtgagctgaagccatttattggtatcttggatggttaacatctaaatgcttaattcctgaaaccactcaagagtcataggattagatgatccaagtcaccaagaaattactgtctcaagtgatacgcttcagcgccagtcagcaaagtaaataaatactgtgcttcttccaactttcattccacttggggaaaaaaaaatatcatcatgtcaaacattacgattgacccagatgtcaaacctggtgaatatgtcatcaagagcctctttgcagaatttgctgttcaagctgaaaagaaaattgaagttgtaatggccgaacccttggagaagctattgtccagatctcttcagaggggtgaagatcttcagtttgatcagttgataagctctatgagctcagtagcagagcactgtctcccttccttacttcgcaccttgtttgactggtacagacgccaaaatggaacggaagatgaatcttatgaatataggcctcggtctagcacaaagtctaagggggatgaacagcaacgtgaaagagattatcttcttgaaaggagggacttagcagtagacttcattttttgtttagttttagttgaagttctaaagcagattcctgttcatcctgtacccgatcccttagttcatgaagttctaaacttagcttttaagcactttaaacataaggaaggatattcaggaaccaacactgggaatgtgcatattattgctgatttatatgcagaggtgataggggttcttgcccaatcaaagtttcaggctgtaaggaagaagtttgtgacagaattaaaagaactgcgacaaaaggaacaaagcccacatgtggtacaaagtgtcatcagcttaataatgggaatgaaattttttcgagtaaaaatgtatcctgtagaagattttgaagcatcatttcaatttatgcaggaatgtgctcagtatttcttagaagtgaaagataaagatataaaacatgcacttgctggtttatttgtggagattcttatccctgtagctgctgctgttaaaaatgaagtgaatgttccctgtttgaaaaattttgtggagatgctttatcagactacttttgaactgagctcgagaaagaagcattcattggctttatatccactaattacctgccttttatgtgtcagtcagaaacaattttttttaaataactggcatattttcctacagaactgtttgtcacatttaaagaataaagatccgaaaatgtctcgagttgcactggaatctttgtatagattattgtgggtttatgtaattagaataaaatgtgaaagcaacactgtaactcaaagtcgtcttatgagcatagtgtcagcactttttccaaaaggctcacgaagtgtggttcctcgtgacacacctctcaatatatttgtgaagattattcagttcattgctcaggaacgcttggattttgcaatgaaagaaataatatttgatcttctcagtgttggaaaatctactaaaactttcaccattaatccagagagaatgaacataggtctcagagtcttccttgtaatagcagacagtttgcagcagaaagatggtgaaccacccatgccaacaacaggagttattcttccctcaggaaatactcttcgtgtaaagaaaatatttctcaataaaaccttgacagatgaagaagcaaaagtcataggaatgtcagtttactatcctcaagtaagaaaagcattagatagcatcctcagacatttggacaaagaagttgggagaccaatgtgtatgaccagtgtgcagatgtctaataaggagcctgaagacatgattacgggggaaagaaaacccaagattgatttgtttagaacttgtattgctgcgattccaaggttgattcctgacggtatgagcagaactgacctgattgaattgttagcaaggctcacaattcatatggatgaagaactgcgtgctctggctttcaatactctgcaggcactaatgcttgattttccagattggcgggaggatgttctttcaggatttgtttattttattgttcgtgaagtgactgatgtccatcccacacttcttgataatgccgtaaagatgttggtacaattaataaatcagtggaaacaagcagcccaaatgcataataaaaaccaggacactcagcatggtgtagctaatggagcttctcatccccctcctctggaaaggagcccatattccaatgtattccatgtggttgaaggctttgcgcttgtcattctctgtagcagtcgacctgccactaggagactagccgtcagtgtccttagagaaatacgggctttatttgcacttctggaaatacctaagggtgatgatgaattagccatagatgtgatggacaggctaagcccatccattcttgagagcttcatacatctcactggggctgatcagactactttgctctattgccctagctcgatagatttacaaactttagcagaatggaactcttctcctattagccaccagtttgatgtgattagtccatcacatatatggatatttgcacatgtgacccaaggccaagacccatggattataagtctctccagttttttaaagcaagaaaatcttcctaaacactgctctacagctgtgagctatgcttggatgtttgcatacacaagacttcagttgttgtcccctcaggtcgatataaatagccccatcaatgctaagaaagtaaataccaccacaagcagtgactcatacattggcctgtggagaaactatctgatcctttgctgcagtgcagcaacatcgtcatcttccacatctgcaggttctgtgagatgttctcctcctgagacgctggcgtctaccccagatagcggctatagcattgattctaaaattattggcatcccatccccttcatccttgtttaagcacatagttccaatgatgcgttctgagagcatggaaatcacagaatcccttgttctaggtcttggcaggaccaacccaggagcttttagggaactaatagaggaattacatcccataattaaagaagcactcgaaagaaggccagagaatatgaaacggcgcaggcgtcgagacattttacgagtacaactggtacgaatatttgaactgctggcagatgctggtgtcattagtcacagtgcaagtggtggccttgataatgaaacacattttctcaacaacactttattggaatatgtagatttaactagacaactcctggaagcagaaaatgaaaaagactctgacacactgaaggatatacgatgccattttagtgccttagtggcgaatattattcagaatgttccagtgcaccagagaagaagtatttttcctcaacagagccttcgtcacagtctatttatgctgttcagtcactgggcaggtccttttagcatcatgtttacgcccttggacagatacagtgatagaaatatgcaaattaatagacatcaatactgtgcgttaaaggctatgtctgctgtactgtgttgtggccctgttgcagataatgtaggactttcatcagatggctatttgtacaaatggttggataacattttggattctctggacaaaaaggttcaccagctgggctgtgaagcagttacgttgttactggagctgaaccctgatcagagcaacctgatgtactgggctgtggaccgctgctacacgggctccgggagggtggcggccggctgctttaaagccattgctaatgttttccagaacagggattatcaatgtgacacagtgatgcttctaaatctgatactgtttaaagcagctgattcttctagaagtatctatgaagttgctatgcaacttttacagattctggaaccgaagatgtttcgctatgctcacaaattggaggttcagagaacagatggagtactcagccagctgtctcctctaccacatctctattctgtttcatattatcagttgtccgaggaactagcaagggcgtatcctgagctaactctcgccatattctcagagataagccagagaatccagacagctcaccctgctgggcggcaggtgatgctgcactacctgctaccatggatgaacaacatcgagctggtggacttaaaacctctccccacagcaaggcgacatgatgaagatgaagatgattccttaaaagaccgagaacttatggtgactagtaggcgctggttacggggagaaggatggggatctccacaagccactgcaatggttttgaacaatctgatgtatatgacagcaaagtatggcgatgaactggcctggtcggaggtggagaatgtgtggaccacacttgcagatggctggcccaaaaacctgaaaataattttgcactttttgatcagcatttgtggggtgaatagcgaaccaagcctcttgccttacgtgaagaaggtcattgtatatttaggtagagataaaacaatgcagttgctagaagagctggtgagtgagcttcagctgaccgatcctgtcagttcaggggtcactcacatggataatcccccgtattatcgcatcacttccagctataaaatcccttctgtcacctcaggaactacttccagtagcaatacaatggtagctcccacagatggcaatcctgataataagcccattaaagagaatattgaagagagctatgtgcacctggacatttacagtggactaaacagtcatttgaatcggcaacatcacagactagaatcccgatacagtagcagctctggaggatcttatgaagaagaaaaaagtgattcaatgccactttattctaattggcgactgaaagtgatggagcataaccaaggagagccactgcccttcccaccagctggaggctgctggtcaccactggtggattacgtgcctgaaacgtcatcacctggattacctcttcacaggtgtaacatagcagtgatccttttgactgatctcatcattgatcatagtgtgaaggtggaatggggaagctacctccatcttcttcttcatgcaatttttatagggtttgaccactgccaccctgaggtgtatgaacattgtaaacgcctgcttctgcacttattaatagtaatgggacccaatagtaacatccgaactgttgcttctgtccttctcaggaacaaggagtttaatgagcccagggtgcttacagtcaaacaagttgcacacttagattataatttcacagcaggcattaacgattttatacctgattaccagccctcccctatgactgactcagggcttagctcaagttctacctcttctagtatcagcttaggaaataacagtgctgccatttcacatctgcacaccactatcctcaatgaggttgacatctcagtggagcaggatggaaaagtcaaaaccctcatggaattcattacctcaagaaaaagagggcccctttggaaccatgaggatgtttctgccaagaatcctagcataaagagtgctgaacagttaactacatttttgaaacatgtggtttctgtttttaagcagtcaagctcagaaggaattcatctggaacatcatcttagtgaagttgctctgcaaacagcactttcctgttcttctcgacactatgctgggagatcctttcagattttcagggccctaaagcagcctctcactgcaactacactttctgatgttctctccagacttgtagaaactgtaggggatccaggagaagatgcacagggatttgtgattgagcttcttctcacattggaatctgcaattgatactttggctgaaaccatgaagcattatgatcttctttctgccctttctcaaacctcatatcatgatcctataatgggaaacaagtatgcagctaacaggaaaagcactggacaactcaatctaagcacaagtcccattaatagtagcagttatttgggatataacagtaatgcaagaagtaactctttgagattaagtttgattggtgaccgacgaggtgaccggcggcggagtaacacactggatataatggatggacggataaaccatagcagtagtttagcaaggactagaagcctttcctctctaagagagaaaggaatgtatgacgtgcagtccactactgagcctaccaacttgatggccaccattttttggatagcagcatctttattagaatcagattatgaatatgaatacctcctggctctcaggcttctcaacaaactgcttatccatttgcctttggataaatcagagagtcgagagaagattgaaaatgtacaaagcaaattgaaatggactaattttccaggacttcagcagctcttccttaagggttttacctcagcatctacacaagaaatgaccgtgcacctcctcagtaaactcatttctgtctccaaacatacattggtggatccttcccaattgtcaggctttcctcttaacatcctttgcttattgcctcacttaatccagcattttgacagcccaactcagttttgcaaagaaacagctagtcgaatagcaaaggtttgtgcagaagaaaaatgcccaacacttgtcaatctggcacacatgatgagtttgtacagtacacacacgtattccagagactgttctaactggatcaatgtcgtgtgcagatacctgcatgactccttctcagatacaacatttaatcttgtgacttatcttgcagagctgttagagaaaggattgtccagtatgcagcaatcattactacagattatttatagtctattgagtcatattgacctgtctgcagccccagccaagcagtttaatctggagatcataaagattattggcaaatatgtacagagtccttactggaaggaagcccttaacatattaaagctggtggtgtcacgctctgcgagtcttgtcgtacccagtgatatccccaagacctatggaggagatacaggttctcctgaaatatccttcactaaaatttttaataatgtttctaaggagttgcctgggaagaccttagattttcattttgatatatctgagacaccaattattggaaacaaatatggtgatcagcacagtgcggctggaagaaatgggaaaccaaaagttattgctgtcactagaagtacttcctcaacttcttctggttctaattctaatgccttggttcctgttagttggaaaaggccacagttatcacagcgaagaacaagagaaaagctaatgaatgtgctttctctctgtggtccagaatctggcctcccaaagaacccatcagttgtattttcttctaatgaggatttggaagtcggtgaccaacagactagcctaatttctacaacagaagacataaatcaagaggaagaagtagctgtggaagataatagcagtgaacaacagtttggtgtttttaaggattttgactttttagatgttgaattggaagatgcagagggtgaaagtatggacaatttcaactggggagttcgcaggcgctcactggacagtattgacaaaggggacactccatccctccaggagtaccagtgctctagtagcacccccagcctgaacctcaccaatcaggaggatacagatgagtcctcggaagaagaagcggcacttacagcaagccagatactctcacgcacacagatgttaaacagtgattctgccactgatgaaacaataccagaccatcctgacttacttctccagtctgaagattccactggcagcatcacaacagaggaagtgcttcaaatcagggatgagaccccaactttggaggcttctctagataatgctaacagccggctgcctgaggatacaacttcagtattaaaggaggaacatgttacaacctttgaagatgaaggatcctatataattcaagaacagcaggaatctcttgtgtgtcaaggaattcttgatttagaagaaactgaaatgccagagcctctagctcctgaaagttaccccgagtcagtctgtgaagaggatgttaccttagctctgaaagagctagatgaaagatgtgaagaagaagaagcggatttctccggactgtctagtcaagatgaagaagagcaagatggttttccagaagtacagacgtcgcctctgccgtcaccatttctttctgccatcatagccgcctttcagcccgtggcatatgatgatgaagaggaagcctggcgctgccacgtcaatcagatgctgtctgacaccgacgggtcctctgcagtgtttacttttcatgtgttttctaggctgtttcagacaattcaaagaaagtttggagaaataactaatgaggcagtcagctttcttggtgatagtctgcaacgcattggtaccaaatttaaaagttccttggaagtgatgatgctgtgttcagaatgcccaacagtctttgtggatgctgaaacactgatgtcatgtggtttgctggaaacactcaagtttggtgttttggagttgcaagaacacctggatacatacaatgtgaaaagagaagccgctgagcagtggctagatgattgtaagaggacatttggtgccaaagaagacatgtataggataaacacagatgcacaacaaatggaaatactagcagaattggagctctgccgaagattatacaaattgcattttcaattgctgcttctgttccaggcctactgtaaacttatcaaccaagtaaatacgataaaaaatgaagcagaggtcatcaacatgtcagaggaacttgcccaactggaaagtatcctcaaagaagctgagtccgcttccgaaaacgaagaaattgacatttccaaagctgcacaaactactatagaaactgccattcattctttaattgaaactttgaaaaataaagaatttatatcagctgtagcacaagtcaaagctttcagatctctctggcccagtgatatctttggcagttgtgaagatgaccctgtacagacactgttacatatatatttccatcatcagacgctgggccagacaggaagctttgcagttataggctctaacctggacatgtcagaagccaactacaaactgatggaacttaatctggaaataagagagtctctacgcatggtgcaatcataccaacttctagcacaggccaaaccaatgggaaatatggtgagcactggattctgagacacttcaggcctttaggaaagaaactaaactgaagatgatgaagaatattaaccaagcaccttttatggacccttgcattcactgataactttctggcagcatctactttttagtgtaactaatgtcaaactgtatcatcaaaaacaaagatctgaaagaaaaaaacatctgatattttaacagctgccaatatctcccacaataactgcgtgaagaaggaattttttaattacttaacctacgtgaaaagaaaagggctaaaagtgatgcctacaaatacattactttctggggaaagaaaagaattccaagaatgtttgcaataatggcctccaatactgaaacaaccaaaagcaggtgaaatgaggctgaaatcaaggctgtttcattttagctgaagacctgcaaagctgcttggatttctagcagttgaaaacctaacctgcaattgatgcttaatcatccatccacatgaacatgcagtcagctatacgcatcaagactcgtttgcaaaaaccattgatttttcagtatgtgggataagggtttgggtttttttgttttttggtctgtataaggaattatgtgtgtgtgagttgggatgtatggatatgtgatagtcatattttcaaggtatggatgtttggtgataacgtctcagagcatgcctaaaagagcactgcaagattatttttgaagaaatgttattttattagatctaactcttcatagtatgtaaatgttagaacattttaataatattttaaaactgggctttcccagtatttcaaaaagaaataatatatctgttaacgttattggaatgctgctcagttctctgatcagtgcttatgttatgattgttgataactaaccaaagtagatgcctgcagagactttaaaatgtaaaataaagatgtatgctgcctgtcagctattctcattagaaaagttttaacttattttactccatatagaaactgtagagactaaaaccagttattttcttgtacatttgtgccatgcactgttgttatacaagaataggtgtacaaagctaaagaaaaattgtggtcattgatgatggaatatatgacttgcaggctttgaagtctgcagaattcaagaaaagagctgcaaatgcatttttgtatctttattcaggactcacatgctttaccctaaagaaacctggggctaggggaaatgaaaggaagcctgaagactgactaccaaaacatgcaatatacttattcactgtctaagtctgtagtataacatgaactggagtctctatccttttctaaaatcgcattttgtaagaaaagaaagaaaaaaaaaaaaaaagaatgtagtcccacaactcctgatttgaaagaaacaccttgtattttttatatacatctcttatccactgtgacttttcttttaaactgggctctgtgattccagagtttagaatgtagaaatgaaatgcttagctttaccttttcttggggggtgtggaccctgccagaaatgtaattacgtatgctcaagtgcattaattgaaggcactgtgcacaccattggactgctgaccacagttaaacatttccagtaaaatttcgtaactggtcacagctcattcataatcactgtattttttgaccctgataaagacaattattttgatggtgttctggtactgtaattggtatcctttaaattatttaaaacttttgggtgtggggcaggcagagagggatggtgtccagagatacatcacactttacatcctatcttactgtcctctgtttttcttaccctccttacatcctttttgttaaaaataaaaagcattgtagctgttggtttgtgttgtattttaacaaagaatgaatgattacagtgtgcatcatttagaaacctttcaaatgttaccttcttgaattgccctagaaaagaacaaaattagttgactacccaaccaaacctttcagttgatatttgctttttgtgtttatttatatgtaactaagtctattaatataataaaaatgaatatacctgcagc

SEQ ID NO: 183885 - DNA, 11103 bp, Artificial Sequence
  derived and/or modified sequence
atgtcaaacattacgattgacccagatgtcaaacctggtgaatatgtcatcaagagcctctttgcagaatttgctgttcaagctgaaaagaaaattgaagttgtaatggccgaacccttggagaagctattgtccagatctcttcagaggggtgaagatcttcagtttgatcagttgataagctctatgagctcagtagcagagcactgtctcccttccttacttcgcaccttgtttgactggtacagacgccaaaatggaacggaagatgaatcttatgaatataggcctcggtctagcacaaagtctaagggggatgaacagcaacgtgaaagagattatcttcttgaaaggagggacttagcagtagacttcattttttgtttagttttagttgaagttctaaagcagattcctgttcatcctgtacccgatcccttagttcatgaagttctaaacttagcttttaagcactttaaacataaggaaggatattcaggaaccaacactgggaatgtgcatattattgctgatttatatgcagaggtgataggggttcttgcccaatcaaagtttcaggctgtaaggaagaagtttgtgacagaattaaaagaactgcgacaaaaggaacaaagcccacatgtggtacaaagtgtcatcagcttaataatgggaatgaaattttttcgagtaaaaatgtatcctgtagaagattttgaagcatcatttcaatttatgcaggaatgtgctcagtatttcttagaagtgaaagataaagatataaaacatgcacttgctggtttatttgtggagattcttatccctgtagctgctgctgttaaaaatgaagtgaatgttccctgtttgaaaaattttgtggagatgctttatcagactacttttgaactgagctcgagaaagaagcattcattggctttatatccactaattacctgccttttatgtgtcagtcagaaacaattttttttaaataactggcatattttcctacagaactgtttgtcacatttaaagaataaagatccgaaaatgtctcgagttgcactggaatctttgtatagattattgtgggtttatgtaattagaataaaatgtgaaagcaacactgtaactcaaagtcgtcttatgagcatagtgtcagcactttttccaaaaggctcacgaagtgtggttcctcgtgacacacctctcaatatatttgtgaagattattcagttcattgctcaggaacgcttggattttgcaatgaaagaaataatatttgatcttctcagtgttggaaaatctactaaaactttcaccattaatccagagagaatgaacataggtctcagagtcttccttgtaatagcagacagtttgcagcagaaagatggtgaaccacccatgccaacaacaggagttattcttccctcaggaaatactcttcgtgtaaagaaaatatttctcaataaaaccttgacagatgaagaagcaaaagtcataggaatgtcagtttactatcctcaagtaagaaaagcattagatagcatcctcagacatttggacaaagaagttgggagaccaatgtgtatgaccagtgtgcagatgtctaataaggagcctgaagacatgattacgggggaaagaaaacccaagattgatttgtttagaacttgtattgctgcgattccaaggttgattcctgacggtatgagcagaactgacctgattgaattgttagcaaggctcacaattcatatggatgaagaactgcgtgctctggctttcaatactctgcaggcactaatgcttgattttccagattggcgggaggatgttctttcaggatttgtttattttattgttcgtgaagtgactgatgtccatcccacacttcttgataatgccgtaaagatgttggtacaattaataaatcagtggaaacaagcagcccaaatgcataataaaaaccaggacactcagcatggtgtagctaatggagcttctcatccccctcctctggaaaggagcccatattccaatgtattccatgtggttgaaggctttgcgcttgtcattctctgtagcagtcgacctgccactaggagactagccgtcagtgtccttagagaaatacgggctttatttgcacttctggaaatacctaagggtgatgatgaattagccatagatgtgatggacaggctaagcccatccattcttgagagcttcatacatctcactggggctgatcagactactttgctctattgccctagctcgatagatttacaaactttagcagaatggaactcttctcctattagccaccagtttgatgtgattagtccatcacatatatggatatttgcacatgtgacccaaggccaagacccatggattataagtctctccagttttttaaagcaagaaaatcttcctaaacactgctctacagctgtgagctatgcttggatgtttgcatacacaagacttcagttgttgtcccctcaggtcgatataaatagccccatcaatgctaagaaagtaaataccaccacaagcagtgactcatacattggcctgtggagaaactatctgatcctttgctgcagtgcagcaacatcgtcatcttccacatctgcaggttctgtgagatgttctcctcctgagacgctggcgtctaccccagatagcggctatagcattgattctaaaattattggcatcccatccccttcatccttgtttaagcacatagttccaatgatgcgttctgagagcatggaaatcacagaatcccttgttctaggtcttggcaggaccaacccaggagcttttagggaactaatagaggaattacatcccataattaaagaagcactcgaaagaaggccagagaatatgaaacggcgcaggcgtcgagacattttacgagtacaactggtacgaatatttgaactgctggcagatgctggtgtcattagtcacagtgcaagtggtggccttgataatgaaacacattttctcaacaacactttattggaatatgtagatttaactagacaactcctggaagcagaaaatgaaaaagactctgacacactgaaggatatacgatgccattttagtgccttagtggcgaatattattcagaatgttccagtgcaccagagaagaagtatttttcctcaacagagccttcgtcacagtctatttatgctgttcagtcactgggcaggtccttttagcatcatgtttacgcccttggacagatacagtgatagaaatatgcaaattaatagacatcaatactgtgcgttaaaggctatgtctgctgtactgtgttgtggccctgttgcagataatgtaggactttcatcagatggctatttgtacaaatggttggataacattttggattctctggacaaaaaggttcaccagctgggctgtgaagcagttacgttgttactggagctgaaccctgatcagagcaacctgatgtactgggctgtggaccgctgctacacgggctccgggagggtggcggccggctgctttaaagccattgctaatgttttccagaacagggattatcaatgtgacacagtgatgcttctaaatctgatactgtttaaagcagctgattcttctagaagtatctatgaagttgctatgcaacttttacagattctggaaccgaagatgtttcgctatgctcacaaattggaggttcagagaacagatggagtactcagccagctgtctcctctaccacatctctattctgtttcatattatcagttgtccgaggaactagcaagggcgtatcctgagctaactctcgccatattctcagagataagccagagaatccagacagctcaccctgctgggcggcaggtgatgctgcactacctgctaccatggatgaacaacatcgagctggtggacttaaaacctctccccacagcaaggcgacatgatgaagatgaagatgattccttaaaagaccgagaacttatggtgactagtaggcgctggttacggggagaaggatggggatctccacaagccactgcaatggttttgaacaatctgatgtatatgacagcaaagtatggcgatgaactggcctggtcggaggtggagaatgtgtggaccacacttgcagatggctggcccaaaaacctgaaaataattttgcactttttgatcagcatttgtggggtgaatagcgaaccaagcctcttgccttacgtgaagaaggtcattgtatatttaggtagagataaaacaatgcagttgctagaagagctggtgagtgagcttcagctgaccgatcctgtcagttcaggggtcactcacatggataatcccccgtattatcgcatcacttccagctataaaatcccttctgtcacctcaggaactacttccagtagcaatacaatggtagctcccacagatggcaatcctgataataagcccattaaagagaatattgaagagagctatgtgcacctggacatttacagtggactaaacagtcatttgaatcggcaacatcacagactagaatcccgatacagtagcagctctggaggatcttatgaagaagaaaaaagtgattcaatgccactttattctaattggcgactgaaagtgatggagcataaccaaggagagccactgcccttcccaccagctggaggctgctggtcaccactggtggattacgtgcctgaaacgtcatcacctggattacctcttcacaggtgtaacatagcagtgatccttttgactgatctcatcattgatcatagtgtgaaggtggaatggggaagctacctccatcttcttcttcatgcaatttttatagggtttgaccactgccaccctgaggtgtatgaacattgtaaacgcctgcttctgcacttattaatagtaatgggacccaatagtaacatccgaactgttgcttctgtccttctcaggaacaaggagtttaatgagcccagggtgcttacagtcaaacaagttgcacacttagattataatttcacagcaggcattaacgattttatacctgattaccagccctcccctatgactgactcagggcttagctcaagttctacctcttctagtatcagcttaggaaataacagtgctgccatttcacatctgcacaccactatcctcaatgaggttgacatctcagtggagcaggatggaaaagtcaaaaccctcatggaattcattacctcaagaaaaagagggcccctttggaaccatgaggatgtttctgccaagaatcctagcataaagagtgctgaacagttaactacatttttgaaacatgtggtttctgtttttaagcagtcaagctcagaaggaattcatctggaacatcatcttagtgaagttgctctgcaaacagcactttcctgttcttctcgacactatgctgggagatcctttcagattttcagggccctaaagcagcctctcactgcaactacactttctgatgttctctccagacttgtagaaactgtaggggatccaggagaagatgcacagggatttgtgattgagcttcttctcacattggaatctgcaattgatactttggctgaaaccatgaagcattatgatcttctttctgccctttctcaaacctcatatcatgatcctataatgggaaacaagtatgcagctaacaggaaaagcactggacaactcaatctaagcacaagtcccattaatagtagcagttatttgggatataacagtaatgcaagaagtaactctttgagattaagtttgattggtgaccgacgaggtgaccggcggcggagtaacacactggatataatggatggacggataaaccatagcagtagtttagcaaggactagaagcctttcctctctaagagagaaaggaatgtatgacgtgcagtccactactgagcctaccaacttgatggccaccattttttggatagcagcatctttattagaatcagattatgaatatgaatacctcctggctctcaggcttctcaacaaactgcttatccatttgcctttggataaatcagagagtcgagagaagattgaaaatgtacaaagcaaattgaaatggactaattttccaggacttcagcagctcttccttaagggttttacctcagcatctacacaagaaatgaccgtgcacctcctcagtaaactcatttctgtctccaaacatacattggtggatccttcccaattgtcaggctttcctcttaacatcctttgcttattgcctcacttaatccagcattttgacagcccaactcagttttgcaaagaaacagctagtcgaatagcaaaggtttgtgcagaagaaaaatgcccaacacttgtcaatctggcacacatgatgagtttgtacagtacacacacgtattccagagactgttctaactggatcaatgtcgtgtgcagatacctgcatgactccttctcagatacaacatttaatcttgtgacttatcttgcagagctgttagagaaaggattgtccagtatgcagcaatcattactacagattatttatagtctattgagtcatattgacctgtctgcagccccagccaagcagtttaatctggagatcataaagattattggcaaatatgtacagagtccttactggaaggaagcccttaacatattaaagctggtggtgtcacgctctgcgagtcttgtcgtacccagtgatatccccaagacctatggaggagatacaggttctcctgaaatatccttcactaaaatttttaataatgtttctaaggagttgcctgggaagaccttagattttcattttgatatatctgagacaccaattattggaaacaaatatggtgatcagcacagtgcggctggaagaaatgggaaaccaaaagttattgctgtcactagaagtacttcctcaacttcttctggttctaattctaatgccttggttcctgttagttggaaaaggccacagttatcacagcgaagaacaagagaaaagctaatgaatgtgctttctctctgtggtccagaatctggcctcccaaagaacccatcagttgtattttcttctaatgaggatttggaagtcggtgaccaacagactagcctaatttctacaacagaagacataaatcaagaggaagaagtagctgtggaagataatagcagtgaacaacagtttggtgtttttaaggattttgactttttagatgttgaattggaagatgcagagggtgaaagtatggacaatttcaactggggagttcgcaggcgctcactggacagtattgacaaaggggacactccatccctccaggagtaccagtgctctagtagcacccccagcctgaacctcaccaatcaggaggatacagatgagtcctcggaagaagaagcggcacttacagcaagccagatactctcacgcacacagatgttaaacagtgattctgccactgatgaaacaataccagaccatcctgacttacttctccagtctgaagattccactggcagcatcacaacagaggaagtgcttcaaatcagggatgagaccccaactttggaggcttctctagataatgctaacagccggctgcctgaggatacaacttcagtattaaaggaggaacatgttacaacctttgaagatgaaggatcctatataattcaagaacagcaggaatctcttgtgtgtcaaggaattcttgatttagaagaaactgaaatgccagagcctctagctcctgaaagttaccccgagtcagtctgtgaagaggatgttaccttagctctgaaagagctagatgaaagatgtgaagaagaagaagcggatttctccggactgtctagtcaagatgaagaagagcaagatggttttccagaagtacagacgtcgcctctgccgtcaccatttctttctgccatcatagccgcctttcagcccgtggcatatgatgatgaagaggaagcctggcgctgccacgtcaatcagatgctgtctgacaccgacgggtcctctgcagtgtttacttttcatgtgttttctaggctgtttcagacaattcaaagaaagtttggagaaataactaatgaggcagtcagctttcttggtgatagtctgcaacgcattggtaccaaatttaaaagttccttggaagtgatgatgctgtgttcagaatgcccaacagtctttgtggatgctgaaacactgatgtcatgtggtttgctggaaacactcaagtttggtgttttggagttgcaagaacacctggatacatacaatgtgaaaagagaagccgctgagcagtggctagatgattgtaagaggacatttggtgccaaagaagacatgtataggataaacacagatgcacaacaaatggaaatactagcagaattggagctctgccgaagattatacaaattgcattttcaattgctgcttctgttccaggcctactgtaaacttatcaaccaagtaaatacgataaaaaatgaagcagaggtcatcaacatgtcagaggaacttgcccaactggaaagtatcctcaaagaagctgagtccgcttccgaaaacgaagaaattgacatttccaaagctgcacaaactactatagaaactgccattcattctttaattgaaactttgaaaaataaagaatttatatcagctgtagcacaagtcaaagctttcagatctctctggcccagtgatatctttggcagttgtgaagatgaccctgtacagacactgttacatatatatttccatcatcagacgctgggccagacaggaagctttgcagttataggctctaacctggacatgtcagaagccaactacaaactgatggaacttaatctggaaataagagagtctctacgcatggtgcaatcataccaacttctagcacaggccaaaccaatgggaaatatggtgagcactggattctgagacacttcaggcctttaggaaagaaactaaactgaagatgatgaagaatattaaccaagcaccttttatggacccttgcattcactgataactttctggcagcatctactttttagtgtaactaatgtcaaactgtatcatcaaaaacaaagatctgaaagaaaaaaacatctgatattttaacagctgccaatatctcccacaataactgcgtgaagaaggaattttttaattacttaacctacgtgaaaagaaaagggctaaaagtgatgcctacaaatacattactttctggggaaagaaaagaattccaagaatgtttgcaataatggcctccaatactgaaacaaccaaaagcaggtgaaatgaggctgaaatcaaggctgtttcattttagctgaagacctgcaaagctgcttggatttctagcagttgaaaacctaacctgcaattgatgcttaatcatccatccacatgaacatgcagtcagctatacgcatcaagactcgtttgcaaaaaccattgatttttcagtatgtgggataagggtttgggtttttttgttttttggtctgtataaggaattatgtgtgtgtgagttgggatgtatggatatgtgatagtcatattttcaaggtatggatgtttggtgataacgtctcagagcatgcctaaaagagcactgcaagattatttttgaagaaatgttattttattagatctaactcttcatagtatgtaaatgttagaacattttaataatattttaaaactgggctttcccagtatttcaaaaagaaataatatatctgttaacgttattggaatgctgctcagttctctgatcagtgcttatgttatgattgttgataactaaccaaagtagatgcctgcagagactttaaaatgtaaaataaagatgtatgctgcctgtcagctattctcattagaaaagttttaacttattttactccatatagaaactgtagagactaaaaccagttattttcttgtacatttgtgccatgcactgttgttatacaagaataggtgtacaaagctaaagaaaaattgtggtcattgatgatggaatatatgacttgcaggctttgaagtctgcagaattcaagaaaagagctgcaaatgcatttttgtatctttattcaggactcacatgctttaccctaaagaaacctggggctaggggaaatgaaaggaagcctgaagactgactaccaaaacatgcaatatacttattcactgtctaagtctgtagtataacatgaactggagtctctatccttttctaaaatcgcattttgtaagaaaagaaagaaaaaaaaaaaaaaagaatgtagtcccacaactcctgatttgaaagaaacaccttgtattttttatatacatctcttatccactgtgacttttcttttaaactgggctctgtgattccagagtttagaatgtagaaatgaaatgcttagctttaccttttcttggggggtgtggaccctgccagaaatgtaattacgtatgctcaagtgcattaattgaaggcactgtgcacaccattggactgctgaccacagttaaacatttccagtaaaatttcgtaactggtcacagctcattcataatcactgtattttttgaccctgataaagacaattattttgatggtgttctggtactgtaattggtatcctttaaattatttaaaacttttgggtgtggggcaggcagagagggatggtgtccagagatacatcacactttacatcctatcttactgtcctctgtttttcttaccctccttacatcctttttgttaaaaataaaaagcattgtagctgttggtttgtgttgtattttaacaaagaatgaatgattacagtgtgcatcatttagaaacctttcaaatgttaccttcttgaattgccctagaaaagaacaaaattagttgactacccaaccaaacctttcagttgatatttgctttttgtgtttatttatatgtaactaagtctattaatataataaaaatgaatatacctgcagcaa

SEQ ID NO: 183886 - DNA, 11706 bp, Artificial Sequence
  derived and/or modified sequence
gaagacctcgcagcacagccgggcgcccgtcgggctctgggagagagcgagagagaaatccggttaaaatcagagtcggagggaggtttaaccacagatcggttccgatcggattattccttaaaggggacgcgccattgtcaagagaacggagccaggggcccgagggcggggaccggcggcgctggaggagcgaggcagctgtactaggactgggaacggcctagaacattccatattctgcttcacacacggtgactcactcactactgctttgtaccagtgtgcccactcgagtgcctgtaaagtacaagctccagatcaaaaaagcttctagatggatcctttccaaacttggtgtcttttctacaaactctgtgcctcaacaaccatttctaagtgagctgaagccatttattggtatcttggatggttaacatctaaatgcttaattcctgaaaccactcaagagtcataggattagatgatccaagtcaccaagaaattactgtctcaagtgatacgcttcagcgccagtcagcaaagtaaataaatactgtgcttcttccaactttcattccacttggggaaaaaaaaatatcatcatgtcaaacattacgattgacccagatgtcaaacctggtgaatatgtcatcaagagcctctttgcagaatttgctgttcaagctgaaaagaaaattgaagttgtaatggccgaacccttggagaagctattgtccagatctcttcagaggggtgaagatcttcagtttgatcagttgataagctctatgagctcagtagcagagcactgtctcccttccttacttcgcaccttgtttgactggtacagacgccaaaatggaacggaagatgaatcttatgaatataggcctcggtctagcacaaagtctaagggggatgaacagcaacgtgaaagagattatcttcttgaaaggagggacttagcagtagacttcattttttgtttagttttagttgaagttctaaagcagattcctgttcatcctgtacccgatcccttagttcatgaagttctaaacttagcttttaagcactttaaacataaggaaggatattcaggaaccaacactgggaatgtgcatattattgctgatttatatgcagaggtgataggggttcttgcccaatcaaagtttcaggctgtaaggaagaagtttgtgacagaattaaaagaactgcgacaaaaggaacaaagcccacatgtggtacaaagtgtcatcagcttaataatgggaatgaaattttttcgagtaaaaatgtatcctgtagaagattttgaagcatcatttcaatttatgcaggaatgtgctcagtatttcttagaagtgaaagataaagatataaaacatgcacttgctggtttatttgtggagattcttatccctgtagctgctgctgttaaaaatgaagtgaatgttccctgtttgaaaaattttgtggagatgctttatcagactacttttgaactgagctcgagaaagaagcattcattggctttatatccactaattacctgccttttatgtgtcagtcagaaacaattttttttaaataactggcatattttcctacagaactgtttgtcacatttaaagaataaagatccgaaaatgtctcgagttgcactggaatctttgtatagattattgtgggtttatgtaattagaataaaatgtgaaagcaacactgtaactcaaagtcgtcttatgagcatagtgtcagcactttttccaaaaggctcacgaagtgtggttcctcgtgacacacctctcaatatatttgtgaagattattcagttcattgctcaggaacgcttggattttgcaatgaaagaaataatatttgatcttctcagtgttggaaaatctactaaaactttcaccattaatccagagagaatgaacataggtctcagagtcttccttgtaatagcagacagtttgcagcagaaagatggtgaaccacccatgccaacaacaggagttattcttccctcaggaaatactcttcgtgtaaagaaaatatttctcaataaaaccttgacagatgaagaagcaaaagtcataggaatgtcagtttactatcctcaagtaagaaaagcattagatagcatcctcagacatttggacaaagaagttgggagaccaatgtgtatgaccagtgtgcagatgtctaataaggagcctgaagacatgattacgggggaaagaaaacccaagattgatttgtttagaacttgtattgctgcgattccaaggttgattcctgacggtatgagcagaactgacctgattgaattgttagcaaggctcacaattcatatggatgaagaactgcgtgctctggctttcaatactctgcaggcactaatgcttgattttccagattggcgggaggatgttctttcaggatttgtttattttattgttcgtgaagtgactgatgtccatcccacacttcttgataatgccgtaaagatgttggtacaattaataaatcagtggaaacaagcagcccaaatgcataataaaaaccaggacactcagcatggtgtagctaatggagcttctcatccccctcctctggaaaggagcccatattccaatgtattccatgtggttgaaggctttgcgcttgtcattctctgtagcagtcgacctgccactaggagactagccgtcagtgtccttagagaaatacgggctttatttgcacttctggaaatacctaagggtgatgatgaattagccatagatgtgatggacaggctaagcccatccattcttgagagcttcatacatctcactggggctgatcagactactttgctctattgccctagctcgatagatttacaaactttagcagaatggaactcttctcctattagccaccagtttgatgtgattagtccatcacatatatggatatttgcacatgtgacccaaggccaagacccatggattataagtctctccagttttttaaagcaagaaaatcttcctaaacactgctctacagctgtgagctatgcttggatgtttgcatacacaagacttcagttgttgtcccctcaggtcgatataaatagccccatcaatgctaagaaagtaaataccaccacaagcagtgactcatacattggcctgtggagaaactatctgatcctttgctgcagtgcagcaacatcgtcatcttccacatctgcaggttctgtgagatgttctcctcctgagacgctggcgtctaccccagatagcggctatagcattgattctaaaattattggcatcccatccccttcatccttgtttaagcacatagttccaatgatgcgttctgagagcatggaaatcacagaatcccttgttctaggtcttggcaggaccaacccaggagcttttagggaactaatagaggaattacatcccataattaaagaagcactcgaaagaaggccagagaatatgaaacggcgcaggcgtcgagacattttacgagtacaactggtacgaatatttgaactgctggcagatgctggtgtcattagtcacagtgcaagtggtggccttgataatgaaacacattttctcaacaacactttattggaatatgtagatttaactagacaactcctggaagcagaaaatgaaaaagactctgacacactgaaggatatacgatgccattttagtgccttagtggcgaatattattcagaatgttccagtgcaccagagaagaagtatttttcctcaacagagccttcgtcacagtctatttatgctgttcagtcactgggcaggtccttttagcatcatgtttacgcccttggacagatacagtgatagaaatatgcaaattaatagacatcaatactgtgcgttaaaggctatgtctgctgtactgtgttgtggccctgttgcagataatgtaggactttcatcagatggctatttgtacaaatggttggataacattttggattctctggacaaaaaggttcaccagctgggctgtgaagcagttacgttgttactggagctgaaccctgatcagagcaacctgatgtactgggctgtggaccgctgctacacgggctccgggagggtggcggccggctgctttaaagccattgctaatgttttccagaacagggattatcaatgtgacacagtgatgcttctaaatctgatactgtttaaagcagctgattcttctagaagtatctatgaagttgctatgcaacttttacagattctggaaccgaagatgtttcgctatgctcacaaattggaggttcagagaacagatggagtactcagccagctgtctcctctaccacatctctattctgtttcatattatcagttgtccgaggaactagcaagggcgtatcctgagctaactctcgccatattctcagagataagccagagaatccagacagctcaccctgctgggcggcaggtgatgctgcactacctgctaccatggatgaacaacatcgagctggtggacttaaaacctctccccacagcaaggcgacatgatgaagatgaagatgattccttaaaagaccgagaacttatggtgactagtaggcgctggttacggggagaaggatggggatctccacaagccactgcaatggttttgaacaatctgatgtatatgacagcaaagtatggcgatgaactggcctggtcggaggtggagaatgtgtggaccacacttgcagatggctggcccaaaaacctgaaaataattttgcactttttgatcagcatttgtggggtgaatagcgaaccaagcctcttgccttacgtgaagaaggtcattgtatatttaggtagagataaaacaatgcagttgctagaagagctggtgagtgagcttcagctgaccgatcctgtcagttcaggggtcactcacatggataatcccccgtattatcgcatcacttccagctataaaatcccttctgtcacctcaggaactacttccagtagcaatacaatggtagctcccacagatggcaatcctgataataagcccattaaagagaatattgaagagagctatgtgcacctggacatttacagtggactaaacagtcatttgaatcggcaacatcacagactagaatcccgatacagtagcagctctggaggatcttatgaagaagaaaaaagtgattcaatgccactttattctaattggcgactgaaagtgatggagcataaccaaggagagccactgcccttcccaccagctggaggctgctggtcaccactggtggattacgtgcctgaaacgtcatcacctggattacctcttcacaggtgtaacatagcagtgatccttttgactgatctcatcattgatcatagtgtgaaggtggaatggggaagctacctccatcttcttcttcatgcaatttttatagggtttgaccactgccaccctgaggtgtatgaacattgtaaacgcctgcttctgcacttattaatagtaatgggacccaatagtaacatccgaactgttgcttctgtccttctcaggaacaaggagtttaatgagcccagggtgcttacagtcaaacaagttgcacacttagattataatttcacagcaggcattaacgattttatacctgattaccagccctcccctatgactgactcagggcttagctcaagttctacctcttctagtatcagcttaggaaataacagtgctgccatttcacatctgcacaccactatcctcaatgaggttgacatctcagtggagcaggatggaaaagtcaaaaccctcatggaattcattacctcaagaaaaagagggcccctttggaaccatgaggatgtttctgccaagaatcctagcataaagagtgctgaacagttaactacatttttgaaacatgtggtttctgtttttaagcagtcaagctcagaaggaattcatctggaacatcatcttagtgaagttgctctgcaaacagcactttcctgttcttctcgacactatgctgggagatcctttcagattttcagggccctaaagcagcctctcactgcaactacactttctgatgttctctccagacttgtagaaactgtaggggatccaggagaagatgcacagggatttgtgattgagcttcttctcacattggaatctgcaattgatactttggctgaaaccatgaagcattatgatcttctttctgccctttctcaaacctcatatcatgatcctataatgggaaacaagtatgcagctaacaggaaaagcactggacaactcaatctaagcacaagtcccattaatagtagcagttatttgggatataacagtaatgcaagaagtaactctttgagattaagtttgattggtgaccgacgaggtgaccggcggcggagtaacacactggatataatggatggacggataaaccatagcagtagtttagcaaggactagaagcctttcctctctaagagagaaaggaatgtatgacgtgcagtccactactgagcctaccaacttgatggccaccattttttggatagcagcatctttattagaatcagattatgaatatgaatacctcctggctctcaggcttctcaacaaactgcttatccatttgcctttggataaatcagagagtcgagagaagattgaaaatgtacaaagcaaattgaaatggactaattttccaggacttcagcagctcttccttaagggttttacctcagcatctacacaagaaatgaccgtgcacctcctcagtaaactcatttctgtctccaaacatacattggtggatccttcccaattgtcaggctttcctcttaacatcctttgcttattgcctcacttaatccagcattttgacagcccaactcagttttgcaaagaaacagctagtcgaatagcaaaggtttgtgcagaagaaaaatgcccaacacttgtcaatctggcacacatgatgagtttgtacagtacacacacgtattccagagactgttctaactggatcaatgtcgtgtgcagatacctgcatgactccttctcagatacaacatttaatcttgtgacttatcttgcagagctgttagagaaaggattgtccagtatgcagcaatcattactacagattatttatagtctattgagtcatattgacctgtctgcagccccagccaagcagtttaatctggagatcataaagattattggcaaatatgtacagagtccttactggaaggaagcccttaacatattaaagctggtggtgtcacgctctgcgagtcttgtcgtacccagtgatatccccaagacctatggaggagatacaggttctcctgaaatatccttcactaaaatttttaataatgtttctaaggagttgcctgggaagaccttagattttcattttgatatatctgagacaccaattattggaaacaaatatggtgatcagcacagtgcggctggaagaaatgggaaaccaaaagttattgctgtcactagaagtacttcctcaacttcttctggttctaattctaatgccttggttcctgttagttggaaaaggccacagttatcacagcgaagaacaagagaaaagctaatgaatgtgctttctctctgtggtccagaatctggcctcccaaagaacccatcagttgtattttcttctaatgaggatttggaagtcggtgaccaacagactagcctaatttctacaacagaagacataaatcaagaggaagaagtagctgtggaagataatagcagtgaacaacagtttggtgtttttaaggattttgactttttagatgttgaattggaagatgcagagggtgaaagtatggacaatttcaactggggagttcgcaggcgctcactggacagtattgacaaaggggacactccatccctccaggagtaccagtgctctagtagcacccccagcctgaacctcaccaatcaggaggatacagatgagtcctcggaagaagaagcggcacttacagcaagccagatactctcacgcacacagatgttaaacagtgattctgccactgatgaaacaataccagaccatcctgacttacttctccagtctgaagattccactggcagcatcacaacagaggaagtgcttcaaatcagggatgagaccccaactttggaggcttctctagataatgctaacagccggctgcctgaggatacaacttcagtattaaaggaggaacatgttacaacctttgaagatgaaggatcctatataattcaagaacagcaggaatctcttgtgtgtcaaggaattcttgatttagaagaaactgaaatgccagagcctctagctcctgaaagttaccccgagtcagtctgtgaagaggatgttaccttagctctgaaagagctagatgaaagatgtgaagaagaagaagcggatttctccggactgtctagtcaagatgaagaagagcaagatggttttccagaagtacagacgtcgcctctgccgtcaccatttctttctgccatcatagccgcctttcagcccgtggcatatgatgatgaagaggaagcctggcgctgccacgtcaatcagatgctgtctgacaccgacgggtcctctgcagtgtttacttttcatgtgttttctaggctgtttcagacaattcaaagaaagtttggagaaataactaatgaggcagtcagctttcttggtgatagtctgcaacgcattggtaccaaatttaaaagttccttggaagtgatgatgctgtgttcagaatgcccaacagtctttgtggatgctgaaacactgatgtcatgtggtttgctggaaacactcaagtttggtgttttggagttgcaagaacacctggatacatacaatgtgaaaagagaagccgctgagcagtggctagatgattgtaagaggacatttggtgccaaagaagacatgtataggataaacacagatgcacaactcaatgaaatactggttgaattggagctctgccgaagattatacaaattgcattttcaattgctgcttctgttccaggcctactgtaaacttatcaaccaagtaaatacgataaaaaatgaagcagaggtcatcaacatgtcagaggaacttgcccaactggaaagtatcctcaaagaagctgagtccgcttccgaaaacgaagaaattgacatttccaaagctgcacaaactactatagaaactgccattcattctttaattgaaactttgaaaaataaagaatttatatcagctgtagcacaagtcaaagctttcagatctctctggcccagtgatatctttggcagttgtgaagatgaccctgtacagacactgttacatatatatttccatcatcagacgctgggccagacaggaagctttgcagttataggctctaacctggacatgtcagaagccaactacaaactgatggaacttaatctggaaataagagagtctctacgcatggtgcaatcataccaacttctagcacaggccaaaccaatgggaaatatggtgagcactggattctgagacacttcaggcctttaggaaagaaactaaactgaagatgatgaagaatattaaccaagcaccttttatggacccttgcattcactgataactttctggcagcatctactttttagtgtaactaatgtcaaactgtatcatcaaaaacaaagatctgaaagaaaaaaacatctgatattttaacagctgccaatatctcccacaataactgcgtgaagaaggaattttttaattacttaacctacgtgaaaagaaaagggctaaaagtgatgcctacaaatacattactttctggggaaagaaaagaattccaagaatgtttgcaataatggcctccaatactgaaacaaccaaaagcaggtgaaatgaggctgaaatcaaggctgtttcattttagctgaagacctgcaaagctgcttggatttctagcagttgaaaacctaacctgcaattgatgcttaatcatccatccacatgaacatgcagtcagctatacgcatcaagactcgtttgcaaaaaccattgatttttcagtatgtgggataagggtttgggtttttttgttttttggtctgtataaggaattatgtgtgtgtgagttgggatgtatggatatgtgatagtcatattttcaaggtatggatgtttggtgataacgtctcagagcatgcctaaaagagcactgcaagattatttttgaagaaatgttattttattagatctaactcttcatagtatgtaaatgttagaacattttaataatattttaaaactgggctttcccagtatttcaaaaagaaataatatatctgttaacgttattggaatgctgctcagttctctgatcagtgcttatgttatgattgttgataactaaccaaagtagatgcctgcagagactttaaaatgtaaaataaagatgtatgctgcctgtcagctattctcattagaaaagttttaacttattttactccatatagaaactgtagagactaaaaccagttattttcttgtacatttgtgccatgcactgttgttatacaagaataggtgtacaaagctaaagaaaaattgtggtcattgatgatggaatatatgacttgcaggctttgaagtctgcagaattcaagaaaagagctgcaaatgcatttttgtatctttattcaggactcacatgctttaccctaaagaaacctggggctaggggaaatgaaaggaagcctgaagactgactaccaaaacatgcaatatacttattcactgtctaagtctgtagtataacatgaactggagtctctatccttttctaaaatcgcattttgtaagaaaagaaagaaaaaaaaaaaaaaagaatgtagtcccacaactcctgatttgaaagaaacaccttgtattttttatatacatctcttatccactgtgacttttcttttaaactgggctctgtgattccagagtttagaatgtagaaatgaaatgcttagctttaccttttcttggggggtgtggaccctgccagaaatgtaattacgtatgctcaagtgcattaattgaaggcactgtgcacaccattggactgctgaccacagttaaacatttccagtaaaatttcgtaactggtcacagctcattcataatcactgtattttttgaccctgataaagacaattattttgatggtgttctggtactgtaattggtatcctttaaattatttaaaacttttgggtgtggggcaggcagagagggatggtgtccagagatacatcacactttacatcctatcttactgtcctctgtttttcttaccctccttacatcctttttgttaaaaataaaaagcattgtagctgttggtttgtgttgtattttaacaaagaatgaatgattacagtgtgcatcatttagaaacctttcaaatgttaccttcttgaattgccctagaaaagaacaaaattagttgactacccaaccaaacctttcagttgatatttgctttttgtgtttatttatatgtaactaagtctattaatataataaaaatgaatatacctgcagc

SEQ ID NO: 183887 - DNA, 9042 bp, Artificial Sequence
  derived and/or modified sequence
atgagcaacatcaccatcgaccccgacgtgaagcccggcgagtacgtgatcaaatcgctgttcgccgagtttgccgtccaagctgaaaagaagatagaggtcgtgatggctgaacccctcgaaaaactcctgtcccggtcactgcagaggggcgaggatctccagtttgatcagctgatttcaagcatgtcctcagtggctgaacactgcctgcccagccttctcaggacacttttcgactggtatcgaaggcaaaatgggactgaagacgagagttacgaataccggccgagatccagtactaagtctaaaggcgacgagcaacagcgggaacgagattatttgttggaacgccgggacctcgcagtggacttcatcttctgcctggtgttggtggaggtcctgaagcagattccagtgcaccctgtacccgaccccctcgttcacgaggtcttgaaccttgcctttaaacatttcaaacacaaagagggctacagcggcacaaacacaggtaacgttcacattatagcagacctctatgccgaggtcattggagtgctagcccaatccaagttccaggccgtgaggaagaagtttgtcaccgagctgaaagagttgcgacaaaaggaacagagtccacatgtggtccagtccgtgattagtctgatcatgggcatgaagttttttcgcgtcaaaatgtatcccgtagaggacttcgaagcatccttccagtttatgcaggagtgtgcccagtattttctggaggtgaaagacaaggatatcaagcacgccctggcgggcctgttcgtcgaaattctgatcccagtggctgccgcagtgaaaaatgaggtcaacgtaccatgcctgaaaaatttcgtggagatgctctatcagacaactttcgagttaagctcaagaaaaaagcactctctggcattgtatccattaattacctgccttctctgcgtgtcacagaaacagttctttttaaacaattggcatatctttcttcagaactgcctctcacacctgaaaaataaggaccccaaaatgtcaagagttgcactggagtcgctgtacagactgctctgggtttatgtcattcgcattaagtgtgaatctaatacagtaacacagagccgcctgatgtccatcgtgtctgcactctttcctaaaggttcccgaagcgttgtccctagagacactccactgaatatttttgtgaaaatcatccagttcatagcacaagagcggctcgattttgccatgaaggaaattatttttgatctgctgagcgtaggcaaatcaacgaagacatttactattaaccccgagaggatgaacatcggcctcagagtcttccttgttatcgccgattctctgcagcagaaagatggagaaccgcccatgccaaccacaggtgtcatcctgcctagcgggaacacacttagggtcaaaaagatctttctaaataagacgctaaccgatgaggaggctaaggtgatcggaatgtctgtgtattatccgcaggtccgaaaagccctggactcaattctgagacacctggataaggaggtcggccgccctatgtgcatgaccagcgtacagatgtcgaataaggaaccagaagatatgatcactggagagaggaaacccaaaatcgacctgtttcggacatgcattgcagcgattcctcgtttgattccagatggcatgtccaggactgacctaatcgagctcctggctcggctgactattcacatggacgaggaactgcgtgctcttgcattcaacacgctgcaggccctgatgcttgatttccctgattggcgggaagacgtgctgagtggctttgtatactttatcgtaagagaggtaaccgacgtccaccctaccctgctcgacaacgccgtgaaaatgcttgtccaactgatcaatcagtggaaacaggccgctcaaatgcacaacaagaatcaagacactcagcacggggtcgctaatggtgcctctcatcccccccctctcgaacgcagtccatactccaacgtctttcacgtagtggaggggttcgccctggtgattttgtgcagctcccgacccgccactcggcgtctcgctgtgtcagttctgagagagattcgggcgctctttgcgctgctggagatccctaaaggcgacgacgagctcgcaattgatgttatggaccgattgagtccatccatcctggaatcttttattcacctcactggagctgatcagacaaccctcctgtactgtcccagcagcatagacctccagaccctcgcagagtggaattcatcacctatctcccatcagtttgatgtcatctccccatcacatatttggatatttgcccacgtgacccagggacaggatccatggataatctctttaagttcctttttgaagcaggagaaccttcccaagcattgctccaccgccgtttcctatgcatggatgtttgcgtacacgcgtctgcagctgttgtcccctcaagttgacatcaacagtccgatcaacgctaaaaaagtgaacacaacaacctcctccgatagctacattggactatggcgaaactacctcattctatgctgcagcgcagcaacaagttcaagttctacttccgcggggtccgtacgctgctctccgcctgagactttggccagtactcccgactcagggtatagtatcgattctaaaatcattgggattccaagcccaagctcactgttcaagcatatcgtccccatgatgcggagtgagtccatggagatcaccgagtctttggtcctcggacttggacgcaccaaccccggagcattcagggagctgattgaagagttgcacccgataattaaggaggcattggagagaaggccagagaacatgaagcggcggaggcggagagacatcctcagagtgcagctggttagaatctttgagttgctcgcagatgctggcgttatttcccattctgctagtggcggcctggataacgagacccactttctgaataacactcttctggagtatgtcgacctcactcgacagttgctcgaggcagaaaacgaaaaagacagtgacacgttgaaagacatcagatgtcactttagcgccctggtcgctaatataatccaaaacgtccctgtacatcagcgccgttcaatcttccctcagcagagtctccggcactccttgttcatgcttttttcacactgggccggccccttcagcattatgttcactccactggatagatattccgacagaaatatgcaaatcaacaggcaccagtattgcgccctcaaggccatgagcgctgtgctgtgttgtggccctgtggcagacaacgtgggtctttccagcgacggatatctttataagtggctcgataacatactagattctctggacaaaaaggtccatcagctcgggtgcgaggcagtgaccctgctgctggaactgaatcctgaccagagcaacctgatgtactgggccgtcgacagatgttatacaggaagcggcagggtggcagccggctgctttaaggccatagcgaatgttttccagaaccgggattaccaatgcgacacggtgatgctgttgaatctgattctgttcaaggctgctgactcaagcagatccatttacgaggtagcaatgcagctactgcagatcctggagcccaaaatgttcaggtatgcacacaaactcgaggtgcaacggacagatggcgtattaagccagcttagccctctgccccacctctattcagtaagttactaccagctgtccgaggagctggcccgggcctaccctgaactcacattggctatcttcagcgagatcagtcaaagaattcagactgctcacccagccggtcgacaagtgatgttacactacttgttgccgtggatgaacaatatagaactcgttgatctgaagcccctgcctaccgccaggcgccatgatgaggacgaggacgattcacttaaagacagagagctgatggtaacttcccgaagatggctccggggggaaggatgggggtctcctcaggcaactgcgatggtcctaaataacctcatgtacatgaccgccaaatacggtgatgagctcgcatggtccgaagtagagaatgtttggacaaccctagcagatggctggcccaagaatctgaaaataatccttcactttctgatatcgatttgtggggtaaacagtgagcctagcctgctaccctacgttaaaaaggtcatcgtgtacctcggacgagacaaaaccatgcagttgctcgaagagctcgtgtcagaactgcaattgactgatcctgtgtcatctggcgtgacccatatggataaccccccatattataggataacctcatcgtacaaaataccttccgtgacgtctgggactacatccagttcaaataccatggtcgcaccaacagacggaaatccggataataagccaatcaaggagaacatcgaggagagttatgtccacctggatatttattcgggactcaactcccacctgaatcggcagcaccacaggctggaatcgagatattcatcatcttctggcggtagctacgaggaggaaaaatccgattcaatgcccctgtatagtaattggcgactgaaggtaatggagcacaaccagggagaacctcttcccttccccccagctggaggctgttggtctccactggtggactatgtcccagagactagctctccgggtttgcccctacacagatgcaatattgcggtgatcctgctgaccgatttgatcatcgaccattcggtgaaagtggagtggggcagttatctccacctgctgttacatgctattttcattggcttcgatcattgtcatcccgaggtatacgaacattgtaaacggctgctgcttcacttgcttatcgttatgggcccaaacagtaatattcggacagtcgcgagtgtgctgctgcggaataaggagtttaatgaacctcgtgtgctcaccgttaagcaggtcgcacatctggactacaatttcaccgctggaatcaatgatttcattcctgattaccagcctagtccaatgacagactcaggtctttcatcttcttcaacaagttcatcaatcagtctgggcaacaactccgctgccatatcccaccttcacaccacaattctgaatgaggtggatatctctgtcgagcaggatggtaaggtcaaaacccttatggagtttataacttcccggaaaagaggtccattgtggaaccatgaggacgtgagcgcaaagaacccatcaatcaaaagtgcagaacagctgacaacatttttaaagcatgtagtatccgttttcaagcagagttcttctgagggcattcatttagagcaccaccttagtgaagtggcattgcagaccgccttatcctgttcttctcgccattacgctggaaggagcttccagatttttagagctctcaaacaacccctcacagcgaccaccttgagtgacgtactttcccgactcgtcgaaacagtaggggatcctggtgaagacgcgcaaggttttgtcattgagcttttgcttacgctggagagcgccattgataccttagccgagactatgaagcactacgacctcctgagtgccctctcccaaacatcatatcatgacccaataatgggtaataagtacgctgccaataggaagagcacagggcagctgaatctctcaacctcccccattaactcctcaagctacctgggctacaatagcaatgccagaagcaacagtctgcgtctttctctgatcggagaccggcgcggggaccggcgccggagcaataccttagatattatggacggtcggatcaatcactcctctagtctggctagaactcgttccctgtcaagcctcagggaaaaagggatgtacgacgtccagagcaccacggaacccacaaacctgatggctactatcttttggattgccgcttccctgctcgagagcgactatgagtacgaatatcttttggcactcaggctgcttaataagttgctcattcatttgcccctggataagtccgagtctcgggaaaagatcgagaatgttcagtctaaactaaaatggactaactttccaggcttgcagcagctgttcctgaaaggatttacaagtgcttccacccaggaaatgactgtccacctgctcagcaaacttatcagtgtctctaagcatacgttggtggacccctctcagttgagtgggttccccttaaatatcttatgtctgctgccgcatctgatccagcactttgattcccccacacaattctgcaaagaaacagcttcccggatcgccaaggtgtgcgcagaggaaaagtgccctacattggtgaatctggcacacatgatgagcttatactccacccacacatattctagggactgcagcaattggattaacgtggtctgccgatacctgcacgactccttttccgacacaacattcaacctggtcacctacctggccgagttactagagaaaggtctctcctccatgcagcaatccctgctccaaattatttacagtctgctgtcccatatcgacctgagtgccgctcctgcaaaacagttcaatttggagatcatcaagatcatcggcaagtacgtccagtccccatattggaaagaggccctgaacattcttaaactggtggtgtccaggtccgcttccttggtagtgccctccgatatccctaaaacatacggcggcgatactgggtcacccgaaatctcattcacaaagatttttaataacgtgtccaaggagctcccaggcaagactctggactttcattttgatatatccgagacaccgattatcggtaataagtatggagatcagcactccgcggcagggagaaacggaaagcctaaagtgattgcggtcacccgttccactagtagcacttcctctggttccaactcaaatgcattggtgcctgtttcatggaagcgtccacagctgtcacagcgcaggaccagagagaagctgatgaacgtcctgagcctctgtggccctgagtccggcctgccaaagaatccctctgtggtgttctcctctaacgaggacttggaagtgggggatcagcagacctctcttatatcaaccacggaagatattaaccaagaggaagaggtcgcggtggaagataattcgtccgaacagcagtttggggtctttaaggactttgactttctggacgtggaactcgaggatgctgaaggcgagtcgatggataactttaattggggggtccgtagaagaagcctggatagcattgacaaaggagacacgccatctctccaggaataccaatgcagttccagtacgccctccctaaacctcaccaatcaggaggataccgacgagtctagtgaggaggaagccgccctcactgcttctcaaatattgagtaggacacaaatgctgaactctgacagcgccaccgacgaaacgatccccgaccaccccgatcttcttctccagtccgaagactctaccggatcaattaccacagaggaggttctccaaattagggatgagacccctaccttggaggcttcccttgataacgcaaactctcggctcccagaggatactaccagcgtgctgaaagaagagcacgtgaccacttttgaggatgagggttcttatattatccaagaacagcaagaaagcctcgtttgtcagggtatccttgatctggaagaaactgaaatgcctgaaccactagcccctgagagttacccggagtctgtttgtgaggaggatgtgactctcgccctgaaggagctggatgagcggtgtgaagaggaggaggcagatttcagcggactgagtagccaggacgaggaggaacaagatggctttcctgaggtgcagacatcccctctgccttcccctttcctgagcgcaattatagctgctttccaaccagtggcatacgatgacgaggaggaggcctggcgatgccacgtcaaccagatgcttagcgatacagatgggtctagtgcagtttttacatttcacgttttctctcggctctttcagaccatccaacgcaagttcggggagatcaccaacgaggctgtctcatttctcggtgatagcctgcagcggatcgggaccaaatttaaatcaagcctggaagttatgatgctttgttcagagtgcccaaccgtgtttgtggacgccgagacactgatgagttgtggactgctcgagacattgaaatttggcgttttggagttgcaggaacacctcgacacctataatgttaagcgcgaggcagcagaacaatggctggacgattgtaagaggacttttggagcgaaagaagacatgtataggattaatactgatgctcagcagatggagatactggcagaactggagctctgtaggcggttgtataaactgcattttcagttactgctgctctttcaggcttactgcaagttgattaaccaggttaacaccataaagaacgaggcagaggtgatcaacatgtcggaggagctggcacaacttgaatccatcctgaaggaggccgaaagcgcaagcgagaacgaagagatcgacatttcaaaagccgcacagaccacaatcgagaccgccatacacagtctgattgagacactgaaaaacaaggaattcatcagtgcagtagcccaggtcaaagcttttcggtctctctggccctctgatattttcggctcatgcgaggatgaccctgttcagacactcctgcacatttactttcaccatcagaccctcggacagacgggaagtttcgctgtcattggtagcaacttggatatgtccgaggcaaactacaagctgatggagcttaatctggagatacgcgaaagtctccggatggtgcagtcgtaccagttactcgctcaagcgaaaccaatggggaatatggtgagcacgggcttttag

SEQ ID NO: 183888 - DNA, 9042 bp, Artificial Sequence
  derived and/or modified sequence
atgagcaacatcaccatcgaccccgacgtgaagcccggcgagtacgtgataaagagcctttttgcagagttcgctgtgcaggctgaaaagaaaattgaggttgttatggccgaaccgcttgagaagctcctctcacggagcctgcaaaggggagaggaccttcagtttgaccagcttatctccagtatgtccagtgtcgccgagcactgtctgccttccctgcttcgtactctattcgactggtatcggagacagaatggtaccgaggacgaaagttacgaataccggccccgctcctcaactaaaagtaagggcgatgagcagcagagagagagggattacctgttggagagacgggatctcgctgtggactttatattttgcttagtcctggtcgaggttctgaagcagattcccgtgcatcccgtgccggaccctcttgtccacgaggtccttaacctggccttcaagcactttaaacacaaggaaggctattcagggaccaacaccggcaatgtgcatatcatcgctgacctgtacgcagaggttattggtgtgttggcgcagtccaagtttcaggccgttaggaagaaatttgtgactgagctgaaggaattacggcagaaggagcagagtcctcatgtggtacagtcagtaatttcccttatcatgggaatgaagttcttccgagtcaaaatgtatcctgtggaagactttgaagcctcgtttcagttcatgcaagagtgcgcccaatactttctggaagtgaaggacaaggacattaagcacgctctcgcaggtctgttcgtggagattctgattcctgtagccgctgcggtaaagaatgaggttaatgtgccatgcttgaagaattttgtggagatgctctatcagaccacctttgagctatcctcccgcaagaaacacagcctagccctctatcccctcatcacatgcctcctgtgtgtctcccagaaacagtttttcctcaacaactggcacatctttctgcagaactgtctgtcacacctcaagaacaaagatccaaagatgtcccgagtcgcactggaatccctttaccggctgttgtgggtttacgtcattcgcattaagtgcgagtctaacaccgtgacccagagccgactaatgtccatcgtcagtgccctgttccctaagggaagccgcagtgtagtgccacgagacacaccacttaacatctttgtaaagattatccagttcatagcacaagagagactggatttcgcaatgaaagaaatcatctttgatctcctcagcgttgggaagtcaactaagacattcaccataaacccggaaaggatgaatataggactgagggttttccttgtgatcgctgattccctgcagcagaaggatggggagccgcctatgccaacgacgggggtcatcctgccaagcggcaacacccttagagtaaagaagatcttccttaacaagacgctcacagatgaagaagccaaggtgatagggatgtcagtttattatcctcaagtcaggaaggctctcgactctatcttacggcacctcgataaggaagtgggtaggcctatgtgcatgacttccgtgcagatgagcaacaaggagcccgaggatatgatcaccggcgaacgcaaacctaaaatcgatctgtttcgcacttgtatcgcggcaatccctcggctgatccccgatgggatgtccagaacagatctgatcgagctgctagcccgcctgaccatacacatggacgaggagctgagggctctggcttttaacactcttcaagctttgatgctggacttcccagactggcgagaagatgtcttgtctggattcgtctacttcattgtacgggaagtcaccgatgtgcacccaaccctgctggacaacgctgtgaagatgcttgtccaattgatcaatcaatggaaacaggctgctcagatgcacaacaagaatcaagatacccagcatggggtggccaacggcgccagtcatcctcctccccttgagaggtccccgtactcaaatgtgttccatgtcgtggaaggtttcgccctagttattctttgctcttcgcggcccgctacccgtaggcttgccgtaagtgtgttgagagagataagggcgctgttcgcactactggagattcccaaaggtgatgacgagcttgccattgacgtgatggacaggttgtccccatccatcctggagagctttattcatctgaccggtgctgaccagactacattgctatactgcccttcctcaattgacctgcagactctggctgagtggaactcttcgccaatttctcaccagttcgatgtaatcagtcccagtcacatttggatcttcgctcacgtgacccaaggacaggatccctggatcatatctctgagtagcttcctgaaacaagaaaatttacccaagcactgttccaccgccgtctcttacgcttggatgttcgcttacacccgcctgcagttgctgagccctcaggtggacataaacagtcccatcaacgccaagaaggtgaacacgactaccagctccgactcttacatcggactgtggcgcaactacctgattctgtgctgcagtgcggccacttcgtcaagcagcacaagtgctggcagcgtcagatgctctcccccagaaaccctggcatcaacccctgactcgggctactcaatagattccaagatcatcggcattcctagcccaagctctctcttcaaacatatcgtccctatgatgcgcagtgagtccatggaaataacagagagcctggtgctgggtttgggtaggacaaatcccggtgctttccgtgaactgatcgaggagctacacccaattattaaagaagctctggaaagaaggcccgagaacatgaagagacgtagacggagagacatacttcgggtgcagttagtgcggatcttcgaactgcttgccgacgctggggtcatctctcacagcgctagcgggggactcgataacgagacacactttctgaataatactctgctggagtacgttgatctcacccgccagctgctggaggcagagaacgagaaagactccgacactttaaaggatatacgctgtcacttctctgcactcgttgccaacatcatccagaatgtgccagttcaccagaggcgcagcattttcccccagcagtctttgcgacactccctgttcatgttatttagccattgggcaggacctttttctattatgtttacaccattagatcgctacagtgatagaaatatgcaaattaatcggcatcagtactgtgccctcaaagccatgagcgcggtcctgtgttgcggtcccgtcgcggataatgtagggctcagttcagatgggtatctgtataagtggttagacaacatcctggacagtctcgataagaaggtccatcaattaggctgtgaggccgtgacgttgcttcttgaactaaatccggatcagtccaatctcatgtactgggccgtggataggtgctacaccgggtccggcagagttgccgcaggctgctttaaagccatagccaatgtctttcagaaccgggattatcagtgtgacactgtgatgctactaaacctcatcctgtttaaggcagctgatagctccagaagcatatatgaggtcgccatgcagcttcttcagatactggagcccaaaatgttccgctatgctcataaattggaggtgcagcggaccgacggcgtgctgtcacagttgtcccctcttcctcatttatactcagtcagttattatcaactgtctgaggagttagctcgggcatatccagaactcactttagccatcttctccgagatatcccagcggatacagacagcacatccagccggccgccaggtgatgttgcattacctgctcccttggatgaataatatagagctcgtagatcttaaaccgctgcctaccgccagacgccatgatgaggacgaagacgactccttaaaggacagagagctgatggtgacatctcgcaggtggctgcgcggagagggatggggatccccccaggcaaccgcgatggtcctaaacaacctcatgtacatgacagccaagtatggtgacgaactcgcatggtcagaagtcgaaaacgtctggacgactctagccgacgggtggcccaaaaatctgaagatcattctgcatttcctgatctctatttgtggagttaacagtgaaccctccctgctgccctacgtgaagaaagtgatcgtgtatctgggccgtgataagacgatgcaacttctggaggagctagtctctgagctgcagctgaccgaccccgtctcttctggtgttactcatatggataacccgccatactatcgtatcacatcgtcctataaaattccctccgtaacttccggaactacctcaagcagcaatacaatggtcgcgcccactgacggaaatccagacaacaagcccattaaagaaaacattgaggaatcatacgttcacttagatatatactccgggctgaactctcatttgaacagacagcaccatagactagagtctcgctattctagctcctcaggcgggagctacgaggaggaaaagagcgactcaatgcctctctactccaactggcggctcaaagtcatggaacacaaccagggtgagcctctaccctttcctcccgctggcggttgctggagcccccttgtggactacgtaccggagacctcttctcccggcctacccctgcatagatgcaatatagccgttattctgcttacggacctcattattgaccactccgtcaaagtggaatgggggtcttacctgcacctgctcctacacgcgatatttatcgggtttgaccactgccaccccgaggtctatgaacattgtaaaagacttctgctacacctcctgattgtcatgggtcctaatagcaatattagaaccgtcgcatccgtactgctgcggaacaaagagtttaacgaaccacgggtcctgacagtaaagcaagttgcgcacctggattataactttacagccggtatcaatgacttcatacctgattatcaacctagtccaatgaccgactcagggttaagcagcagttccacctccagctcaatttccctgggtaataactcagccgctatctcccacctgcatactactatcctgaacgaggtggatatctccgtggaacaggacggcaaagtcaagactttaatggagttcatcacttctagaaaaagggggccgctgtggaatcatgaggatgttagcgccaaaaatccgagcattaagtctgctgaacagctaaccacttttttaaagcacgtggtcagcgtgttcaaacaatcttcatctgaagggatccacttagagcaccatcttagcgaagtggctctacagaccgccttgagctgcagtagcaggcattatgcgggcagaagttttcaaatcttccgcgctctgaagcagcctctgaccgccaccactctgtcggacgtcctgtcaaggctggtggagacagtgggggacccaggcgaagacgctcaaggctttgtgatcgaattacttctcaccctggagtctgctatcgacactctggctgaaaccatgaaacattacgatctgcttagcgccctcagccagacatcttaccatgatccaatcatggggaacaagtacgccgcaaatcgcaagtctaccggacaattgaatctgagcacgagcccgattaacagtagctcgtatctgggttacaactcaaatgcccggtctaatagtctaagactcagtttgatcggggatagaagaggagatcggaggaggtcgaacactctggacattatggacggtcggatcaaccactcctcctctctcgctcgcacccgcagcttgtccagcctgagagagaaggggatgtatgatgtgcaatcgactacagagcctactaaccttatggcgactatcttctggattgcagcctcgctcctggagtcggattacgagtacgaatacttactggctctacgtctccttaataagctcctcatccatctacccttggacaagtccgagtccagagagaagattgagaatgtccagtccaagctcaagtggacaaacttccccggcctccagcagctttttctgaagggctttaccagtgcatcaacacaggagatgacagttcatttactttcaaaactgatcagtgtgtcgaagcacactcttgtggacccctcccaactttctggatttccactgaacatcttatgtctcttaccccatctgatccagcattttgactctcccacacagttctgtaaagaaacagcaagccgtattgctaaggtgtgtgccgaagaaaaatgccccacgttggtcaacctagcccacatgatgtctttgtacagcacacacacctactcccgcgattgctctaattggattaatgtggtctgccggtacctccacgatagcttcagtgacacaacctttaatctggtaacctatctggccgagctgttagaaaagggattgtcctccatgcagcagagtctgctccagataatctattccttgctaagccacattgacctttcagccgctccggcgaagcagtttaatctcgaaatcatcaagatcattggtaaatatgtccagtccccatattggaaggaggcactgaacatcttaaaacttgtagtgtcgcgcagcgcctcactggtggtcccgagcgatattcctaagacctatgggggcgacacagggagcccagagattagcttcactaaaattttcaacaatgtctctaaggagctgccgggaaagactctggactttcatttcgatatttccgaaactccaatcatcggaaataaatacggggatcagcacagcgccgctggccgcaacgggaagccaaaggtcatcgccgttacccgatcaacttcatccactagctcaggatctaactctaatgcactggttcctgtcagctggaagcgcccccagctgtctcagcggcggacaagagagaagcttatgaacgtgctcagcttgtgtggaccggagagtgggctgccaaagaatccgagtgttgtttttagttcaaacgaggatcttgaggttggggatcaacagacctctctgatttccacgacggaggacatcaaccaggaagaagaggtggctgtggaggataactcttcggagcagcaattcggtgtgttcaaggattttgacttcttggatgtggagcttgaagacgccgaaggtgagtccatggacaatttcaactggggtgtacggagacgctcactggactctattgacaaaggagacaccccttccttacaggaataccagtgcagctcttctaccccgtctttaaacctcacgaaccaggaggacaccgacgagagcagcgaggaagaggccgccttgacggccagccagatcctgtcgagaacgcaaatgctcaactccgacagtgccactgacgagactatccccgaccaccccgatctcctgctgcagagcgaggactccacaggaagcattactacagaagaagttctgcaaattagggacgagaccccaaccctggaggctagcctggacaacgctaattcccgacttcctgaagatacaacatctgtgctgaaggaggaacatgtcacaaccttcgaagacgagggcagctacataatacaggaacagcaagagtctcttgtttgtcagggtattcttgacctggaagaaacggagatgcccgagcccctcgcccctgagagctacccagaaagtgtgtgcgaggaggatgttacactcgctctgaaagaactcgatgaacggtgcgaggaggaagaggccgactttagcggactgtcttcccaggacgaggaagagcaggacgggttcccagaagtgcagacatcccccctgcctagcccctttttatctgcgattatagcagcttttcaacccgtggcatatgacgatgaggaagaggcttggcgatgtcatgtgaatcagatgctctcagatacagatggttcatcagctgtgttcactttccacgtgttttctagactcttccaaaccatccagcgaaaattcggggaaattaccaatgaagccgtgtctttcctgggggattctctgcaaagaatcggaactaaattcaaatcatcactagaagtgatgatgttgtgcagtgagtgtccaaccgtattcgtcgatgcggagaccctgatgtcctgcggcctgcttgaaacgctgaagtttggggtccttgaacttcaggaacacctggatacatacaacgtaaagagggaagcagccgagcagtggttagatgattgtaagcgcacgttcggtgcaaaagaggatatgtacaggatcaataccgatgcacagcagatggagatccttgccgagctggagctgtgtcggagactgtacaaattacacttccagctgctgctattgttccaggcatattgtaaactcattaaccaggtgaataccattaaaaatgaggcggaagtcattaatatgtccgaagagctcgctcagctggagtcaatccttaaggaagctgagtctgcttcagaaaacgaagaaatcgacatctctaaggccgcgcaaaccaccattgagacggctatccattcactaatcgagaccttgaagaataaagaatttatttctgctgtcgcgcaagtgaaggcttttaggtctctgtggccgagtgacatttttggaagttgtgaggatgatcctgtgcagactctgctgcatatctattttcaccaccagacccttggccagactgggtcctttgccgtcatcggtagtaatctcgacatgagcgaagctaactataagttgatggagttaaatctggagatcagggagagtctgcgcatggtacagtcataccaactgctggcccaggccaaacctatgggtaacatggtgtcaactggattctag

SEQ ID NO: 183889 - DNA, 9042 bp, Artificial Sequence
  derived and/or modified sequence
atgagcaacatcaccatcgaccccgacgtgaagcccggcgagtacgtcataaaaagcctgttcgctgaatttgctgtacaggccgaaaagaaaatagaagtcgtcatggcggaaccattggagaagctgttatctcggtcgttgcagaggggcgaggacttgcagttcgatcagctgataagtagtatgtctagtgtggcggaacattgcctcccctccttgctccggacactctttgactggtacagaaggcaaaatggaaccgaggatgaatcttacgagtaccgtcctagatccagtaccaagtccaagggcgacgagcaacaacgcgaacgggactatctcctggaacggagagacctcgccgtcgacttcatattctgtctggtactggtggaggtgctgaagcagattcctgttcaccccgtacccgatcctctagtgcacgaggtactgaatcttgcctttaaacacttcaagcacaaagagggttactccgggaccaacacaggtaatgtgcatatcatcgccgatttatacgctgaggtcatcggagttttggctcaaagcaaattccaagctgtccgcaagaagttcgttacagaacttaaggagctgcgacaaaaggaacaatcgccacacgttgtgcagtccgtgatctcactaatcatgggcatgaagttctttcgcgtaaagatgtaccccgtggaggacttcgaagcttcctttcaatttatgcaggaatgtgctcaatatttcctagaggttaaggacaaagatatcaaacatgctctggctggactctttgtggaaatactcatccctgttgctgctgctgtaaagaacgaggttaatgttccatgcttgaagaactttgttgagatgttgtatcaaaccacgtttgagctgtcctctcgcaagaaacactcgcttgccctctatccactgatcacttgcctgttgtgcgtctctcagaagcagttttttctgaacaactggcatatattcctccagaattgtctgagccaccttaaaaataaagatcctaaaatgagtcgggtggcattggagtcactttatcgtctcttatgggtctatgtcattaggattaaatgcgaaagcaacaccgtcacccaatcaaggctgatgtctatcgtgtcagcgctctttccaaaaggttcccggtccgtcgtaccccgcgacacgccattgaatatctttgtaaaaattatccagtttatcgcacaggagcgcttagattttgcgatgaaagagataattttcgatctcctttctgtgggtaagtctacaaaaaccttcaccattaatcccgagcgcatgaatattggcctgcgggttttcctggtcatcgccgatagcctccaacaaaaagatggggagcctccaatgcctacaacaggagtgattctgccctctggaaacaccttgcgtgtgaagaagattttcctgaacaagacactgactgacgaggaggctaaagtgattgggatgagcgtttactacccacaggtccgcaaggcactggatagcatcctacgacatttggacaaggaggtcgggagacccatgtgcatgacaagcgtccaaatgtctaataaagaaccagaggacatgatcaccggggagcgtaaaccaaaaattgatctattccgcacatgcatcgcagctatcccgcggctgattcccgacgggatgtcacggacagatctcatcgaactattggccagactgaccatccatatggatgaagagcttcgcgcattggccttcaacactctgcaggccttgatgcttgatttcccagactggcgcgaagacgtgctctccgggttcgtctattttatcgtccgtgaggtaactgacgtgcaccctacgcttctggataacgcggtgaagatgctggttcagttgatcaaccagtggaagcaggccgctcaaatgcacaacaaaaatcaggacacacaacatggcgtcgcaaatggtgcttctcatcccccccctttagaaagaagtccttactccaacgtctttcatgtagtagaagggttcgcattagtgatactgtgtagctctcgacccgctacccgacgactggccgtgtccgttctgagagaaataagagcactctttgccctcctggagatccccaaaggagacgatgaactcgctatcgacgtgatggataggcttagtccttccatcctggagtctttcatccatcttacgggggccgatcagaccaccttgctgtactgtccgtcctccattgatttgcagactctggcggagtggaactcctccccgattagtcatcagtttgacgtaattagtccatctcacatttggatcttcgctcacgttactcaggggcaggacccgtggattataagtctttcctccttcttgaagcaggagaacctacccaaacattgctccaccgccgtgtcatatgcgtggatgttcgcctatactcgactgcagctgctgtcaccccaggtagacatcaatagccctatcaacgccaagaaagttaatacaactacaagtagtgactcttacattggcctgtggcgaaactaccttatcctttgttgctctgcagctacgtctagttcatccacgagcgcagggtcagtgagatgttctcctcccgaaaccctggcatccactcctgattcaggatactccattgactccaaaatcatcggcattcccagcccctcatcactctttaagcacatcgtgcctatgatgcgtagcgaaagcatggagataacagaaagcttagtactaggactgggacggaccaacccaggcgcattcagggaactgatcgaggaattgcaccccattatcaaggaggcactggagcgacggccagaaaacatgaagcgacgcaggcggcgagatatactgcgagtgcaattggtacgaatcttcgagctcctcgcggacgccggggttattagtcacagcgccagtgggggacttgacaacgagacacatttcttgaacaatacactgttagagtatgtagacttgaccaggcagctgttggaggccgagaatgaaaaagattcagacaccttgaaggatatccgttgccatttctctgcactcgttgccaacatcatccagaacgtgccagtgcatcagcgtaggagtatctttcctcagcagtctctgaggcacagcttgtttatgttgttctcacactgggcaggccctttcagcatcatgttcacgcctctggatagatactctgatcggaatatgcaaataaaccgacaccagtactgtgcactcaaagcgatgtccgccgtgctgtgttgtggcccggtagctgataacgttgggttgtcatccgacgggtacctttataagtggttagacaatattctggattctctggataagaaggtccatcagctcggctgcgaagccgttactctgctcctggaactgaaccccgaccagtctaaccttatgtactgggctgtcgatcggtgttacaccggtagtgggcgggtggcggctgggtgctttaaggccattgccaacgtgtttcagaatcgcgattaccagtgcgataccgtcatgctgctgaacctgatactttttaaagccgccgattcttcacgctcgatctatgaagttgccatgcaactgctgcaaattctggagccgaagatgttccgctatgcacacaaactggaagtgcaacgcacggatggcgtgcttagccagctgagccctctgccccatctctactccgtgtcttactatcagttgtccgaagaattagcaagagcctaccccgaactgactctggctatcttcagtgaaatctctcagcggattcagaccgctcaccctgccggccgacaagttatgcttcactacctcctgccatggatgaacaacatagagctagtagacctgaagccactgcctactgcgcggcgccatgacgaagatgaggatgatagcctaaaggatagggagctcatggtgacttcacgccggtggctcaggggtgaaggctggggaagtccccaggctactgccatggttcttaacaacctgatgtatatgaccgctaagtatggcgatgagctcgcttggagcgaggtagagaacgtctggacaacattggcggacggctggcccaagaatctgaaaatcattctacacttcctgatcagcatatgcggcgtgaactctgaaccctctctcctgccgtacgtcaagaaagtaatcgtgtatctggggcgcgataagaccatgcagctgctggaggaactcgtatcggaactacagctaaccgatccagtctccagcggcgttacccatatggacaatcctccctattatcggattacatcctcctacaaaatccccagcgtgactagtgggaccacatcaagcagtaacaccatggtcgctccaactgatggaaatccagacaataagcccatcaaagagaatatcgaggaatcttatgtgcacctggacatctatagtggcctcaactcccatctcaacaggcagcaccaccggctcgagagccggtacagcagctcgagtggggggtcctatgaagaggagaagagtgattctatgccactgtactcgaattggcggcttaaggtcatggaacacaaccagggcgagcctctgccgtttcctccagccggggggtgctggtccccactggtggattatgtgcccgaaacgtcttcaccaggactgcccctccaccgttgcaatatcgccgtgattctcctgacggatttgataatcgaccattcagtgaaggtcgagtggggctcctacctccacctattgttgcacgccattttcataggctttgaccactgtcatcccgaggtgtatgagcactgtaaacgcctcctcttacacctactgatcgtaatgggcccgaacagcaacatcagaactgtggccagcgtacttctccgcaacaaagagttcaacgaacctagagtgctgactgttaaacaggtggcccacctagattataatttcaccgctggcattaacgatttcatccctgattaccaaccgagccctatgactgacagtgggctgtcaagctccagcaccagcagttccatctcattggggaataacagcgctgctatcagtcatctgcacacgactatattaaacgaagtggatatcagtgtcgaacaggacggcaaagtgaagacgctcatggaattcataacatcaaggaagaggggtccactctggaaccatgaggacgtcagtgccaagaaccccagcatcaagtccgcagagcaactgactacctttctcaagcatgtcgtgtcagtttttaagcagtcttcatctgagggcatccatctcgagcaccatctatctgaagtcgcccttcagaccgcactctcttgttcaagtcgtcattatgccggaaggtcttttcagatctttagagcactcaagcaacctcttactgcaactaccctgtctgatgtgctcagccggttagtggagactgtgggagaccccggggaggacgctcaggggttcgttattgaattactgttgacattggagagcgccatcgacacactggcagagactatgaagcactacgatctcctgtcagcactctctcagaccagctaccacgaccctattatgggcaacaaatatgcagccaatcggaagagcacaggccaattaaatctctccacgagcccgataaatagctcctcctacctgggctacaacagtaacgcacgctccaattcactgaggctttcactcatcggtgacaggaggggcgatcggagacgatcaaatacactggacattatggacggacggattaatcacagctcaagcttggccaggaccagaagtttgagttccctgagggaaaaaggcatgtatgatgtccaaagcactacagagcccaccaacctgatggccacgattttctggatcgccgccagtctgctggagtctgattacgaatacgaatatctcctggctctccgccttttgaacaagctgctgattcacctgcccttggataagtctgagagcagagagaagattgagaacgtgcaaagcaaattgaagtggaccaacttccccggcttacagcagctgttcctcaagggattcacatccgcttctacacaggagatgacagttcacctccttagcaagctgatcagtgtcagtaagcatactctggttgacccatctcagctgtctggttttcccttgaatattctatgtcttcttcctcatctgattcagcacttcgactctcctactcagttctgcaaggagactgcaagtcgtatcgctaaggtgtgcgctgaggaaaagtgtcctaccctcgtcaatttagcacacatgatgtccttgtactcgacccacacctattcccgtgactgctctaattggatcaatgtggtgtgtcgttacttgcatgactccttttccgacaccacatttaatttagtcacatacttggcggaacttttggaaaagggactgtcttccatgcagcagtctctcctgcagatcatctattcgctcctgagccacattgacctcagtgcagctccggccaagcaattcaacttagaaatcatcaaaataattggcaaatacgtgcagtcaccttattggaaggaagctctcaacatccttaagctggtggtgagtagatctgccagtctcgtggtgccttctgacataccgaaaacatacgggggtgacaccggaagtcccgagatttcatttacgaagatctttaataacgtgtctaaggaactgcctgggaaaactctggatttccatttcgacatcagtgaaacaccaataataggcaataaatacggtgaccagcatagtgctgcgggccgaaacggtaagccgaaggttattgccgtaacgagatccacgagtagcacgagctcggggtcaaattcgaacgccctggttccagtgtcttggaagagaccacagctgtcccaaaggcgcacacgcgagaagcttatgaacgtgctgtctctgtgcggaccagaatcagggctcccaaaaaatccttctgtggtgttctcttcgaacgaggatctggaggtcggcgaccagcagacctcattgatctccactacagaagacattaaccaagaagaggaggtggcagtggaggacaactcctccgaacagcagtttggagtgtttaaagacttcgacttcctcgatgtggaactggaagatgccgagggcgaaagcatggataattttaattggggagtgaggagacggtctctcgacagtatcgataagggcgatactccatcgcttcaagaatatcaatgttcatcaagtaccccctcattgaaccttactaaccaagaggatactgacgagagctcagaggaagaggctgcattgaccgcgagccagattttatcaaggacacagatgttgaatagcgattccgcaactgacgaaacaattcccgaccaccctgacctcctccttcaaagtgaagactcaaccggcagcattacaactgaggaagtgctccaaatcagagatgaaacccccactctggaggcctcactcgacaatgccaactctcgattgcctgaagatacaactagcgtgcttaaggaagaacacgtgacgacctttgaagatgaaggatcatacatcatccaggaacagcaagaatcactggtgtgtcaagggatcttggatctggaggagaccgagatgccggagccactggctcctgagagctatcccgaaagcgtttgtgaggaggatgtgaccctggccctcaaagagctggatgaaaggtgtgaggaggaggaagcggacttttcagggctgtcctcccaggacgaggaggagcaggacggttttcctgaggtgcaaacaagtccactgcctagcccttttctgtcagctataatcgccgcattccagccagtcgcatacgacgatgaagaggaggcatggcgatgccatgtaaaccagatgctttcagatacagacggatcttcggccgtctttactttccacgtcttttcgaggttatttcaaactatccagcggaagttcggggagatcacaaacgaggcagtgagttttctgggggacagcctgcagcgtatcggaactaagttcaaatcctcactagaggtcatgatgttatgttccgagtgtccaacagtctttgtggatgcggaaacattgatgtcatgtggccttctcgagaccctgaagtttggggtcttggagcttcaagagcaccttgatacctataacgtgaagcgggaagctgcggagcagtggctggatgattgcaaacgtaccttcggggcgaaagaagacatgtatcgaataaacacagacgctcagctgaatgagattttggtcgaattggaactgtgccggcggctgtacaagctgcatttccagctgctgctgttattccaggcttactgtaagctcatcaatcaagtgaacactatcaagaacgaggcagaagtaattaatatgtcagaagaactcgcccagcttgaaagcatccttaaggaagcggagtccgcctctgaaaatgaggaaattgacattagtaaagctgctcagactaccatcgaaaccgctatccatagcttaatcgagaccttgaaaaacaaagagtttataagcgccgttgcccaggtcaaagcatttagaagcctgtggccatccgacatttttggttcatgcgaagatgacccggttcaaactttgcttcatatttactttcatcaccaaaccctgggccaaactggctcattcgcagtgattggttctaacttagatatgtccgaggccaattacaaactgatggagcttaatctagagattcgggaatctctcagaatggtgcagtcctatcagttgttggcccaagcaaagccaatgggaaatatggtcagtaccggcttctag

SEQ ID NO: 183890 - DNA, 9041 bp, Artificial Sequence
  derived and/or modified sequence
atgtcgaacattacaatcgaccccgacgtcaaacccggtgaatacgttataaagagcctttttgcagagtttgcagtgcaggctgagaagaagattgaggtggtcatggcagagccccttgaaaagctcctgtctaggtcactacagagaggcgaggatttacaatttgatcaactgatcagtagcatgtcctcagtggcggagcactgtctcccttccctgttgcgaacactgtttgactggtacagacggcagaacggcacagaagatgagagttacgagtacagacccaggtcatcaacaaaaagcaaaggtgatgaacagcagcgcgagagggattaccttctggaaaggagggatctagcagtagactttattttctgcctggtgttagtagaggttctgaaacagatcccagttcacccagttcctgaccctttggtgcacgaagtactcaatttagccttcaagcactttaagcataaggaagggtacagtggtaccaacacaggcaatgttcacataattgctgacctctatgcggaggtgatcggagtgttagcccagtccaaattccaagctgtgagaaaaaagttcgtgacggagctaaaggagctgcggcagaaggagcaatcaccccacgtggtccagagcgtcatttcactgatcatggggatgaaattctttcgcgtcaaaatgtatcccgtcgaagacttcgaggccagcttccaattcatgcaggagtgtgctcagtacttcttggaggtcaaagacaaggatatcaagcacgccctcgcgggactttttgtggagatcctaatccccgtggcagctgccgtgaaaaatgaagtgaatgtgccgtgcctgaagaatttcgtcgaaatgctctaccagacaaccttcgaactgtcttcccggaagaaacactcattggcgctgtaccctctgatcacatgtctcctctgcgtgtcccagaaacagttctttttgaacaattggcatatattcctgcagaactgtctaagccatctgaagaataaggatccaaagatgagccgcgtggctcttgagtcactgtatcgcctcctttgggtttacgtcatccgtattaaatgcgaatccaatacagtgactcaaagtaggctgatgtctattgtttcagctctgtttcctaaaggatctcgctcggtggtaccgagggacacccctctgaatatcttcgtgaaaattattcagttcattgcacaggagcggctcgattttgcaatgaaggagatcattttcgacctgttatctgtgggcaagagcacgaaaaccttcaccattaatcccgagcggatgaacataggattaagagtgttcctggttatagccgattctctccagcagaaagacggggaacccccaatgccaacaacaggcgttattctgccttcaggaaacaccctccgagtcaaaaagatttttcttaataagactctgactgacgaagaggccaaagtgattggaatgtctgtgtactaccctcaggtcagaaaggcactcgattccattctaagacatttagacaaggaggtgggcagaccgatgtgcatgacttcagtacagatgtccaacaaggagccggaggatatgatcacaggtgaacgcaagcccaagattgacctatttaggacttgtatagctgccatcccacgcctgatcccagatggaatgtcacggacagatctaatcgagcttctcgctcggcttacgatccatatggacgaagagctgcgcgctttagcttttaatacattacaagccctcatgctcgatttcccagattggcgcgaggacgttttatcgggtttcgtctatttcatcgtccgggaggtgaccgacgtgcatcctactcttctggacaacgccgttaagatgttagtgcaacttataaatcagtggaaacaagccgctcagatgcataacaagaatcaggacacccagcatggcgtcgctaacggcgctagccacccccctcccctggaaaggagcccgtattccaatgtgtttcatgtggtggaggggttcgcactggttattctgtgtagtagtcgaccagcaactagacggctggcagtttctgtgttgagagagattcgagcgttgtttgccttactggaaattccaaaaggcgatgatgagctcgcgatcgacgtgatggaccggctttctcccagcattcttgagtccttcattcacctgaccggcgctgaccagacaacgttgctctattgtccatccagcatcgaccttcaaacactggccgaatggaatagcagtcctatcagtcatcagtttgacgtgattagtccatcacatatatggatatttgcccatgtaacccagggccaggatccttggatcatctcgctgtccagctttttgaagcaggagaatttacccaaacattgcagcacagctgtgtcttacgcttggatgttcgcttatacccgacttcagctcctttctccccaggtcgacattaattcccctataaacgctaagaaggttaacaccactacgtctagtgactcatatattggtctctggagaaactacctcatcctgtgctgcagcgctgccacatcttcctccagcacaagtgcgggttctgtccgctgctccccacccgaaaccctggccagcactccggattccggatactctattgatagcaagattatcgggattccctcaccctcttctcttttcaaacatatcgtgcctatgatgcggtccgagtctatggaaatcacagagagcttggtcttgggcttgggacgaactaatccaggagcctttagagagctgatcgaagaactccatcctatcatcaaggaagctctggaaagaagacctgaaaatatgaagcggcgacgacggagggatatccttcgggtgcagctggtacgtatttttgagttactcgctgatgcaggtgtcatctcacattccgcctccggaggcctcgacaatgaaactcacttcctcaataacaccctgcttgaatatgtggacctgacaaggcagctgctcgaggccgagaacgagaaagatagcgacacactgaaggatatccggtgtcatttcagcgcactggttgccaacattatccagaatgtaccagtgcatcagcgcaggagcattttcccgcagcagagcctcagacactctcttttcatgttatttagccattgggcgggtcctttctctattatgtttacaccgcttgatcggtattccgatcgcaacatgcagatcaacaggcaccaatactgtgctctgaaagccatgagcgccgtgttgtgctgcggtcctgtggcagataacgtagggttgtcatcagacggatatttgtacaaatggttggacaatatcctggacagcctggacaaaaaggtgcatcagctaggttgtgaggcagtgacactcttgttagagctcaatccggatcagtccaatctaatgtattgggcagtcgacagatgttacaccggctcaggacgcgtggccgctggctgctttaaagctattgctaatgtgtttcaaaacagagattaccagtgtgacacggtcatgctgctgaatctcattttgttcaaagcagctgatagctctcgctctatctacgaggtggctatgcaattgctccaaattcttgagcccaagatgttccgttacgctcataaactcgaagtgcagaggacagacggggtgctgtcccaattgtcccccctgccacatctgtactccgtttcatactaccagctgtctgaggagctggcgagggcctaccctgagcttactctcgcaattttcagcgagattagccagcgaatacagactgcacacccagccggacgacaggtgatgctccactacctccttccttggatgaacaatattgaactggtcgatctgaaaccactccccacagcaaggagacatgatgaggacgaggacgatagcctaaaggatagagagttgatggtgactagcaggaggtggctcagaggggagggttggggatccccgcaggcaacagccatggtgctcaacaacttgatgtatatgactgcaaaatacggtgatgagcttgcttggtctgaagtggagaacgtctggaccacactcgcagatggttggcccaagaatctgaaaatcattctgcatttcctgatctcaatctgcggcgttaactcagagccgagcctgcttccttacgtgaaaaaggtaatcgtctatctgggacgagataagactatgcagctgctagaggaactagtgtccgagttgcagctgaccgatccggtgtctagcggcgtcacccacatggacaatccaccctattaccgcattacttctagttataaaatccccagcgtcactagtggtaccaccagctctagcaacacgatggtggcccctactgacggaaacccagacaataaacccattaaagagaacatcgaagaatcttacgtgcatctggacatttactctggacttaatagccacctgaaccgccaacatcaccgcctagagtctaggtactcctcaagctctggaggaagttatgaggaggagaagagcgattccatgccactatacagtaactggaggctcaaggttatggagcacaatcagggcgagcctctgcccttccctcctgccggaggttgctggagccccctcgtggattacgtgcctgagacctctagtcctggtttacccttacacagatgcaacatagcagtaatcctgctcacagacctcatcatcgatcactctgtgaaagtggagtggggaagctacctgcatctgctattgcatgctatcttcatcggattcgatcattgccatccagaagtgtatgaacattgtaaacgattgctgctgcacctgctcatcgtcatgggacctaactcaaatatccgcacagtggcctcagtgctgctgcggaataaagagttcaatgagccgcgagttctgactgtcaagcaagtggctcacctagactataacttcacagctggcatcaacgactttattcccgattatcagccttccccaatgaccgatagtggactctctagtagctccaccagtagtagtatatcattaggcaataattctgcagctatttcacatctgcacacaacaattctgaacgaggtggacatctcagtcgaacaggatggcaaagtgaaaacactgatggagttcatcacttcaaggaaaagaggtcctctttggaatcatgaggatgtttccgctaagaacccttcaatcaaaagcgcagagcagctcacaacttttctgaagcatgtggtgtcggtcttcaagcagtccagcagtgagggtatccatctcgaacaccacctgagtgaggtggctctgcaaaccgctctctcttgcagctctcgccactacgccggtcgcagctttcagatcttcagggcgctaaaacaaccccttacagcaacaactttgagcgatgttctgtcacgcctcgttgaaacagtgggagatcctggggaagacgcccagggattcgtgatcgaattgttgctcacattagagtccgccattgacacgctcgctgagaccatgaaacactacgacctgctatcggccctctctcaaaccagctatcacgaccctatcatgggcaacaaatacgctgccaatcggaagagcaccggacagttgaacctctcaacctctccaatcaactcaagctcttacctgggctataactccaacgcacgttcaaatagtctccggctgtccttgatcggggacagaaggggagatcgcagacggtccaacaccctcgatattatggacggtaggataaatcacagcagtagtctggcgagaacgcgcagcctatctagcctccgggagaaagggatgtacgatgtgcagtccaccactgaaccgactaatttaatggccacaattttctggattgccgcatctctgctcgaaagtgattacgagtacgagtacttgctcgctctgcgcctgctgaacaaactgcttattcaccttccgctcgataagagcgaatcccgagaaaagatcgaaaatgttcagtccaaactgaaatggactaatttccccggactgcagcaactttttctaaagggcttcacaagcgccagtactcaggaaatgaccgtgcacttgctgtcaaagctgatttccgtgtcaaagcacacgctggttgatccgtctcagctgtccgggtttcccctgaatatcctgtgccttctgccacacctaatccagcactttgattcgccaacccagttttgcaaggagaccgcttcaaggatcgctaaggtttgtgctgaggagaaatgccccacactggtgaacctcgcccatatgatgagtctatacagcacacatacctatagtagggactgctcgaattggatcaacgtggtgtgcaggtatctgcatgacagcttttccgacactacatttaacctggtgacatacctggccgaactgctcgagaagggactttcaagcatgcagcaaagtctgctgcaaatcatctattctctgctaagccacatcgacctctccgccgctcctgccaaacagttcaatctggaaataatcaagatcatcggaaagtacgtacaaagcccctactggaaagaggcactgaatatccttaaactggtcgtttctaggtcagccagtttagtcgtccctagcgatatccctaagacctatgggggagacactggcagccctgagatctcttttactaagatcttcaacaatgtcagtaaggagctgcctggtaagaccctggacttccactttgacattagcgagaccccaattattgggaataagtatggggatcaacactcagcggcaggcaggaacgggaaacctaaagtgatcgccgtgactagatcgaccagctccaccagctccggatctaacagcaacgctcttgtgcccgtcagctggaaacgaccccaactttcacagcggcgaacaagggagaagctgatgaacgtgctatccctatgcggccctgaatccggactaccaaagaatccgagcgtggtgtttagcagcaatgaagatctggaggtaggagaccagcagacttcacttattagcactacagaagacattaatcaggaagaagaagtggctgtggaagacaatagttctgagcagcagttcggagtcttcaaagattttgacttcttagatgttgagcttgaagacgcagagggcgaaagcatggataatttcaactggggggtccggcgtcgaagccttgattctatcgataagggcgacacaccctccttacaggaataccagtgctcctcttccactccaagcctcaatttgactaaccaggaggatactgacgagagtagcgaagaggaggctgccttgaccgcatctcagattctgtccaggacacagatgctcaacagtgattccgcgactgatgaaaccattcccgaccaccccgacctgctgctgcaatcagaagatagcactggatctattactacagaagaggtgctgcagatcagggacgagacaccaacattggaggcctccctggacaacgcaaactcacgccttcccgaagacaccacgtccgtccttaaggaggaacatgtcactacattcgaggacgagggtagctacataatccaggagcagcaagaaagtctggtgtgccagggcatattggatctcgaggaaactgaaatgccagagccactcgctcccgaatcttacccggagtctgtgtgcgaggaggacgtgaccttggccctcaaggagttagatgagcggtgtgaagaagaggaagccgatttcagcggtttatcatcccaggacgaagaggagcaagacgggttcccggaggtgcagacttcacccctcccctccccctttctctctgctatcatagcagcatttcagccggtcgcttatgatgacgaagaggaagcctggagatgccatgtgaatcagatgctcagcgacacagatggatcatcggcggttttcactttccacgtgttttctcgcctatttcagacaatccagcgcaagttcggtgaaatcacaaatgaggccgtttcttttctcggagattcactgcagcgaatcggcactaaatttaagtcctccctcgaggtcatgatgctgtgctccgagtgccctaccgtttttgtggatgcagagaccttaatgagttgcgggcttctggaaacattaaaatttggcgtcctcgagttacaggagcaccttgatacctacaacgtgaaaagggaggctgctgagcagtggctggacgactgcaaaagaacttttggcgcaaaggaggatatgtatagaattaatacggatgcgcagcagatggagattcttgccgaattggagctgtgcaggaggctgtataaattgcactttcagctgctgctcctgttccaggcctactgcaagctgataaatcaagtgaacactataaaaaacgaagccgaggttatcaacatgagcgaggagttagcccaactagagagcatcctgaaggaagctgaaagcgctagcgagaatgaggaaatagatatatccaaggccgcacagacaaccattgagacagccatccattcgcttatcgaaacacttaagaacaaggagtttattagcgccgtcgctcaagtgaaagcctttcgttccctctggccctccgacatctttggaagttgcgaagatgaccctgtgcagacacttctccacatttacttccaccaccaaacattaggccagactggttcgtttgccgtcataggatctaaccttgatatgtcagaggccaactataaattaatggagctgaatctggaaatacgtgagagccttaggatggtgcagtcatatcaactccttgcacaggcaaagcctatgggcaatatggtttccacaggttttta

SEQ ID NO: 183891 - DNA, 9041 bp, Artificial Sequence
  derived and/or modified sequence
atgagcaacataactatcgatcccgacgtgaagccaggtgagtacgtcatcaaatcactgtttgccgagttcgctgtgcaagcagaaaaaaaaatagaagtcgtgatggctgaacccctggagaaactgctgtcccgctctctccaacgcggagaggatctgcagttcgaccaactgatctcaagtatgagcagcgtggctgagcactgtctgccttccctgctcagaacactgtttgattggtatcggagacaaaatgggacagaagacgaaagctacgagtacaggccaagaagcagcaccaagtcaaaaggtgacgagcaacaaagggagagagattatttacttgaacgcagggacctggcggtggacttcatattttgtcttgttctggtcgaggtgctgaagcagattcccgtgcatcctgtgccagacccactggtgcatgaggttctcaacctggcgttcaaacatttcaagcacaaggaagggtatagcgggaccaataccggcaatgtgcacattatcgcggatctgtacgctgaggtaattggggtgctggctcaaagcaagttccaagctgtgcgaaagaagttcgttaccgagctgaaggagctgcggcagaaggagcagtcgcctcatgtcgttcagagcgtgatatcactcattatgggcatgaagttttttcgtgtcaaaatgtatcccgttgaggactttgaggcaagttttcagttcatgcaggaatgcgcccaatactttctggaagtaaaggataaggacattaaacacgccctcgctggcctgtttgttgagatactcatccccgtcgctgccgctgtcaagaatgaagtcaatgtgccatgtctaaaaaactttgtggagatgctctatcagacgactttcgagttgagctccagaaagaagcactctctggcactgtacccacttatcacttgcttgctctgtgtgagtcagaaacaattctttcttaacaactggcacatttttctgcagaactgtcttagtcaccttaaaaacaaggatccaaaaatgtcacgagtggccctggaatcactgtatcgcttactctgggtatacgtcatcaggattaagtgcgaatccaataccgtgacgcaatcgagattgatgtcaatcgtttccgccttgttccctaaggggtcccgcagcgtggtgccccgtgatactcccctcaatatctttgtgaagatcatccaattcatcgcccaagaaagactggatttcgcaatgaaggagattatattcgatctgcttagtgtgggaaagagcacaaaaacttttaccatcaacccagaaagaatgaatataggcctcagggtcttcctggtgattgctgatagcctccagcagaaggacggtgaaccccctatgcctactaccggcgtcattctgccctctgggaacaccctgcgcgttaaaaaaattttcctcaacaagactctcaccgacgaggaagccaaagtgatcggcatgtccgtctactaccctcaggtccgaaaggcactggactctattttacggcacttggacaaggaagtgggcagaccaatgtgcatgacatctgtgcagatgagcaacaaagaacccgaggatatgataacaggcgagcgaaagcccaagatagatctgtttaggacatgcatagcagcaatcccaagattaatcccggacggtatgtcccgcaccgaccttatagagcttcttgctcgtcttacgattcacatggacgaggaattgagagctttggcctttaacacactgcaagctctaatgctggatttccctgactggagagaggacgtcctaagcggattcgtgtactttatcgttagggaggtgaccgatgtgcaccccaccctgctggacaacgcagtgaagatgcttgtccagttgatcaatcagtggaagcaggccgctcagatgcataataagaaccaggacacacaacacggcgtggctaacggcgcttcgcacccacctcccctggaaagatcaccttattcaaacgtgttccacgtcgttgagggattcgcgctggtgattttgtgttccagccggccagctacccgcagattggctgtgtccgtgttgcgggagatcagagcgctgttcgctttattggagatcccaaaaggtgatgatgaactagccatcgatgtaatggataggctctcgccatcaatcttagagagcttcattcacttgacaggcgctgatcagacaacactgctgtactgcccatcttccattgatttgcagacccttgctgaatggaatagcagccccatcagccaccagttcgacgtgatctcaccctcacatatatggatcttcgcccacgtcacacagggacaggacccatggatcatttccctatcaagctttttaaaacaagaaaacctccctaagcattgctcaactgcagtctcctatgcatggatgtttgcgtatactcgcctccaattgctctctccacaagtggatatcaattccccaatcaacgcaaagaaagtcaacacaaccacttcaagtgatagttacattggcctgtggcgcaattacctgatcttgtgctgctcggcagccacttcaagtagcagcacttcggccggatcggttcgatgctccccaccagaaaccctggcaagcacgcccgattccggctattctatagattcaaagattataggtatcccctcccctagtagtctatttaaacatatcgtgccaatgatgcgaagcgagagcatggagattaccgagagcctcgtcctcgggttgggaaggaccaatcctggcgcttttcgtgagcttatagaggaactgcacccgataattaaggaagctctcgagagaaggcctgaaaacatgaaaaggcgccgtagacgggacatactccgcgtgcagctcgttagaattttcgaactcctggccgatgccggtgtgataagtcacagcgcatctggaggtttggacaacgaaacccactttctgaataatacattattggagtacgtggatctcactcggcagctgctagaagccgagaatgaaaaggacagcgacacacttaaagatatccgttgtcatttcagcgcgctggtggcgaatattattcaaaatgtccctgtacaccagagacgatcaatattccctcaacagtctctgagacattcgctcttcatgctcttttctcactgggcaggccctttttctataatgttcacaccgttggataggtattcagatagaaatatgcagatcaatcgtcaccaatactgcgctcttaaagcgatgagcgcggtcctgtgttgcggaccggtggccgataatgtgggcctctccagcgatggttacctctataagtggctagataacatactcgattccctggacaaaaaggtgcatcagttaggctgtgaggcagtaacattgctgctggagctgaatccagatcagagcaacctgatgtactgggccgttgataggtgttacaccggcagcggaagagttgcagctgggtgtttcaaagcaatcgccaacgtgttccagaaccgtgattaccagtgcgacaccgtgatgttgctgaatctgattctgtttaaggctgccgattctagcaggagtatatacgaggtggcaatgcagctgctccagatactcgagcccaagatgttccgctacgcacataaactggaggtccagagaaccgatggcgtgttgagtcagctctctcctttgccacatctgtacagcgtgtcatattaccaattatcggaagaattggctcgggcttacccagaattgacactggctatatttagcgaaatttcacagcgaatccagaccgcccaccctgccggtcgtcaggtgatgctgcactatctgctcccatggatgaataacatagaacttgtggatctgaaaccactgccaacggctcggagacatgatgaagatgaggacgattctcttaaggacagagagcttatggtgacctcgaggcgctggctaagaggcgaaggctggggtagtccgcaggccaccgccatggtccttaataatctcatgtatatgacagccaaatacggggacgagctggcatggtcagaggtcgaaaacgtctggactaccctggctgacggctggccgaagaacttaaagattattctgcactttttgatctcaatatgtggtgtaaactctgagccgagcctcttaccgtacgtcaagaaggtgatagtttacctaggaagagacaaaactatgcaactgctggaggagctggtgtccgaattgcagctcacggaccctgtttctagcggcgttactcatatggataatccgccatattatcgtataacctcctcctacaagatcccttcagtaacttctggcactacaagctcgtctaacaccatggtggcacctactgatggaaatcctgataataaacccatcaaagaaaatatcgaagaaagctacgtccacttggacatctactctggccttaactctcatctcaacagacagcatcatcgactggagtccaggtactcatcaagcagcgggggttcctatgaagaagagaagagcgactcaatgccactgtattccaattggcgcctcaaagtgatggagcacaatcaaggcgaaccactgcccttccctcccgcaggaggatgttggtctcctctggtagattacgtccctgaaactagctctcctgggttgccccttcaccggtgcaacatcgctgtgatcctcctgactgacctcatcatagaccattcggtgaaggttgagtggggctcgtatctccatttgcttctgcatgccatcttcattggcttcgaccactgtcatcccgaagtctacgagcattgtaaaagactgctccttcacctccttatcgttatgggcccaaatagcaatattagaaccgtcgcttctgtgttgcttcgaaataaggagttcaacgagcctcgagttctgacggttaaacaggtcgctcaccttgactataatttcaccgccggtattaacgattttattccggattatcagccatcacctatgacagactccggcctctcttcctcaagcacgagtagttcgattagccttggcaataactcagctgcaatttctcacctccatacaacgattctgaacgaagtggatatcagtgtggagcaagacgggaaagtgaaaacactcatggaattcattaccagccgcaaaaggggaccgctgtggaaccatgaagacgtgtccgcgaagaacccttccatcaaatctgctgagcaattgaccacttttttaaagcatgtcgtaagtgtattcaaacagtcttcaagcgagggaatccacctggagcaccacttgtcagaggtggctctccagaccgctctctcttgctcttcacgccattacgccggacggtcattccagatttttcgcgctctgaagcagcctttaacggcaaccactctatccgatgtactttctcgcttagtagagacagtgggagacccgggagaggacgcacaaggctttgtgatagaactgctgttgaccctcgaatccgccatcgatacgctcgcagaaacaatgaaacattatgacttgctaagtgcactatcgcagactagctaccacgatcctattatgggaaacaaatacgcagcaaacaggaagtctaccggccaacttaacttgagtacctctcccattaattcaagttcatatttaggatataatagcaatgctagatctaattcgcttcgcctttcactgattggggataggaggggagaccggcgacggagtaacactcttgacattatggacggtcgaatcaaccactcctcttctctcgcccgtacccggtccttgtcctccctccgtgagaaaggcatgtacgacgtgcagtcaactacggagccaacaaatctgatggccaccatcttttggatagcagcctcactcctcgagtcggactacgagtacgaatacttgctggcactgcgtctgctgaacaaactgctgatccacctccctcttgataaatcagaatcaagggagaagatcgagaatgtacagtcaaagctgaagtggacaaattttccgggactgcagcagctctttttgaagggttttacgtcagctagcacgcaagaaatgaccgtgcacctccttagcaagctgatcagcgtcagcaaacacacccttgttgatccgtcacagctgagtggctttccgttgaacatcctctgtctcctcccacacctgattcagcacttcgacagcccgacccagttctgcaaagaaactgcctcgaggatagccaaggtttgcgccgaggaaaagtgtccgactctcgtcaaccttgcgcacatgatgtccttgtatagcactcacacatattctcgagactgtagtaattggatcaatgtagtctgcaggtatctccatgacagcttcagtgataccacctttaatcttgtcacctaccttgctgaattgctggagaaaggactctccagcatgcagcagtcccttcttcaaattatctactcccttctaagccatattgatctgtccgccgctccagctaagcagttcaacctggaaattatcaagattataggcaagtacgtgcagagcccttattggaaagaagcactgaacatccttaagctggtggtgtctcgaagcgctagcctcgttgtcccttctgacatcccaaagacctacggtggcgacaccggctcgcccgaaatttccttcaccaaaatcttcaataatgtatcgaaagaacttccaggtaaaacactggacttccacttcgacatatcagagacacctattattggcaacaagtatggcgatcagcattctgcagccggaaggaatggcaaaccaaaggtgatagcagttactcggtccacatcctccacttcctccgggtctaattctaatgcactcgtgcctgtgagttggaaacggccacagctgtcccagcgacgaacccgcgaaaaacttatgaatgtgctcagcctttgcggacccgagagcggcctgcctaagaatccatccgtggttttctcgtcaaacgaagatctggaagttggggaccagcagacctctttgatttctaccacagaagatatcaaccaagaagaagaagtggccgttgaggataactcttctgagcagcagttcggggttttcaaagacttcgactttctcgatgtggaactggaggatgccgaaggcgaaagtatggataattttaactggggggtgagaagaagatcgttggactctatcgataaaggcgacacaccaagtctgcaggaataccaatgctcttcctccactccatcactgaacctgactaaccaggaggacactgatgagtcaagtgaagaggaggcggctctgacagctagccagatcctcagtcgcacccagatgttgaacagtgactctgctactgacgaaacaattccagaccaccccgatttgctattacaatcggaggactctaccgggtccattaccactgaagaggtactgcagattagggatgagacacctactctcgaagctagtctggataacgccaattcaaggctgccggaagataccaccagcgtgcttaaagaagagcacgttaccacctttgaggacgaaggctcatacattatccaggagcagcaggagagcctggtctgccaggggattttagacctggaggaaacagaaatgcctgagcccctggctccagaatcatatcctgagagcgtttgcgaagaggacgtaaccctggcactcaaagagctggacgaacggtgtgaggaggaagaagctgattttagtggcttgtcttcacaagacgaagaagagcaagatggctttccagaggtgcagacaagtccattgccctcgcctttcctgagtgccatcatcgcagctttccagcccgtcgcgtacgacgatgaggaagaagcctggcgttgccatgttaatcagatgctgtcggacacagacggctcttccgctgtgttcacatttcacgtgttttcacgcctctttcaaacgatacagcggaaatttggggagatcaccaacgaagccgtgagcttcttgggagattccctgcagagaatagggacaaaatttaaatcttcactcgaggtgatgatgctgtgcagtgagtgtcccaccgtatttgtggatgccgagaccctgatgtcttgcggccttctggagactttgaagttcggcgtgttagaactgcaggaacaccttgatacttataacgtgaagcgggaagcagccgaacaatggctggatgattgcaagcgaactttcggtgctaaggaagacatgtaccggattaacaccgatgcccaacagatggagatcctggcagagcttgagttatgtcggagactgtataagttgcacttccagctgctgctcctctttcaagcttactgtaaactcataaaccaggtgaataccataaagaatgaggccgaagttataaacatgagcgaagagctggcccagctggagtctatcttgaaggaggcggaatcagcatcagagaacgaggagatcgatatcagtaaagccgctcagacgacgatcgagacggctatccactcactcatcgagacgctgaagaacaaagaattcatttcagcagttgctcaagtaaaggcctttcgcagtttatggccgtctgatatattcgggagttgcgaggacgatcccgtgcagacacttttgcacatttacttccatcaccagaccctcggtcagacaggaagttttgccgtcattggttctaacctggacatgagtgaagcaaactataagctgatggagctaaaccttgagattagagagtctctcaggatggtgcaatcttaccaattgctcgcacaggccaagcctatggggaatatggtctctaccgggttcta

SEQ ID NO: 183892 - DNA, 9041 bp, Artificial Sequence
  derived and/or modified sequence
atgtctaatattacaatcgaccctgacgttaagcctggcgaatatgtaatcaagagtctcttcgccgagttcgctgttcaggccgaaaaaaagatcgaagtagttatggcagagcccctcgaaaagctcttgtcgagatccttgcagcgcggtgaagatctgcagttcgatcaactcatttctagtatgagttctgtggccgaacactgtttaccaagtctcctccggaccctgtttgactggtataggaggcagaacgggactgaagacgaaagttatgagtaccggcctcgttcctccaccaaatccaaaggagacgagcagcagagagaacgggactatctgctcgaacgtcgcgatttagcagtggattttattttttgccttgtgctggtggaagtgctcaagcaaatccctgtgcaccccgtgcctgatccactggtccacgaagttctcaatttggccttcaaacactttaaacacaaagaaggatacagtggtacaaacacaggcaacgtgcacatcatcgcagacttatacgccgaggtaattggggtactggctcagtccaaatttcaggcagtgaggaagaagttcgtgacagaactgaaggaactgagacagaaggaacagagccctcatgtcgtgcagtcggtgatatctctgataatggggatgaaatttttccgggtgaaaatgtaccctgtggaagactttgaggcatcctttcaatttatgcaggagtgcgctcagtatttcctggaggtcaaggacaaagatatcaaacacgctctggctggacttttcgtagagattctcattcccgtggccgctgctgtgaaaaacgaagtaaacgtcccttgtttgaagaactttgtggagatgctgtaccaaaccacgtttgagctttcatcccgaaaaaagcactcgttagcactgtatcctttaatcacctgtctcctctgcgtcagtcagaagcaattcttcttgaataactggcacatcttcttacagaactgtttatcacacttgaaaaacaaagatcctaagatgagccgcgtcgcactggagtctctttacaggctgctctgggtttatgtcatacgtataaaatgtgagtcaaacaccgtgacccagtcccggctgatgagcatcgtgtctgcactgtttcctaagggtagtagatcagtcgtgccacgggacacacccctcaacatcttcgtaaagatcatacagtttattgcccaggaacgactcgattttgccatgaaggagatcatctttgatttactgtccgttggaaagagcactaagacctttactattaatcccgaacgtatgaatatcggcttacgtgtgttcctggtgatcgccgattcactgcagcagaaggacggagagcctccaatgccaaccactggagtaatcctacctagtggcaacaccctacgagtgaagaagatcttcttgaataaaacgttaactgacgaagaagcgaaggtaattggtatgagcgtctattaccctcaggtgcggaaagcactggatagcatccttagacacctggacaaggaggttgggagaccaatgtgcatgaccagcgtccagatgtccaacaaggagccagaagacatgatcacaggtgaacggaaacctaagattgatttatttcgcacttgtatcgccgctattccccgtcttatccctgacgggatgagtaggaccgaccttattgagctgctggctcgcctcacaattcatatggatgaggagctgagggccttggcatttaacactcttcaggcgctaatgcttgattttccggattggcgcgaggacgtactctcggggttcgtctatttcattgtgcgcgaggtgacagacgtccatcctaccttattggataacgctgttaaaatgctggtgcagctgattaaccagtggaaacaggcagcacagatgcataacaagaaccaagacacgcagcacggggtggccaatggagccagtcatccgccacctcttgaacgcagcccatactctaatgtattccacgtggtagaaggatttgcacttgtcatactgtgttctagccgaccagctacaagacgtctggcagtatctgtgctgcgggagataagagctctgtttgccttgcttgagatcccgaagggcgacgacgagctagccatcgacgttatggacaggctgagccctagtatccttgagtcatttatccatctgaccggggctgatcaaacaacattactgtactgcccgagcagtatcgacctccagacactggccgaatggaacagctcccctatttcccaccagttcgacgtgatttcccctagtcatatctggatttttgcgcacgtgacccagggccaggacccttggatcataagtctctcgtctttcctgaaacaggagaatctgccaaagcattgctctaccgctgtaagctacgcctggatgttcgcgtacacaagactccagttgctgtcaccccaggtagatatcaacagcccaattaatgccaaaaaagtcaataccaccacgtcctccgacagctatattggcctgtggagaaactaccttatcttgtgctgcagcgccgctacctccagttcatccacgagcgctggctctgtgagatgcagccccccagagaccctggcctctaccccagattcgggttatagcattgatagtaaaatcatcgggatacccagcccgagtagcctgttcaaacacatcgttcccatgatgcgatcagaatctatggaaatcaccgagtcgctggtcctcggattaggacgaacaaacccaggcgctttcagggagcttatagaggagcttcaccccattattaaggaggcgctggagcgcagaccagagaacatgaagaggcgcaggagacgggatatcttgcgggttcagcttgtgcgcatctttgaattgttagctgacgcgggagtcatttcacacagcgcctcaggcggacttgacaatgaaacccacttcctgaataatactctgctggaatatgttgacctgacacgacagttactagaggctgagaacgagaaggacagtgacacactgaaggacatacgatgtcattttagcgcgcttgtggccaacataattcagaacgtgcctgtacaccagcggcgatccatttttccccagcagtcacttaggcacagcttgttcatgctgttctctcactgggcgggacccttctcaataatgtttacacccttggaccggtattctgatagaaacatgcagattaaccggcaccaatactgcgccctgaaggcaatgagtgcggtgctgtgttgcggccctgtagcagacaatgtaggactctcaagcgacggctacctctacaagtggctagataatattttagacagccttgacaagaaagtgcaccagctgggatgtgaggcggttaccctgctgctcgaactgaatcctgaccagtccaacctcatgtattgggctgttgatcggtgttatacaggttccggcagggtggcagccggttgctttaaagccattgccaatgtttttcaaaaccgggattatcagtgtgataccgtgatgttgttgaatctgatactctttaaggctgcagactcttctcgatccatttacgaggtggcaatgcaacttttacagattttagaacccaaaatgtttagatacgctcacaaattggaggttcagaggactgacggggttctgagccagctgagtccactccctcatctctattcagtcagctactatcagctgtctgaggaactggcgagagcctaccccgagctgactctggctatcttttccgagatttcccagcgaatccagaccgcgcatcctgccggacggcaagtgatgttacattacctattgccatggatgaataatatcgagctggtggacttaaagcccctgccaacagccagaaggcatgatgaggacgaggatgattctctcaaggatagggagctgatggtcacttcaagaaggtggctccggggagaagggtgggggtctccccaagcaaccgccatggtcttgaataatttgatgtacatgactgcgaaatacggtgatgagctggcctggagtgaggtggaaaatgtctggacaacacttgcggatggttggccgaagaatctgaagattatcctgcacttcctgatcagtatctgcggtgtgaactccgagccctctctgctaccatacgttaagaaagtgatcgtctacctgggcagggacaagaccatgcagctactcgaggagctggtcagcgaactgcaactgaccgaccctgtgtcctctggcgttactcacatggataatcctccctattacagaattacatccagttacaaaattcccagcgtcacgtccggaacaacttccagttcaaataccatggtcgctcccactgacggaaatcctgacaacaaacctatcaaggagaacatcgaagagtcctacgtgcatttggacatctatagcggtttaaatagtcatttaaatcggcagcatcatcggctggaatctcgttattccagtagttctggcggaagctatgaggaggagaaaagcgatagcatgccattgtactctaattggagactaaaggtcatggagcataaccagggcgagccgctgccattcccgcctgccggaggctgctggtcccccctcgtggactatgttcctgaaacatcatcaccaggcctccccctgcacaggtgtaacatcgctgtgattctcctgactgacctcatcatagatcacagcgtcaaggtagagtggggatcatatcttcaccttctgttgcatgcaatcttcattgggttcgaccattgtcatcccgaggtgtacgaacactgcaagcggctcctgctgcacctgcttatcgttatggggcctaattcaaacattcgtaccgtcgccagcgtcctactcagaaacaaggagtttaacgagcccagagtactgactgtgaagcaagtggcacaccttgactataattttactgctggtatcaacgatttcatcccagattaccagccctctccaatgaccgacagcggactgagctcaagtagtacttcatccagtatcagtctggggaataacagtgctgcaattagccacctacacactacgattctcaatgaagtggatatctcagtggagcaggacggaaaggtgaagactctaatggagttcatcacatccaggaaacgcggtccactgtggaaccacgaggacgtgagtgctaaaaacccttcaattaagagtgccgagcagctaacgaccttcttgaagcatgttgtgtcagtctttaaacagagctctagcgaggggattcacctcgaacaccatctgagcgaagtggctcttcaaaccgccctgagctgttcctcccgccattacgccggacggtcttttcaaatttttagagccttgaaacagccactaaccgcgaccacactctcagacgtactgtcacggcttgttgagactgttggagatcctggtgaggatgcccagggattcgtcatcgaattactgttaacgcttgagagcgccattgatacgctggcggaaacaatgaagcattacgaccttctaagcgcgctatctcagacgtcatatcacgaccctatcatggggaacaagtacgctgccaataggaagagtactggacaacttaatctatccacatcacctattaattcttccagttacttaggctataattcaaatgccaggagtaacagcttacggctcagccttattggtgaccggcgtggcgaccggagacggtccaatactctggatataatggacggacggatcaatcactctagctctctggctagaacccgctctctgtcctctctgagagaaaaaggaatgtacgacgtacaatcaaccacagagcccaccaatttgatggcaaccattttctggatagccgcttccctgttggagtctgattatgagtatgagtatctgctggccctcagactgcttaacaagctgctgatccacctacccctagacaaaagcgaatcccgcgaaaagattgagaacgtccagagcaaactcaaatggacaaatttccccggtctgcagcagctctttctaaaagggtttacgtccgcttccacccaagagatgacggttcacctactgtccaaactgatctctgtctctaagcacactctggtggacccttctcaacttagcggcttcccactgaacatcctttgcctcttaccacatctgatacagcactttgacagtcctacccaattctgcaaggaaacagcctcccgcatcgctaaagtctgtgccgaagagaagtgtcccaccttggtaaaccttgctcacatgatgagcctatactccacacacacctattcgagggattgttccaattggattaacgtggtctgcagatatctgcatgattcgttttctgacacaacttttaatctggtcacctacctggccgagctgttggagaaaggtttgagttcgatgcagcaaagcttgctgcagataatctactccctcctctctcatatagacttatctgccgctccagccaaacagttcaatcttgagattattaagatcattggcaagtacgtacaatctccatattggaaggaggcattgaacatcttgaagcttgtcgtatcacgctccgcttccctcgttgtgcctagcgatatccccaagacgtatggaggggatacgggctcccccgagatctcattcactaagattttcaacaatgtgagcaaggagctacccggaaaaactctcgattttcactttgatatcagtgagaccccaattatcgggaataagtacggagatcaacattcagccgcagggagaaatggaaaacctaaagtgatcgctgtgacccggagtacctctagtacgtccagcggctccaattccaacgccctcgtgcccgtgtcttggaagcggcctcagctatcccagcgaagaacgcgcgaaaagctgatgaacgtgctgtcactgtgtggcccagagagcgggctccccaagaatccaagtgtggtgttttctagcaatgaggacctggaggttggagatcagcagacatctctgatctccaccaccgaagacattaatcaagaagaggaagtggccgtggaagataactcaagcgagcaacagttcggggtctttaaagactttgatttcctggacgttgagctggaggatgccgaaggagagtcaatggacaactttaattggggggtgagacgtcggtcactggatagcatcgacaaaggcgacacaccctctttgcaggaatatcagtgtagtagctctaccccatcactgaacctgacaaaccaagaggacacggacgaatcttctgaagaagaggctgctttgacggcttctcagatcttgtccaggactcaaatgctcaactccgatagtgcaactgatgagaccatcccggaccacccagatctgctgttgcaatcagaggattccacaggcagcattaccaccgaggaggtgttgcagattagagatgagactcccacactagaggccagcttagacaacgctaattcacgtttacctgaagacaccactagcgtgctgaaagaggagcacgttacaacttttgaagatgagggcagctacatcatccaagaacagcaggaaagccttgtgtgtcagggcattttggatctggaggaaaccgaaatgcccgagccactagcacctgaatcatatcctgagagtgtgtgcgaagaggacgtaacgctggcactgaaagagctggacgaaaggtgtgaagaggaggaagcggactttagcggtctgtctagtcaggacgaagaggagcaagatggattccctgaggttcagacatctcctctccctagtcctttcctttctgctattatcgccgctttccagccagtagcgtacgatgacgaagaggaggcttggcgttgtcatgttaaccagatgttgagcgatacagacggatcttccgccgttttcacctttcatgtattcagcagactgtttcaaactattcaacgaaaattcggcgaaattacgaatgaggctgtcagtttcctcggagattccctccagagaatcggaacaaaattcaagtcctctcttgaggtaatgatgttgtgctctgagtgccctaccgtttttgtcgatgcagaaacacttatgtcttgcgggttgctggaaaccctgaagttcggcgtactggagctgcaggagcacctggacacatataacgtcaagcgcgaggcggctgaacagtggctcgatgactgtaaaaggactttcggagccaaggaagacatgtaccggatcaacaccgatgcccagctaaacgagatcctggtagagctcgagctgtgcaggcggctgtataagctccattttcagctattgctcctctttcaagcgtattgcaagttaatcaatcaggttaataccatcaagaatgaggccgaggttattaatatgagcgaagagctggctcagttggagtcgatcctcaaggaagcagaaagcgcatccgagaatgaggaaattgatatttccaaggctgcccagactactatagaaactgccatccactctttaattgagactttgaagaacaaagaattcatcagcgccgttgctcaggtgaaagcgttccggtctctttggccatcagatatctttggctcttgcgaggatgacccggtgcaaaccctgctgcacatttacttccaccaccagacactgggccagactggttctttcgctgttataggctccaacctcgatatgagcgaggcaaactataagctaatggaattaaacctcgagattagggaatcattgcgaatggtccagtcctatcagctgctggcccaggctaagccgatggggaatatggtatcaacaggtttcta

SEQ ID NO: 183893 - protein, 1447 aa, Artificial Sequence
  derived and/or modified sequence
MAHSKTRTNDGKITYPPGVKEISDKISKEEMVRRLKMVVKTFMDMDQDSEEEKELYLNLALHLASDFFLKHPDKDVRLLVACCLADIFRIYAPEAPYTSPDKLKDIFMFITRQLKGLEDTKSPQFNRYFYLLENIAWVKSYNICFELEDSNEIFTQLYRTLFSVINNGHNQKVHMHMVDLMSSIICEGDTVSQELLDTVLVNLVPAHKNLNKQAYDLAKALLKRTAQAIEPYITNFFNQVLMLGKTSISDLSEHVFDLILELYNIDSHLLLSVLPQLEFKLKSNDNEERLQVVKLLAKMFGAKDSELASQNKPLWQCYLGRFNDIHVPIRLECVKFASHCLMNHPDLAKDLTEYLKVRSHDPEEAIRHDVIVSIVTAAKKDILLVNDHLLNFVRERTLDKRWRVRKEAMMGLAQIYKKYALQSAAGKDAAKQIAWIKDKLLHIYYQNSIDDRLLVERIFAQYMVPHNLETTERMKCLYYLYATLDLNAVKALNEMWKCQNLLRHQVKDLLDLIKQPKTDASVKAIFSKVMVITRNLPDPGKAQDFMKKFTQVLEDDEKIRKQLEVLVSPTCSCKQAEGCVREITKKLGNPKQPTNPFLEMIKFLLERIAPVHIDTESISALIKQVNKSIDGTADDEDEGVPTDQAIRAGLELLKVLSFTHPISFHSAETFESLLACLKMDDEKVAEAALQIFKNTGSKIEEDFPHIRSALLPVLHHKSKKGPPRQAKYAIHCIHAIFSSKETQFAQIFEPLHKSLDPSNLEHLITPLVTIGHIALLAPDQFAAPLKSLVATFIVKDLLMNDRLPGKKTTKLWVPDEEVSPETMVKIQAIKMMVRWLLGMKNNHSKSGTSTLRLLTTILHSDGDLTEQGKISKPDMSRLRLAAGSAIVKLAQEPCYHEIITLEQYQLCALAINDECYQVRQVFAQKLHKGLSRLRLPLEYMAICALCAKDPVKERRAHARQCLVKNINVRREYLKQHAAVSEKLLSLLPEYVVPYTIHLLAHDPDYVKVQDIEQLKDVKECLWFVLEILMAKNENNSHAFIRKMVENIKQTKDAQGPDDAKMNEKLYTVCDVAMNIIMSKSTTYSLESPKDPVLPARFFTQPDKNFSNTKNYLPPEMKSFFTPGKPKTTNVLGAVNKPLSSAGKQSQTKSSRMETVSNASSSSNPSSPGRIKGRLDSSEMDHSENEDYTMSSPLPGKKSDKRDDSDLVRSELEKPRGRKKTPVTEQEEKLGMDDLTKLVQEQKPKGSQRSRKRGHTASESDEQQWPEEKRLKEDILENEDEQNSPPKKGKRGRPPKPLGGGTPKEEPTMKTSKKGSKKKSGPPAPEEEEEEERQSGNTEQKSKSKQHRVSRRAQQRAESPESSAIESTQSTPQKGRGRPSKTPSPSQPKKNVRVGRSKQAATKENDSSEEVDVFQGSSPVDDIPQEETEEEEVSTVNVRRRSAKRERR

SEQ ID NO: 183894 - DNA, 4344 bp, Artificial Sequence
  derived and/or modified sequence
atggctcatagtaaaactaggacaaatgatgggaaaatcacataccctccaggagtgaaagagatcagcgacaaaatctctaaggaggagatggtccggcggctgaagatggtcgtgaagacatttatggacatggaccaggattctgaagaagagaaagaactttaccttaacctcgctttgcatttggcttctgatttttttttgaaacaccctgataaggacgtgcgactgcttgtcgcctgttgccttgccgacatttttaggatctacgcccctgaggcgccctacacttcgccagacaagttgaaagacatctttatgtttattactcgccagctcaagggactcgaagacactaaatccccccagtttaaccgatacttctacctcctggaaaacatcgcatgggtgaagtcgtacaatatatgttttgagctcgaggacagtaacgagatattcactcaactgtaccggactcttttctccgtaataaacaacggacacaaccagaaggtccacatgcatatggttgatctgatgtctagcatcatctgtgaaggcgacaccgtgtcacaagagcttctggacacagttctggtgaacttggtacccgcccacaaaaatttaaataaacaggcttacgacctggccaaggctctgcttaaacgcaccgcccaagccatcgagccttatattacaaacttttttaaccaagtattaatgctgggtaagaccagcatttcggatctgtccgaacatgtcttcgatctcatcctcgaactgtacaacatagacagtcacctcctgctgtcagtcttgccccagttggaatttaagctgaagagcaacgacaatgaggaacgtttacaggtggtgaagttgctagcaaagatgttcggcgctaaggacagtgaactggcttcacagaataagccgctttggcaatgctatctggggaggtttaatgacatccacgtgccaatcaggctggagtgcgtgaagttcgcttctcattgtctgatgaaccatcctgatttggccaaggatctgaccgagtatctgaaagtacgcagccacgaccctgaggaagccatccggcatgatgttattgtgagcatcgtaaccgcggctaaaaaggatatcctgttagtgaacgaccacttgctaaactttgtgagggagcgtaccttagacaaacgctggcgggtaagaaaagaagcgatgatgggactggctcagatttacaagaaatacgcgctgcagtcagccgcggggaaggacgcggcgaagcagattgcttggattaaagataagctgctgcacatatattaccagaactccattgacgaccgcctgctggtggaacgcatatttgctcagtacatggtgcctcacaatctggaaacaacagaacgaatgaaatgtctgtattatctttacgcaaccctggacctcaatgccgtcaaggctttaaacgaaatgtggaaatgtcagaacttactgagacaccaggtgaaggatctcctggacctcataaagcaaccaaaaaccgacgcctctgttaaggcgatcttctctaaggtgatggttatcaccagaaatcttccagaccccggaaaggcccaggatttcatgaagaaatttacccaggtacttgaggatgatgaaaagatacggaaacagctggaggtactggttagccccacttgttcctgcaaacaggccgaaggttgcgtgcgagagatcacaaagaagctgggtaaccccaagcagcctactaaccctttcctggagatgattaagttcctgttggagaggatcgcacccgtccacattgacactgaaagtatttccgccctcattaagcaggtcaataagtccatcgacggtaccgctgacgacgaggacgagggcgttccgaccgaccaggcgatccgggcgggtctggagctgctcaaagtgctcagctttactcacccgatttctttccactccgcagagacatttgagagcctgttggcctgtctcaagatggatgacgaaaaagttgccgaggctgcacttcaaattttcaaaaacactggatcaaaaatagaggaggatttcccacacatacgttccgcactgctccccgtgctgcatcacaaatcaaagaagggacctccaaggcaggccaagtacgccattcactgtatccacgctatcttttctagtaaggagacacagtttgctcaaattttcgagcctttgcacaaaagcctcgatcccagtaatctggagcacctgatcaccccgctcgtcacaataggacatatcgcccttttagctcctgaccaatttgccgcacccctcaagagtctcgttgccacatttatcgttaaagacttgctgatgaacgacaggttgccaggcaagaaaactaccaagctgtgggtgcctgacgaggaggtgagtcccgagacaatggtgaaaatacaggccatcaagatgatggttcggtggctccttggtatgaagaacaaccatagcaaaagtgggacgtctaccctgcggctgctgacaactattctgcattcagacggagacctcacagagcagggtaagatttctaagcccgacatgtcccgccttcggttggctgccggctcggccatcgtgaagctagcgcaggagccctgctaccacgagataatcaccctggagcagtaccagctgtgcgccctggctatcaatgatgagtgctaccaggttaggcaggtattcgcccagaagctgcataagggtctgagccgtctgcggctcccacttgagtacatggctatctgcgccctgtgcgccaaagatccggtcaaagagagaagagcacacgctaggcaatgtctggtgaagaatatcaacgtccggcgggaatatctgaagcaacacgccgctgtttctgagaagttgctctctctgcttcccgagtatgtggtaccatacacaatccatctgttggcccacgacccggactacgttaaggtgcaggatattgagcagctgaaggatgtaaaggaatgcctttggtttgtgctcgagattttgatggccaaaaatgagaacaatagccacgcattcatcaggaagatggtagaaaacattaaacagaccaaggacgcgcagggaccggacgatgctaaaatgaacgaaaaattgtataccgtttgtgatgtggccatgaatattatcatgtctaagagtacaacctactctctggagagccccaaagatccggttctgcctgccagattctttacacagccagacaagaacttcagcaatacaaagaactatctgcctcccgaaatgaaaagcttttttaccccgggaaaaccaaaaacaaccaacgtcctgggggccgttaacaaacctctctctagcgccgggaaacagagtcagacaaagtccagtcggatggagaccgtgagcaatgcctcctcttcttcaaacccgtcctcacctggcaggataaaagggagattagattctagtgaaatggaccatagcgagaatgaagattatactatgagctccccgcttccaggcaagaagagcgacaagagggatgatagcgacttggtgcgttcagagctggagaagcccagaggtcgaaagaagacaccagtgacggagcaggaagagaagctcggtatggatgatctgaccaaactagtgcaggaacagaaaccaaaaggctcacagcggagccgaaagcgcgggcacaccgcctccgagagtgacgagcaacagtggcccgaggaaaagcgcctgaaggaagacatcctcgaaaatgaggacgaacagaattctccccccaaaaagggcaaaaggggccgtcccccaaaacccttgggagggggcactcccaaggaagaaccaacaatgaaaacatctaagaagggctctaaaaaaaaatccggtccccctgccccggaagaggaggaggaagaggagagacagtcgggaaataccgagcaaaagtccaaatccaagcagcaccgagtcagccgacgcgctcagcaacgggctgaatcgcccgagagttctgccatcgaatcaactcaatccacaccacagaaggggcggggccgcccatccaagactcccagcccttcacaaccgaagaaaaacgttagagtcggccgctctaagcaggccgccactaaggagaacgatagttccgaagaagtggacgtttttcaggggagtagccctgtcgatgatatcccacaagaggagacagaggaggaggaagtcagtacagttaacgtgaggagaaggtccgccaagagagagcgacgatag

SEQ ID NO: 183895 - DNA, 3909 bp, Artificial Sequence
  derived and/or modified sequence
atggcgcactccaagaccaggacgaacgatgggaaaataacatacccccctggcgtgaaagagatttctgataaaatcagtaaggaagaaatggtccgacggttgaagatggtcgtgaaaacattcatggatatggatcaggattcagaggaagagaaagaactgtatctgaatctcgccctccacttggccagtgacttctttttgaagcacccggacaaggatgttcgccttttggttgcgtgctgcctggccgatattttccgaatttatgcccccgaggcaccctatactagccccgacaaattgaaagatatctttatgtttattactcggcagttgaagggacttgaagatacaaagtcaccccaattcaatcggtacttctacttgctggaaaacatagcctgggtcaaatcttataacatctgctttgagctggaggatagcaacgagatattcacccagctgtaccggacactgttctctgtcataaataatggccacaatcaaaaagtccatatgcacatggtagatctgatgtcttcgataatttgcgaaggcgacacagtgtcccaggaactgcttgacaccgtgctagtcaatctggtccctgcacataaaaatttaaacaaacaggcatacgatctggccaaggctttactgaagagaacagctcaagccatagagccctatataaccaacttcttcaaccaggtgttgatgctgggcaagactagcatttcagaccttagtgagcatgtctttgacctgatcttggaactgtacaacatcgactcccacctgctgctgagtgtcctgccacagctggagttcaagttgaagagcaatgacaatgaggagcgcctgcaggttgttaagctgctggcgaagatgttcggtgctaaggatagcgaactggccagccagaataaacctctttggcagtgctatctggggagatttaatgacatccatgtcccaatccggttggaatgtgtgaagttcgctagccactgtctgatgaaccaccctgacctcgccaaagatttaacagaatatctgaaggtcagaagtcacgatcccgaggaggcgatcagacacgacgtcattgtgtccattgtaactgcggcaaagaaggacatcctgctcgtcaacgatcacctcctgaattttgtgcgcgaacggaccctggacaagaggtggagagtcagaaaggaggccatgatgggcctggcgcaaatctataagaaatacgcccttcagtccgccgccggcaaagatgccgcaaaacagatcgcttggatcaaggacaaattgctgcatatctactaccagaacagtatagacgacagactcctggttgaacggatattcgcacagtatatggtgccacataacttagaaaccacagaacgcatgaaatgtctgtattatctctacgcaaccctcgacttaaacgcagtcaaagcgctgaatgagatgtggaagtgtcaaaatctgttgagacatcaggtgaaggatctgctagacctaataaagcagcctaagacagatgcctccgtcaaagctatcttttcgaaggtgatggtgatcacccgcaacttgccagaccctggaaaagcacaagactttatgaagaagtttacgcaagtcctggaggacgatgagaaaatccggaaacaacttgaagtacttgtgagtcctacctgcagttgtaaacaagcggagggctgtgtacgggaaatcactaaaaagctcggcaacccaaagcagcccacaaaccccttcctggaaatgatcaagttcctacttgagaggatagcccctgtgcacatcgacaccgagtctataagcgccctgatcaagcaggtgaataagagtattgacggaactgctgatgacgaagatgagggagttcctacggaccaagccataagggccggattggagcttctgaaggtactttctttcactcatcctatctcctttcacagtgccgagaccttcgagagtctcctggcatgtctgaagatggacgacgagaaggtcgctgaagcagcactgcagattttcaaaaacacaggcagcaagatcgaagaggactttccgcatatccggtccgccctcctcccagttctgcaccataagtccaagaaaggaccaccccggcaggccaagtatgccattcactgtatccacgctatattctcctcgaaagaaacacaattcgctcagattttcgaacctctgcataagtccctcgacccctccaaccttgaacacctcattacccctctggtgacaatcgggcacattgccctcctagctcctgatcagttcgccgcgcccttgaagagtctggtcgcaacctttatcgtcaaggacttgctaatgaacgacagactgccaggtaagaagacaacaaagctgtgggtaccagatgaagaggtgagtccggaaactatggtgaagatccaagccatcaagatgatggtgagatggctcctgggcatgaaaaacaaccatagcaagagcggaacaagcaccttgcgcctcttgactactatcttgcactcagatggtgatctgactgaacaaggaaagattagtaagccagatatgagtagactcagattagctgctggttcagccattgtgaagttggcacaagaaccttgctaccatgaaattatcacccttgaacagtatcagctttgcgccctggccattaacgatgaatgctaccaggttcgtcaggtgttcgctcagaagctgcacaagggcctttctagactccggttacccttggagtatatggctatttgcgccttgtgtgccaaggacccggtgaaggagcggagggcgcacgcgaggcagtgcctagtaaaaaatattaacgtgcggagggaatacttaaaacagcacgccgcggtctccgagaagctgttgtcccttttgccggagtacgtggtgccgtatacaatccacctgctcgctcatgatcctgactatgttaaggtccaggatatagaacagctcaaggatgttaaggaatgcctgtggttcgtgttggagatcctcatggcaaagaatgaaaataactcccacgcattcatcaggaagatggtcgaaaacatcaagcagacgaaagacgcacaaggtccagacgatgctaagatgaacgaaaagctctatactgtttgcgacgtggccatgaatattatcatgagcaagagcactacttacagcctagagagtccaaaggatccagtgctgccagcacgtttcttcacgcaaccagacaaaaattttagcaacaccaagaattatctgccccccgagatgaagtccttctttacacccggtaagcctaaaaccaccaacgtgctgggggcagtgaataaacccctgtcatctgctggcaaacagtcccaaactaagtccagccggatggaaaccgtctccaacgctagtagcagctcaaaccctagctcccctggtcggatcaaaggtagactcgatagtagcgaaatggatcactccgagaatgaagactacacaatgagttccccactgcctggcaagaagagtgacaagagggacgattctgatctggtgcggagcgagttagagaagcctcggggtcgaaaaaagacgccggtgacagaacaggaggagaagttggggatggacgaccttacaaagcttgttcaggaacaaaaacccaaaggctcacaacgctcccgaaaacgcggccacactgccagtgagagcgacgagcagcagtggccagaggaaaaacgactgaaagaggacatactagagaatgaggatgaacaaaattctctccctttacatcagaaagatgcctctgatcggaggactacgatgcagatcgtgaaatag

SEQ ID NO: 183896 - DNA, 7497 bp, Artificial Sequence
  derived and/or modified sequence
gagcagccgccgaagagcgcttggcgccattttgaagcggagaggaggaggaacggcagggctggctgcggaaggggagggggggggagaaggcgattggatgcggcggcggcggcggatcccggagagccccggagtgagcggagtagcgagtcggcaacccggaggggtagaaatatttctgtcatggctcattcaaagactaggaccaatgatggaaaaattacatatccgcctggggtcaaggaaatatcagataaaatatctaaagaggagatggtgagacgattaaagatggttgtgaaaacttttatggatatggaccaggactctgaagaagaaaaggagctttatttaaacctagctttacatcttgcttcagatttttttctcaagcatcctgataaagatgttcgcttactggtagcctgctgccttgctgatattttcaggatttatgctcctgaagctccttacacatcccctgataaactaaaggatatatttatgtttataacaagacagttgaaggggctagaggatacaaagagcccacaattcaataggtatttttatttacttgagaacattgcttgggtcaagtcatataacatatgctttgagttagaagatagcaatgaaattttcacccagctatacagaaccttattttcagttataaacaatggccacaatcagaaagtccatatgcacatggtagaccttatgagctctattatttgtgaaggtgatacagtgtctcaggagcttttggatacggttttagtaaatctggtacctgctcataagaatttaaacaagcaagcatatgatttggcaaaggctttactgaagaggacagctcaagctattgagccatatattaccaatttttttaatcaggttctgatgcttgggaaaacatctatcagcgatttgtcagagcatgtctttgacttaattttggagctctacaatattgatagtcatttgctgctctctgttttaccccagcttgaatttaaattaaagagcaatgataatgaggagcgcctacaagttgttaaactactggcaaaaatgtttggggcaaaggattcagaattggcttctcaaaacaagccactttggcagtgctacttgggcaggtttaatgatatccatgtaccaatccgcctggaatgtgtgaaatttgctagccattgtctcatgaaccatcctgatttagcaaaagacttaacagagtatcttaaagtgaggtcacatgaccctgaggaagctattagacatgatgttattgtgtcaatagttacagctgctaaaaaggatattcttctggtcaatgatcacttacttaattttgtgagagagagaacattagacaaacgatggagagtacgcaaagaagccatgatgggacttgcccaaatttataagaaatatgctttacagtcagcagctggaaaagatgctgcaaaacagatagcatggatcaaagacaaattgctacatatatattatcaaaatagtattgatgatcgactacttgttgaacggatctttgctcaatacatggttcctcacaatttagaaactacagaacggatgaaatgcttatattacttgtatgccacactggatttaaatgctgtgaaagcattgaatgaaatgtggaaatgtcaaaatctgctccgacatcaagtaaaggatttgcttgacttgattaagcaacccaaaacagatgccagtgtcaaggccatattttcaaaagtgatggttattacaagaaatttacctgatcctggtaaggctcaggatttcatgaagaaattcacacaggtgttagaagatgatgagaaaataagaaagcagttagaagtacttgttagtccaacatgctcctgcaagcaggctgaaggttgtgtgcgtgaaataactaagaagttgggcaaccccaaacagcctacaaatcctttcctggaaatgatcaagtttctcttggagaggatagcacctgtgcacatagataccgaatctatcagtgctcttattaaacaagtgaacaaatcaatagatggaacagcagatgatgaagatgagggtgttccaactgatcaagccatcagagcaggtcttgaactgcttaaggtactctcatttacacatcccatctcatttcattctgctgaaacatttgaatcattactggcttgtctgaaaatggatgatgaaaaagtagcagaagctgcactacaaattttcaaaaacacaggaagcaaaattgaagaggattttccacacatcagatcagccttgcttcctgttttacatcacaaatctaaaaaaggacccccccgtcaagccaaatatgccattcattgtatccatgcgatattttctagtaaagagacccagtttgcacagatatttgagcctctgcataagagcctagatccaagcaacctggaacatctcataacaccattggttactattggtcatattgctctccttgcacctgatcaatttgctgctcctttgaaatctttggtagctactttcattgtgaaagatcttctcatgaatgatcggcttccagggaaaaagacaactaaactttgggttccagatgaagaagtatctcctgagacaatggtcaaaattcaggctattaaaatgatggttcgatggctacttggaatgaaaaataatcacagtaaatcaggaacttctaccttaagattgctaacaacaatattgcatagtgatggagacttgacagaacaggggaaaattagtaaaccagatatgtcacgtctgagacttgctgctgggagtgctattgtgaagctggcacaagaaccctgttaccatgaaatcatcacattagaacaatatcagctatgtgcattagctatcaacgatgaatgctatcaagtaagacaagtgtttgcccagaaacttcacaaaggcctttcccgtttacggcttccacttgagtatatggcaatctgtgccctttgtgcaaaagatcctgtaaaggagagaagagctcatgctaggcaatgtttggtgaaaaatataaatgtaaggcgggagtatctgaagcagcatgcagctgttagtgaaaaattattgtctcttctaccagagtatgttgttccatatacaattcaccttttggcacatgacccagattatgtcaaagtacaggatattgaacaacttaaagatgttaaagaatgtctttggtttgttctggaaatattaatggctaaaaatgaaaataacagtcacgcttttatcagaaagatggtagaaaatattaaacaaacaaaagatgcccaaggaccagatgatgcaaaaatgaatgaaaaactgtacactgtgtgtgatgttgccatgaatatcatcatgtcaaagagtactacatacagtttggaatctcctaaagacccggtactaccagctcgtttcttcactcaacctgacaagaatttcagtaacaccaaaaattatctgcctcctgaaatgaaatcatttttcactcctggaaaacctaaaacaaccaatgttctaggagctgttaacaagccactttcatcagcaggcaagcaatctcagaccaaatcatcacgaatggaaactgtaagcaatgcaagcagcagctcaaatccaagctctcctggaagaataaaggggaggcttgatagttctgaaatggatcacagtgaaaatgaagattacacaatgtcttcacctttgccggggaaaaaaagtgacaagagagacgactctgatcttgtaaggtctgaattggagaagcctagaggcaggaaaaaaacgcccgtcacagaacaggaggagaaattaggtatggatgacttgactaagttggtacaggaacagaaacctaaaggcagtcagcgaagtcggaaaagaggccatacggcttcagaatctgatgaacagcagtggcctgaggaaaagaggctcaaagaagatatattagaaaatgaagatgaacagaatagtccgccaaaaaagggtaaaagaggccgaccaccaaaacctcttggtggaggtacaccaaaagaagagccaacaatgaaaacttctaaaaaaggaagcaaaaaaaaatctggacctccagcaccagaggaggaggaagaagaagaaagacaaagtggaaatacggaacagaagtccaaaagcaaacagcaccgagtgtcaaggagagcacagcagagagcagaatctcctgaatctagtgcaattgaatccacacagtccacaccacagaaaggacgaggaagaccatcaaaaacgccatcaccatcacaaccaaaaaaaaatgtccgtgtaggacgctccaaacaagcagctactaaggaaaatgattcaagtgaagaagtagatgtgtttcagggtagctctcctgtcgatgatattccacaggaagaaacagaggaggaggaagtttctacagtaaatgtacggcggcgaagtgctaaaagggaacggcgatgaacaaatgtaattaataactttctctgtgaaagctttggaaaaatctttttttttttttttggtcaagcttgaggctgaataaagcctttgatgcacaaaatgggactgctgaagagtggacagttggaccttactttggtgaccccatacatttgtggtcacatgctttagccatacacatggtaacattgactatggagtcttgtgaaagtgtaatgtgcgatggctatgtagacataaagaagaaacttgtaaatatcttttttcttttttttaatgtttctgatttctgaagtgcttgtatagcttttatctgcggctttaaactgacagtacccgactgtttattggatctattgatttgaaaagaatttgttaggatagatcttaagcagtaatctgtcagtgtttgtatttgtattctctgcaattttactgtgaaaaaaaatttgttttcaacaattggtgtcattttcttgatgtcactatttgttggagagttaaatggtctcttccctttgtgtatcttacctagtgtttactcctgggcacccttaatcttcagaggtgctaaattgtctgccattacaccagaaggatgcctctgataggaggacaaccatgcaaattgtgaaatagtcctgaagttcttggattactttacacctcagtattgatttgtcccagaattttctggcctttcatggcaatgaaaattttaagaagaaagatttaaagtattttaattttaaagagtgtgttataaaataatgtactgaattctttatcccattttatcatcctttcagtttttattaatctactgtatcaataaaattctgtaatttgaatgagtttttaatagtctagaatgttattgtgtatagatatttcctcttgaacgttatgttcagaaaatgcaaattacactataatataaaacctgatatatacacattagaaatattccagttctccgtaacagtgtaaagttaatcagaaagaaaaaattttattgatgcagtgtgtctttataaagctgttcttgaaagccaagtgttttgtattttatagtgagttgcatgtttttgaaaaaaagtgctgaaaatgggatgtgctgttttctgtaaattcatatttagccatagtatatgatagattgccccataacatagtttttcatcaagagtttattattgtactttattttggagccaaaaaattgattctggggggtgggggcagcgtagaagtggtatatccaagtatatcagctactgtagttgtcacagtcttgtgaactttgaatgaaattccactttgtccagattgggagaagtggaaatttatttggatttagagcaggtctttttttttcttcattgtaatctgcaaaatgtagaaataaattacttaaggcagtatcctttatacagttgtataaactgtattttgaaccaaaacatataggttactacttaatgcttacctaatttcattttagtattttaggtgctgttatgttttttcatggttaacaccagaggggaaaaaatcatattctaacttattaaatttatcacattgaatagtggaacattttcatatgatacaccattatgtttaagatatatttccaagattggttataatagatggggcatataataaagaagctactattttggaaaatgacattttactatttgccaatgtatattgcaattgatgtgattatttttcttttaaagatttgtttgtgtttatgaaacagccatttattttttaaaaagtgttttgaattgtgtcttaatctctccatattcaactattcttcatttacaacaatagtgacaccagtaattatgagaggctgtcatatatcaaagcagctcaggtgggatcaacatacattggttttgaaatgtttccttagctcggttctcccaaacacataatttctgtttcagcagtacaaaggcatgttttaaaatctataacataaagaataaggaatagctttgtatttttgtcattgattaaattgcaccagaaatgtttatggaaatattaagaacattttataaaacatacgaaaaagtgattgtgaaggatttttatttgcatgattatagttaagcaaatttcatttcacatttttgtaatgctgtacagcagttcacaaaaaaatgttcattgtagattttgttatgttcaatgccaatgagtctgtaattttacgacctgtctgttctttttttgggtggattacgatgtaaatttttcttttctttctttctttttttttttttttgtgtagaaaaataggtgcaataatgatcaaagttttgatgtcttgagtctccatcttaggggattatcttacgtttaagcttaacatttcatgtagtaagatttggagagccacatactttacagtaaaattaagtgtgtataaaacattaattgctaacaattgttagcaaactatttcagtgataatgttcattttgaaaatatgtactgtataacattaagaaaatatttaactccctgtaacaagttccattatgaaaatcttattcctcagtgaggttatcttgctgcactctgtagcaaatttgtttaatctacattataataaaatttcttgctgcagtgcaacaggaggctttttcagtgatcttcactgtatatgtaaattacaaatgtggctgtaaaacttattccaggtattaaaggttaaattgctttctatatcttcttataacttgtaagtctgatttttaagatttccttttgtccacttgtaagaatgtcaggaatttaagaatttgtttaaattaggcatatctctgccatcacatagtattatgtcaccataatgaacaattgctatttaaatagataaccaattttcagacacatttttggatttctgtgaagttgaataaacataaaagctaa

SEQ ID NO: 183897 - DNA, 4067 bp, Artificial Sequence
  derived and/or modified sequence
attttgaagcggagaggaggaggaacggcagggctggctgcggaaggggagggggggggagaaggcgattggatgcggcggcggcggcggatcccggagagccccggagtgagcggagtagcgagtcggcaacccggaggggtagaaatatttctgtcatggctcattcaaagactaggaccaatgatggaaaaattacatatccgcctggggtcaaggaaatatcagataaaatatctaaagaggagatggtgagacgattaaagatggttgtgaaaacttttatggatatggaccaggactctgaagaagaaaaggagctttatttaaacctagctttacatcttgcttcagatttttttctcaagcatcctgataaagatgttcgcttactggtagcctgctgccttgctgatattttcaggatttatgctcctgaagctccttacacatcccctgataaactaaaggatatatttatgtttataacaagacagttgaaggggctagaggatacaaagagcccacaattcaataggtatttttatttacttgagaacattgcttgggtcaagtcatataacatatgctttgagttagaagatagcaatgaaattttcacccagctatacagaaccttattttcagttataaacaatggccacaatcagaaagtccatatgcacatggtagaccttatgagctctattatttgtgaaggtgatacagtgtctcaggagcttttggatacggttttagtaaatctggtacctgctcataagaatttaaacaagcaagcatatgatttggcaaaggctttactgaagaggacagctcaagctattgagccatatattaccaatttttttaatcaggttctgatgcttgggaaaacatctatcagcgatttgtcagagcatgtctttgacttaattttggagctctacaatattgatagtcatttgctgctctctgttttaccccagcttgaatttaaattaaagagcaatgataatgaggagcgcctacaagttgttaaactactggcaaaaatgtttggggcaaaggattcagaattggcttctcaaaacaagccactttggcagtgctacttgggcaggtttaatgatatccatgtaccaatccgcctggaatgtgtgaaatttgctagccattgtctcatgaaccatcctgatttagcaaaagacttaacagagtatcttaaagtgaggtcacatgaccctgaggaagctattagacatgatgttattgtgtcaatagttacagctgctaaaaaggatattcttctggtcaatgatcacttacttaattttgtgagagagagaacattagacaaacgatggagagtacgcaaagaagccatgatgggacttgcccaaatttataagaaatatgctttacagtcagcagctggaaaagatgctgcaaaacagatagcatggatcaaagacaaattgctacatatatattatcaaaatagtattgatgatcgactacttgttgaacggatctttgctcaatacatggttcctcacaatttagaaactacagaacggatgaaatgcttatattacttgtatgccacactggatttaaatgctgtgaaagcattgaatgaaatgtggaaatgtcaaaatctgctccgacatcaagtaaaggatttgcttgacttgattaagcaacccaaaacagatgccagtgtcaaggccatattttcaaaagtgatggttattacaagaaatttacctgatcctggtaaggctcaggatttcatgaagaaattcacacaggtgttagaagatgatgagaaaataagaaagcagttagaagtacttgttagtccaacatgctcctgcaagcaggctgaaggttgtgtgcgtgaaataactaagaagttgggcaaccccaaacagcctacaaatcctttcctggaaatgatcaagtttctcttggagaggatagcacctgtgcacatagataccgaatctatcagtgctcttattaaacaagtgaacaaatcaatagatggaacagcagatgatgaagatgagggtgttccaactgatcaagccatcagagcaggtcttgaactgcttaaggtactctcatttacacatcccatctcatttcattctgctgaaacatttgaatcattactggcttgtctgaaaatggatgatgaaaaagtagcagaagctgcactacaaattttcaaaaacacaggaagcaaaattgaagaggattttccacacatcagatcagccttgcttcctgttttacatcacaaatctaaaaaaggacccccccgtcaagccaaatatgccattcattgtatccatgcgatattttctagtaaagagacccagtttgcacagatatttgagcctctgcataagagcctagatccaagcaacctggaacatctcataacaccattggttactattggtcatattgctctccttgcacctgatcaatttgctgctcctttgaaatctttggtagctactttcattgtgaaagatcttctcatgaatgatcggcttccagggaaaaagacaactaaactttgggttccagatgaagaagtatctcctgagacaatggtcaaaattcaggctattaaaatgatggttcgatggctacttggaatgaaaaataatcacagtaaatcaggaacttctaccttaagattgctaacaacaatattgcatagtgatggagacttgacagaacaggggaaaattagtaaaccagatatgtcacgtctgagacttgctgctgggagtgctattgtgaagctggcacaagaaccctgttaccatgaaatcatcacattagaacaatatcagctatgtgcattagctatcaacgatgaatgctatcaagtaagacaagtgtttgcccagaaacttcacaaaggcctttcccgtttacggcttccacttgagtatatggcaatctgtgccctttgtgcaaaagatcctgtaaaggagagaagagctcatgctaggcaatgtttggtgaaaaatataaatgtaaggcgggagtatctgaagcagcatgcagctgttagtgaaaaattattgtctcttctaccagagtatgttgttccatatacaattcaccttttggcacatgacccagattatgtcaaagtacaggatattgaacaacttaaagatgttaaagaatgtctttggtttgttctggaaatattaatggctaaaaatgaaaataacagtcacgcttttatcagaaagatggtagaaaatattaaacaaacaaaagatgcccaaggaccagatgatgcaaaaatgaatgaaaaactgtacactgtgtgtgatgttgccatgaatatcatcatgtcaaagagtactacatacagtttggaatctcctaaagacccggtactaccagctcgtttcttcactcaacctgacaagaatttcagtaacaccaaaaattatctgcctcctgaaatgaaatcatttttcactcctggaaaacctaaaacaaccaatgttctaggagctgttaacaagccactttcatcagcaggcaagcaatctcagaccaaatcatcacgaatggaaactgtaagcaatgcaagcagcagctcaaatccaagctctcctggaagaataaaggggaggcttgatagttctgaaatggatcacagtgaaaatgaagattacacaatgtcttcacctttgccggggaaaaaaagtgacaagagagacgactctgatcttgtaaggtctgaattggagaagcctagaggcaggaaaaaaacgcccgtcacagaacaggaggagaaattaggtatggatgacttgactaagttggtacaggaacagaaacctaaaggcagtcagcgaagtcggaaaagaggccatacggcttcagaatctgatgaacagcagtggcctgaggaaaagaggctcaaagaagatatattagaaaatgaagatgaacagaatagtctgccattacaccagaaggatgcctctgataggaggacaaccatgcaaattgtgaaatag

SEQ ID NO: 183898 - DNA, 4344 bp, Artificial Sequence
  derived and/or modified sequence
atggcccacagcaagaccaggaccaatgatggcaagatcacctacccacctggggtgaaggagatcagtgacaagatcagcaaggaggagatggtgcggcggctgaagatggtggtgaagaccttcatggacatggaccaggacagcgaggaggagaaggagctgtacctgaacctggccctgcacctggccagtgacttcttcctgaagcacccagacaaggatgtgcggctgctggtggcctgctgcctggccgacatcttccgcatctatgcccctgaggccccctacaccagcccagacaagctgaaggacatcttcatgttcatcacccggcagctgaagggcctggaggacaccaagagcccccagttcaaccgctacttctacctgctggagaacatcgcctgggtgaagagctacaacatctgctttgagctggaggacagcaatgagatcttcacccagctgtaccgcaccctcttcagcgtcatcaacaacggccacaaccagaaggtgcacatgcacatggtggacctgatgagcagcatcatctgtgagggggacacagtgtcccaggagctgctggacacagtgctggtgaacctggtgcctgcccacaagaacctgaacaagcaggcctatgacctggccaaggccctgctgaagaggacagcccaggccatcgagccctacatcaccaacttcttcaaccaggtgctgatgctgggcaagaccagcatcagtgacctgtctgagcacgtgtttgacctgatcctggagctgtacaacatcgacagccacctgctgctgtctgtgctgccccagctggagttcaagctgaagagcaatgacaatgaggagcggctgcaggtggtgaagctgctggccaagatgtttggagccaaggacagcgagctggccagccagaacaagcccctgtggcagtgctacctgggccgcttcaatgacatccacgtgcccatccggctggagtgtgtgaagtttgccagccactgcctgatgaaccacccagacctggccaaggacctgacagagtacctgaaggtgcgcagccatgaccctgaggaggccatcagacatgatgtgattgtgtccatcgtgacagctgccaagaaggacatcctgctggtgaatgaccacctgctgaactttgtgcgggagaggaccctggacaagcgctggagggtgaggaaggaggccatgatgggcctggcccagatctacaagaagtatgccctgcagagcgctgctgggaaggatgctgccaagcagatcgcctggatcaaggacaagctgctgcacatctactaccagaacagcattgatgaccggctgctggtggagcgcatctttgcccagtacatggtgccccacaacctggagaccacagagaggatgaagtgcctgtactacctgtatgccaccctggacctgaatgctgtgaaggccctgaatgagatgtggaagtgccagaacctgctgcggcaccaggtgaaggacctgctggacctgatcaagcagcccaagacagatgcctctgtgaaggccatcttcagcaaggtgatggtgatcaccaggaacctgcctgaccccgggaaggcccaggacttcatgaagaagttcacccaggtgctggaggatgatgagaagatcaggaagcagctggaggtgctggtgagccccacctgcagctgcaagcaggccgagggctgtgtgcgggagatcaccaagaagctgggcaaccccaagcagcccaccaaccccttcctggagatgatcaagttcctgctggagcgcatcgcccctgtgcacatcgacacagagagcatcagcgccctgatcaagcaggtgaacaagagcattgatggaacagcagatgatgaagatgaaggagtgcccacagaccaggccatccgggccggcctggagctgctgaaggtgctgtccttcacccaccccatctccttccacagcgctgagacctttgagagcctgctggcctgcctgaagatggatgatgagaaggtggccgaggccgccctgcagatcttcaagaacacaggcagcaagattgaggaggacttcccccacatccgcagcgccctgctgcctgtgctgcaccacaagagcaagaagggccccccccggcaggccaagtatgccatccactgcatccacgccatcttcagcagcaaggagacccagtttgcccagatctttgagcccctgcacaagagcctggaccccagcaacctggagcacctgatcacccccctggtgaccatcggccacatcgccctgctggccccagaccagtttgctgcccccctgaagagcctggtggccaccttcatcgtgaaggacctgctgatgaatgaccggctgcccgggaagaagaccaccaagctgtgggtgcctgatgaggaggtgtccccagagaccatggtgaagatccaggccatcaagatgatggtgcgctggctgctgggcatgaagaacaaccacagcaagagcggcaccagcaccctgcggctgctgaccaccatcctgcacagtgatggagacctgacagagcagggcaagatcagcaagccagacatgagccggctgcggctggccgccggcagcgccatcgtgaagctggcccaggagccctgctaccacgagatcatcaccctggagcagtaccagctgtgtgccctggccatcaatgatgagtgctaccaggtgcggcaggtgtttgcccagaagctgcacaagggcctgagccggctgcggctgcccctggagtacatggccatctgtgccctgtgtgccaaggaccctgtgaaggagcggcgggcccacgcccggcagtgcctggtgaagaacatcaacgtgagaagagagtacctgaagcagcacgccgctgtgtctgagaagctgctgagcctgctgcctgaatatgtggtgccctacaccatccacctgctggcccatgaccctgactatgtgaaggtgcaggacatcgagcagctgaaggatgtgaaggaatgtctgtggtttgtgctggagatcctgatggccaagaatgaaaacaacagccacgccttcatcaggaagatggtggagaacatcaagcagaccaaggatgcccagggcccagatgatgccaagatgaatgagaagctgtacacagtgtgtgatgtggccatgaacatcatcatgagcaagagcaccacctacagcctggagagccccaaggaccctgtgctgcctgcccgcttcttcacccagcctgacaagaacttcagcaacaccaagaactacctgcccccagagatgaagagcttcttcacccctgggaagcccaagaccaccaacgtgctgggcgctgtgaacaagcccctgagcagcgctgggaagcagagccagaccaagagcagcaggatggagaccgtgtccaatgccagcagcagcagcaaccccagcagccctggccgcatcaagggccgcctggacagcagcgagatggaccacagtgaaaatgaagactacaccatgagcagccccctgcccgggaagaagagtgacaagagagatgacagcgacctggtgcgctctgagctggagaagccccggggcaggaagaagacccctgtgacagagcaggaggagaagctgggcatggatgacctgaccaagctggtgcaggagcagaagcccaagggcagccagaggagcaggaagaggggccacacagccagcgagagtgatgagcagcagtggccagaggagaagaggctgaaggaggacatcctggagaatgaagatgagcagaacagcccccccaagaagggcaagaggggccggccccccaagcccctgggcggcggcacccccaaggaggagcccaccatgaagaccagcaagaagggcagcaagaagaagagcggccccccagcccctgaggaggaggaggaggaggagcggcagagcggcaacacagagcagaagagcaagagcaagcagcaccgggtgtcccggcgggcccagcagagagctgagagccctgagagcagcgccatcgagagcacccagagcaccccccagaagggccggggccggcccagcaagacccccagccccagccagcccaagaagaatgtgcgggtgggccgcagcaagcaggccgccaccaaggaaaatgacagcagcgaggaggtggatgtgttccagggcagcagccctgtggatgacatcccccaggaggagacagaggaggaggaggtgtccacagtgaatgtgagaagaagaagtgccaagcgggagaggaggtag

SEQ ID NO: 183899 - DNA, 3909 bp, Artificial Sequence
  derived and/or modified sequence
atggcccacagcaagaccaggaccaatgatggcaagatcacctacccacctggggtgaaggagatcagtgacaagatcagcaaggaggagatggtgcggcggctgaagatggtggtgaagaccttcatggacatggaccaggacagcgaggaggagaaggagctgtacctgaacctggccctgcacctggccagtgacttcttcctgaagcacccagacaaggatgtgcggctgctggtggcctgctgcctggccgacatcttccgcatctatgcccctgaggccccctacaccagcccagacaagctgaaggacatcttcatgttcatcacccggcagctgaagggcctggaggacaccaagagcccccagttcaaccgctacttctacctgctggagaacatcgcctgggtgaagagctacaacatctgctttgagctggaggacagcaatgagatcttcacccagctgtaccgcaccctcttcagcgtcatcaacaacggccacaaccagaaggtgcacatgcacatggtggacctgatgagcagcatcatctgtgagggggacacagtgtcccaggagctgctggacacagtgctggtgaacctggtgcctgcccacaagaacctgaacaagcaggcctatgacctggccaaggccctgctgaagaggacagcccaggccatcgagccctacatcaccaacttcttcaaccaggtgctgatgctgggcaagaccagcatcagtgacctgtctgagcacgtgtttgacctgatcctggagctgtacaacatcgacagccacctgctgctgtctgtgctgccccagctggagttcaagctgaagagcaatgacaatgaggagcggctgcaggtggtgaagctgctggccaagatgtttggagccaaggacagcgagctggccagccagaacaagcccctgtggcagtgctacctgggccgcttcaatgacatccacgtgcccatccggctggagtgtgtgaagtttgccagccactgcctgatgaaccacccagacctggccaaggacctgacagagtacctgaaggtgcgcagccatgaccctgaggaggccatcagacatgatgtgattgtgtccatcgtgacagctgccaagaaggacatcctgctggtgaatgaccacctgctgaactttgtgcgggagaggaccctggacaagcgctggagggtgaggaaggaggccatgatgggcctggcccagatctacaagaagtatgccctgcagagcgctgctgggaaggatgctgccaagcagatcgcctggatcaaggacaagctgctgcacatctactaccagaacagcattgatgaccggctgctggtggagcgcatctttgcccagtacatggtgccccacaacctggagaccacagagaggatgaagtgcctgtactacctgtatgccaccctggacctgaatgctgtgaaggccctgaatgagatgtggaagtgccagaacctgctgcggcaccaggtgaaggacctgctggacctgatcaagcagcccaagacagatgcctctgtgaaggccatcttcagcaaggtgatggtgatcaccaggaacctgcctgaccccgggaaggcccaggacttcatgaagaagttcacccaggtgctggaggatgatgagaagatcaggaagcagctggaggtgctggtgagccccacctgcagctgcaagcaggccgagggctgtgtgcgggagatcaccaagaagctgggcaaccccaagcagcccaccaaccccttcctggagatgatcaagttcctgctggagcgcatcgcccctgtgcacatcgacacagagagcatcagcgccctgatcaagcaggtgaacaagagcattgatggaacagcagatgatgaagatgaaggagtgcccacagaccaggccatccgggccggcctggagctgctgaaggtgctgtccttcacccaccccatctccttccacagcgctgagacctttgagagcctgctggcctgcctgaagatggatgatgagaaggtggccgaggccgccctgcagatcttcaagaacacaggcagcaagattgaggaggacttcccccacatccgcagcgccctgctgcctgtgctgcaccacaagagcaagaagggccccccccggcaggccaagtatgccatccactgcatccacgccatcttcagcagcaaggagacccagtttgcccagatctttgagcccctgcacaagagcctggaccccagcaacctggagcacctgatcacccccctggtgaccatcggccacatcgccctgctggccccagaccagtttgctgcccccctgaagagcctggtggccaccttcatcgtgaaggacctgctgatgaatgaccggctgcccgggaagaagaccaccaagctgtgggtgcctgatgaggaggtgtccccagagaccatggtgaagatccaggccatcaagatgatggtgcgctggctgctgggcatgaagaacaaccacagcaagagcggcaccagcaccctgcggctgctgaccaccatcctgcacagtgatggagacctgacagagcagggcaagatcagcaagccagacatgagccggctgcggctggccgccggcagcgccatcgtgaagctggcccaggagccctgctaccacgagatcatcaccctggagcagtaccagctgtgtgccctggccatcaatgatgagtgctaccaggtgcggcaggtgtttgcccagaagctgcacaagggcctgagccggctgcggctgcccctggagtacatggccatctgtgccctgtgtgccaaggaccctgtgaaggagcggcgggcccacgcccggcagtgcctggtgaagaacatcaacgtgagaagagagtacctgaagcagcacgccgctgtgtctgagaagctgctgagcctgctgcctgaatatgtggtgccctacaccatccacctgctggcccatgaccctgactatgtgaaggtgcaggacatcgagcagctgaaggatgtgaaggaatgtctgtggtttgtgctggagatcctgatggccaagaatgaaaacaacagccacgccttcatcaggaagatggtggagaacatcaagcagaccaaggatgcccagggcccagatgatgccaagatgaatgagaagctgtacacagtgtgtgatgtggccatgaacatcatcatgagcaagagcaccacctacagcctggagagccccaaggaccctgtgctgcctgcccgcttcttcacccagcctgacaagaacttcagcaacaccaagaactacctgcccccagagatgaagagcttcttcacccctgggaagcccaagaccaccaacgtgctgggcgctgtgaacaagcccctgagcagcgctgggaagcagagccagaccaagagcagcaggatggagaccgtgtccaatgccagcagcagcagcaaccccagcagccctggccgcatcaagggccgcctggacagcagcgagatggaccacagtgaaaatgaagactacaccatgagcagccccctgcccgggaagaagagtgacaagagagatgacagcgacctggtgcgctctgagctggagaagccccggggcaggaagaagacccctgtgacagagcaggaggagaagctgggcatggatgacctgaccaagctggtgcaggagcagaagcccaagggcagccagaggagcaggaagaggggccacacagccagcgagagtgatgagcagcagtggccagaggagaagaggctgaaggaggacatcctggagaatgaagatgagcagaacagcctgcccctgcaccagaaggatgccagtgacaggaggaccaccatgcagatcgtgaagtag

SEQ ID NO: 183900 - DNA, 4344 bp, Artificial Sequence
  derived and/or modified sequence
atggcccacagcaagacccggaccaacgacggcaagatcacctaccctcccggagtcaaagagatcagcgacaaaatcagtaaagaggagatggtccggagattgaaaatggtggtcaaaacattcatggatatggaccaggactcagaagaggaaaaggagttgtacctgaatctagctctccaccttgcttcagatttctttttgaagcatcctgataaggacgtgcgattactcgtcgcttgttgcctcgccgacatttttagaatctatgccccggaggctccatatacgtctccagacaaactgaaagacatctttatgtttattactcggcagcttaagggactggaggacaccaaatcaccacagtttaacagatacttctatctactggagaacatcgcatgggtgaagtcttataacatctgttttgaactggaggattcaaacgaaatatttacccagctttatcggactcttttcagcgttatcaacaacggtcacaaccagaaggtccatatgcacatggtggacctcatgagcagcatcatttgcgaaggagacactgtgtctcaggagctgctggatacagtcctcgtcaatcttgttccagcccacaagaatctgaataagcaggcatatgacctggcgaaggctcttctgaaaaggactgctcaggccattgaaccttatattaccaattttttcaatcaagttttgatgttgggcaagacctctattagcgacctgtcggagcacgtgttcgatctgattctcgagctgtataacatcgactctcatctcctcctgtctgtcctgccccagctggagttcaagctaaaatctaatgacaatgaagaaaggcttcaagtggtgaagctcctggccaaaatgttcggcgctaaagactccgaactggcttctcaaaacaaacccctttggcagtgttacctggggaggtttaacgatatccacgtgcctattcggctggaatgtgtcaagtttgcaagccattgtctgatgaaccaccccgaccttgccaaagatctgacagagtatcttaaggttcgatcacatgatcccgaggaggcaattcggcatgacgtgattgtgagtattgtgacggccgctaaaaaagatatactcttggtcaacgatcacctgctgaacttcgttagagagcgcaccctggataagcgatggcgtgttcgtaaggaggccatgatgggactagcgcagatctacaaaaagtacgccctccagtcagccgccggcaaagacgccgccaagcagatagcttggatcaaggacaaacttttgcacatctactatcagaacagtatcgatgataggctacttgtggagcggatttttgcccaatatatggtcccacacaacctggaaaccacagaacgcatgaaatgcctctactacctctatgctaccctcgacctgaacgcagtgaaagccctgaatgagatgtggaagtgtcagaatctgctacgccaccaagtgaaggatctgctggacctaattaaacagcctaagactgacgcatcagtgaaggccatcttttcgaaggtgatggttattacacggaacctgcctgacccgggaaaggcccaggatttcatgaaaaagttcacacaagtcctggaggatgacgagaaaatcagaaaacagctggaagtcctcgtaagccccacctgctcctgtaagcaggccgagggttgtgttagagagatcactaagaagcttggcaacccaaaacaacctactaacccttttttggaaatgatcaagtttctgctagagagaattgcccccgtgcacatcgacaccgagagcattagtgctctgattaaacaggtgaacaagagcatcgacggcacagccgatgatgaggatgagggcgtgcccactgatcaggcgatcagggccggcctggaattgctgaaggtgctgtccttcactcaccccatctcatttcactctgcagaaacctttgagagtcttctggcttgcctgaagatggacgatgaaaaggtcgccgaagccgccctgcagatttttaaaaataccggatccaaaatagaggaagatttcccccacatccgatccgcgctcctcccggttctgcaccacaagtcaaagaagggtccaccccgccaagctaagtatgcaatacactgtattcacgctatcttctccagtaaagagacccaattcgcacaaatctttgaacctctgcataaatctctcgacccctcgaatctggagcatctgatcacaccactggtgactataggacacatcgctctccttgcgcccgaccagtttgctgctcccttgaagtcactcgtggccaccttcatcgtgaaagatttactaatgaatgataggttaccaggcaaaaaaacaacgaaattgtgggtaccggacgaggaagtcagcccagaaacaatggtgaaaatccaggccattaagatgatggtccgttggttactgggtatgaagaacaaccacagcaagtccggcacttcaactctgcggctgcttaccacaattttacactccgacggagatctcaccgagcagggtaaaatctcgaagccagatatgagtaggcttcgcctggctgcaggttctgccatagtcaaactcgctcaggagccctgctaccacgagattattacacttgagcagtaccagttatgtgccttggcaattaacgacgaatgttaccaggtgcgtcaggtatttgcccagaagcttcataagggactgagcaggctgcggcttccactggaatatatggctatttgcgcgctgtgcgccaaagatcccgttaaagagcgcagggcccatgctcgtcagtgtctcgtgaagaatataaacgttcgcagagagtacctgaagcaacacgccgccgtgagcgagaaactcctgagtttgctgcctgagtacgtggtaccttacacaattcatctgctggctcacgatccggactacgttaaggtacaggacatagaacagctaaaagacgtcaaggaatgcttgtggttcgtcttagaaatcttgatggctaagaacgaaaacaacagtcacgccttcatacgcaaaatggtggaaaatattaagcagacaaaggacgcgcaaggcccagatgacgcaaaaatgaacgagaagctttacaccgtgtgcgacgtggcgatgaacatcatcatgtccaagagcaccacctattcccttgaatccccaaaggatcccgtcctacctgcgcggttcttcacccagcctgacaagaatttttctaacaccaagaactacttacctcctgagatgaaatcattctttacgcccggaaagccaaaaacaacaaacgtgctaggtgcagtgaataagcctctgtcatcagctgggaagcaatcccaaacgaagtctagccgtatggaaacagtgtccaatgcctctagttcctctaatcctagttcccctggacggataaagggaaggttagattccagtgagatggaccactcagaaaacgaagattatacgatgagtagccctcttccgggcaagaagtccgataaaagagatgacagtgatttggtgagatcagagctcgagaagccccgtggtcggaaaaaaacaccagtaactgaacaggaggaaaaattgggcatggacgatctgactaagctagtacaggaacaaaagcccaagggttcccagagaagccggaaacgaggccacactgcctccgaatctgacgagcaacagtggcccgaggagaagcgtctcaaagaagatattctggagaatgaagatgaacagaactctccccccaagaagggtaagcggggtcggcccccaaagcccctgggagggggcacccctaaagaagagccaacgatgaagacgagtaagaaaggctccaagaagaaaagcggaccacctgcacccgaggaggaggaagaagaggaacgccagtccggtaatacagagcaaaaatccaaatcaaaacagcacagagtatcccggcgggcccaacagcgtgctgagagccccgaaagtagcgctatcgagtccactcaaagtaccccccagaagggcagaggtcgcccttcgaagactccaagcccgtcccagccaaagaaaaacgtgcgcgtgggtagaagtaaacaggccgcaaccaaggaaaacgacagcagtgaagaggtggacgtgttccaagggtcatcgccagtggacgacattcctcaggaggagacagaggaagaggaagtgtcaactgtaaacgtgcgacgtaggtcggcgaagcgagaacgccgctag

SEQ ID NO: 183901 - DNA, 3909 bp, Artificial Sequence
  derived and/or modified sequence
atggcccacagcaagacccggaccaacgacggcaagatcacctacccacctggagtgaaggaaataagcgataagatcagcaaagaagagatggtgcgcagacttaagatggtggtaaagacattcatggatatggaccaagactcagaagaagaaaaggagttgtacctgaacctggccttgcacctcgcctctgatttcttccttaaacacccggataaagatgtgcgattactggtggcctgttgcctggctgatatattccgcatatacgccccagaagccccttatacgagccccgataaacttaaggatatttttatgttcattacacgccaactgaaggggctggaagacaccaaatctccgcagttcaatcggtacttttatttgctcgagaatattgcatgggtgaaaagctataacatttgctttgaactcgaagactctaatgagatatttacccagttatataggacactcttttccgtgatcaacaacggccataatcaaaaagttcatatgcatatggttgatctgatgtcctctatcatctgcgagggcgatactgtaagtcaggagctcttggacactgtgcttgtgaatctcgtgcccgcccacaagaacctcaacaagcaggcatatgacctggctaaggccctcctgaagcgcactgcgcaggccatcgaaccctacattaccaattttttcaaccaggttctgatgttggggaagacctcgatctctgacctgtcggagcatgtgttcgacctaatcttggaactgtacaacatcgactcacacctgctcctctccgtgctgcctcagctggaattcaagctaaagtcaaacgataacgaagaacgactgcaagtggtgaagttactagccaaaatgttcggcgccaaggacagcgagctagcctcccagaataaaccactgtggcagtgttatctggggcggttcaacgacatccacgttcctattcggctggaatgcgttaaatttgcaagccattgtctgatgaatcaccccgacctcgctaaggatctcacggagtatttaaaagtgcggtcccacgatccagaggaggctatcagacacgatgtgatagtgtccatagtgaccgcggctaaaaaggatattttactggtaaatgatcacctgcttaattttgtcagggagcgcacgctggataagagatggagagttagaaaagaggccatgatggggctggcacaaatatacaagaaatacgctcttcagagcgctgccggcaaagatgcagccaaacagatcgcatggatcaaggataagcttctccatatctactaccagaattcaatcgatgaccggctactagtcgagcgaatctttgcccagtacatggtgcctcataatctcgaaacaacggaaaggatgaagtgcctttactacctgtacgcaacgctggacctgaacgccgtgaaagcactaaatgagatgtggaaatgtcagaaccttctgcgccatcaggttaaagatctcttggatttaattaaacagccaaaaactgatgcttcggtgaaagccatatttagtaaggtcatggtgatcacccgaaatttacctgacccaggaaaggcccaggacttcatgaagaagtttacacaggtcctggaggatgacgagaagatccgcaagcagctggaggtactggttagcccgacgtgttcatgcaagcaggcagaaggatgcgttcgggagataaccaaaaaactgggtaatccaaagcagcccacgaatcccttccttgagatgatcaaatttctcctggagaggatcgctccagtgcacatcgacacagagtctattagcgcactgataaagcaggtgaacaagtccatagatggaactgccgacgatgaagatgagggcgttcctacagaccaagccatccgtgcaggcttggaactcctgaaggtactctcgttcacgcatcctataagctttcactctgccgagacctttgagtccctgcttgcatgcctcaagatggatgatgaaaaagtcgcagaagcagctctgcaaatcttcaaaaacacagggagtaaaattgaagaagacttcccacacatccgttcagccctcctccccgtcctacaccataaaagcaagaagggcccccccaggcaggctaagtacgccattcactgcatacatgctattttctcctccaaggaaacccagtttgcacagatctttgaaccattacacaaaagcctcgacccatctaacctggaacatctcattacccctcttgtcacaatcggccacattgcccttctggctcccgatcagttcgctgcacccttgaagagtttggtggctacattcatcgtgaaggatctcctcatgaatgatcgccttccagggaagaaaaccacgaagctctgggtgcctgatgaagaggtgtcacccgaaacgatggtcaagatacaagcgatcaagatgatggtacgctggcttctgggtatgaagaacaaccacagcaagtccggaactagtacgctccgactacttaccaccatactgcatagcgatggggacctgactgagcagggcaagataagcaaacctgacatgtcccggcttaggctggcggcgggaagcgccatcgttaagctcgcacaggagccttgctaccacgagattattaccctggagcaatatcagttatgtgctctggcaattaacgacgaatgttaccaggtccgccaggtgtttgcccaaaagctgcataaagggttgagccggcttagattaccactcgagtacatggcgatctgcgccctgtgtgctaaggacccagtcaaagaaaggagggcccacgctcgccagtgcctggtgaaaaacattaatgttcgccgtgagtatttgaagcaacatgccgcagtgtccgagaagctgctgtcgctgctaccagagtacgttgtcccctacacaattcatcttttagcacacgatccggactatgtgaaagtacaggacatagaacagttgaaagatgtgaaggagtgcctctggttcgtgctggaaatcctgatggccaaaaacgaaaacaactcccacgccttcattagaaaaatggtggagaatatcaaacagacaaaggacgcacagggccctgatgacgcgaagatgaacgaaaagctttatactgtgtgtgacgtggcgatgaacataatcatgtctaagtctacgacctatagcctagaaagtcctaaggatccggttttgccagcacggtttttcacacagcctgacaaaaatttttctaataccaagaactatctccccccagagatgaaatccttctttactccaggcaagcccaagaccactaatgtcctcggggctgtgaacaagcctctgagcagcgccggcaaacaaagccagacaaaaagctcccgcatggagaccgtgagcaacgcctctagcagcagcaacccctctagtccaggccggattaagggaagactggatagcagcgaaatggaccattctgagaacgaagattacaccatgtcatcccctctgcctggcaaaaaaagcgataagagggacgattcagacttggtccgcagcgagcttgagaagccacgcgggagaaaaaagactccagtcacggagcaggaggagaaactgggtatggacgatctgaccaagttagtccaggagcagaaacccaaggggagtcaaaggtcaaggaaacgcggacacaccgcaagcgagtccgatgaacagcaatggcctgaagagaagcgcctgaaagaggacattctggaaaatgaagatgagcagaatagtctccctcttcaccaaaaggacgcatctgaccgaaggaccacgatgcagatcgtgaagtag

SEQ ID NO: 183902 - DNA, 4344 bp, Artificial Sequence
  derived and/or modified sequence
atggcccattccaagacgagaacgaatgacggcaagattacttaccctcccggagtcaaagaaatttccgataaaatcagcaaggaggaaatggtgagaagattaaaaatggtggtaaagactttcatggacatggatcaggacagcgaggaggagaaagagctctacttgaacctggccctccacttggcgagcgattttttcctgaagcaccctgataaagacgttcgtctgttggtggcatgttgcctggcagacattttcagaatatatgccccagaagccccttatacatcccctgataaattaaaggatatatttatgtttatcacccggcagctgaaaggattggaagatacaaagagcccccagtttaaccggtatttctacctccttgaaaacatcgcatgggtcaagagctataacatttgcttcgagcttgaggactccaacgagatattcactcagctgtacagaaccctgttcagtgtaattaacaatggccacaatcagaaggtgcatatgcacatggttgacctgatgtcctccatcatctgtgaaggggatacagtcagtcaggagctgctcgatacagtgctcgtaaatctggtacccgcacacaagaacctgaacaagcaggcctacgatctcgccaaagccctccttaaacggaccgcacaggcgatcgagccctacatcactaacttcttcaaccaagtgctaatgctcggcaagacctccatcagcgatctgtcagagcacgttttcgacctcattctcgagctttacaatattgattcccaccttcttctcagcgtgctgccccaattggagttcaaactaaagtccaatgataatgaagagcgcctacaggtggtaaagttattggcgaaaatgttcggcgctaaggactccgagcttgcttcccaaaacaagcccctctggcaatgctacctgggacggttcaatgacatccacgtaccaattcgtctggaatgtgtgaaattcgcctcccactgcctcatgaatcaccctgatcttgcaaaggatttgacggagtatctaaaggtgcggagtcatgaccccgaggaggccatcagacacgacgtgattgtgtcaatagtcaccgccgcaaagaaggacattctgctggtcaacgatcatttacttaactttgttagggagaggactctggataaaaggtggcgggttcgcaaggaagctatgatgggcttggcccagatctataaaaagtatgccctccaatcagcagcgggaaaggatgcagctaaacaaatcgcgtggatcaaggataagctgctccacatctactaccagaactccattgacgaccggcttcttgttgaaaggatctttgctcagtatatggtgccccataatctcgaaaccacagagcgaatgaagtgtctttattatctgtatgcaacgttagatctgaacgccgtcaaggccctcaacgagatgtggaagtgccagaatctgctgaggcatcaggtcaaagacctactagatcttatcaagcagccaaaaaccgacgcttcagtgaaagccatttttagcaaggtcatggtcatcacccgcaatctccctgaccccggaaaagcccaagactttatgaaaaaatttacgcaggtactagaagacgacgaaaagatcaggaaacaactggaggtacttgtgagcccaacatgttcctgcaagcaggcggaaggctgtgttcgcgagattacgaaaaagctgggaaacccgaaacagcccaccaatccgttcctggagatgattaaattcctgctggagcggattgctccagtgcatattgacacggagtctattagtgctctaattaaacaagtgaataagtccattgacgggaccgccgatgatgaagacgagggtgtaccaaccgaccaagcgattcgggctgggctagaactgcttaaagtattgtcttttacccatcctattagttttcattccgcagagacttttgagtctctcttggcatgccttaaaatggacgatgagaaagtcgccgaagctgccctccagatctttaaaaatacaggtagcaaaattgaggaagacttcccacacatccggtctgcattacttcccgtgttgcatcacaaaagcaaaaaaggaccccctcggcaggccaagtacgctattcattgcatccacgccattttcagctcaaaggaaacccaatttgcacagatcttcgagccactccacaagagtctcgaccccagtaacctggagcatttaatcacccctctggttacaatcggccatattgcacttctagctccagaccagtttgccgcaccactgaagtccctagtcgccactttcatcgtgaaggacttgcttatgaacgatcgactgcctggcaagaagacgaccaagctgtgggtgccagacgaggaagtctcccccgagacaatggtcaaaattcaggccataaaaatgatggtccggtggctgctcggcatgaagaacaatcacagtaagtcgggaacctccacactgcgactgttgacgacaatcctccattccgatggcgatctgacggagcaaggtaaaatttcgaagcccgacatgtcgcgcctccgactggcggctgggtcagctatcgtgaaactggcacaggaaccctgctaccacgaaataatcaccctcgagcagtaccaactttgtgccttagcaatcaacgatgaatgttaccaagtgaggcaagtttttgcccaaaagctccacaagggtttaagcagacttcggttacccctggaatacatggcaatctgtgccctgtgtgcaaaagatcctgtgaaggagaggcgagcacacgccagacagtgcctggttaagaatatcaacgtgcggcgtgagtatctgaagcaacacgcagccgtctctgagaagctgcttagtctactccccgagtatgttgtgccatatactattcatctgctggctcatgacccagactacgtcaaggtacaggacatcgaacagctcaaggacgtaaaggaatgcctttggtttgtccttgagatactgatggcaaagaatgaaaacaactctcacgccttcattcggaagatggtagaaaatattaagcaaacaaaggacgcccaggggccagatgatgctaaaatgaatgagaagttatatacagtgtgcgacgtcgccatgaatattatcatgtccaaatcaacaacttattcccttgagtctcccaaggatcctgtgttgccagccagatttttcactcagccagacaagaattttagcaacactaagaactacctgcctccggagatgaagagcttcttcactccaggcaagcctaaaacgaccaacgtgcttggcgcagttaataagccattgtcctctgcgggaaagcagtctcaaacaaaaagctcccgcatggaaactgtgagcaatgccagcagctcttcaaacccttcaagccccggaagaattaagggcagattggattcctccgagatggatcactccgagaacgaagattacaccatgagcagtcccctgccaggtaaaaaaagcgacaaaagggacgattccgatttggtgaggagtgaactggagaagcccagggggcgtaagaagacccccgttacggaacaggaggaaaaactgggtatggacgacttgacaaagctcgttcaagagcagaagccaaaagggagccagcgttcaaggaaaagaggacacaccgcgtccgagtcagacgagcaacagtggccagaagaaaaaaggctgaaggaggacatacttgaaaacgaagacgagcagaattctcccccaaagaagggcaagcggggtcggcctcctaagcctctcggaggcggaacacccaaagaagaacctacaatgaagactagcaaaaagggatccaaaaaaaagagtggaccccctgctcccgaagaggaggaggaggaggagcgccagtctggcaataccgagcagaaaagcaagtctaagcagcaccgagtatctagaagggcccagcagagggccgagtctccggagagttctgctattgagtccacacaatccaccccacagaaaggcagaggccgtccctctaagacgccctcccctagtcagccgaagaaaaacgtgagggtgggtcggtctaagcaggctgccacaaaggaaaacgatagctcagaagaagtcgatgtgtttcagggatcgagtccagtggacgacatacctcaggaagaaacagaggaagaggaggtctctaccgtgaacgtaagacgtcggagcgctaaacgcgagcggcgatag

SEQ ID NO: 183903 - DNA, 3909 bp, Artificial Sequence
  derived and/or modified sequence
atggcccacagtaaaaccagaacgaacgacggcaaaattacttatcctccaggagtcaaggaaatttccgacaaaattagcaaggaagagatggtgaggcgactgaaaatggtcgtgaaaacctttatggatatggatcaggatagtgaagaggagaaggaactctacttgaacctcgcactgcaccttgcttccgatttcttcctgaagcatcccgataaagacgtgagattgctggtagcttgctgtttagccgatatatttagaatctacgccccagaggcaccctatacatcgcccgacaagctgaaagacatttttatgttcatcactcggcagctcaaaggtcttgaggataccaagtccccacagtttaatcgctacttctatctgctcgagaacatcgcctgggtcaaatcttataacatatgctttgaactggaagattctaatgagatttttacgcagttgtaccggactctgttttcagtcattaataatgggcacaaccagaaggtacatatgcacatggttgacctgatgtctagcatcatttgtgaaggagacaccgtttctcaggagctcctggacacagtcttggttaacctggtgcctgcccacaagaacctgaacaagcaggcctacgacctcgctaaagcccttctgaaacgtaccgcccaggccatagagccttatatcacgaatttctttaatcaggtgctgatgttggggaaaaccagcatctctgatctgtcagaacacgttttcgacctgatcctggagctctataacatcgacagtcatttgttactatctgtcctgcctcaactggaatttaaattgaagtccaatgataatgaagaacggcttcaggtggtgaaactgctcgcaaaaatgttcggagccaaggactctgaactcgcctcacagaacaaaccactgtggcagtgctacctgggccgatttaacgacatccatgttcccattcgactcgagtgcgttaagttcgcgtcgcattgtctgatgaatcaccctgacctcgctaaagacctgactgagtacttgaaggtcaggagccacgatcccgaggaggccataaggcacgacgtgattgtgtcgattgtgacagcggcaaagaaggatatccttctggtgaatgatcacttgctgaattttgtgagggagcgcaccttggacaagagatggcgggtgcgaaaggaggcaatgatgggcttagcacagatatacaagaagtacgctctgcagtccgcagccggaaaagacgccgctaagcagattgcatggatcaaagataaacttctacatatctactatcagaacagcatcgatgaccgactgctggtggagcgaatctttgcacaatatatggtgccccataacctggagactacggaaagaatgaagtgtctgtattacctgtacgccactctggatctgaatgccgttaaagcccttaatgaaatgtggaaatgtcagaatctcctccgtcaccaggtgaaggatctcctcgatttaatcaagcagcccaagacagatgcctctgtaaaggctatcttcagcaaagtgatggtcatcactcgtaacctgcccgatcctggtaaggcacaggatttcatgaaaaaatttacccaggtccttgaggacgatgagaagatcaggaaacaactcgaagtcctagtgtcccctacatgcagttgcaagcaagccgaagggtgcgtcagagagattaccaaaaagctgggaaaccccaaacagcccactaacccattcctcgagatgatcaagttcctgctcgagcgcatagcgccagtgcatatcgataccgaatcaatcagcgccctgattaagcaggtcaataagagcatcgacggaactgccgatgacgaagacgaaggcgtcccaaccgatcaggctattcgcgctggattagaactactgaaagtgctctccttcacccatcctatctcttttcactccgccgagacgtttgagtcactgttagcctgcctgaagatggatgatgaaaaggtggccgaagccgctctgcaaatctttaagaacactggttccaagattgaggaagattttccccatatccgatcagccctgctgccagtgctgcatcacaagagcaagaaaggcccacctagacaggctaaatacgctatccactgtatccacgctattttctcgtctaaagaaacccagtttgcacagattttcgagccactgcacaaaagtcttgatccatccaacctcgagcacctcattacgccactcgttaccatcggtcatatagccctcctggctccagatcaatttgctgctccccttaaaagtttggtagctacctttatcgtgaaggatctgttaatgaatgataggctccctgggaaaaaaactaccaagctttgggtacccgatgaggaggttagcccagaaactatggtcaaaattcaggcaattaaaatgatggttcgctggcttctgggtatgaaaaacaaccacagcaaatcgggcacctcaaccctgaggctcctgacaacgatccttcatagcgacggggatctgacagaacaggggaagatctctaaacctgatatgagccgcctaaggttggcagcgggttccgcgatcgtaaagctggcccaggaaccttgttaccacgagattatcaccctcgagcagtatcagctctgcgcactggcgatcaacgatgagtgttatcaggtccggcaagtattcgcccagaagctccataagggactctctcgcctacgcctgcctctggagtacatggcaatttgcgccctatgtgccaaagatccagtgaaagagcgacgcgctcatgccagacagtgtttagtcaagaatattaacgtgcgcagagaatatctcaaacagcatgctgccgtgagtgaaaaattactgtccctgctgcctgagtatgtggtcccctacaccatccatcttctggcacacgacccagactacgttaaggtgcaagacatagaacagttaaaggacgttaaggaatgcctgtggtttgttctggagatcctgatggctaagaatgaaaataattctcacgcctttattagaaaaatggtggaaaacataaaacagaccaaggatgcccagggccctgatgatgcaaagatgaacgagaaactgtatacggtctgcgacgttgcgatgaatattattatgagcaagtccacaacgtactcccttgaatcgccaaaagaccctgttctcccggctcgcttctttactcagccagacaaaaacttttccaatacaaagaattacctcccccctgagatgaagagtttcttcacgcctggcaagcccaaaaccaccaacgtattaggggctgtcaataaacccctttcctcggctggcaaacagagccagacaaagtcttctcgtatggaaaccgtttccaatgcctctagctctagcaacccaagttctcccggacggatcaagggtcgccttgacagctccgagatggaccattcggagaacgaagattacactatgtcttctcctctacctgggaagaagtctgataagagggatgattccgatctggtaaggtccgagctagaaaagccaaggggccgaaagaagacacccgtgacagaacaagaggagaagctagggatggacgatctgaccaagctcgttcaggaacagaaacccaaggggtcacagcgttccaggaagagggggcataccgccagtgagagtgatgagcagcaatggccggaggaaaagaggttaaaagaggacattctggagaatgaggacgagcaaaactccttacctctacaccagaaagacgccagcgatcgcaggacgaccatgcaaatcgtcaaatag

SEQ ID NO: 183904 - DNA, 4344 bp, Artificial Sequence
  derived and/or modified sequence
atggcccacagcaagaccagaaccaacgacggcaagatcacctacccccccggcgtgaaggagatcagcgacaagatcagcaaggaggagatggtgagaagactgaagatggtggtgaagaccttcatggacatggaccaggacagcgaggaggagaaggagctgtacctgaacctggccctgcacctggccagcgacttcttcctgaagcaccccgacaaggacgtgagactgctggtggcctgctgcctggccgacatcttcagaatctacgcccccgaggccccctacaccagccccgacaagctgaaggacatcttcatgttcatcaccagacagctgaagggcctggaggacaccaagagcccccagttcaacagatacttctacctgctggagaacatcgcctgggtgaagagctacaacatctgcttcgagctggaggacagcaacgagatcttcacccagctgtacagaaccctgttcagcgtgatcaacaacggccacaaccagaaggtgcacatgcacatggtggacctgatgagcagcatcatctgcgagggcgacaccgtgagccaggagctgctggacaccgtgctggtgaacctggtgcccgcccacaagaacctgaacaagcaggcctacgacctggccaaggccctgctgaagagaaccgcccaggccatcgagccctacatcaccaacttcttcaaccaggtgctgatgctgggcaagaccagcatcagcgacctgagcgagcacgtgttcgacctgatcctggagctgtacaacatcgacagccacctgctgctgagcgtgctgccccagctggagttcaagctgaagagcaacgacaacgaggagagactgcaggtggtgaagctgctggccaagatgttcggcgccaaggacagcgagctggccagccagaacaagcccctgtggcagtgctacctgggcagattcaacgacatccacgtgcccatcagactggagtgcgtgaagttcgccagccactgcctgatgaaccaccccgacctggccaaggacctgaccgagtacctgaaggtgagaagccacgaccccgaggaggccatcagacacgacgtgatcgtgagcatcgtgaccgccgccaagaaggacatcctgctggtgaacgaccacctgctgaacttcgtgagagagagaaccctggacaagagatggagagtgagaaaggaggccatgatgggcctggcccagatctacaagaagtacgccctgcagagcgccgccggcaaggacgccgccaagcagatcgcctggatcaaggacaagctgctgcacatctactaccagaacagcatcgacgacagactgctggtggagagaatcttcgcccagtacatggtgccccacaacctggagaccaccgagagaatgaagtgcctgtactacctgtacgccaccctggacctgaacgccgtgaaggccctgaacgagatgtggaagtgccagaacctgctgagacaccaggtgaaggacctgctggacctgatcaagcagcccaagaccgacgccagcgtgaaggccatcttcagcaaggtgatggtgatcaccagaaacctgcccgaccccggcaaggcccaggacttcatgaagaagttcacccaggtgctggaggacgacgagaagatcagaaagcagctggaggtgctggtgagccccacctgcagctgcaagcaggccgagggctgcgtgagagagatcaccaagaagctgggcaaccccaagcagcccaccaaccccttcctggagatgatcaagttcctgctggagagaatcgcccccgtgcacatcgacaccgagagcatcagcgccctgatcaagcaggtgaacaagagcatcgacggcaccgccgacgacgaggacgagggcgtgcccaccgaccaggccatcagagccggcctggagctgctgaaggtgctgagcttcacccaccccatcagcttccacagcgccgagaccttcgagagcctgctggcctgcctgaagatggacgacgagaaggtggccgaggccgccctgcagatcttcaagaacaccggcagcaagatcgaggaggacttcccccacatcagaagcgccctgctgcccgtgctgcaccacaagagcaagaagggcccccccagacaggccaagtacgccatccactgcatccacgccatcttcagcagcaaggagacccagttcgcccagatcttcgagcccctgcacaagagcctggaccccagcaacctggagcacctgatcacccccctggtgaccatcggccacatcgccctgctggcccccgaccagttcgccgcccccctgaagagcctggtggccaccttcatcgtgaaggacctgctgatgaacgacagactgcccggcaagaagaccaccaagctgtgggtgcccgacgaggaggtgagccccgagaccatggtgaagatccaggccatcaagatgatggtgagatggctgctgggcatgaagaacaaccacagcaagagcggcaccagcaccctgagactgctgaccaccatcctgcacagcgacggcgacctgaccgagcagggcaagatcagcaagcccgacatgagcagactgagactggccgccggcagcgccatcgtgaagctggcccaggagccctgctaccacgagatcatcaccctggagcagtaccagctgtgcgccctggccatcaacgacgagtgctaccaggtgagacaggtgttcgcccagaagctgcacaagggcctgagcagactgagactgcccctggagtacatggccatctgcgccctgtgcgccaaggaccccgtgaaggagagaagagcccacgccagacagtgcctggtgaagaacatcaacgtgagaagagagtacctgaagcagcacgccgccgtgagcgagaagctgctgagcctgctgcccgagtacgtggtgccctacaccatccacctgctggcccacgaccccgactacgtgaaggtgcaggacatcgagcagctgaaggacgtgaaggagtgcctgtggttcgtgctggagatcctgatggccaagaacgagaacaacagccacgccttcatcagaaagatggtggagaacatcaagcagaccaaggacgcccagggccccgacgacgccaagatgaacgagaagctgtacaccgtgtgcgacgtggccatgaacatcatcatgagcaagagcaccacctacagcctggagagccccaaggaccccgtgctgcccgccagattcttcacccagcccgacaagaacttcagcaacaccaagaactacctgccccccgagatgaagagcttcttcacccccggcaagcccaagaccaccaacgtgctgggcgccgtgaacaagcccctgagcagcgccggcaagcagagccagaccaagagcagcagaatggagaccgtgagcaacgccagcagcagcagcaaccccagcagccccggcagaatcaagggcagactggacagcagcgagatggaccacagcgagaacgaggactacaccatgagcagccccctgcccggcaagaagagcgacaagagagacgacagcgacctggtgagaagcgagctggagaagcccagaggcagaaagaagacccccgtgaccgagcaggaggagaagctgggcatggacgacctgaccaagctggtgcaggagcagaagcccaagggcagccagagaagcagaaagagaggccacaccgccagcgagagcgacgagcagcagtggcccgaggagaagagactgaaggaggacatcctggagaacgaggacgagcagaacagcccccccaagaagggcaagagaggcagaccccccaagcccctgggcggcggcacccccaaggaggagcccaccatgaagaccagcaagaagggcagcaagaagaagagcggcccccccgcccccgaggaggaggaggaggaggagagacagagcggcaacaccgagcagaagagcaagagcaagcagcacagagtgagcagaagagcccagcagagagccgagagccccgagagcagcgccatcgagagcacccagagcaccccccagaagggcagaggcagacccagcaagacccccagccccagccagcccaagaagaacgtgagagtgggcagaagcaagcaggccgccaccaaggagaacgacagcagcgaggaggtggacgtgttccagggcagcagccccgtggacgacatcccccaggaggagaccgaggaggaggaggtgagcaccgtgaacgtgagaagaagaagcgccaagagagagagaagatag

SEQ ID NO: 183905 - DNA, 3909 bp, Artificial Sequence
  derived and/or modified sequence
atggcccacagcaagaccagaaccaacgacggcaagatcacctacccccccggcgtgaaggagatcagcgacaagatcagcaaggaggagatggtgagaagactgaagatggtggtgaagaccttcatggacatggaccaggacagcgaggaggagaaggagctgtacctgaacctggccctgcacctggccagcgacttcttcctgaagcaccccgacaaggacgtgagactgctggtggcctgctgcctggccgacatcttcagaatctacgcccccgaggccccctacaccagccccgacaagctgaaggacatcttcatgttcatcaccagacagctgaagggcctggaggacaccaagagcccccagttcaacagatacttctacctgctggagaacatcgcctgggtgaagagctacaacatctgcttcgagctggaggacagcaacgagatcttcacccagctgtacagaaccctgttcagcgtgatcaacaacggccacaaccagaaggtgcacatgcacatggtggacctgatgagcagcatcatctgcgagggcgacaccgtgagccaggagctgctggacaccgtgctggtgaacctggtgcccgcccacaagaacctgaacaagcaggcctacgacctggccaaggccctgctgaagagaaccgcccaggccatcgagccctacatcaccaacttcttcaaccaggtgctgatgctgggcaagaccagcatcagcgacctgagcgagcacgtgttcgacctgatcctggagctgtacaacatcgacagccacctgctgctgagcgtgctgccccagctggagttcaagctgaagagcaacgacaacgaggagagactgcaggtggtgaagctgctggccaagatgttcggcgccaaggacagcgagctggccagccagaacaagcccctgtggcagtgctacctgggcagattcaacgacatccacgtgcccatcagactggagtgcgtgaagttcgccagccactgcctgatgaaccaccccgacctggccaaggacctgaccgagtacctgaaggtgagaagccacgaccccgaggaggccatcagacacgacgtgatcgtgagcatcgtgaccgccgccaagaaggacatcctgctggtgaacgaccacctgctgaacttcgtgagagagagaaccctggacaagagatggagagtgagaaaggaggccatgatgggcctggcccagatctacaagaagtacgccctgcagagcgccgccggcaaggacgccgccaagcagatcgcctggatcaaggacaagctgctgcacatctactaccagaacagcatcgacgacagactgctggtggagagaatcttcgcccagtacatggtgccccacaacctggagaccaccgagagaatgaagtgcctgtactacctgtacgccaccctggacctgaacgccgtgaaggccctgaacgagatgtggaagtgccagaacctgctgagacaccaggtgaaggacctgctggacctgatcaagcagcccaagaccgacgccagcgtgaaggccatcttcagcaaggtgatggtgatcaccagaaacctgcccgaccccggcaaggcccaggacttcatgaagaagttcacccaggtgctggaggacgacgagaagatcagaaagcagctggaggtgctggtgagccccacctgcagctgcaagcaggccgagggctgcgtgagagagatcaccaagaagctgggcaaccccaagcagcccaccaaccccttcctggagatgatcaagttcctgctggagagaatcgcccccgtgcacatcgacaccgagagcatcagcgccctgatcaagcaggtgaacaagagcatcgacggcaccgccgacgacgaggacgagggcgtgcccaccgaccaggccatcagagccggcctggagctgctgaaggtgctgagcttcacccaccccatcagcttccacagcgccgagaccttcgagagcctgctggcctgcctgaagatggacgacgagaaggtggccgaggccgccctgcagatcttcaagaacaccggcagcaagatcgaggaggacttcccccacatcagaagcgccctgctgcccgtgctgcaccacaagagcaagaagggcccccccagacaggccaagtacgccatccactgcatccacgccatcttcagcagcaaggagacccagttcgcccagatcttcgagcccctgcacaagagcctggaccccagcaacctggagcacctgatcacccccctggtgaccatcggccacatcgccctgctggcccccgaccagttcgccgcccccctgaagagcctggtggccaccttcatcgtgaaggacctgctgatgaacgacagactgcccggcaagaagaccaccaagctgtgggtgcccgacgaggaggtgagccccgagaccatggtgaagatccaggccatcaagatgatggtgagatggctgctgggcatgaagaacaaccacagcaagagcggcaccagcaccctgagactgctgaccaccatcctgcacagcgacggcgacctgaccgagcagggcaagatcagcaagcccgacatgagcagactgagactggccgccggcagcgccatcgtgaagctggcccaggagccctgctaccacgagatcatcaccctggagcagtaccagctgtgcgccctggccatcaacgacgagtgctaccaggtgagacaggtgttcgcccagaagctgcacaagggcctgagcagactgagactgcccctggagtacatggccatctgcgccctgtgcgccaaggaccccgtgaaggagagaagagcccacgccagacagtgcctggtgaagaacatcaacgtgagaagagagtacctgaagcagcacgccgccgtgagcgagaagctgctgagcctgctgcccgagtacgtggtgccctacaccatccacctgctggcccacgaccccgactacgtgaaggtgcaggacatcgagcagctgaaggacgtgaaggagtgcctgtggttcgtgctggagatcctgatggccaagaacgagaacaacagccacgccttcatcagaaagatggtggagaacatcaagcagaccaaggacgcccagggccccgacgacgccaagatgaacgagaagctgtacaccgtgtgcgacgtggccatgaacatcatcatgagcaagagcaccacctacagcctggagagccccaaggaccccgtgctgcccgccagattcttcacccagcccgacaagaacttcagcaacaccaagaactacctgccccccgagatgaagagcttcttcacccccggcaagcccaagaccaccaacgtgctgggcgccgtgaacaagcccctgagcagcgccggcaagcagagccagaccaagagcagcagaatggagaccgtgagcaacgccagcagcagcagcaaccccagcagccccggcagaatcaagggcagactggacagcagcgagatggaccacagcgagaacgaggactacaccatgagcagccccctgcccggcaagaagagcgacaagagagacgacagcgacctggtgagaagcgagctggagaagcccagaggcagaaagaagacccccgtgaccgagcaggaggagaagctgggcatggacgacctgaccaagctggtgcaggagcagaagcccaagggcagccagagaagcagaaagagaggccacaccgccagcgagagcgacgagcagcagtggcccgaggagaagagactgaaggaggacatcctggagaacgaggacgagcagaacagcctgcccctgcaccagaaggacgccagcgacagaagaaccaccatgcagatcgtgaagtag

SEQ ID NO: 183906 - protein, 617 aa, Artificial Sequence
  derived and/or modified sequence
IRWTDELWDQFDNLEKHTQWGIDILEKYIKFVKERTEIELSYAKQLRNLSKKYQPKKNSKEEEEYKYTSCKAFISNLNEMNDYAGQHEVISENMASQIIVDLARYVQELKQERKSNFHDGRKAQQHIETCWKQLESSKRRFERDCKEADRAQQYFEKMDADINVTKADVEKARQQAQIRHQMAEDSKADYSSILQKFNHEQHEYYHTHIPNIFQKIQEMEERRIVRMGESMKTYAEVDRQVIPIIGKCLDGIVKAAESIDQKNDSQLVIEAYKSGFEPPGDIEFEDYTQPMKRTVSDNSLSNSRGEGKPDLKFGGKSKGKLWPFIKKNKLMSLLTSPHQPPPPPPASASPSAVPNGPQSPKQQKEPLSHRFNEFMTSKPKIHCFRSLKRGPSFKQGATPEDFSNLPPEQRRKKLQQKVDELNKEIQKEMDQRDAITKMKDVYLKNPQMGDPASLDHKLAEVSQNIEKLRVETQKFEAWLAEVEGRLPARSEQARRQSGLYDSQNPPTVNNCAQDRESPDGSYTEEQSQESEMKVLATDFDDEFDDEEPLPAIGTCKALYTFEGQNEGTISVVEGETLYVIEEDKGDGWTRIRRNEDEEGYVPTSYVEVCLDKNAKDS

SEQ ID NO: 183907 - protein, 617 aa, Artificial Sequence
  derived and/or modified sequence
MSWGTELWDQFDNLEKHTQWGIDILEKYIKFVKERTEIELSYAKQLRNLSKKYQPKKNSKEEEEYKYTSCKAFISNLNEMNDYAGQHEVISENMASQIIVDLARYVQELKQERKSNFHDGRKAQQHIETCWKQLESSKRRFERDCKEADRAQQYFEKMDADINVTKADVEKARQQAQIRHQMAEDSKADYSSILQKFNHEQHEYYHTHIPNIFQKIQEMEERRIVRMGESMKTYAEVDRQVIPIIGKCLDGIVKAAESIDQKNDSQLVIEAYKSGFEPPGDIEFEDYTQPMKRTVSDNSLSNSRGEGKPDLKFGGKSKGKLWPFIKKNKLMSLLTSPHQPPPPPPASASPSAVPNGPQSPKQQKEPLSHRFNEFMTSKPKIHCFRSLKRGHSLLKGATPEDFSNLPPEQRRKKLQQKVDELNKEIQKEMDQRDAITKMKDVYLKNPQMGDPASLDHKLAEVSQNIEKLRVETQKFEAWLAEVEGRLPARSEQARRQSGLYDSQNPPTVNNCAQDRESPDGSYTEEQSQESEMKVLATDFDDEFDDEEPLPAIGTCKALYTFEGQNEGTISVVEGETLYVIEEDKGDGWTRIRRNEDEEGYVPTSYVEVCLDKNAKDS

SEQ ID NO: 183908 - protein, 617 aa, Artificial Sequence
  derived and/or modified sequence
MSWGTELWDQFDNLEKHTQWGIDILEKYIKFVKERTEIELSYAKQLRNLSKKYQPKKNSKEEEEYKYTSCKAFISNLNEMNDYAGQHEVISENMASQIIVDLARYVQELKQERKSNFHDGRKAQQHIETCWKQLESSKRRFERDCKEADRAQQYFEKMDADINVTKADVEKARQQAQIRHQMAEDSKADYSSILQKFNHEQHEYYHTHIPNIFQKIQEMEERRIVRMGESMKTYAEVDRQVIPIIGKCLDGIVKAAESIDQKNDSQLVIEAYKSGFEPPGDIEFEDYTQPMKRTVSDNSLSNSRGEGKPDLKFGGKSKGKLWPFIKKNKLMSLLTSPHQPPPPPPASASPSAVPNGPQSPKQQKEPLSHRFNEFMTSKPKIHCFRSLKRGLSLKLGATPEDFSNLPPEQRRKKLQQKVDELNKEIQKEMDQRDAITKMKDVYLKNPQMGDPASLDHKLAEVSQNIEKLRVETQKFEAWLAEVEGRLPARSEQARRQSGLYDSQNPPTVNNCAQDRESPDGSYTEEQSQESEMKVLATDFDDEFDDEEPLPAIGTCKALYTFEGQNEGTISVVEGETLYVIEEDKGDGWTRIRRNEDEEGYVPTSYVEVCLDKNAKDS

SEQ ID NO: 183909 - DNA, 5206 bp, Artificial Sequence
  derived and/or modified sequence
atcagatggacagatgaactttgggatcagtttgacaacttagaaaaacacacacagtggggaattgatattcttgagaaatatatcaagtttgtgaaagaaaggacagagattgaactcagctatgcaaagcaactcaggaatctttcaaagaagtaccaacctaaaaagaactcgaaggaggaagaagaatacaagtatacgtcatgtaaagctttcatttccaacctgaacgaaatgaatgattacgcagggcagcatgaagttatctccgagaacatggcatcacagatcattgtggacttggcacgctatgttcaggaactgaaacaggagaggaaatcaaactttcacgatggccgtaaagcacagcagcacatcgagacttgctggaagcagcttgaatctagtaaaaggcgatttgaacgcgattgcaaagaggcggacagggcgcagcagtactttgagaaaatggacgctgacatcaatgtcacaaaagcggatgttgaaaaggcccgacaacaagctcaaatacgtcaccaaatggcagaggacagcaaagcagattactcatccattctccagaaattcaaccatgagcagcatgaatattaccatactcacatccccaacatcttccagaaaatacaagagatggaggaaaggaggattgtgagaatgggagagtccatgaagacatatgcagaggttgatcggcaggtgatcccaatcattgggaagtgcctggatggaatagtaaaagcagccgaatcaattgatcagaaaaatgattcacagctggtaatagaagcttataaatcagggtttgagcctcctggagacattgaatttgaggattacactcagccaatgaagcgcactgtgtcagataacagcctttcaaattccagaggagaaggcaaaccagacctcaaatttggtggcaaatccaaaggaaagttatggccgttcatcaaaaaaaataagcttatgtcccttttaacatccccccatcagcctccccctccccctcctgcctctgcctcaccctctgctgttcccaacggcccccagtctcccaagcagcaaaaggaacccctctcccatcgcttcaacgagttcatgacctccaaacccaaaatccactgcttcaggagcctaaagcgtgggccttctttcaagcagggtgcaacaccggaggatttcagcaacctcccacctgaacaaagaaggaaaaagctgcagcagaaagtcgatgagttaaataaagaaattcagaaggagatggatcaaagagatgccataacaaaaatgaaagatgtctacctaaagaatcctcagatgggagacccagccagtttggatcacaaattagcagaagtcagccaaaatatagagaaactgcgagtagagacccagaaatttgaggcctggctggctgaggttgaaggccggctcccagcacgcagcgagcaggcgcgccggcagagcggactgtacgacagccagaacccacccacagtcaacaactgcgcccaggaccgtgagagcccagatggcagttacacagaggagcagagtcaggagagtgagatgaaggtgctggccacggattttgacgacgagtttgatgatgaggagcccctccctgccatagggacgtgcaaagctctctacacatttgaaggtcagaatgaaggaacgatttccgtagttgaaggagaaacattgtatgtcatagaggaagacaaaggcgatggctggacccgcattcggagaaatgaagatgaagagggttatgtccccacttcatatgtcgaagtctgtttggacaaaaatgccaaagattcctagaggggagtgcctgcgagcctcgggtgagccttcctggaggagcctccgtctgcttgttcccacaggcctccagcgccctgccctgtggacagcccacccctccgcagccccatccctgcggggcggtctctctctctctccagcatgctccctgcggccctgccctcccgcccagcccgggccacctcgtgggggacaagtctcgccagcgcccacccccatggctcgggtcagtcctcatcgctccccctccccaccccgcgcaggccactgagacggtgggacacacgcccctacctgctccttcctgggccctcagtccacccgggctcgtcctggcagcccttccgcgcttcacacagtgccttttgtgaaagtgtcatcacgggtcccctgaggagacaaggcaggtccagcgcacatcaggcggactgagcactcgatgtcatccgtgtcgatgtcatccgtgtgtcccagactgtctgctgtagaaaacacttcctcctctcctgagtctgtgaagtcctcagtggtcctttttggattctaggcttgcacctcatactaaacattgaccctttcactatgccctcaacctgggagcatctggcaggcaggggggcaggtacacacacacccacaggcacacccaccagtacacacgcgtgcgcatacacacattttggtttgacgccctgttttcagtggcctggggaggtccacactggaagtcgaattccagctcgccttgttgactcgcctgtgtccaccggccatgaggagcccacgcctgtcctccccatcactttcctgtccctgagaactgtagatcatgcgcttgtgagcgaggccctcccctctgcaccagctcattgcaaagcgaacatcctctcctttccaggagccccaggattagcatctgaaaagggtagcacttccttttttgttgttgttttttttttttttttgagacgggagtctcgctctattgttcagactggagtgcagtggcatgatctcggctcactacaacctccacctcctgggttccagcgattctcctgcctcagcctcccaaatagctgtgattacaggcgtgcaccaccacgcccggctaatgtttgtatttttagtagagacagggtttcaccgtgttggtcaggctggtctcaaactcctgacctcaggtgatccgcccgcctcagcctcccaaagtgctgagattacaggtgtgagctaccgcaccccgccgaggttagcactttcatcaccaaagaccccgtgcctctcgtggtcctttgagggatcccgccgccaccacccttgtattttatcacgtgctcttcagggcatgtggaattcgttgagtttgcttttagagccaagtttctttccctgtgtgggtttttgaggaaaacctgaggtcccctaatctgtggccaccaccccccccccccgccacgccttagagcagagcagcccctcctctcatttggtgcagaaacagtcaagaggaaccattggcctagagctcctgtgaccgagagcgccacggaagcctggggatgacgtcgggcagctttattctttgcttggctttggtaactaggtggtcccctcaagcatcctcagttcctcttgctgtttatgaatctaagacaaggaagtcctatagaagccaaagggacagggacggaaaggacaggtcccaagggatggggctgtctttacttgtggaaaccaggaaattgctcctctcagccaaccaaggttgaccacacaccacccttccggagcagctcagtcagccctcggggacgagaaaccacaagcgcagagacgctgaggcccaggcaggtgaagaggaagtggctttgggtttttaaagtaggtgagcgtgagcctctctgactgcttcttccccgggggggactgcaaaccgctcagggttgcggcagagccatggacttccggtccctgcaacgggtgacctaagcgtggtgcacccatcagtcacgcaggaggactgacttgacagacgaaagacaagcccggatgacacagggtgagaagagtcagggccgcacctctgtccctgcaaaccaacaggtgcatggtgagtgtggcagtccccacagctccacaatgggctcccccgccaacggggacgacagggatcttcaggaacttctgacctcaccaagtcaagtggaccactctccactccacgaggatgtgaaacggttctttaaaatgggattttagagcctcgggaatgcatgtgcgtcacatctttcatattatgggtcaggatagattcatttcttgcaacatagtggaaaagatataagctgcagtaatttgctctttgaatgaccgtcacccccagtataggatatgcttgtatccccccgtcactcctccgcctgttttttaaacttttccaccacctgcgtccaaaaagaatgttatagcgagtgctcttaaatgttgaacctgggtgttgcttccgggccagtctgcgtggctccatgaaaagctcactgctgccccagccgggcttcttagaggaggtcagttgtcctatgtatcatcatttactctgggaatcctactgtgaaatcatgtctgtatttttctggagcagttcacatagagtagaatgtggaatttcccgtgaacgtctccttcctcccccgtatctgccgcctgtcacttcgccaccgtgctagaatactgttgtgttgtaagatgactaattttaaaagaacctgccctgaaaagttcttagaaacgcagtgaaagggaggaacttgtcctttacccagtttttcctttgtaggatgggaaagtataaaaaggcacagaaggttgtcatgggctgttccttgggggtttttatcctgctcaccgtggagataagcctgcggcttgtctaaccagcgcagcgcaaaggtctcgatgccttttggtaacatccgtcattgcagaagaaagtttacacgacgtcaaaaagtgacgttcatgctaagtgtttttccagaaatattggtttcatgtttcttattggctctgcctcctgtgcttatatcatccaaaaactttttaaaaaggtccagaattctattttaacctgatgttgagcacctttaaaatgttcgtatgtgtgttgcactaattctaaactttggaggcattttgctgtgtgaggccgatcgccactgtaaaggtcctagagttgcctgtttgtctctggagatggaattaaaccaaataaagagcttccactggaggcttgtattgaccttgtaactatatgttaatctcgtgttaaaataaaatataacttgtg

SEQ ID NO: 183910 - DNA, 5393 bp, Artificial Sequence
  derived and/or modified sequence
gctgtggagcggcggggaggaggagccgccgaggagaccccgggcgaggagctgcgagccggaggaggccgcgcggactccgggctttccgccgtcgcggggatctcggggggcaaagggatcgccggggagggggaccagagagccgcgcccgccgcgcggagcgccccttcgcgtcccctgcaccatgagctggggcaccgagctctgggatcagtttgacaacttagaaaaacacacacagtggggaattgatattcttgagaaatatatcaagtttgtgaaagaaaggacagagattgaactcagctatgcaaagcaactcaggaatctttcaaagaagtaccaacctaaaaagaactcgaaggaggaagaagaatacaagtatacgtcatgtaaagctttcatttccaacctgaacgaaatgaatgattacgcagggcagcatgaagttatctccgagaacatggcatcacagatcattgtggacttggcacgctatgttcaggaactgaaacaggagaggaaatcaaactttcacgatggccgtaaagcacagcagcacatcgagacttgctggaagcagcttgaatctagtaaaaggcgatttgaacgcgattgcaaagaggcggacagggcgcagcagtactttgagaaaatggacgctgacatcaatgtcacaaaagcggatgttgaaaaggcccgacaacaagctcaaatacgtcaccaaatggcagaggacagcaaagcagattactcatccattctccagaaattcaaccatgagcagcatgaatattaccatactcacatccccaacatcttccagaaaatacaagagatggaggaaaggaggattgtgagaatgggagagtccatgaagacatatgcagaggttgatcggcaggtgatcccaatcattgggaagtgcctggatggaatagtaaaagcagccgaatcaattgatcagaaaaatgattcacagctggtaatagaagcttataaatcagggtttgagcctcctggagacattgaatttgaggattacactcagccaatgaagcgcactgtgtcagataacagcctttcaaattccagaggagaaggcaaaccagacctcaaatttggtggcaaatccaaaggaaagttatggccgttcatcaaaaaaaataagcttatgtcccttttaacatccccccatcagcctccccctccccctcctgcctctgcctcaccctctgctgttcccaacggcccccagtctcccaagcagcaaaaggaacccctctcccatcgcttcaacgagttcatgacctccaaacccaaaatccactgcttcaggagcctaaagcgtgggcatagtcttctcaaaggtgcaacaccggaggatttcagcaacctcccacctgaacaaagaaggaaaaagctgcagcagaaagtcgatgagttaaataaagaaattcagaaggagatggatcaaagagatgccataacaaaaatgaaagatgtctacctaaagaatcctcagatgggagacccagccagtttggatcacaaattagcagaagtcagccaaaatatagagaaactgcgagtagagacccagaaatttgaggcctggctggctgaggttgaaggccggctcccagcacgcagcgagcaggcgcgccggcagagcggactgtacgacagccagaacccacccacagtcaacaactgcgcccaggaccgtgagagcccagatggcagttacacagaggagcagagtcaggagagtgagatgaaggtgctggccacggattttgacgacgagtttgatgatgaggagcccctccctgccatagggacgtgcaaagctctctacacatttgaaggtcagaatgaaggaacgatttccgtagttgaaggagaaacattgtatgtcatagaggaagacaaaggcgatggctggacccgcattcggagaaatgaagatgaagagggttatgtccccacttcatatgtcgaagtctgtttggacaaaaatgccaaagattcctagaggggagtgcctgcgagcctcgggtgagccttcctggaggagcctccgtctgcttgttcccacaggcctccagcgccctgccctgtggacagcccacccctccgcagccccatccctgcggggcggtctctctctctctccagcatgctccctgcggccctgccctcccgcccagcccgggccacctcgtgggggacaagtctcgccagcgcccacccccatggctcgggtcagtcctcatcgctccccctccccaccccgcgcaggccactgagacggtgggacacacgcccctacctgctccttcctgggccctcagtccacccgggctcgtcctggcagcccttccgcgcttcacacagtgccttttgtgaaagtgtcatcacgggtcccctgaggagacaaggcaggtccagcgcacatcaggcggactgagcactcgatgtcatccgtgtcgatgtcatccgtgtgtcccagactgtctgctgtagaaaacacttcctcctctcctgagtctgtgaagtcctcagtggtcctttttggattctaggcttgcacctcatactaaacattgaccctttcactatgccctcaacctgggagcatctggcaggcaggggggcaggtacacacacacccacaggcacacccaccagtacacacgcgtgcgcatacacacattttggtttgacgccctgttttcagtggcctggggaggtccacactggaagtcgaattccagctcgccttgttgactcgcctgtgtccaccggccatgaggagcccacgcctgtcctccccatcactttcctgtccctgagaactgtagatcatgcgcttgtgagcgaggccctcccctctgcaccagctcattgcaaagcgaacatcctctcctttccaggagccccaggattagcatctgaaaagggtagcacttccttttttgttgttgttttttttttttttttgagacgggagtctcgctctattgttcagactggagtgcagtggcatgatctcggctcactacaacctccacctcctgggttccagcgattctcctgcctcagcctcccaaatagctgtgattacaggcgtgcaccaccacgcccggctaatgtttgtatttttagtagagacagggtttcaccgtgttggtcaggctggtctcaaactcctgacctcaggtgatccgcccgcctcagcctcccaaagtgctgagattacaggtgtgagctaccgcaccccgccgaggttagcactttcatcaccaaagaccccgtgcctctcgtggtcctttgagggatcccgccgccaccacccttgtattttatcacgtgctcttcagggcatgtggaattcgttgagtttgcttttagagccaagtttctttccctgtgtgggtttttgaggaaaacctgaggtcccctaatctgtggccaccaccccccccccccgccacgccttagagcagagcagcccctcctctcatttggtgcagaaacagtcaagaggaaccattggcctagagctcctgtgaccgagagcgccacggaagcctggggatgacgtcgggcagctttattctttgcttggctttggtaactaggtggtcccctcaagcatcctcagttcctcttgctgtttatgaatctaagacaaggaagtcctatagaagccaaagggacagggacggaaaggacaggtcccaagggatggggctgtctttacttgtggaaaccaggaaattgctcctctcagccaaccaaggttgaccacacaccacccttccggagcagctcagtcagccctcggggacgagaaaccacaagcgcagagacgctgaggcccaggcaggtgaagaggaagtggctttgggtttttaaagtaggtgagcgtgagcctctctgactgcttcttccccgggggggactgcaaaccgctcagggttgcggcagagccatggacttccggtccctgcaacgggtgacctaagcgtggtgcacccatcagtcacgcaggaggactgacttgacagacgaaagacaagcccggatgacacagggtgagaagagtcagggccgcacctctgtccctgcaaaccaacaggtgcatggtgagtgtggcagtccccacagctccacaatgggctcccccgccaacggggacgacagggatcttcaggaacttctgacctcaccaagtcaagtggaccactctccactccacgaggatgtgaaacggttctttaaaatgggattttagagcctcgggaatgcatgtgcgtcacatctttcatattatgggtcaggatagattcatttcttgcaacatagtggaaaagatataagctgcagtaatttgctctttgaatgaccgtcacccccagtataggatatgcttgtatccccccgtcactcctccgcctgttttttaaacttttccaccacctgcgtccaaaaagaatgttatagcgagtgctcttaaatgttgaacctgggtgttgcttccgggccagtctgcgtggctccatgaaaagctcactgctgccccagccgggcttcttagaggaggtcagttgtcctatgtatcatcatttactctgggaatcctactgtgaaatcatgtctgtatttttctggagcagttcacatagagtagaatgtggaatttcccgtgaacgtctccttcctcccccgtatctgccgcctgtcacttcgccaccgtgctagaatactgttgtgttgtaagatgactaattttaaaagaacctgccctgaaaagttcttagaaacgcagtgaaagggaggaacttgtcctttacccagtttttcctttgtaggatgggaaagtataaaaaggcacagaaggttgtcatgggctgttccttgggggtttttatcctgctcaccgtggagataagcctgcggcttgtctaaccagcgcagcgcaaaggtctcgatgccttttggtaacatccgtcattgcagaagaaagtttacacgacgtcaaaaagtgacgttcatgctaagtgtttttccagaaatattggtttcatgtttcttattggctctgcctcctgtgcttatatcatccaaaaactttttaaaaaggtccagaattctattttaacctgatgttgagcacctttaaaatgttcgtatgtgtgttgcactaattctaaactttggaggcattttgctgtgtgaggccgatcgccactgtaaaggtcctagagttgcctgtttgtctctggagatggaattaaaccaaataaagagcttccactggaggcttgtattgaccttgtaactatatgttaatctcgtgttaaaataaaatataacttgtg

SEQ ID NO: 183911 - DNA, 5425 bp, Artificial Sequence
  derived and/or modified sequence
cggccgcggctgctgcttcctcgggccattttgctgtggagcggcggggaggaggagccgccgaggagaccccgggcgaggagctgcgagccggaggaggccgcgcggactccgggctttccgccgtcgcggggatctcggggggcaaagggatcgccggggagggggaccagagagccgcgcccgccgcgcggagcgccccttcgcgtcccctgcaccatgagctggggcaccgagctctgggatcagtttgacaacttagaaaaacacacacagtggggaattgatattcttgagaaatatatcaagtttgtgaaagaaaggacagagattgaactcagctatgcaaagcaactcaggaatctttcaaagaagtaccaacctaaaaagaactcgaaggaggaagaagaatacaagtatacgtcatgtaaagctttcatttccaacctgaacgaaatgaatgattacgcagggcagcatgaagttatctccgagaacatggcatcacagatcattgtggacttggcacgctatgttcaggaactgaaacaggagaggaaatcaaactttcacgatggccgtaaagcacagcagcacatcgagacttgctggaagcagcttgaatctagtaaaaggcgatttgaacgcgattgcaaagaggcggacagggcgcagcagtactttgagaaaatggacgctgacatcaatgtcacaaaagcggatgttgaaaaggcccgacaacaagctcaaatacgtcaccaaatggcagaggacagcaaagcagattactcatccattctccagaaattcaaccatgagcagcatgaatattaccatactcacatccccaacatcttccagaaaatacaagagatggaggaaaggaggattgtgagaatgggagagtccatgaagacatatgcagaggttgatcggcaggtgatcccaatcattgggaagtgcctggatggaatagtaaaagcagccgaatcaattgatcagaaaaatgattcacagctggtaatagaagcttataaatcagggtttgagcctcctggagacattgaatttgaggattacactcagccaatgaagcgcactgtgtcagataacagcctttcaaattccagaggagaaggcaaaccagacctcaaatttggtggcaaatccaaaggaaagttatggccgttcatcaaaaaaaataagcttatgtcccttttaacatccccccatcagcctccccctccccctcctgcctctgcctcaccctctgctgttcccaacggcccccagtctcccaagcagcaaaaggaacccctctcccatcgcttcaacgagttcatgacctccaaacccaaaatccactgcttcaggagcctaaagcgtgggctttctctcaagctgggtgcaacaccggaggatttcagcaacctcccacctgaacaaagaaggaaaaagctgcagcagaaagtcgatgagttaaataaagaaattcagaaggagatggatcaaagagatgccataacaaaaatgaaagatgtctacctaaagaatcctcagatgggagacccagccagtttggatcacaaattagcagaagtcagccaaaatatagagaaactgcgagtagagacccagaaatttgaggcctggctggctgaggttgaaggccggctcccagcacgcagcgagcaggcgcgccggcagagcggactgtacgacagccagaacccacccacagtcaacaactgcgcccaggaccgtgagagcccagatggcagttacacagaggagcagagtcaggagagtgagatgaaggtgctggccacggattttgacgacgagtttgatgatgaggagcccctccctgccatagggacgtgcaaagctctctacacatttgaaggtcagaatgaaggaacgatttccgtagttgaaggagaaacattgtatgtcatagaggaagacaaaggcgatggctggacccgcattcggagaaatgaagatgaagagggttatgtccccacttcatatgtcgaagtctgtttggacaaaaatgccaaagattcctagaggggagtgcctgcgagcctcgggtgagccttcctggaggagcctccgtctgcttgttcccacaggcctccagcgccctgccctgtggacagcccacccctccgcagccccatccctgcggggcggtctctctctctctccagcatgctccctgcggccctgccctcccgcccagcccgggccacctcgtgggggacaagtctcgccagcgcccacccccatggctcgggtcagtcctcatcgctccccctccccaccccgcgcaggccactgagacggtgggacacacgcccctacctgctccttcctgggccctcagtccacccgggctcgtcctggcagcccttccgcgcttcacacagtgccttttgtgaaagtgtcatcacgggtcccctgaggagacaaggcaggtccagcgcacatcaggcggactgagcactcgatgtcatccgtgtcgatgtcatccgtgtgtcccagactgtctgctgtagaaaacacttcctcctctcctgagtctgtgaagtcctcagtggtcctttttggattctaggcttgcacctcatactaaacattgaccctttcactatgccctcaacctgggagcatctggcaggcaggggggcaggtacacacacacccacaggcacacccaccagtacacacgcgtgcgcatacacacattttggtttgacgccctgttttcagtggcctggggaggtccacactggaagtcgaattccagctcgccttgttgactcgcctgtgtccaccggccatgaggagcccacgcctgtcctccccatcactttcctgtccctgagaactgtagatcatgcgcttgtgagcgaggccctcccctctgcaccagctcattgcaaagcgaacatcctctcctttccaggagccccaggattagcatctgaaaagggtagcacttccttttttgttgttgttttttttttttttttgagacgggagtctcgctctattgttcagactggagtgcagtggcatgatctcggctcactacaacctccacctcctgggttccagcgattctcctgcctcagcctcccaaatagctgtgattacaggcgtgcaccaccacgcccggctaatgtttgtatttttagtagagacagggtttcaccgtgttggtcaggctggtctcaaactcctgacctcaggtgatccgcccgcctcagcctcccaaagtgctgagattacaggtgtgagctaccgcaccccgccgaggttagcactttcatcaccaaagaccccgtgcctctcgtggtcctttgagggatcccgccgccaccacccttgtattttatcacgtgctcttcagggcatgtggaattcgttgagtttgcttttagagccaagtttctttccctgtgtgggtttttgaggaaaacctgaggtcccctaatctgtggccaccaccccccccccccgccacgccttagagcagagcagcccctcctctcatttggtgcagaaacagtcaagaggaaccattggcctagagctcctgtgaccgagagcgccacggaagcctggggatgacgtcgggcagctttattctttgcttggctttggtaactaggtggtcccctcaagcatcctcagttcctcttgctgtttatgaatctaagacaaggaagtcctatagaagccaaagggacagggacggaaaggacaggtcccaagggatggggctgtctttacttgtggaaaccaggaaattgctcctctcagccaaccaaggttgaccacacaccacccttccggagcagctcagtcagccctcggggacgagaaaccacaagcgcagagacgctgaggcccaggcaggtgaagaggaagtggctttgggtttttaaagtaggtgagcgtgagcctctctgactgcttcttccccgggggggactgcaaaccgctcagggttgcggcagagccatggacttccggtccctgcaacgggtgacctaagcgtggtgcacccatcagtcacgcaggaggactgacttgacagacgaaagacaagcccggatgacacagggtgagaagagtcagggccgcacctctgtccctgcaaaccaacaggtgcatggtgagtgtggcagtccccacagctccacaatgggctcccccgccaacggggacgacagggatcttcaggaacttctgacctcaccaagtcaagtggaccactctccactccacgaggatgtgaaacggttctttaaaatgggattttagagcctcgggaatgcatgtgcgtcacatctttcatattatgggtcaggatagattcatttcttgcaacatagtggaaaagatataagctgcagtaatttgctctttgaatgaccgtcacccccagtataggatatgcttgtatccccccgtcactcctccgcctgttttttaaacttttccaccacctgcgtccaaaaagaatgttatagcgagtgctcttaaatgttgaacctgggtgttgcttccgggccagtctgcgtggctccatgaaaagctcactgctgccccagccgggcttcttagaggaggtcagttgtcctatgtatcatcatttactctgggaatcctactgtgaaatcatgtctgtatttttctggagcagttcacatagagtagaatgtggaatttcccgtgaacgtctccttcctcccccgtatctgccgcctgtcacttcgccaccgtgctagaatactgttgtgttgtaagatgactaattttaaaagaacctgccctgaaaagttcttagaaacgcagtgaaagggaggaacttgtcctttacccagtttttcctttgtaggatgggaaagtataaaaaggcacagaaggttgtcatgggctgttccttgggggtttttatcctgctcaccgtggagataagcctgcggcttgtctaaccagcgcagcgcaaaggtctcgatgccttttggtaacatccgtcattgcagaagaaagtttacacgacgtcaaaaagtgacgttcatgctaagtgtttttccagaaatattggtttcatgtttcttattggctctgcctcctgtgcttatatcatccaaaaactttttaaaaaggtccagaattctattttaacctgatgttgagcacctttaaaatgttcgtatgtgtgttgcactaattctaaactttggaggcattttgctgtgtgaggccgatcgccactgtaaaggtcctagagttgcctgtttgtctctggagatggaattaaaccaaataaagagcttccactggaggcttgtattgaccttgtaactatatgttaatctcgtgttaaaataaaatataacttgtg

SEQ ID NO: 183912 - DNA, 1854 bp, Artificial Sequence
  derived and/or modified sequence
atccggtggaccgacgagttgtgggaccaattcgataacctcgaaaagcacacgcagtggggcattgacattctggagaagtacatcaaattcgttaaggagcgcaccgaaatcgagctgtcctatgccaagcagttgcggaatctgtccaagaagtatcagcctaagaagaatagcaaggaagaggaggagtataaatatactagctgcaaggcctttatctctaatctgaatgagatgaacgattacgccggtcaacacgaggtgatttctgaaaatatggcatctcagattattgtagatttggcacgatacgttcaggaactgaaacaagagcgcaaatccaattttcacgatggaagaaaggcgcagcaacacatcgagacttgctggaaacagctggagagcagtaagcggcgctttgagagagactgtaaggaggcagaccgtgctcagcaatactttgaaaagatggacgccgatattaatgtgactaaagccgatgttgaaaaggcgcgccaacaggctcaaattagacatcagatggctgaggacagtaaggctgactactcatctatcttacagaaatttaatcatgaacagcatgaatactatcatactcacattccgaacatctttcagaaaatacaagagatggaagagcgccgcatagtgaggatgggggagtccatgaagacatacgctgaggttgaccggcaagtgatcccgattatcggtaaatgtctggatggcatcgtcaaggccgccgagtcaattgaccagaaaaacgatagccagcttgtcatcgaggcctataaatcaggcttcgaaccacccggcgatatcgagttcgaggattacacccaacctatgaaaaggaccgtgagtgacaattctttaagcaatagtcgcggagaggggaagcctgacctgaagttcggagggaaaagcaaaggcaagttgtggccatttattaaaaaaaacaagctaatgagcctgcttacatccccccaccagcccccaccccctcctcccgcctccgccagtccttctgccgtccccaacggtccccagagccctaaacaacagaaggaacccctgagtcacaggttcaatgagtttatgactagtaaacccaaaattcattgtttcaggagtttaaaaagagggccgagctttaagcagggggctacccctgaagacttctcgaacctgccgccagaacagcggagaaagaaactgcagcaaaaggtagacgagttgaataaggagattcaaaaagagatggaccagcgcgacgccatcactaagatgaaagacgtgtatctcaagaacccacagatgggcgaccccgcaagcctggaccataagcttgcagaagtgtcgcagaacattgagaagctgagggtggagacccagaagttcgaggcttggttggctgaagtggaaggacgcctccctgctaggagtgaacaggcccgacgacagtccgggctctacgattcccagaatccccctactgtgaacaactgtgcacaggatcgggaaagcccggacggtagctacaccgaagagcagtctcaggagagcgaaatgaaagtcttagccacagatttcgatgatgagtttgacgatgaggagccactgcctgccattggcacatgtaaggccctctacactttcgaaggccagaacgagggaactattagtgtggtcgagggagaaaccctctacgtcatcgaagaggataaaggcgatggctggacgagaatcagacgcaacgaggatgaagagggctatgtgcctactagttacgtcgaggtgtgtctggataaaaatgccaaagattcctag

SEQ ID NO: 183913 - DNA, 1854 bp, Artificial Sequence
  derived and/or modified sequence
atgagctggggcactgaattgtgggaccagtttgacaatctcgaaaagcacactcagtgggggattgacattctagaaaaatatatcaaattcgtaaaagagcgcactgagatcgaactcagctacgccaaacagctcaggaatctcagtaagaagtatcagccaaagaaaaattctaaggaagaagaagagtacaaatatacgtcttgtaaggccttcatctccaacttgaacgagatgaacgactatgctggacagcacgaggtgatatctgaaaacatggccagtcaaatcatagtggatctggccagatatgttcaggaactcaagcaggagcgcaaaagcaactttcatgacggacggaaggctcagcagcacatcgaaacctgctggaaacaattggagtcctccaagcgccggttcgaacgagattgcaaagaggctgaccgagcccaacagtatttcgaaaagatggacgccgatatcaacgtcacaaaagccgatgttgagaaagcacgccagcaagctcaaattaggcaccagatggccgaggactctaaggccgactattcctcaatactgcagaaattcaaccacgagcagcatgaatattaccatacccacatccctaacatcttccagaaaatccaggaaatggaggaaagaagaatcgttcgtatgggagaatctatgaagacttacgctgaagtggataggcaggtaatcccaattatcggaaagtgcctcgatggaatcgtgaaagccgccgaatcgatcgatcagaagaacgatagtcagctggtaatcgaggcctataaatcgggttttgagcctcccggggatattgaatttgaggactacacccagcccatgaagaggactgtgtctgataacagcctcagcaattcacgaggcgaagggaagcctgatctgaaatttggcggaaaatcaaagggcaagctttggccattcatcaaaaaaaacaaattgatgtccctcctgacctcacctcaccaacccccaccccctccacccgctagcgcctctcctagcgccgtaccgaacggtccacaatcccctaaacagcaaaaggaaccacttagtcatcgatttaatgagttcatgacctcaaagcctaagatccactgtttccgctctctgaaacggggccactcattgctgaagggcgcgacgccagaggacttttcaaacttaccaccagaacaaagacgaaagaaattacagcagaaagtggacgagctgaacaaggaaatccagaaagaaatggaccaacgggacgccattacaaagatgaaagacgtttatctcaagaacccccaaatgggcgacccagctagtctcgaccacaagctagccgaagtttcccagaacatagagaaattgagagtcgaaactcaaaagttcgaggcctggttagccgaagtggaaggtcgactgccagcccggtctgagcaggccagacgccagtccggactgtatgactcccagaatccaccgacggtcaataactgcgcccaggatagggagagtcctgatggctcatacactgaggaacagtcccaagagtccgaaatgaaggtgctggcgacagatttcgacgacgagtttgatgacgaggagcctctgccggctattggcacttgcaaagcgctttacaccttcgagggccagaacgaaggaacgattagcgttgtagaaggcgagactctgtatgtaatcgaggaggacaagggcgatggctggacaaggatccgacggaatgaagacgaggagggctatgtacctactagctacgtggaagtctgtttggataagaatgcgaaggattcgtag

SEQ ID NO: 183914 - DNA, 1854 bp, Artificial Sequence
  derived and/or modified sequence
atgtcctggggtacagagctgtgggaccagtttgataacctagagaagcatacccagtggggtatcgatatactagaaaagtacatcaaatttgtgaaggagcgaacggagatcgaactctcatacgctaagcagctgaggaatctgtcgaagaagtatcagccgaaaaaaaacagcaaagaggaagaggaatacaaatacacgagctgtaaagcattcatcagtaatctgaatgaaatgaacgactatgctggccagcacgaagttatttccgaaaacatggcctcgcaaataattgtcgatctagctcggtacgtccaggagctgaagcaagagcgcaaaagcaacttccatgacggccggaaggcgcaacagcatatagagacctgctggaaacagctggaatccagtaaaaggcggttcgaaagggactgtaaagaagcagatagagcccagcaatacttcgagaagatggatgcagacattaatgtgacgaaggccgatgtggagaaggcacggcagcaggctcagatcaggcaccagatggcagaggacagtaaagcggactacagttctatattgcaaaagtttaaccacgaacagcacgagtattaccatactcacatccctaatatctttcagaagatacaggaaatggaagagcgtcgtatagtccgaatgggtgagtccatgaagacttacgccgaagtggacaggcaagttatacccatcatcggaaaatgcctcgatggaattgttaaggctgccgaatcgatcgaccagaagaatgactctcagctggtcattgaagcctataagtcggggtttgaacccccaggcgacattgagttcgaggactatactcagccaatgaaacggaccgtgtcagacaattccctgagcaacagccgcggggagggcaagcctgacctgaagttcggtggaaagtctaaaggaaaattgtggcccttcattaagaaaaataaactcatgtcacttcttacaagtcctcaccagcccccacctcccccgcctgcatccgccagcccttccgctgtgccaaacggccctcagtctcctaagcagcagaaggaacccctgagccaccgctttaacgaatttatgacaagcaagcccaagatacactgtttccgcagtctgaaacgtggactgtctttgaagcttggagccaccccagaagacttctcgaacctcccacctgagcaacggcgtaagaagctgcagcagaaagtggatgaattaaataaggagattcagaaggagatggatcagagagacgctatcactaagatgaaggatgtctacttgaaaaacccacagatgggtgacccagcctctctagatcacaaactcgccgaggtttcccagaatatcgagaagttacgcgtagaaacccagaagttcgaggcctggctggctgaggtggagggcaggctgcctgctagaagcgagcaggcccggagacagtctggactctacgactcccaaaatcctcccaccgtcaataattgcgcccaggatcgggagtcgccagatgggagctatacagaggagcagtcgcaagaaagtgagatgaaggttctggctacagactttgacgatgagtttgatgacgaggagccgctgcccgccatcggcacgtgtaaagccctatatacatttgaaggccagaacgagggaacaatctccgtcgtggagggcgagacgctgtacgtcatcgaggaggataaaggtgacggctggactaggattcggaggaatgaggacgaggaaggctacgttcctacttcgtacgtcgaggtatgtctggacaagaacgccaaggattcctag

SEQ ID NO: 183915 - DNA, 1854 bp, Artificial Sequence
  derived and/or modified sequence
atccgctggacagatgagctgtgggaccagtttgacaacctggagaagcacacccagtggggcatcgacatcctggagaagtacatcaagtttgtgaaggagaggacagaaattgagctgtcctatgccaagcagctgaggaacctgagcaagaagtaccagcccaagaagaacagcaaggaggaggaggagtacaagtacaccagctgcaaggccttcatcagcaacctgaatgagatgaatgactatgccggccagcatgaagtcatcagcgagaacatggccagccagatcatcgtggacctggcccgctacgtgcaggagctgaagcaggagaggaagagcaacttccatgatggcaggaaggcccagcagcacatcgagacctgctggaagcagctggagagcagcaagagaagatttgagcgggactgcaaggaggccgaccgggcccagcagtactttgagaagatggatgctgacatcaacgtgaccaaggcagatgtggagaaggcccggcagcaggcccagatccgccaccagatggccgaggacagcaaggctgactacagcagcatcctgcagaagttcaaccacgagcagcacgagtactaccacacccacatccccaacatcttccagaagatccaggagatggaggagcggcgcatcgtgaggatgggagagagcatgaagacctatgcagaggtggaccggcaggtgatccccatcatcggcaagtgcctggatggcatcgtgaaggctgctgagagcattgaccagaagaatgacagccagctggtgattgaggcctacaagagcggctttgagcccccaggggacatcgagtttgaggactacacccagcccatgaagaggacagtgtctgacaacagcctgagcaacagcagaggagagggcaagccagacctgaagtttggaggcaagagcaagggcaagctgtggcccttcatcaagaagaacaagctgatgagcctgctgaccagcccccaccagcccccacctcctcctccagccagcgccagccccagcgctgtgcccaacggcccccagagccccaagcagcagaaggagcccctgagccaccgcttcaatgagttcatgaccagcaagcccaagatccactgcttccgcagcctgaagaggggccccagcttcaagcagggcgccaccccagaggacttcagcaacctgcccccagagcagaggaggaagaagctgcagcagaaggtggatgagctgaacaaggagatccagaaggagatggaccagagagatgccatcaccaagatgaaggatgtgtacctgaagaacccccagatgggagaccctgccagcctggaccacaagctggccgaggtgtcccagaacatcgagaagctgcgggtggagacccagaagtttgaggcctggctggccgaggtggagggccgcctgcctgcccggtctgagcaggcccggcggcagagcggcctgtatgacagccagaaccccccaacagtgaacaactgtgcccaggaccgggagagcccagatggcagctacacagaggagcagagccaggagagcgagatgaaggtgctggccacagactttgatgatgaatttgatgatgaggagcccctgcctgccatcggcacctgcaaggccctgtacacctttgagggccagaatgaaggcaccatctctgtggtggagggggagaccctgtatgtgattgaggaggacaagggagatggctggacccgcatcagaagaaatgaagatgaggagggctacgtgcccaccagctatgtggaggtgtgcctggacaagaatgccaaggacagctag

SEQ ID NO: 183916 - DNA, 1854 bp, Artificial Sequence
  derived and/or modified sequence
atgtcctggggcacagagctgtgggaccagtttgacaacctggagaagcacacccagtggggcatcgacatcctggagaagtacatcaagtttgtgaaggagaggacagaaattgagctgtcctatgccaagcagctgaggaacctgagcaagaagtaccagcccaagaagaacagcaaggaggaggaggagtacaagtacaccagctgcaaggccttcatcagcaacctgaatgagatgaatgactatgccggccagcatgaagtcatcagcgagaacatggccagccagatcatcgtggacctggcccgctacgtgcaggagctgaagcaggagaggaagagcaacttccatgatggcaggaaggcccagcagcacatcgagacctgctggaagcagctggagagcagcaagagaagatttgagcgggactgcaaggaggccgaccgggcccagcagtactttgagaagatggatgctgacatcaacgtgaccaaggcagatgtggagaaggcccggcagcaggcccagatccgccaccagatggccgaggacagcaaggctgactacagcagcatcctgcagaagttcaaccacgagcagcacgagtactaccacacccacatccccaacatcttccagaagatccaggagatggaggagcggcgcatcgtgaggatgggagagagcatgaagacctatgcagaggtggaccggcaggtgatccccatcatcggcaagtgcctggatggcatcgtgaaggctgctgagagcattgaccagaagaatgacagccagctggtgattgaggcctacaagagcggctttgagcccccaggggacatcgagtttgaggactacacccagcccatgaagaggacagtgtctgacaacagcctgagcaacagcagaggagagggcaagccagacctgaagtttggaggcaagagcaagggcaagctgtggcccttcatcaagaagaacaagctgatgagcctgctgaccagcccccaccagcccccacctcctcctccagccagcgccagccccagcgctgtgcccaacggcccccagagccccaagcagcagaaggagcccctgagccaccgcttcaatgagttcatgaccagcaagcccaagatccactgcttccgcagcctgaagaggggccacagcctgctgaagggggccaccccagaggacttcagcaacctgcccccagagcagaggaggaagaagctgcagcagaaggtggatgagctgaacaaggagatccagaaggagatggaccagagagatgccatcaccaagatgaaggatgtgtacctgaagaacccccagatgggagaccctgccagcctggaccacaagctggccgaggtgtcccagaacatcgagaagctgcgggtggagacccagaagtttgaggcctggctggccgaggtggagggccgcctgcctgcccggtctgagcaggcccggcggcagagcggcctgtatgacagccagaaccccccaacagtgaacaactgtgcccaggaccgggagagcccagatggcagctacacagaggagcagagccaggagagcgagatgaaggtgctggccacagactttgatgatgaatttgatgatgaggagcccctgcctgccatcggcacctgcaaggccctgtacacctttgagggccagaatgaaggcaccatctctgtggtggagggggagaccctgtatgtgattgaggaggacaagggagatggctggacccgcatcagaagaaatgaagatgaggagggctacgtgcccaccagctatgtggaggtgtgcctggacaagaatgccaaggacagctag

SEQ ID NO: 183917 - DNA, 1854 bp, Artificial Sequence
  derived and/or modified sequence
atgtcctggggcacagagctgtgggaccagtttgacaacctggagaagcacacccagtggggcatcgacatcctggagaagtacatcaagtttgtgaaggagaggacagaaattgagctgtcctatgccaagcagctgaggaacctgagcaagaagtaccagcccaagaagaacagcaaggaggaggaggagtacaagtacaccagctgcaaggccttcatcagcaacctgaatgagatgaatgactatgccggccagcatgaagtcatcagcgagaacatggccagccagatcatcgtggacctggcccgctacgtgcaggagctgaagcaggagaggaagagcaacttccatgatggcaggaaggcccagcagcacatcgagacctgctggaagcagctggagagcagcaagagaagatttgagcgggactgcaaggaggccgaccgggcccagcagtactttgagaagatggatgctgacatcaacgtgaccaaggcagatgtggagaaggcccggcagcaggcccagatccgccaccagatggccgaggacagcaaggctgactacagcagcatcctgcagaagttcaaccacgagcagcacgagtactaccacacccacatccccaacatcttccagaagatccaggagatggaggagcggcgcatcgtgaggatgggagagagcatgaagacctatgcagaggtggaccggcaggtgatccccatcatcggcaagtgcctggatggcatcgtgaaggctgctgagagcattgaccagaagaatgacagccagctggtgattgaggcctacaagagcggctttgagcccccaggggacatcgagtttgaggactacacccagcccatgaagaggacagtgtctgacaacagcctgagcaacagcagaggagagggcaagccagacctgaagtttggaggcaagagcaagggcaagctgtggcccttcatcaagaagaacaagctgatgagcctgctgaccagcccccaccagcccccacctcctcctccagccagcgccagccccagcgctgtgcccaacggcccccagagccccaagcagcagaaggagcccctgagccaccgcttcaatgagttcatgaccagcaagcccaagatccactgcttccgcagcctgaagaggggcctgagcctgaagctgggcgccaccccagaggacttcagcaacctgcccccagagcagaggaggaagaagctgcagcagaaggtggatgagctgaacaaggagatccagaaggagatggaccagagagatgccatcaccaagatgaaggatgtgtacctgaagaacccccagatgggagaccctgccagcctggaccacaagctggccgaggtgtcccagaacatcgagaagctgcgggtggagacccagaagtttgaggcctggctggccgaggtggagggccgcctgcctgcccggtctgagcaggcccggcggcagagcggcctgtatgacagccagaaccccccaacagtgaacaactgtgcccaggaccgggagagcccagatggcagctacacagaggagcagagccaggagagcgagatgaaggtgctggccacagactttgatgatgaatttgatgatgaggagcccctgcctgccatcggcacctgcaaggccctgtacacctttgagggccagaatgaaggcaccatctctgtggtggagggggagaccctgtatgtgattgaggaggacaagggagatggctggacccgcatcagaagaaatgaagatgaggagggctacgtgcccaccagctatgtggaggtgtgcctggacaagaatgccaaggacagctag

SEQ ID NO: 183918 - DNA, 1854 bp, Artificial Sequence
  derived and/or modified sequence
atccggtggaccgacgagctgtgggaccagttcgacaacctggagaagcatacccagtggggaatcgacatattagaaaagtacatcaagttcgtgaaagagagaacggagatagagctaagttatgcaaagcaactgcggaacctcagcaagaagtatcaaccaaaaaaaaattcgaaagaagaggaagaatacaagtatacatcctgtaaagctttcatcagcaatctgaatgagatgaatgactatgcaggccaacacgaggtcatcagcgagaacatggccagccaaatcatagtagacctggctaggtacgtgcaggaactgaaacaggaacgcaaaagtaactttcacgacggtcggaaagcccagcaacacatagagacatgctggaagcaactagagagctctaagcgaagattcgaacgcgactgtaaagaggcagaccgcgctcagcagtatttcgagaaaatggacgccgatatcaatgtgactaaagctgacgtcgaaaaggctcggcaacaggcacaaattcggcatcagatggccgaagactctaaagctgattactcctccattctccagaagtttaaccacgagcagcacgaatattatcacacacacatcccaaatattttccagaaaatccaggaaatggaagaaagaagaatcgtgcgcatgggcgaatccatgaagacctacgcggaagttgacagacaagtgattcccatcattggaaagtgcctggacggtatcgtaaaagctgccgagtctatagaccagaagaatgattctcagcttgtcattgaggcctataagagtggatttgaaccccctggtgatatagagtttgaggattatacgcagccaatgaaacgcacagtcagcgacaactctttaagcaacagcaggggtgaaggtaaacccgacctaaagttcggaggaaaatctaaggggaagctgtggccgtttataaagaaaaataagctcatgtcgctccttacgtccccacatcagccccccccccccccacccgcttccgcctccccaagtgccgtgcctaatgggccgcagtctccgaagcagcagaaagagcccctgagccaccggtttaacgaattcatgacttcgaagcccaagattcattgcttccgttctttaaaaagaggaccttcattcaaacagggtgccacaccagaggacttctccaacttgccacctgaacagcgccgaaaaaagcttcagcagaaagtggatgaattaaataaagagatacagaaggagatggaccaacgggatgccattaccaaaatgaaggatgtctaccttaagaacccccagatgggtgacccagctagccttgaccacaaacttgctgaggtgagccagaatattgagaaactcagagtcgagactcagaaattcgaggcatggctggcagaggttgaaggaaggcttcccgcacgttctgagcaggctcgtcggcaatcggggctgtacgattcccagaatcctccgacagtcaacaactgcgcccaagaccgcgaaagccctgacgggagctacacagaggaacagtctcaggagtctgagatgaaggttctggccaccgatttcgatgacgaattcgatgatgaagaaccgttgccggcaataggaacatgcaaggcactgtacacctttgagggtcagaatgagggcaccatcagcgtggtggaaggagaaacactgtatgttatcgaagaggataaaggcgatgggtggacacggataagacgaaatgaagatgaggagggatacgtaccaacatcttacgtcgaagtctgcctcgataagaatgcgaaagattcgtag

SEQ ID NO: 183919 - DNA, 1854 bp, Artificial Sequence
  derived and/or modified sequence
atgagctggggcaccgagctgtgggaccagttcgacaacctggagaaacacacacaatggggcatcgacatactggagaagtacattaaatttgtgaaagaacgcactgaaatagagctctcctatgctaaacagcttaggaatctatcaaagaagtaccagcccaaaaaaaatagcaaggaagaggaagaatacaaatacacttcttgcaaagccttcatctccaatctcaatgagatgaacgattacgctggacagcatgaagtcatcagcgagaatatggcttctcagatcatcgtggatctggctaggtacgtgcaggagctcaaacaggaacgaaaatctaatttccatgatggaaggaaggcccaacaacacatcgaaacttgctggaagcagttagagtcaagcaaacgtcgcttcgagcgcgattgtaaagaagctgacagggcccagcagtactttgagaagatggatgcggacattaatgtcactaaggctgatgtggaaaaagccagacagcaggcacagattcgtcatcaaatggccgaagatagcaaggccgactattcttccatcctgcagaaatttaaccacgagcaacacgaatattaccatacacacatccccaacatctttcaaaaaatccaagagatggaagagaggcgcatagtgcgtatgggcgaatcaatgaaaacttatgctgaggttgatagacaagttattcctatcattggtaaatgtcttgacggcattgtcaaagctgcagagagtatagatcagaaaaacgacagtcaactcgtaattgaagcgtacaagtccgggttcgagccccctggtgacatcgagtttgaggactacacacaaccgatgaagcggacagtttctgacaattcactgtcgaactcaagaggcgaggggaaaccggacctcaagtttggtgggaaaagtaagggcaagctgtggccgtttataaagaaaaataagttgatgtccctactaacaagtcctcatcaaccgccaccaccccctcctgccagcgctagcccctctgccgtcccaaacggcccgcaatcacctaaacaacaaaaggaaccattgagtcacaggttcaatgaattcatgacaagtaagcccaagatccattgcttccggtccttaaaaagagggcattctcttttaaaaggcgctactccagaagactttagtaacttgccacctgaacagcggcgaaaaaaactgcagcagaaagtggacgaactcaacaaagaaatccagaaggagatggatcaaagagacgctatcacaaagatgaaagacgtgtatttaaaaaacccacaaatgggagaccctgcgtcattggatcataagctggccgaggtctcccaaaacatcgaaaaattgcgtgtcgagactcaaaagtttgaggcctggttagcagaggtggagggccgcttaccggctaggagcgaacaagcgaggagacaaagcgggctgtacgactctcagaaccccccaaccgtaaacaattgcgcacaggatcgagagtctccagacggaagctacactgaagaacagtcccaggagtcggagatgaaggtgttagctaccgattttgatgatgaattcgacgacgaggagccactgccagccataggaacatgcaaggctctgtataccttcgaagggcagaacgagggcactatttctgtcgtggagggcgagaccctgtacgtgattgaggaggacaagggcgacggatggacacgaatccggaggaatgaagatgaagagggctatgtacccactagctacgtggaagtgtgtttagataaaaacgccaaagactcctag

SEQ ID NO: 183920 - DNA, 1854 bp, Artificial Sequence
  derived and/or modified sequence
atgagctggggcaccgagctgtgggaccagttcgacaacctggagaagcacactcaatggggcatcgacatcctggagaagtatattaagtttgtaaaagagagaactgagatcgaactcagctacgctaagcagttacgcaatctgagcaaaaagtatcaacccaagaaaaattctaaggaagaggaggagtacaaatatacatcctgtaaggcttttattagtaatcttaatgagatgaatgattatgcaggccagcatgaagtgataagcgagaacatggcttcccagattattgtagatctggcacggtacgtgcaggaactgaagcaggagcgcaagtctaacttccacgacggcagaaaagcccaacagcatatcgagacttgttggaaacagcttgagagctcaaagaggcgctttgagagggactgcaaggaagcagaccgggcccagcagtacttcgagaaaatggatgccgatatcaacgtgactaaagctgatgtggagaaggcccgacagcaagctcaaatcagacaccagatggctgaagactctaaagcagattactcttctatcctgcaaaaattcaatcatgaacagcacgaatattatcacactcacattcccaatatcttccagaagattcaggagatggaagagcgcagaattgttcgaatgggagagagtatgaaaacctacgctgaggtcgatcgacaggtcatacctattatcggtaaatgccttgacggaattgtgaaggctgctgagtcgatcgaccagaagaatgactctcaactagtgatcgaggcgtacaagagcggattcgaacctcctggagatattgagttcgaggactacactcaacctatgaagcggacagtgagtgacaatagtctgtcaaacagtcgcggcgagggaaagccagacttgaaatttgggggtaagagtaagggcaaactgtggccctttattaaaaagaataagctcatgtcccttctgacttcgcctcaccaacccccgccccccccccctgcctccgcgagcccaagtgcagtgcctaatggcccgcagagtcctaaacagcagaaggaacctctgtcacatcggtttaatgagttcatgacctccaagcctaaaatccattgttttaggtctttgaagaggggactgtcacttaaattaggggccacgcctgaggatttcagcaacctaccacccgagcagagaagaaagaagctccaacaaaaggttgacgagctgaataaggaaatccaaaaagagatggatcagagggacgccattaccaagatgaaggacgtttacctcaaaaacccccagatgggcgatcctgcgagcctagatcataagctggccgaggtttcccagaatatcgaaaagctcagggttgagacacagaaattcgaggcctggctggccgaggtggaggggcgcttacctgcacgctctgagcaagctcggcgccaatccggcctctatgattcccaaaaccctccaacagtcaacaattgcgcacaggaccgtgaatccccagatgggtcttacactgaggaacaatcccaggaatcagagatgaaagttttagctaccgacttcgacgacgagttcgacgacgaggaacccttgcccgccattggcacttgtaaagctctgtacactttcgaaggacagaatgagggtaccatctcagtggtggagggcgaaacgctctacgttatagaggaggataagggggacggatggactcggattcgcaggaacgaggacgaggaagggtatgtcccaactagctacgtggaggtgtgcctggacaagaacgctaaagattcgtag

SEQ ID NO: 183921 - DNA, 1854 bp, Artificial Sequence
  derived and/or modified sequence
atccgatggactgacgaactctgggaccagttcgataacctggaaaagcacactcagtggggcatcgatatcctggagaaatacatcaaatttgtcaaagagcggactgagattgaactctcctacgccaaacagctgaggaatctcagtaagaagtaccagccaaagaaaaacagtaaggaggaagaagagtacaaatacacatcctgtaaagcctttatttccaatcttaacgagatgaatgactatgctggacagcacgaggtgatttccgaaaacatggcatctcagattattgtagatcttgcccgttatgttcaggagctgaagcaagagcggaaatccaattttcacgatggccgaaaggcccagcagcacattgaaacctgttggaaacaattggaaagttcgaaaagaaggttcgagcgcgactgcaaggaggccgaccgggcacagcagtatttcgaaaaaatggatgccgacatcaacgtaacgaaggcggatgtggaaaaggcccgacaacaagcccagatcagacaccagatggctgaagattctaaggcggactacagcagcatcctgcaaaaattcaatcatgaacagcatgagtactatcatacacacattcctaacatatttcagaagattcaagagatggaagaaaggaggattgtgcgcatgggcgaatccatgaagacttatgctgaagtggatcgtcaggttattcccatcatcgggaaatgtctcgacggcatcgtcaaggcagctgaatccatcgatcagaaaaacgacagccaattggtgatcgaggcctataaaagtggatttgagccccctggtgatatcgagtttgaggattacacccagcccatgaaaagaaccgtgagcgacaattcactttcaaattcacggggagaagggaagcccgatctgaaattcggaggaaagagtaaggggaagctctggccttttattaaaaagaacaagctgatgtctctgcttacaagcccacatcaacctccacctcctcccccagcgagcgcctcgcccagtgccgtgccgaacgggcctcaatccccaaagcagcagaaagagcccttaagccacagattcaatgaatttatgacgtccaagcctaagatccattgctttaggtctttgaaaagaggacccagttttaaacaaggggcaactcctgaggattttagcaacctacctcctgagcaaaggaggaagaaactgcagcagaaagtggacgagttgaacaaagagatccagaaagagatggatcagagggacgctatcactaaaatgaaggacgtatatctaaagaacccacaaatgggggatcccgcatctctggatcacaagctggcggaagtcagtcagaatattgaaaagctgagggtggaaacacagaagttcgaggcttggctcgctgaggtggaagggagacttcccgcacgatccgagcaagctcgacgccagagcggtctatacgactctcaaaacccaccaacagtcaacaattgtgctcaagatagagaaagccctgacgggtcgtacaccgaagagcagagccaagagtccgagatgaaggttctggctacagacttcgatgatgaatttgatgatgaggaacctctaccggctatcgggacttgtaaagcgctctatacctttgagggccaaaatgagggtaccatctctgtcgttgaaggtgagacactatacgttatagaagaggacaagggggacggctggacaagaatcagaagaaacgaagacgaggagggttacgtccccacatcttatgtggaggtttgcttagacaaaaatgcgaaggacagttag

SEQ ID NO: 183922 - DNA, 1854 bp, Artificial Sequence
  derived and/or modified sequence
atgtcttggggcacagaactgtgggaccagttcgataacctggagaaacacacacagtggggaatagacattctagaaaaatatattaagttcgtaaaggagaggacagagattgaactctcctatgcgaaacaactaaggaatctaagcaagaaataccagcctaagaagaacagtaaggaggaggaagaatataagtacactagctgtaaggcttttatcagcaacctgaacgaaatgaacgattacgcaggccagcacgaagtcataagtgagaacatggctagtcagatcatagtcgatctggcgaggtacgtacaagaactcaagcaggaacgtaaatctaattttcatgacggcagaaaggctcagcaacatatcgaaacctgttggaaacagctggagtcgagcaaaaggcgcttcgagcgtgactgtaaagaggcggaccgagcccagcagtattttgagaagatggacgctgatatcaacgtgaccaaagccgacgtggagaaggccaggcagcaagcacaaattcgtcatcagatggccgaagattcaaaagccgactattcatctatcctccagaagttcaaccacgagcaacacgagtattatcacacacatatccccaatatctttcagaagattcaggagatggaagagagaaggatagtgcgcatgggggagtcaatgaagacctacgctgaagtggataggcaagtcatcccgattatcggcaagtgtttggatggcatcgtgaaggccgcagaatccattgaccagaaaaacgattcacagctcgtcattgaggcttacaagtccggattcgagccaccaggagacattgaatttgaagattatacacagccgatgaagcggacggtgtctgacaattctctgtccaattcgagaggagagggaaagccggacttgaaattcggaggaaaaagcaaggggaaactgtggcctttcattaagaagaataaactgatgtctctgctgacctctcctcatcagcccccaccccctcccccagcatccgcctcacccagcgctgtccctaacggccctcaatccccaaagcagcagaaagagcctctcagtcacagattcaacgagttcatgacctccaaacctaagattcattgctttaggtccctaaaaagagggcattccttactgaagggggcaacacctgaggatttcagtaacctaccacctgagcagcggagaaagaaactgcaacagaaagtggacgagctcaacaaagagattcagaaagaaatggaccagcgagatgctatcaccaagatgaaggatgtctatcttaagaacccacagatgggggacccggctagcctggatcataagctcgcagaggtgagtcaaaacattgagaaactcagggtcgagacccagaagttcgaggcctggctggctgaagtggagggcaggctccctgctagatctgagcaggcccgaaggcaatctggcctgtatgacagccagaatcccccaactgtaaataattgcgcccaggatcgagagtccccagatggtagctacaccgaggagcaatctcaggagtccgagatgaaggtcctggccaccgactttgatgacgagttcgacgacgaagaacctctacccgcaatcgggacctgcaaggccctgtacactttcgaaggccagaacgagggaacgatcagcgtggtggaaggcgagacgctgtatgtcattgaggaagacaagggcgatggctggactagaatccgcaggaatgaggatgaggaaggatatgtgccaaccagttacgtcgaggtatgcctggataagaatgctaaagactcctag

SEQ ID NO: 183923 - DNA, 1854 bp, Artificial Sequence
  derived and/or modified sequence
atgtcatggggtaccgaactttgggatcagtttgacaatcttgaaaagcacactcaatgggggatcgatatccttgaaaaatatatcaaattcgtgaaagaacggacggagattgaattatcttatgccaagcagctgcggaatctttccaagaagtaccagcctaagaagaactcgaaggaggaggaagagtacaagtatacctcttgcaaagcctttattagcaatttaaatgaaatgaatgactacgctgggcagcacgaagtgataagcgaaaatatggccagtcagataatcgtggacctcgccaggtacgtccaggagctaaagcaagaacgtaagtcaaactttcacgatggcagaaaggcccagcagcatatcgaaacatgctggaaacagttggagtcaagtaagaggaggtttgaacgcgactgcaaggaggctgatagagctcagcaatactttgaaaaaatggatgccgacattaacgtcactaaggcagatgttgagaaggctcgtcaacaggcccagattaggcatcagatggccgaagacagcaaagccgactactcgtctattctccagaagttcaatcacgagcaacacgaatattaccatactcatatccccaacatattccagaaaatccaggaaatggaggagcgcaggatcgtccgtatgggagagtcaatgaagacttacgctgaagtagatagacaggtaatcccaatcataggcaagtgtctcgacgggatcgttaaggccgctgagagtatcgatcagaagaatgacagtcagttagtcattgaggcctataagtcagggtttgagcccccaggagatatcgaattcgaggattatacccagcctatgaaaagaacggtttccgataatagcctgtccaactcccgaggtgaaggaaaacccgacctgaagttcgggggtaaaagcaagggcaaactgtggccattcataaagaagaacaaactgatgtcactgctaacatccccacaccagccacccccacccccacccgcttcggcgtcaccttccgccgtgcctaacggaccacagagcccgaaacaacagaaggagccccttagccataggtttaatgaatttatgacatccaagcctaaaattcactgttttcggtctctcaagagagggttgtctctgaagttgggcgctacacccgaggattttagcaatttacctcccgagcagaggaggaagaagcttcagcagaaagtcgatgaacttaataaggaaatccagaaagaaatggaccagcgggacgcaattacgaaaatgaaggacgtctatttgaagaatccacagatgggcgatcctgcctcactcgaccataaactggccgaagtcagccaaaacattgagaagctgcgcgtggaaacacagaagttcgaagcttggctcgcagaggtggaaggaagactgcccgctaggagcgagcaggctagacggcagtctggcctctatgactctcagaatcccccaacagtgaacaattgcgcacaggaccgagagtcaccagatgggagctacactgaagaacaaagtcaggaaagtgagatgaaggttttggctaccgatttcgacgatgagtttgatgacgaggaacctctgcccgcaattggtacctgtaaagcactctacacattcgaagggcagaatgaaggaactatcagcgttgtcgaaggggaaaccctgtacgtcatcgaggaggacaagggggatggatggacccgaattaggagaaacgaggatgaggaaggatacgtccccacctcttacgttgaggtgtgcctggacaaaaacgctaaagactcctag

SEQ ID NO: 183924 - DNA, 1854 bp, Artificial Sequence
  derived and/or modified sequence
atcagatggaccgacgagctgtgggaccagttcgacaacctggagaagcacacccagtggggcatcgacatcctggagaagtacatcaagttcgtgaaggagagaaccgagatcgagctgagctacgccaagcagctgagaaacctgagcaagaagtaccagcccaagaagaacagcaaggaggaggaggagtacaagtacaccagctgcaaggccttcatcagcaacctgaacgagatgaacgactacgccggccagcacgaggtgatcagcgagaacatggccagccagatcatcgtggacctggccagatacgtgcaggagctgaagcaggagagaaagagcaacttccacgacggcagaaaggcccagcagcacatcgagacctgctggaagcagctggagagcagcaagagaagattcgagagagactgcaaggaggccgacagagcccagcagtacttcgagaagatggacgccgacatcaacgtgaccaaggccgacgtggagaaggccagacagcaggcccagatcagacaccagatggccgaggacagcaaggccgactacagcagcatcctgcagaagttcaaccacgagcagcacgagtactaccacacccacatccccaacatcttccagaagatccaggagatggaggagagaagaatcgtgagaatgggcgagagcatgaagacctacgccgaggtggacagacaggtgatccccatcatcggcaagtgcctggacggcatcgtgaaggccgccgagagcatcgaccagaagaacgacagccagctggtgatcgaggcctacaagagcggcttcgagccccccggcgacatcgagttcgaggactacacccagcccatgaagagaaccgtgagcgacaacagcctgagcaacagcagaggcgagggcaagcccgacctgaagttcggcggcaagagcaagggcaagctgtggcccttcatcaagaagaacaagctgatgagcctgctgaccagcccccaccagccccccccccccccccccgccagcgccagccccagcgccgtgcccaacggcccccagagccccaagcagcagaaggagcccctgagccacagattcaacgagttcatgaccagcaagcccaagatccactgcttcagaagcctgaagagaggccccagcttcaagcagggcgccacccccgaggacttcagcaacctgccccccgagcagagaagaaagaagctgcagcagaaggtggacgagctgaacaaggagatccagaaggagatggaccagagagacgccatcaccaagatgaaggacgtgtacctgaagaacccccagatgggcgaccccgccagcctggaccacaagctggccgaggtgagccagaacatcgagaagctgagagtggagacccagaagttcgaggcctggctggccgaggtggagggcagactgcccgccagaagcgagcaggccagaagacagagcggcctgtacgacagccagaacccccccaccgtgaacaactgcgcccaggacagagagagccccgacggcagctacaccgaggagcagagccaggagagcgagatgaaggtgctggccaccgacttcgacgacgagttcgacgacgaggagcccctgcccgccatcggcacctgcaaggccctgtacaccttcgagggccagaacgagggcaccatcagcgtggtggagggcgagaccctgtacgtgatcgaggaggacaagggcgacggctggaccagaatcagaagaaacgaggacgaggagggctacgtgcccaccagctacgtggaggtgtgcctggacaagaacgccaaggacagctag

SEQ ID NO: 183925 - DNA, 1854 bp, Artificial Sequence
  derived and/or modified sequence
atgagctggggcaccgagctgtgggaccagttcgacaacctggagaagcacacccagtggggcatcgacatcctggagaagtacatcaagttcgtgaaggagagaaccgagatcgagctgagctacgccaagcagctgagaaacctgagcaagaagtaccagcccaagaagaacagcaaggaggaggaggagtacaagtacaccagctgcaaggccttcatcagcaacctgaacgagatgaacgactacgccggccagcacgaggtgatcagcgagaacatggccagccagatcatcgtggacctggccagatacgtgcaggagctgaagcaggagagaaagagcaacttccacgacggcagaaaggcccagcagcacatcgagacctgctggaagcagctggagagcagcaagagaagattcgagagagactgcaaggaggccgacagagcccagcagtacttcgagaagatggacgccgacatcaacgtgaccaaggccgacgtggagaaggccagacagcaggcccagatcagacaccagatggccgaggacagcaaggccgactacagcagcatcctgcagaagttcaaccacgagcagcacgagtactaccacacccacatccccaacatcttccagaagatccaggagatggaggagagaagaatcgtgagaatgggcgagagcatgaagacctacgccgaggtggacagacaggtgatccccatcatcggcaagtgcctggacggcatcgtgaaggccgccgagagcatcgaccagaagaacgacagccagctggtgatcgaggcctacaagagcggcttcgagccccccggcgacatcgagttcgaggactacacccagcccatgaagagaaccgtgagcgacaacagcctgagcaacagcagaggcgagggcaagcccgacctgaagttcggcggcaagagcaagggcaagctgtggcccttcatcaagaagaacaagctgatgagcctgctgaccagcccccaccagccccccccccccccccccgccagcgccagccccagcgccgtgcccaacggcccccagagccccaagcagcagaaggagcccctgagccacagattcaacgagttcatgaccagcaagcccaagatccactgcttcagaagcctgaagagaggccacagcctgctgaagggcgccacccccgaggacttcagcaacctgccccccgagcagagaagaaagaagctgcagcagaaggtggacgagctgaacaaggagatccagaaggagatggaccagagagacgccatcaccaagatgaaggacgtgtacctgaagaacccccagatgggcgaccccgccagcctggaccacaagctggccgaggtgagccagaacatcgagaagctgagagtggagacccagaagttcgaggcctggctggccgaggtggagggcagactgcccgccagaagcgagcaggccagaagacagagcggcctgtacgacagccagaacccccccaccgtgaacaactgcgcccaggacagagagagccccgacggcagctacaccgaggagcagagccaggagagcgagatgaaggtgctggccaccgacttcgacgacgagttcgacgacgaggagcccctgcccgccatcggcacctgcaaggccctgtacaccttcgagggccagaacgagggcaccatcagcgtggtggagggcgagaccctgtacgtgatcgaggaggacaagggcgacggctggaccagaatcagaagaaacgaggacgaggagggctacgtgcccaccagctacgtggaggtgtgcctggacaagaacgccaaggacagctag

SEQ ID NO: 183926 - DNA, 1854 bp, Artificial Sequence
  derived and/or modified sequence
atgagctggggcaccgagctgtgggaccagttcgacaacctggagaagcacacccagtggggcatcgacatcctggagaagtacatcaagttcgtgaaggagagaaccgagatcgagctgagctacgccaagcagctgagaaacctgagcaagaagtaccagcccaagaagaacagcaaggaggaggaggagtacaagtacaccagctgcaaggccttcatcagcaacctgaacgagatgaacgactacgccggccagcacgaggtgatcagcgagaacatggccagccagatcatcgtggacctggccagatacgtgcaggagctgaagcaggagagaaagagcaacttccacgacggcagaaaggcccagcagcacatcgagacctgctggaagcagctggagagcagcaagagaagattcgagagagactgcaaggaggccgacagagcccagcagtacttcgagaagatggacgccgacatcaacgtgaccaaggccgacgtggagaaggccagacagcaggcccagatcagacaccagatggccgaggacagcaaggccgactacagcagcatcctgcagaagttcaaccacgagcagcacgagtactaccacacccacatccccaacatcttccagaagatccaggagatggaggagagaagaatcgtgagaatgggcgagagcatgaagacctacgccgaggtggacagacaggtgatccccatcatcggcaagtgcctggacggcatcgtgaaggccgccgagagcatcgaccagaagaacgacagccagctggtgatcgaggcctacaagagcggcttcgagccccccggcgacatcgagttcgaggactacacccagcccatgaagagaaccgtgagcgacaacagcctgagcaacagcagaggcgagggcaagcccgacctgaagttcggcggcaagagcaagggcaagctgtggcccttcatcaagaagaacaagctgatgagcctgctgaccagcccccaccagccccccccccccccccccgccagcgccagccccagcgccgtgcccaacggcccccagagccccaagcagcagaaggagcccctgagccacagattcaacgagttcatgaccagcaagcccaagatccactgcttcagaagcctgaagagaggcctgagcctgaagctgggcgccacccccgaggacttcagcaacctgccccccgagcagagaagaaagaagctgcagcagaaggtggacgagctgaacaaggagatccagaaggagatggaccagagagacgccatcaccaagatgaaggacgtgtacctgaagaacccccagatgggcgaccccgccagcctggaccacaagctggccgaggtgagccagaacatcgagaagctgagagtggagacccagaagttcgaggcctggctggccgaggtggagggcagactgcccgccagaagcgagcaggccagaagacagagcggcctgtacgacagccagaacccccccaccgtgaacaactgcgcccaggacagagagagccccgacggcagctacaccgaggagcagagccaggagagcgagatgaaggtgctggccaccgacttcgacgacgagttcgacgacgaggagcccctgcccgccatcggcacctgcaaggccctgtacaccttcgagggccagaacgagggcaccatcagcgtggtggagggcgagaccctgtacgtgatcgaggaggacaagggcgacggctggaccagaatcagaagaaacgaggacgaggagggctacgtgcccaccagctacgtggaggtgtgcctggacaagaacgccaaggacagctag

SEQ ID NO: 183927 - protein, 307 aa, Artificial Sequence
  derived and/or modified sequence
MTETTKTHVILLACGSFNPITKGHIQMFERARDYLHKTGRFIVIGGIVSPVHDSYGKQGLVSSRHRLIMCQLAVQNSDWIRVDPWECYQDTWQTTCSVLEHHRDLMKRVTGCILSNVNTPSMTPVIGQPQNETPQPIYQNSNVATKPTAAKILGKVGESLSRICCVRPPVERFTFVDENANLGTVMRYEEIELRILLLCGSDLLESFCIPGLWNEADMEVIVGDFGIVVVPRDAADTDRIMNHSSILRKYKNNIMVVKDDINHPMSVVSSTKSRLALQHGDGHVVDYLSQPVIDYILKSQLYINASG

SEQ ID NO: 183928 - DNA, 924 bp, Artificial Sequence
  derived and/or modified sequence
atgactgaaacaaccaagacgcacgtaatcctcctcgcctgtgggtctttcaatcccatcaccaaaggacacatccagatgttcgagcgggcacgggactatctacataaaacaggacgattcattgttattggaggtatcgtgtcccccgttcacgactcatacgggaaacaaggccttgtctcttcccggcatcgtctcatcatgtgtcagctggctgtgcagaattccgattggattcgggtggacccctgggagtgttatcaggatacttggcagacgacatgctctgtgctggagcaccaccgagatctgatgaaaagagtcactgggtgtatccttagtaacgtcaacaccccttccatgacccccgtcatcgggcagccccaaaacgaaaccccccaacccatttaccaaaactctaatgtcgctactaaacctaccgccgccaaaatcctgggaaaagtgggagaaagtctatccagaatctgttgtgtgcggccacccgtggaaaggttcacttttgtagatgagaacgccaaccttggaactgttatgcggtatgaagaaatcgaactacggattcttttactatgtgggtccgatttactggagtctttctgcattccaggtctgtggaatgaagcagacatggaggtaatagtgggagatttcgggatagtcgtcgtccccagagatgccgccgataccgaccgtatcatgaatcatagttctattctacgtaagtataaaaacaatatcatggttgtgaaagatgatatcaatcatcccatgagtgtggtcagttctactaaatcccggttggcactgcaacatggagacggacacgtcgttgactacctgtctcagcccgtaattgactatatactgaaatcccagctctatattaatgcatccggatag

SEQ ID NO: 183929 - DNA, 924 bp, Artificial Sequence
  derived and/or modified sequence
atgacagagaccaccaagacccacgtgatcctgctggcctgtggcagcttcaaccccatcaccaagggccacatccagatgtttgagcgggcccgggactacctgcacaagacaggccgcttcatcgtcatcggcggcatcgtgtcccctgtgcatgacagctatggcaagcagggcctggtgagcagccgccacaggctcatcatgtgccagctggccgtgcagaacagcgactggatccgggtggacccctgggagtgctaccaggacacctggcagaccacctgcagcgtgctggagcaccaccgggacctgatgaagagggtgacaggctgcatcctgagcaatgtgaacacccccagcatgacccctgtgattggccagccccagaatgagaccccccagcccatctaccagaacagcaatgtggccaccaagcccacagctgccaagatcctgggcaaggtgggggagagcctgagccgcatctgctgcgtgcggccccctgtggagcgcttcacctttgtggatgaaaatgccaacctgggcaccgtgatgagatatgaggagattgagctgcgcatcctgctgctgtgtggcagtgacctgctggagagcttctgcatccctggcctgtggaatgaggccgacatggaggtgattgtgggggactttggaattgtggtggtgcccagagatgctgctgacacagaccgcatcatgaaccacagcagcatcctgaggaagtacaagaacaacatcatggtggtgaaggatgacatcaaccaccccatgtctgtggtgagcagcaccaagagccggctggccctgcagcacggagatggccacgtggtggactacctgagccagcctgtgattgactacatcctgaagagccagctgtacatcaatgccagcggctag

SEQ ID NO: 183930 - DNA, 924 bp, Artificial Sequence
  derived and/or modified sequence
atgaccgagaccaccaagacccacgtgatcctgctggcctgcggcagttttaatcctattactaaagggcacatccagatgtttgagcgggcaagagactacttgcacaagacagggagattcatcgtgatcgggggcattgtgtccccagtgcacgactcatatgggaagcaggggctcgtctccagcaggcatcggctgataatgtgccagttagcagtacagaatagtgattggattagggtcgacccatgggagtgctaccaggatacttggcaaactacatgttctgtgttagaacatcaccgcgacctgatgaaaagagtgacaggatgtatcctcagcaatgtgaatactccttccatgactcccgtcatcgggcaacctcagaacgagaccccacagcccatctatcagaattccaatgtggctacaaagcccaccgcagccaaaattctgggaaaggtgggcgagtccctgtctcggatttgctgcgtcagacctcctgtagagcggttcacttttgttgatgagaacgccaacctcgggacggtgatgaggtacgaggagatcgagctcaggattttattgctgtgtggatcggacctgctagaaagtttctgtattcccgggctgtggaatgaggccgacatggaggtgatagttggggatttcggcatcgtggtggtacctagggacgctgcagataccgatcgaatcatgaatcattcttccattctcaggaaatataagaataacataatggtcgtcaaagacgacatcaatcatccgatgagcgtcgtcagctctaccaagagccggcttgcgctgcagcatggcgacgggcacgtggtggattacctgtctcaacccgtgatagactatattctgaaatcccaactttacatcaatgcatcagggtag

SEQ ID NO: 183931 - DNA, 924 bp, Artificial Sequence
  derived and/or modified sequence
atgacagagactacaaagactcacgtgatcctcctggcttgtgggtccttcaacccaataactaagggccacattcagatgtttgagcgcgctagggattacctccacaaaaccggccgttttatcgttatcggtggcatcgtcagccccgtgcacgactcatatgggaaacagggccttgtgtcatccaggcataggctaatcatgtgccagctcgcagtccagaactcagactggatccgcgtcgacccttgggaatgttatcaggatacctggcagaccacttgctctgtactggagcatcacagagatcttatgaaaagggttactggctgtatcctgtccaatgtgaacacccccagtatgactcctgtgatcggacagccacagaacgaaactccacagcccatctaccagaacagcaacgtggctactaagcctactgctgctaagatcctgggaaaagttggtgaaagcctctcccggatttgctgtgtcagaccaccggtcgaacggttcacattcgttgatgaaaatgccaatctagggactgtgatgaggtatgaggaaatcgaactgaggatcctgctactgtgcgggagtgatctgctggaatctttctgcattccaggtttatggaacgaagcagatatggaggtgatcgttggcgactttggtattgtcgtggtgccccgagatgccgcagacaccgaccgaatcatgaaccactcttcaattctgagaaaatacaagaacaacataatggtagtgaaagacgacattaatcaccccatgtctgtcgtatcctcaaccaagtcccggctagcattgcagcacggcgacggtcacgtggtcgactatctgtctcagccagttatagattacattttgaaatctcaattatacataaacgcctctgggtag

SEQ ID NO: 183932 - DNA, 5663 bp, Artificial Sequence
  derived and/or modified sequence
ataaactctaaggaagacagtgatggagtgaagtgggctgggggcgatagagaggatggggtggggcaccaggcgagagatgcgaaggaagccagaacgaaaagagagcgaccgaggagagaagagagcagagcaatacaaaagcagcctcggatctagccggagctgcaagcgttaaggggaggcggagagtgacgcggtttgcgtctggagcggctccttggagtccacagcatccaccgccggagcctcgccttcctttctccctctgcagacacaacgagacacaaaaagagaggcaacccctagaccaccgcgaaggacccatctgcaccatgaccgagaccaccaagacccacgttatcttgctcgcctgcggcagcttcaatcccatcaccaaagggcacattcagatgtttgaaagagccagggattatctgcacaaaactggaaggtttattgtgattggcgggattgtctcccctgtccacgactcctatggaaaacagggcctcgtgtcaagccggcaccgtctcatcatgtgtcagctggccgtccagaattctgattggatcagggtggacccttgggagtgctaccaggacacctggcagacgacctgcagcgtgttggaacaccaccgggacctcatgaagagggtgactggctgcatcctctccaatgtcaacacaccttccatgacacctgtgatcggacagccacaaaacgagaccccccagcccatttaccagaacagcaacgtggccaccaagcccactgcagccaagatcttggggaaggtgggagaaagcctcagccggatctgctgtgtccgcccgccggtggagcgtttcacctttgtagatgagaatgccaatctgggcacggtgatgcggtatgaagagattgagctacggatcctgctgctgtgtggtagtgacctgctggagtccttctgcatcccagggctctggaacgaggcagatatggaggtgattgttggtgactttgggattgtggtggtgccccgggatgcagccgacacagaccgaatcatgaatcactcctcaatactccgcaaatacaaaaacaacatcatggtggtgaaggatgacatcaaccatcccatgtctgttgtcagctcaaccaagagcaggctggccctgcagcatggggacggccatgttgtggattacctgtcccagccggtcatcgactacatcctcaaaagccagctgtacatcaatgcctccggctagcagcccctcgtcctccggcaacacaatggcccctccatctttgtcagccccctgtttctctcctgcctctctgtttctccatctcctcgtcttgactgttttccctacttgctgacttaaccccccatagtgtgggggacctgcagagaaccatggcattccctattccacagtcatctttggacagactttcctctagtctccgggttgggggtgggtgagggaatggggtgggagtcgggggaagtgcagtccttggagatgtactggtgtccgtctcccagcatgctctagagaggcggctctggtgcccatcctcccagcacgctctggggaggcggctctggtgcccatcctcccagcatgctctagagaggcggctctggtgcccctcctcccagcatgctctggggaggcggctctggctcttgccttcccagcatgccctttactacaaagggctatttttcttttctttcttttgtttatttatttttctttgttcactccctgtagaacttggatgaaatcagtgtccatggttctttatgtttgtagtcttgatgtgctcctgtggtattacttcccctctgataggacattgtagccagcctcagcactcagtgagttcatcagggccacacccagtagagaaggccaagcaacctccacttcttcagcaccacacacacgcacacacacacacacgcacacatgcgtgtgcacccgcgcacgcacatacacacacacatatagcagtagcagcagcagcagcagcagcagcaacctttgatcaggagtgagattttcgggttctgaaacctgggacacgagtctgtgaatagtcggttttctcagaataatttgaatctgttttcttagtttcaaatgaccatttccctgatgctctgagcttatgatcacacagagccagtccatcctcatttcctggtggcatctgttcatttacctttgtggactgtagctgatggcacagtgcgggttccctaccagccaggggtttccaagggacctttggaggccatgcttagacacattcctgtacctgagaacaaccacataggcaggaccagatccacatcgtgcagtcgtgtcataaaaaaacaaaacaaaacaaaaaaacactaggagtccactcaaccctggaggtctttgctaattggaattatgtattgtctgttgggctgggaaatgtctctttcatattgtaagtccaggatgaactaggagaaagcaatttgttgccctgatgataactgatgattttcaccctctctagctgaggtaactcagacagtgcatgaggtcagtttcttcttgagaagcagtgccttggtcttgtttctgtggttggttctagcccctgcagagcctgggagctgcaggaactgtctgagaaaatctccctaataggggagtgggttcccagaagggagatctgggaggggtcaggagccactaagttgcttcactccttttttctctaattttctaccttcctctctgttcctgcagacagttttgccagctttgcttctggttactagggtctcatgcgtgtcctgcttggagagccataaggaaattgctgtcttgtgctttgtgtctctcatccagtctctggctcttgggattctggtctttgagaaatagtccctgagtattaggatacttttatcaaaatctagtaccagctacggccagaaagggccaggtgggacctgaaagcaaagacaatgttctttaccacacgtttcacatctgcaacatccttcaattgcgggaaaaggaacttgatttaacagaagaacatggtagagcagcatccagaaagtctgttattcctcttggattttttgaaataatcttcagaggaaggaaggaaaatcctattttggggtatcagtgtttgactagggatcatgaaataataaactgaaaaaaactttagagttcagttgatccaacactttcctttaaaagttgagggagcagaggcccatgggattaaatggctggtccaggtcagccagcaggtgtagggcctgacaagaacatattgtttccctgacccctaggccgtcacaccacaccctccatttcctcatgttgctgaccaggtgcccatatgatttctacacttcccaagccttaccctggcatctttcttttaaattatatctgtcccaggtgctctccacacataggatggtaatgccagtcccaggggagggtgtgatagtaaggaaggccactgttaggtttcctttagaaataaagagatctcagcagcttggaagaaatcccagaagcggactccatcaatccaagaaagagttgctttgtggaaggtgaaggaagacccacagagtgctcaggatgatgctattgctggagagcgaaagatggaacagccttgtccaggcagaacagtcataagccaggaaatgaaacaaaggaaaacaggtgcctgaatttcctggggaaacatggcttgtttaaggacttggagttatggatggaatttatgggacccacgtgagcagacctgaggaaggctcgatttcttttgtttcttggtccactctgtcactctgctctggtcaagccccatttggtctacagcccatgagaaggaatgaggctggttctgcactctcagcatgcagtccgaaagcatgtgggagtggggagggaaagtgagatgaattaagacaaagaacaggtgccatagaagtagatttctaggaatgaagtggggcagatcttatctttgtggattacaggcactgtactaaaaacaggtttcctatttaatataaaaagaaagtgaatcttcttttggatagaatcatccattcccatcgccgcaccccctaccccccaaacacacacacacacacacacacacacacacacacacacacacacacacacgccctactcttcatttgctaggggaaggtcacagcacaactaaatccaggacaggacattgtgaccatgacccagccacagtcaataccagaaagatgattcagagtctgaagtggtgccccaggtgccaacaggataacctctaccccccgactttgtctctggggtcctgttccttcctgcaaagcccaatccaagactggcatggctcagaggttgtgagaaaggcatggactggaacaatcatgtccagaggggtctggagctttgtttcctgttcaccagcaaaaaatgtctctcccatttttctgaaagtggctgatgtaagaacaggcagaaggaaaaccctttttgtcaataactctgtccttaaggaatggtcctctgggagggctgtgctgctagtgggtacctcagtcacacacccccaaccccaggcagcctctagagccttcttgctttcattttccttgaatgtacataggaacaagggggaaagtctcttactgaagtgcctgaaacccaaagctagagcttctagagacgccgttcttcctgtctcagcttggccagcctttcaacaatgttctctagtttcaagctccagcttctcagaaagaattaaagaacttgctgttcaaattaagtagaaagtgagactcaataataactgaactacagcaaaaggcagagaattacagggagaaaaaacttgtacttaccagcccaattctactctcctcaaactgacacacacacacacacacacacacacacacacacacacacactcttttaggggactaagagagagaagcatgttattacattttactcatccaaacagtaatgcaaaaataaaacggtagaatatgaaaagctcaggatctctcccaaggctacctactgcaggagggccaacaggtgagatgggaagaatggaaacagggaccgattttgtagctcatacaattaggacaccttaggaatagcattgtagtaatggtgatgaatatgctctgccaaattcatccagtctgcaccatcttatagctgcccagcacactcgactgttcatgtggtctctttgtagtgtgagtttggagtgtcctattagcctgttctggttaggaatgagttaacggctctttccctcaaccttagtctagtcccagggctgaggattcagctggatccacatggtcttgagggttggcatgaggagggggaagcttttttgaatcgctttttgatcacataatctgccattttaagagtaagatttgctttatggaaatcaattcattaataaaaaatgatattcaagttgcaataccatttcacagtgaaatattttgagtacaattttgttgctagaatagtcatgggcaagagttttatgcaaaatgtttcaattatgttaataaataagacaatgctacaaga

SEQ ID NO: 183933 - DNA, 924 bp, Artificial Sequence
  derived and/or modified sequence
atgaccgagaccaccaagacccacgtgatcctgctggcctgcggcagcttcaaccccatcaccaagggccacatccagatgttcgagagagccagagactacctgcacaagaccggcagattcatcgtgatcggcggcatcgtgagccccgtgcacgacagctacggcaagcagggcctggtgagcagcagacacagactgatcatgtgccagctggccgtgcagaacagcgactggatcagagtggacccctgggagtgctaccaggacacctggcagaccacctgcagcgtgctggagcaccacagagacctgatgaagagagtgaccggctgcatcctgagcaacgtgaacacccccagcatgacccccgtgatcggccagccccagaacgagaccccccagcccatctaccagaacagcaacgtggccaccaagcccaccgccgccaagatcctgggcaaggtgggcgagagcctgagcagaatctgctgcgtgagaccccccgtggagagattcaccttcgtggacgagaacgccaacctgggcaccgtgatgagatacgaggagatcgagctgagaatcctgctgctgtgcggcagcgacctgctggagagcttctgcatccccggcctgtggaacgaggccgacatggaggtgatcgtgggcgacttcggcatcgtggtggtgcccagagacgccgccgacaccgacagaatcatgaaccacagcagcatcctgagaaagtacaagaacaacatcatggtggtgaaggacgacatcaaccaccccatgagcgtggtgagcagcaccaagagcagactggccctgcagcacggcgacggccacgtggtggactacctgagccagcccgtgatcgactacatcctgaagagccagctgtacatcaacgccagcggctag

SEQ ID NO: 183934 - protein, 548 aa, Artificial Sequence
  derived and/or modified sequence
MATDDKTSPTLDSANDLPRSPTSPSHLTHFKPLTPDQDEPPFKSAYSSFVNLFRFNKERAEGGQGEQQPLSGSWTSPQLPSRTQSVRSPTPYKKQLNEELQRRSSALDTRRKAEPTFGGHDPRTAVQLRSLSTVLKRLKEIMEGKSQDSDLKQYWMPDSQCKECYDCSEKFTTFRRRHHCRLCGQIFCSRCCNQEIPGKFMGYTGDLRACTYCRKIALSYAHSTDSNSIGEDLNALSDSACSVSVLDPSEPRTPVGSRKASRNIFLEDDLAWQSLIHPDSSNTPLSTRLVSVQEDAGKSPARNRSASITNLSLDRSGSPMVPSYETSVSPQANRTYVRTETTEDERKILLDSVQLKDLWKKICHHSSGMEFQDHRYWLRTHPNCIVGKELVNWLIRNGHIATRAQAIAIGQAMVDGRWLDCVSHHDQLFRDEYALYRPLQSTEFSETPSPDSDSVNSVEGHSEPSWFKDIKFDDSDTEQIAEEGDDNLANSASPSKRTSVSSFQSTVDSDSAASISLNVELDNVNFHIKKPSKYPHVPPHPADQKGRR

SEQ ID NO: 183935 - protein, 2098 aa, Artificial Sequence
  derived and/or modified sequence
MATDDKTSPTLDSANDLPRSPTSPSHLTHFKPLTPDQDEPPFKSAYSSFVNLFRFNKERAEGGQGEQQPLSGSWTSPQLPSRTQSVRSPTPYKKQLNEELQRRSSALDTRRKAEPTFGGHDPRTAVQLRSLSTVLKRLKEIMEGKSQDSDLKQYWMPDSQCKECYDCSEKFTTFRRRHHCRLCGQIFCSRCCNQEIPGKFMGYTGDLRACTYCRKIALSYAHSTDSNSIGEDLNALSDSACSVSVLDPSEPRTPVGSRKASRNIFLEDDLAWQSLIHPDSSNTPLSTRLVSVQEDAGKSPARNRSASITNLSLDRSGSPMVPSYETSVSPQANRTYVRTETTEDERKILLDSVQLKDLWKKICHHSSGMEFQDHRYWLRTHPNCIVGKELVNWLIRNGHIATRAQAIAIGQAMVDGRWLDCVSHHDQLFRDEYALYRPLQSTEFSETPSPDSDSVNSVEGHSEPSWFKDIKFDDSDTEQIAEEGDDNLANSASPSKRTSVSSFQSTVDSDSAASISLNVELDNVNFHIKKPSKYPHVPPHPADQKEYLISDTGGQQLSISDAFIKESLFNRRVEEKSKELPFTPLGWHHNNLELLREENGEKQAMERLLSANHNHMMALLQQLLHSDSLSSSWRDIIVSLVCQVVQTVRPDVKNQDDDMDIRQFVHIKKIPGGKKFDSVVVNGFVCTKNIAHKKMSSCIKNPKILLLKCSIEYLYREETKFTCIDPIVLQEREFLKNYVQRIVDVRPTLVLVEKTVSRIAQDMLLEHGITLVINVKSQVLERISRMTQGDLVMSMDQLLTKPHLGTCHKFYMQIFQLPNEQTKTLMFFEGCPQHLGCTIKLRGGSDYELARVKEILIFMICVAYHSQLEISFLMDEFAMPPTLMQNPSFHSLIEGRGHEGAVQEQYGGGSIPWDPDIPPESLPCDDSSLLELRIVFEKGEQENKNLPQAVASVKHQEHSTTACPAGLPCAFFAPVPESLLPLPVDDQQDALGSEQPETLQQTVVLQDPKSQIRAFRDPLQDDTGLYVTEEVTSSEDKRKTYSLAFKQELKDVILCISPVITFREPFLLTEKGMRCSTRDYFAEQVYWSPLLNKEFKEMENRRKKQLLRDLSGLQGMNGSIQAKSIQVLPSHELVSTRIAEHLGDSQSLGRMLADYRARGGRIQPKNSDPFAHSKDASSTSSGQSGSKNEGDEERGLILSDAVWSTKVDCLNPINHQRLCVLFSSSSAQSSNAPSACVSPWIVTMEFYGKNDLTLGIFLERYCFRPSYQCPSMFCDTPMVHHIRRFVHGQGCVQIILKELDSPVPGYQHTILTYSWCRICKQVTPVVALSNESWSMSFAKYLELRFYGHQYTRRANAEPCGHSIHHDYHQYFSYNQMVASFSYSPIRLLEVCVPLPKIFIKRQAPLKVSLLQDLKDFFQKVSQVYVAIDERLASLKTDTFSKTREEKMEDIFAQKEMEEGEFKNWIEKMQARLMSSSVDTPQQLQSVFESLIAKKQSLCEVLQAWNNRLQDLFQQEKGRKRPSVPPSPGRLRQGEESKISAMDASPRNISPGLQNGEKEDRFLTTLSSQSSTSSTHLQLPTPPEVMSEQSVGGPPELDTASSSEDVFDGHLLGSTDSQVKEKSTMKAIFANLLPGNSYNPIPFPFDPDKHYLMYEHERVPIAVCEKEPSSIIAFALSCKEYRNALEELSKATQWNSAEEGLPTNSTSDSRPKSSSPIRLPEMSGGQTNRTTETEPQPTKKASGMLSFFRGTAGKSPDLSSQKRETLRGADSAYYQVGQTGKEGTENQGVEPQDEVDGGDTQKKQLINPHVELQFSDANAKFYCRLYYAGEFHKMREVILDSSEEDFIRSLSHSSPWQARGGKSGAAFYATEDDRFILKQMPRLEVQSFLDFAPHYFNYITNAVQQKRPTALAKILGVYRIGYKNSQNNTEKKLDLLVMENLFYGRKMAQVFDLKGSLRNRNVKTDTGKESCDVVLLDENLLKMVRDNPLYIRSHSKAVLRTSIHSDSHFLSSHLIIDYSLLVGRDDTSNELVVGIIDYIRTFTWDKKLEMVVKSTGILGGQGKMPTVVSPELYRTRFCEAMDKYFLMVPDHWTGLGLNC

SEQ ID NO: 183936 - DNA, 6297 bp, Artificial Sequence
  derived and/or modified sequence
atggctactgatgataagaccagtccgactctcgattctgcgaacgacctgcctaggagtcccacttctccaagccatctgacacactttaaacctctgacgcctgaccaagacgagcccccgttcaagtcagcctattcaagctttgttaaccttttccgatttaataaagagcgggccgaaggtgggcagggtgaacagcaacctcttagtgggagctggacgagcccacagctcccctcccgcacacagtccgtgagaagccctactccatataagaaacagcttaacgaagagctgcagcgaaggagctcagcgcttgacactaggaggaaggcggaaccaaccttcggcggccacgaccctcggaccgccgtccagcttaggagcctgtctacagtgctgaagagattgaaagaaatcatggagggcaagtctcaggattcagaccttaagcagtattggatgcctgactctcagtgcaaggaatgttacgactgtagcgagaaatttacgacttttcgtagacgccaccattgtcggttgtgcggccagattttctgttctaggtgttgtaatcaggagataccaggcaagtttatgggctacacaggagacctgcgtgcttgtacttattgccggaagatagccctgtcatacgcccactccaccgatagcaattctatcggggaggaccttaacgccctgagtgactcagcttgcagtgtgagtgtccttgatccatccgagccaagaacccccgtgggatctaggaaggcaagtcgcaacattttcttggaggatgatctcgcctggcagagtttgatccatcccgatagctcaaataccccactgtccacacgcctggtctccgttcaagaggacgcgggaaagagccctgctaggaaccggtctgccagcatcaccaacttaagcttagatcgttccggctctccaatggtgccctcttatgagaccagcgtctcccctcaggcaaacagaacctacgttagaaccgaaacaaccgaggacgagaggaagatcttattagactccgtccagctcaaggacctgtggaaaaaaatctgccaccattctagcggaatggagtttcaggatcatcgatactggctgcgaacgcacccaaattgcatcgtagggaaggagctggtcaactggctgattcggaacggccacatcgccactagagcccaggctatcgctattggacaggcaatggtcgatggccgttggctggactgtgtgagccatcacgatcaactgttccgagacgagtacgctctctaccggcctctgcagtcgaccgagtttagtgaaaccccttcacccgatagcgacagcgtgaattcagtcgaggggcacagtgagccctcttggtttaaggatatcaagttcgacgattctgacactgagcagatcgccgaggagggcgatgataatctggcaaattctgcttctccctcgaagagaacatctgtctccagttttcagtcgacagtggactcagacagtgccgcctccatctccctgaatgtggagctggataacgttaactttcatatcaagaagccaagcaagtatcctcacgtacctcctcacccagctgatcagaaggaatatcttatcagcgatacggggggtcagcagctcagcatttctgacgcttttattaaggagagcctctttaaccgcagagtggaggagaagagtaaagaactaccctttactcctctgggttggcaccataacaacctggaacttctgagggaagagaacggcgagaagcaggcaatggagagattactgtcggccaatcacaatcacatgatggctctgttacaacaactactgcactctgactctttgagctctagctggcgagatattatagtgtcactggtctgtcaggtggtccaaactgtgagacccgacgtgaaaaaccaggacgatgatatggacatccgacagtttgtgcacattaagaagatccctggcggtaagaagttcgactctgtagtggtgaatggattcgtgtgtactaagaacatagcccataaaaaaatgtcttcctgtatcaagaatccgaaaattctactcctgaaatgttctatcgagtacctttaccgggaggagaccaagttcacttgtattgaccctatagtgctgcaagagagagagttcttgaagaactatgtgcagagaatcgtggacgtgagaccaactctagtgctggtggaaaagacagtttcccgtatcgcgcaggatatgctgctggaacatggcataaccctggtgattaatgtgaaatcccaggtgttggagagaattagccgcatgacacagggtgacctggtgatgagtatggaccaactcctgaccaagccccaccttgggacatgccataagttctatatgcagatcttccagttgcccaatgaacaaaccaagacactgatgttcttcgagggatgccctcaacatttaggttgtactattaaactaaggggcggatctgactacgagctggctcgggtgaaagagatcctgatttttatgatttgcgtggcttatcactctcagctcgagatatctttcctaatggatgagttcgccatgccgccaacccttatgcagaacccgtcgtttcatagtctgatagagggtcgggggcatgaaggggccgtccaggagcaatacggaggcggctccatcccttgggaccctgatatccctccagaatccctaccgtgcgatgacagtagccttctggaactccgtattgtgtttgagaagggcgaacaggaaaataagaacctcccgcaggccgtggcatcagtaaaacaccaggagcatagtaccactgcctgccccgctgggctgccctgcgccttttttgcaccagtgcccgagtccctcctgccactgcccgtggatgatcagcaggatgccctgggatccgagcaacccgaaacactgcaacaaacagtcgtgttgcaggaccctaaatcccaaatccgagccttccgggatcccctgcaggatgatacgggattgtatgtcaccgaggaggtgacctcaagcgaggacaaacgaaagacctattccctggctttcaaacaagagctcaaggacgtaatactctgcatatcgccagtaattacattccgggagcccttcctgctcactgagaagggcatgagatgtagtacaagagattatttcgccgaacaagtctattggagcccactgctgaacaaagagttcaaggagatggagaacaggaggaagaagcaacttctccgcgatctgtccgggctacaggggatgaacggcagcatccaggctaagtccatccaggtgcttccttcccacgaacttgtgtccacaagaattgcagaacatctgggggattcgcagtcgctcggacgcatgctagcagattaccgggcaagaggtggccggattcagcctaagaatagcgacccatttgcccacagtaaggatgcttccagtacttccagcggccagagtggatccaagaacgaaggcgatgaagagcgtgggttaatcttaagcgatgctgtgtggtctacaaaggttgactgccttaaccctatcaaccaccagagattgtgcgtcctgttcagcagttctagtgcccagtcgtcaaacgcccccagcgcctgcgtgtccccatggatagtgaccatggagttttacggaaaaaatgatctcaccttaggaatttttcttgagcggtactgtttcaggcccagctatcagtgtccaagcatgttttgtgatactcccatggtgcatcacataaggcgattcgtgcacggacagggctgtgttcaaataatactcaaggaactcgactcccccgtgcctggctaccagcacacaatcctgacctattcctggtgtcggatctgtaaacaggtgacaccagtggtcgccctgtctaacgaaagttggagcatgtcgtttgccaaatatctcgagcttcgcttctatggacaccagtacacacgcagagctaacgctgagccctgtggtcattctatccaccacgattaccaccagtatttctcctataaccagatggtagcaagcttctcctatagcccaattcgactgcttgaagtgtgtgtgcctctcccaaagatatttatcaagagacaggcacctctaaaggtctccctgctgcaggatctcaaagattttttccagaaggtgtcacaggtgtatgtggcaatagacgagcgcctcgcgagcctgaaaaccgacacattttctaagacacgcgaagagaagatggaagacatcttcgcacagaaggaaatggaggaaggcgagttcaagaattggatcgaaaaaatgcaggccagactgatgagctccagcgtagatactcctcagcagctgcagtccgtgtttgagagcctcatcgcgaagaagcagagcctgtgtgaggtgttgcaggcatggaacaataggctacaagatttgttccagcaggagaagggccgcaagcgcccaagcgtgccgccatcccccggtaggctgagacaaggagaagaaagcaaaatatctgccatggatgcatccccacgaaacataagcccgggcctgcagaatggcgaaaaagaggaccggtttcttaccaccctgtcaagccaatcctccacctcaagcactcacctacagctgccaacaccccctgaggtgatgagcgagcagtcagtgggggggcccccggagctagatacagcaagtagctccgaggacgtgtttgatgggcatctgctgggtagcacagattcccaggtcaaggagaaaagtacgatgaaggctatattcgctaatctgctgccaggcaactcttataatccaattccctttccttttgatccagacaaacactatttaatgtatgaacacgagagagtgccgatcgcggtgtgcgaaaaggagcctagtagcatcatcgcatttgccctcagttgcaaggaataccggaacgccttagaagagcttagcaaggcgacacagtggaattctgcagaggagggtctgcccactaactccacgtctgactccagaccaaaatcaagttccccaattcggctcccagagatgagcggtggtcagaccaatcgaaccacagagactgagcctcagcctacaaaaaaggcctccggtatgctgtctttctttagaggtactgccggaaaaagtccagacttgtccagccagaaacgagagactcttagaggagccgatagcgcatactaccaggtgggacaaacaggaaaagagggaacagaaaatcagggagtagagcctcaggatgaggtcgatggaggcgacactcagaaaaagcagcttatcaatccccacgtggaacttcagttctcagacgctaacgcaaaattttattgcagactgtattacgcaggagagttccataagatgagggaggtcatactggatagttcggaggaggacttcataagatccttgagccattcgtccccttggcaagcccgaggcggaaagtccggagcagctttctacgcaacggaggacgaccgattcatcctgaagcaaatgccccgactcgaggttcagtcctttcttgacttcgctccccactactttaattacataacaaatgccgtccagcagaaacgaccgacagctctagcgaaaatcctaggagtgtacaggatcggctataagaattctcagaataacactgaaaagaagcttgatcttctggtgatggagaatctcttctacgggagaaaaatggctcaagtgtttgacctcaagggatctctgcgcaataggaatgtgaagacggacacagggaaggagtcatgtgacgtcgtgctcctagacgaaaacctcctaaaaatggtacgagataatcccttgtacatccgatcccattctaaagctgtcctacgtacttctatacactccgacagccactttctttcctctcacctaattatcgactactcactgctggtcgggagggatgacacttccaatgagttagtcgtcggaataatagactacattagaacttttacctgggataagaaattagaaatggtcgtgaagtctacaggcatcttaggcggccagggcaaaatgccaacagtggtatcccccgaactatatagaacccgcttctgcgaggcaatggacaaatacttcctgatggtgcctgaccattggactggcctcggtctaaactgttag

SEQ ID NO: 183937 - DNA, 6297 bp, Artificial Sequence
  derived and/or modified sequence
atggccacagatgacaagaccagccccaccctggacagcgccaatgacctgcccaggagccccaccagccccagccacctgacccacttcaagcccctgaccccagaccaggatgagccccccttcaagagcgcctacagcagctttgtgaacctcttccgcttcaacaaggagcgggcagagggcggccagggcgagcagcagcccctgagcggctcctggaccagcccccagctgcccagcaggacccagagcgtgcgcagccccaccccctacaagaagcagctgaatgaggagctgcagaggaggagcagcgccctggacaccaggaggaaggccgagcccacctttggaggccatgaccccaggacagctgtgcagctgcggagcctgagcacagtgctgaagaggctgaaggagatcatggagggcaagagccaggacagcgacctgaagcagtactggatgccagacagccagtgcaaggaatgttatgactgcagcgagaagttcaccaccttcagaagaagacaccactgccgcctgtgtggccagatcttctgcagccgctgctgcaaccaggagatccctgggaagttcatgggctacaccggggacctgcgggcctgcacctactgcaggaagatcgccctgtcctatgcccacagcacagacagcaacagcattggagaggacctgaatgccctgagtgacagcgcctgcagcgtgtctgtgctggaccccagcgagcccaggacccctgtgggcagcaggaaggccagcaggaacatcttcctggaggatgacctggcctggcagagcctcatccacccagacagcagcaacacccccctgagcacccggctggtgtctgtgcaggaggatgctgggaagagccctgccaggaacagaagtgccagcatcaccaacctgagcctggacaggagcggcagccccatggtgcccagctatgagacctctgtgagcccccaggccaacagaacctacgtgaggacagagaccacagaagatgagaggaagatcctgctggacagcgtgcagctgaaggacctgtggaagaagatctgccaccacagcagcggcatggagttccaggaccaccgctactggctgcggacccaccccaactgcatcgtgggcaaggagctggtgaactggctgatcagaaatggccacatcgccacccgggcccaggccatcgccatcggccaggccatggtggatggccgctggctggactgtgtgagccaccacgaccagctgttcagagatgaatatgccctgtaccggcccctgcagagcacagagttcagcgagacccccagcccagacagcgacagcgtgaacagcgtggagggccacagcgagcccagctggttcaaggacatcaagtttgatgacagcgacacagagcagattgctgaggagggagatgacaacctggccaacagcgccagccccagcaagaggacctctgtgagcagcttccagagcacagtggacagcgacagcgctgccagcatcagcctgaatgtggagctggacaacgtgaacttccacatcaagaagcccagcaagtacccccacgtgcccccccaccctgctgaccagaaggagtacctgatcagtgacaccggcggccagcagctgagcatcagtgatgccttcatcaaggagagcctcttcaacagaagagtggaggagaagagcaaggagctgcccttcacccccctgggctggcaccacaacaacctggagctgctgcgggaggagaatggagagaagcaggccatggagcggctgctgagcgccaaccacaaccacatgatggccctgctgcagcagctgctgcacagcgacagcctgagcagctcctggagggacatcatcgtgtccctggtgtgccaggtggtgcagacagtgcggccagatgtgaagaaccaggatgatgacatggacatccggcagtttgtgcacatcaagaagatccctgggggcaagaagtttgacagcgtggtggtgaatggatttgtgtgcaccaagaacatcgcccacaagaagatgagcagctgcatcaagaaccccaagatcctgctgctgaagtgcagcattgagtacctgtaccgggaggagaccaagttcacctgcatcgaccccatcgtgctgcaggagcgggagttcctgaagaactacgtgcagagaattgtggatgtgcggcccaccctggtgctggtggagaagacagtgtccagaattgcccaggacatgctgctggagcacggcatcaccctggtgatcaacgtgaagagccaggtgctggagcgcatcagcaggatgacccagggcgacctggtgatgtccatggaccagctgctgaccaagccccacctgggcacctgccacaagttctacatgcagatcttccagctgcccaatgagcagaccaagaccctgatgttctttgagggctgcccccagcacctgggctgcaccatcaagctgcggggcggcagtgactatgagctggcccgggtgaaggagatcctgatcttcatgatctgtgtggcctaccacagccagctggagatctccttcctgatggatgaatttgccatgccacccaccctgatgcagaaccccagcttccacagcctgattgagggccggggccacgagggcgctgtgcaggagcagtatggaggcggcagcatcccctgggaccctgacatccccccagagagcctgccctgtgatgacagcagcctgctggagctgcgcatcgtgtttgagaagggggagcaggagaacaagaacctgccccaggccgtggcctctgtgaagcaccaggagcacagcaccacagcctgcccagctggcctgccctgtgccttctttgcccctgtgcctgagagcctgctgcccctgcctgtggatgaccagcaggatgccctgggcagcgagcagcctgagaccctgcagcagacagtggtgctgcaggaccccaagagccagatccgggccttccgggaccccctgcaggatgacaccggcctgtatgtgacagaggaggtgaccagcagcgaggacaagaggaagacctacagcctggccttcaagcaggagctgaaggatgtgatcctgtgcatcagccctgtgatcaccttccgggagcccttcctgctgacagagaagggcatgcgctgcagcacccgggactactttgctgagcaggtgtactggagccccctgctgaacaaggagttcaaggagatggagaacagaaggaagaagcagctgctgcgggacctgagcggcctgcagggcatgaatggcagcatccaggccaagagcatccaggtgctgcccagccatgagctggtgtccaccagaattgctgagcacctgggggacagccagagcctgggccgcatgctggccgactaccgggcccggggcggccgcatccagcccaagaacagcgacccctttgcccacagcaaggatgccagcagcaccagcagcggccagagcggcagcaagaatgaaggagatgaggagcggggcctcatcctgagtgatgctgtgtggagcaccaaggtggactgcctgaaccccatcaaccaccagaggctgtgtgtgctcttcagcagcagcagcgcccagagcagcaatgcccccagcgcctgtgtgagcccctggatcgtgaccatggagttctacggcaagaatgacctgaccctgggcatcttcctggagcgctactgcttccggcccagctaccagtgccccagcatgttctgtgacacccccatggtgcaccacatcagaagatttgtgcacggccagggctgtgtgcagatcatcctgaaggagctggacagccctgtgcccggctaccagcacaccatcctgacctacagctggtgccgcatctgcaagcaggtgacccctgtggtggccctgagcaatgaatcctggagcatgagctttgccaagtacctggagctgcgcttctacggccaccagtacacccggcgggccaatgctgagccctgtggccacagcatccaccacgactaccaccagtacttctcctacaaccagatggtggccagcttctcctacagccccatccggctgctggaggtgtgtgtgcccctgcccaagatcttcatcaagaggcaggcccccctgaaggtgtccctgctgcaggacctgaaggacttcttccagaaggtgtcccaggtgtatgtggccattgatgagcggctggccagcctgaagacagacaccttcagcaagacccgggaggagaagatggaggacatctttgcccagaaggagatggaggagggggagttcaagaactggattgagaagatgcaggcccggctgatgagcagctctgtggacaccccccagcagctgcagagcgtgtttgagagcctgattgccaagaagcagagcctgtgtgaggtgctgcaggcctggaacaaccggctgcaggacctcttccagcaggagaagggcaggaagaggcccagcgtgccccccagccctggccgcctgcggcagggcgaggagagcaagatcagcgccatggatgccagccccaggaacatcagccctggcctgcagaatggagagaaggaggaccgcttcctgaccaccctgagcagccagagcagcaccagcagcacccacctgcagctgcccaccccacctgaggtgatgtctgagcagagcgtgggcggccccccagagctggacacagccagcagcagtgaagatgtgtttgatggccacctgctgggcagcacagacagccaggtgaaggagaagagcaccatgaaggccatctttgccaacctgctgcccggcaacagctacaaccccatccccttcccctttgatcctgacaagcactacctgatgtatgaacatgagcgggtgcccatcgctgtgtgtgagaaggagcccagcagcatcatcgcctttgccctgagctgcaaggagtacagaaatgccctggaggagctgagcaaggccacccagtggaacagcgctgaggagggcctgcccaccaacagcaccagtgacagccggcccaagagcagcagccccatccggctgcctgagatgtctgggggccagaccaacagaaccacagaaacagagccccagcccaccaagaaggccagcggcatgctgtccttcttccggggcacagctgggaagagcccagacctgagcagccagaagcgggagaccctgcggggagctgacagcgcctactaccaggtgggccagacaggcaaggagggcacagagaaccagggcgtggagccccaggatgaggtggatggaggagacacccagaagaagcagctgatcaacccccacgtggagctgcagttcagtgatgccaatgccaagttctactgccgcctgtactatgctggggagttccacaagatgagggaggtgatcctggacagcagcgaggaggacttcatccgcagcctgagccacagcagcccctggcaggcccggggcggcaagagcggggccgccttctacgccacagaagatgaccgcttcatcctgaagcagatgccccggctggaggtgcagagcttcctggactttgccccccactacttcaactacatcaccaatgctgtgcagcagaagaggcccacagccctggccaagatcctgggcgtgtacagaattggctacaagaacagccagaacaacacagagaagaagctggacctgctggtgatggagaacctcttctacggcaggaagatggcccaggtgtttgacctgaagggcagcctgaggaacagaaatgtgaagacagacaccgggaaggagagctgtgatgtggtgctgctggatgagaacctgctgaagatggtgcgggacaaccccctgtacatccgcagccacagcaaggctgtgctgcggaccagcatccacagcgacagccacttcctgagcagccacctgatcatcgactacagcctgctggtgggcagagatgacaccagcaatgagctggtggtgggcatcatcgactacatccgcaccttcacctgggacaagaagctggagatggtggtgaagagcacaggcatcctgggcggccagggcaagatgcccaccgtggtgtccccagagctgtaccgcacccgcttctgtgaggccatggacaagtacttcctgatggtgcctgaccactggacaggcctgggcctgaactgctag

SEQ ID NO: 183938 - DNA, 6297 bp, Artificial Sequence
  derived and/or modified sequence
atggccaccgacgacaagaccagccccaccctggacagcgccaacgacctgccgcggtcacctacctctccctcacatctaacacattttaaaccactaacccccgatcaagatgagccgccatttaaaagcgcttactcatcatttgtgaatttattccggttcaataaagagagggccgaagggggtcagggcgagcagcaaccactctctggttcgtggactagcccgcaactccctagccgcacacagtcggtgaggtctccaactccttacaagaaacagctcaacgaggagctgcagcgccgcagctctgcactggatacaaggcgaaaggcagaacctactttcggtgggcacgaccccaggaccgcggtgcagcttaggagcctgtcaactgtgctcaaacggctgaaggagatcatggagggcaagtcgcaggattctgacctcaaacagtactggatgcctgactcacaatgcaaggagtgttatgactgttctgagaagtttacgactttccgccgccgtcaccattgtcgtctttgcggtcagattttttgctctcgctgctgtaatcaggagatcccgggtaaattcatgggttatactggggacctgagagcgtgcacctattgtcggaaaattgcattgtcatacgcccactccacagacagtaacagcataggagaagacctgaacgcgctctcggactcagcgtgttctgtatcggtgttggaccctagtgagccaagaaccccagtaggttccaggaaggctagccggaatatcttcttagaggacgacctggcctggcagagcctcatccaccccgatagcagcaacaccccactttccaccagattggtgagtgttcaggaggatgccggaaagtctccagcacggaacaggagtgcatccattactaacctgtctctggatcggtccggtagcccaatggtcccctcatacgagacaagtgtgtcgcctcaagctaatcggacatacgttcgtaccgaaacaaccgaggatgagcggaagattctgttagactcggtccagctgaaagatttatggaagaaaatatgtcatcactcgagtggaatggaattccaagaccacagatactggcttcggacgcaccccaattgtattgtgggcaaggaactggtgaactggctgataagaaacggccacattgccacaagggcccaggccatagctattgggcaggccatggttgacggtcgctggctggattgtgtgtctcaccacgaccagctgtttagggacgagtacgcgttgtaccgccctttacagagtacagaattctctgaaacccccagtcctgattctgactccgtaaactctgtggaaggtcactcggagcccagttggttcaaagacataaagtttgatgattccgataccgagcagatcgccgaggagggggacgacaacctcgctaactctgcgtcccccagtaagcgcacctctgtgagtagcttccaatccacagtagattccgactctgccgctagtatcagcttgaacgtcgaactggataacgtgaattttcacataaagaagccgtcaaaatatccccacgtgccacctcacccagcggaccagaaggagtatctgatctcagatacaggaggccagcagctgtctattagcgatgccttcattaaagagtccctgttcaataggagggtcgaggagaagtctaaggaactgccattcacccctctcggatggcaccataataacctcgagttgctgagagaagagaacggggaaaagcaggctatggagcgcctccttagcgccaatcacaatcacatgatggctctgcttcagcagctgttgcactccgacagtctgagtagcagctggcgggatatcatagtttctttggtatgccaagtagtacagacagtgcgacccgatgttaaaaatcaagatgacgatatggacatcaggcaattcgtacacatcaaaaagattccaggcggcaagaaattcgattcagtcgtcgttaatggattcgtttgcaccaagaatatcgcgcacaagaagatgtcctcatgtatcaaaaacccaaaaattctactgctgaagtgttctattgagtacctctatagggaggaaaccaaatttacgtgcatagaccctattgtgctgcaggagcgagagttccttaaaaactacgtgcagcgaatcgtggatgtaaggcctaccctcgtgctggtcgagaagaccgtttcacgtattgcccaggacatgctactggaacacggcattacccttgtgatcaacgtgaaaagccaggtgctcgagcggatcagcagaatgacacagggcgacttggtaatgagcatggatcaactgttaactaagccacatcttgggacatgtcataagttttacatgcagatcttccagctccccaatgaacagacaaagaccctgatgttcttcgaaggatgcccacaacacctggggtgcacaataaagctgcgcggtgggtccgactacgagctggctagagtcaaagagatattaattttcatgatttgcgtggcctatcacagccagcttgagatctcctttctaatggacgagtttgcgatgccgccgacccttatgcaaaacccctcttttcactcgttaatcgagggcaggggacatgaaggagcagtacaggagcagtatggcggagggagcattccgtgggatcccgacataccgccagagagcctcccatgcgacgactccagcctgctcgaactacgcatcgtgtttgaaaaaggggagcaggaaaacaagaatctgccacaggcagtggcgagcgttaagcatcaagagcattcaaccactgcttgtcctgccggactaccctgcgccttctttgcgcccgtccccgagagcctgcttccacttccagtggatgatcaacaggacgcactgggatcagaacaaccagagactcttcagcagacagtagtgctgcaggatcccaaatcacagattagggccttccgtgacccattgcaagacgataccggcctatacgtaacggaggaggttaccagtagcgaagacaaacgtaagacgtacagcctagccttcaagcaggagctaaaagatgttattctctgcatttctccagtgatcacattcagggaaccattcctgctgaccgagaaaggcatgaggtgcagtacccgagactacttcgcagaacaggtatactggtctcccttgctgaataaggaatttaaagagatggagaatagacgaaaaaagcagctgctgagggatctctcaggcttgcagggaatgaatggctccattcaggctaagagcatacaggtgcttccaagccacgaactggtttccaccaggatcgctgagcatctcggagatagccagagcctcggaaggatgctggccgactatcgggcaaggggtggccgaatccaaccaaaaaattccgatccctttgcgcactccaaggacgcttcctcgacttccagcggtcagagcgggtccaagaatgaaggagatgaagagcggggtctgattctgtcagatgccgtgtggtcaacaaaagtggattgtcttaatccaatcaatcatcagcgcttgtgcgtgcttttttctagctccagcgcccagtcttccaatgcaccttccgcttgtgtcagcccttggattgtcactatggagttttacgggaagaatgatttaaccctcggaatatttctcgaacggtactgtttcaggccgtcgtatcagtgcccttctatgttttgtgacacccccatggtccaccatatccgcagatttgttcatgggcagggatgcgtgcagattatcctgaaagagctggattcacccgtgcccggttaccagcatactatcttgacatatagttggtgtcgcatctgcaagcaagtcactccagttgtggccctttctaacgaatcttggtccatgtcctttgctaagtaccttgagctccggttttacgggcaccagtacacaaggcgcgctaacgcagaaccatgcggccacagtattcatcacgactatcaccagtacttctcttacaatcagatggtcgctagcttctcctattcccctattcggctgctggaagtgtgcgttcccctccccaagatcttcattaaaaggcaggcacctctcaaagtatctctgctgcaggatcttaaagatttttttcagaaggtctcgcaggtgtacgtggcgattgacgagagacttgcctctctaaaaaccgacacattcagtaaaacccgggaagaaaagatggaagatatatttgcacagaaggagatggaggaaggggagtttaagaactggatcgagaaaatgcaggctcgtctcatgagttcaagcgtggacactccccagcagctgcagtcagtgtttgagtctctcatcgccaagaagcagtccttgtgcgaggtgctacaggcctggaataatcggttgcaggatttattccagcaagagaaaggacggaagcgcccctcagtgccaccaagtcctggtagactcaggcagggggaggagagtaagatcagtgccatggatgcgtcacccaggaacattagtcccggcctgcagaacggagagaaagaggacagatttctgactacactatccagtcagtctagcaccagtagcacacacctgcaactgcctacacctcctgaagtcatgtcagagcagtctgtgggcgggccccccgaactggataccgctagcagcagtgaagatgtgtttgatggccacctgctgggatctacagactcacaggtcaaagaaaagagcactatgaaggcaattttcgccaatctcctcccaggtaatagttataacccgatcccgtttcccttcgatcccgataaacattacctgatgtatgagcatgagcgagtgccaatagcagtatgcgagaaggagccgagctcaataatagcctttgcattgtcttgcaaggaataccgaaacgcattggaggagctcagcaaagccacccagtggaactctgctgaggagggactgcctacgaactcgacatccgacagtagacccaagtctagcagtcccattaggttgcccgaaatgtcagggggacagacaaatagaaccactgagaccgagccccagccaaccaaaaaagcttctgggatgttatctttcttcaggggcaccgcggggaaaagccccgacctgagctcacagaagcgcgagaccctgaggggcgcagattcagcctactatcaagtgggccagactggtaaggagggcacagagaaccagggcgtagagccccaggatgaagttgatggaggtgacacacagaaaaagcagcttattaatccacacgttgagctgcagttctctgacgctaacgcgaagttttattgtagactgtattacgctggggaatttcataaaatgagggaggtcattctcgatagcagcgaggaggacttcatacggtccctgtcacacagctccccatggcaggcacgaggtggaaagtcaggggccgctttctatgcgacagaggacgatcgctttattcttaaacaaatgccacgccttgaagtacagtctttccttgacttcgctccccattactttaactacatcaccaacgccgtgcagcagaaaagacctactgccttggccaagattctgggcgtctaccgcatcggctataagaactcgcaaaataacacggaaaaaaaattagacctgctggtgatggagaaccttttttatggccggaaaatggctcaggtgtttgatctgaagggctcactgcggaaccgcaatgtgaaaacagataccggaaaggaatcctgcgatgtagttctgctggatgagaatctcttgaaaatggtgcgcgataacccgctgtatattcggtcccactcgaaggctgttctacggacgagcattcactctgacagtcattttctctcttcccacctgattattgactacagcctgctagtgggaagagacgatacctcgaatgaactagtggtgggaataatcgattacatccggacctttacatgggacaagaagctggagatggtggtgaaatccacagggatacttgggggacaggggaagatgccaaccgtggtgagccctgagctgtatcgaacccgcttttgcgaagccatggataaatacttcttgatggttccagatcactggaccggcttaggactcaactgctag

SEQ ID NO: 183939 - DNA, 9901 bp, Artificial Sequence
  derived and/or modified sequence
caaccatgtaagcagcttcgcttcctgccgcaaccgtccgcggcctgaggagcccaccgccgctctcgggggccgacttccgggggctgagccgttgaagcggaggctggggcggggggcagccggcgcggccggggcaggaggcgcagactcatgaaatggccacagatgataagacgtccccaacactggactctgctaatgatttgcctcgatctcctactagtccttctcatctcacacactttaaacctttgactcctgatcaagatgagcccccttttaaatcagcttatagttcttttgtaaatctctttcgttttaacaaagagagagcagaaggaggccagggagaacagcagcctttgagtggaagttggaccagccctcagctcccttcgaggacacagtctgttaggtcacccacaccttataaaaagcagcttaatgaggaactccagcggcgctcttcagcattagacacaagaaggaaagcagaacctacctttggaggtcatgaccctcgtacagctgttcagcttcgaagcctcagcacagtattaaaacgcctcaaggaaatcatggaggggaaaagccaggatagtgacctgaaacaatactggatgccagatagccaatgtaaagagtgctatgactgtagtgagaaatttacaacctttaggcgcagacaccattgccgactatgtgggcagattttctgcagtcgttgctgtaatcaagaaatccctggaaaatttatgggctatacaggagacctccgagcttgcacatattgtagaaaaatagccttaagttatgctcattccacagacagtaattctattggggaagacttgaatgctctttcagattctgcttgctctgtgtctgtgcttgatccaagtgaaccccgaacacctgttgggagtaggaaagccagccgtaacatatttttagaggatgatttggcctggcaaagtttgattcatccagattcctcaaatactcctctttcaacaagacttgtatctgtgcaagaggatgctgggaaatctcctgctcgaaatagatcagccagcattactaacctgtcactggatagatctggttctcctatggtaccttcatatgagacatctgtcagtccccaggctaaccgaacatatgttaggacagagaccactgaggatgaacgcaaaattcttctggacagtgtgcagttaaaagacctgtggaaaaaaatctgccatcacagcagtggaatggagtttcaggatcaccgctactggttgagaacgcatcccaactgcattgtaggaaaggaattagtcaactggctaatccgaaatgggcatattgccacaagggcacaagctatagcaattggacaagcaatggttgatggacgttggctggattgtgttagtcatcacgaccagcttttcagagatgagtatgcgctgtatagaccactgcagagtacagaattttctgagacgccttctcccgacagtgactcagtgaactccgtggaaggacactctgagccatcctggtttaaagacataaagtttgatgacagtgacacagaacagatagctgaagaaggtgacgataatttggctaattctgccagtcctagcaagcgcacatcagtcagcagtttccagtccacagtggacagtgactcagccgcttctatcagcctgaacgtggagctggacaacgtgaacttccatatcaagaagccctccaagtacccacatgtgccccctcaccctgctgaccaaaaagagtatttgatttctgacactggaggacaacagctctcaataagtgacgctttcatcaaagaatccttatttaatcgccgagtagaggaaaaatccaaagagctgcctttcacacctttgggctggcatcataacaacctggagctcctgagggaggagaatggggagaaacaagccatggagaggttgctttcagctaatcataaccacatgatggcactactccagcagttgctccatagtgactcactgtcatcatcttggagggacatcatcgtgtcattggtctgccaggttgttcagacagtccgacctgatgtcaagaaccaggatgatgacatggatatccgtcagtttgtccacatcaaaaaaatcccaggtggaaagaagtttgattctgtggttgtcaatggctttgtttgtaccaagaacattgcacataaaaagatgagttcttgtattaaaaaccccaaaattcttctgttgaagtgttccattgagtatctctacagagaagaaactaagtttacttgcattgatcctattgtgcttcaggaaagggaattcttgaagaattatgtccagcgaatagttgatgttcgacccaccttggttcttgttgagaaaacagtgtctcggattgcccaggacatgttattggaacatggcattactttggtcattaatgtaaagtcacaagttttggaacgaatcagtcgaatgacccaaggtgatttagtgatgtcaatggaccagctgcttacgaaaccacacctgggcacttgtcacaaattttatatgcagatatttcagttgcctaatgaacaaaccaagacactgatgttttttgaaggttgtccacagcacctaggctgtacaatcaagctaagaggaggctctgattatgagctggctcgagttaaggagatcctaatatttatgatctgtgttgcttatcattctcaactagaaatatcctttctcatggatgaatttgctatgcctcccacattaatgcaaaacccttcattccattccctgattgagggacgagggcatgagggggctgtccaagagcagtacggtggaggttccatcccctgggatcctgacatccctcctgagtctctgccctgtgatgatagcagtttgctggaattgaggattgtgtttgagaagggtgagcaggaaaataaaaatcttccgcaggctgttgcctctgtgaagcatcaagaacatagcacaacagcttgcccggcgggtctcccttgtgctttctttgcacctgtaccggaatcattgttgccactccctgtggatgaccaacaagatgctttaggcagcgagcagccagagactttgcagcaaacagttgtgctgcaggatcccaaaagccagataagagcctttagagaccctctacaggatgacactggattatatgttactgaggaagtcacctcctctgaagataaacgaaagacttattctttggcctttaagcaggaattaaaagatgtgatcctctgtatctccccagtaatcacattccgagaaccctttcttttaactgaaaaggggatgagatgctctacccgagattattttgcagagcaggtttactggtctcctctcctcaataaagaattcaaagaaatggagaacaggaggaagaaacagctgctcagggatctctctggacttcagggcatgaatggaagtattcaggccaagtctattcaagtcttaccctcacatgagctagtgagcactagaattgctgagcatctgggcgatagccagagcttgggtagaatgctggccgattatcgagccagaggaggaagaattcagcccaaaaattcagacccttttgctcattcaaaggatgcatcaagtacttcaagtggccaatcaggaagcaaaaatgagggtgatgaagagagagggcttattctgagtgatgctgtgtggtcaacaaaggtggactgtctgaatcccattaatcaccagagactttgtgtgctcttcagcagctcttctgcccagtccagcaatgctcctagtgcctgtgtcagtccttggattgtaacaatggaattttatggaaagaatgatcttacattaggaatatttttagagagatactgtttcaggccttcttatcagtgtccaagcatgttctgtgatacccccatggtacatcatattcggcgctttgttcatggccaaggctgtgtgcagataatcctgaaggagttggattctccagtacctggatatcagcatacaattcttacatattcctggtgtagaatctgcaaacaggtaacaccagttgttgctctttccaatgagtcctggtctatgtcatttgcaaaataccttgaacttaggttttatgggcaccagtatactcgcagagccaacgctgagccctgtggtcactccatccatcatgattatcaccagtatttctcctataaccagatggtggcgtctttcagttattctcccattcggcttcttgaagtatgtgttccactccccaaaatattcattaagcgtcaggccccattaaaagtgtcccttcttcaggatctgaaggacttctttcaaaaagtttcacaggtatatgttgccattgatgaaagacttgcatctttgaaaactgatacatttagtaaaacaagagaggaaaaaatggaagatatttttgcacagaaagagatggaagaaggtgagttcaagaactggattgagaagatgcaagcaaggctcatgtcttcctctgtagatacccctcagcaactgcagtcggtctttgagtcactcattgccaagaaacaaagtctctgtgaagtgctgcaagcttggaataacaggttgcaggaccttttccaacaggaaaagggtagaaagagaccttcagttcctccaagtcctggaagactgagacaaggggaagaaagcaagataagtgcgatggatgcatctccacggaatatttctccaggacttcagaatggagaaaaagaggatcgcttcttaacaactttgtccagccagagctccaccagttctactcatctccaattgcctacgccacctgaagtcatgtctgaacagtcagtgggagggccccctgagctagatacagccagcagttccgaagatgtgtttgatgggcatttgctgggatccacagacagccaagtgaaggaaaagtcaaccatgaaagccatctttgcaaatttgcttccaggaaatagctataatcctattccatttccttttgatccagataaacactacttaatgtatgaacatgaacgagtgcccattgcagtctgcgagaaggaacccagctccatcattgcttttgctctcagttgtaaagaataccgaaatgccttagaggaattgtctaaagcgactcagtggaacagtgccgaagaagggcttccaacaaatagtacttcagatagcagaccaaagagtagcagccctatcagattacctgaaatgagtggaggacagacaaatcgtacaacagaaacagaaccacaaccaaccaaaaaggcttctggaatgttgtccttcttcagagggacagcagggaaaagccccgatctctcttcccagaagagagagaccttacgtggagcagatagtgcttactaccaggttgggcagacgggcaaggaggggaccgagaatcaaggcgttgagcctcaagatgaagtagatggaggagatacacaaaagaagcaactcataaatcctcatgtggaacttcaattttcagatgctaatgccaagttttactgtcggctctactatgcgggagagtttcataagatgcgtgaagtgattctggacagcagtgaagaagatttcattcgttccctctcccactcatcaccctggcaggcccggggaggcaaatcaggagctgccttctatgcaactgaggatgatagatttattttgaagcaaatgcctcgtctggaagtccagtccttcctcgactttgcaccacattacttcaattatattacaaatgctgttcaacaaaagaggcccacggcgttggccaaaattcttggagtttacagaattggttataagaactctcagaacaacactgagaagaagttagatctccttgtcatggaaaatcttttctacgggagaaagatggcacaggtttttgatttgaagggctctcttaggaatcggaatgtaaaaactgacactggaaaagagagttgtgatgtggtcctgctagatgaaaatctcctaaagatggttcgagacaaccctctatatattcgttctcattccaaagctgtgctgagaacctcgatccatagtgactcccatttcctttctagccacctcattatagattattctttgctggttgggcgagatgatactagcaatgagctagtagttggaattatagattatattcgaacatttacatgggacaaaaagcttgagatggttgtgaaatcaacaggaattttaggtggacaaggtaaaatgccaacagtggtgtctccggagttgtacaggactaggttttgtgaggcaatggacaagtatttcctaatggtaccagaccactggacaggcttgggtctgaattgctgaaatcaagcacatattttgaaatggactgtgaaggaaaaggggacaggaacaaaggaccaaaaataagctacatgttttatttcttcatcgtgttcaccactgtatgccaaggcttttcagttctgtggctgtttagactgtccgtaatggaatggtaaaactccatgaatttgcactttggtttttgatacctgtggagctgtctgtaggttgggaagtggcatgaaaattttcttaagctaaaatacagacatgtttcaaagggctaaagttggagatgagtagatagggtgaaaaatgggttaaatttgctagcttaattgttttaagaagaaaacagtgtctcataaattgactatcctggcatcacatttaacatgttatctacttagaaagcatttgtagagctgctgaatttgttttgtgtttttctgtaataatttaatgttacttattatcagaatttctgaaacctttacaaaaattctgatttattccattaatggccggttaaacacgtgggcatttattgttttattgaggaatttgacttaaactgggaatcctgtcatgttgtttatctttccagcttgcctgtttttgagtatgtttgatgtttttaaaattttgtcttctctgtggaagacaggaggctacagcaattaactttaagcctccttttagagatatttttaaaacttgtttaaaatttttgtgcaattcatatattaaattgcacttacttgcatacgctcatattctagggttttttctctatttttagggtatcatagtaaatcattagtaaatgagtctgtagttactaaaccctaatggaataattattaatgaaagatttttgaaatataaaaaataaattaggcccaatccaagaaattgagtgagaaggaaacacttgttttattcacagaggtaaagtgtcttttcaatataaccagcaatttaggtggcatctataaaataaaaaatttctactgtggacatccccttttccaactttctacataatggctagttctgactactaagaaatgttaagaaataggccaagtgcggtggctcacgcctataatcctatcactttgggaggcctaggcaggcagatcacctgaggtcaggagttcaagaccagcctggccaacatgacgaaaccccatctctactaaaaagacaaaaaattagctgggcatggtggcatatacctgtaaccccaactacttgggtggctgaggcaggagaattgtttgaacctgggaggcggaggctgcagtgagctgggattacaccattgcattccagcctgggcaacagagcaagactgtctcaaaaaacaaaacgaaacaaaaaaagaaagttattcttagtaaggaacttcttgtttaatagcatttttgtttattttaaaaagtgatcagaagtagtaaactatctttgaggaaatactgtaaccccagaatatttcctcttgacttctttttgtaacaaggataatttagggatttataaagttgtaaggatttcactgtttttggactgcctataataatagcacattaaccttcacataataagaaatctggacaagttcagttacacagtatgatgaatacttgaattaggaacattgtggaaaatttgctttagagaatcaaggcagtagtttggtatttggtgcttattaaaaatgtggtttgttttgaactggaagcaagttgaccaaggacttatgactaatgtgatgctaagttccacttggccccttttaaaaacgtgtatgtgccttttgaagatacacaaaacactgaggattttagttttgaaatcaaagactattaaaggagctgtacagaggtaaaaaaataaatgtggaacattattaacttactttgtgtctaggaacaatggattttgtatctgatttaaaatgccaacactgttttgtctctgttcattttttctgtgaggatacttaaggttattattcctgtctgtttcctgtactcccctagtcatgagcacttgaagtacaaggtgtctccccctaggtgcaattaggttgtttctttgtttttagtttcaattctatgtgcatagcaggaatgctccacaggaatggcttctgacaataatctgtcctgttgattttgttttccttgcccatgacttgaacaactgtgttttaaagtactgtagtctagtaggtaactttgtggcaaaaattttcaatataatacattctgaaacaatagttgctgccttgcaaaggtaatctctcattttaaaattggacagtattaatgaaggggaaatatacaatttatttctattgagtggtagaactatatgtctggtcccttgctgctcttgtttaggccactatcatagatatatttcaaatattgtactactcagtgttaagtattgaatgactgtttccctttccttcaaggcctagagtatattctgaaaatttaggaatgaggaagaaatcttaatacttccttccttaacatacaacatgagtcccgagaataattgatagtagcaagagaaaactatgtcagtaacatgttgctttgtataaaaatcttatttataaatgtgaagctttttgatgccatcaaaacttattaaaaaataggatttacttttttctaattctgacctaagaaaaataatgagaacaagctgttgcaagctcttttgtagtctattgaatattttatagatattcaaaatttcctacaaactataattttttccatgatttagcagtgagtgattttctagctttggctcttattaggtattgtaaatagtagggttatatcgatatcagcttttgtgatggcattgtggtcatcagcttcatgacattttacccatttgcagtgatcctgtgtaaaactgccaaggaaagtaattacctgtaggagtttgctgagcttgaagagtgaaaactgttgtgaatgagcctgatcataaaacggaccaggccattcattattcctcaagtgttaatatactgacttatgcagtattcaaaccatctagtgcaatgtttttgtttttgttttttttttggtaacacaggtgcagtgtattatagaaaaaataaaaactacaatcattagcagttttaatactgctgtgtcagttttgtaaaaaatgtacattatgtcttttgacatgttgaattttaaactagggaaatgacattgtaaatcatagtagcctcttttaatttaatatgaaaaatgccactatattgaaagtacttaatgtattgtatatatttctctactttggttctagctattttatatgattgacatgttatttaaaagataactgccttgaacttttggagacttgtactgtaaataaagaaatcttaacaataaactcagaatctacttactcca

SEQ ID NO: 183940 - DNA, 6297 bp, Artificial Sequence
  derived and/or modified sequence
atggctaccgacgataagacttctccaactcttgatagcgccaacgatctgccccgaagtccaacctccccgagccacctgactcacttcaaacctcttacacccgaccaggatgagcctccatttaagagtgcttacagctcatttgtcaacctcttcaggtttaacaaagaaagagccgaagggggacagggcgaacaacaaccactctccggttcgtggacaagccctcaactgcccagtcgaacacagagcgtgagaagccctacaccctacaagaagcaactcaacgaggaactgcagcgtcgttcatctgccctggacacgcgcaggaaggcggagcctacttttgggggtcacgatcccagaactgccgttcagcttcgcagtttatctacagtgctgaaaagacttaaagaaattatggaggggaaatcccaggacagcgacctgaagcagtactggatgcccgattcccagtgcaaggaatgctatgattgttccgagaagttcacaacatttagaaggaggcatcattgccgcctgtgcgggcagatcttctgtagcagatgctgtaatcaggagatccctggtaagtttatggggtatactggggacctccgggcatgtacttattgccgaaagatagcgctgagctacgctcatagcactgactccaacagtattggtgaagacttaaacgcgctgtctgattctgcgtgttctgtcagcgtgctcgatcctagcgaacctaggaccccggtcggttcgaggaaggcatctcggaacatattcctcgaggacgatctggcttggcagagccttattcatcccgattctagtaatacccccctgtccacacgattggtaagtgtgcaggaggacgccggaaagtcaccagcccgaaaccgctccgcaagcattactaacctgagcctagatcggtccggctcccccatggttccatcctatgaaacctctgtcagcccccaggccaaccgtacatacgtcaggaccgagaccaccgaagatgaacggaaaattctattagacagcgttcaactaaaggacctgtggaagaagatctgccaccactcttccggaatggagtttcaggatcaccgctattggttacgaacccatccaaattgcatcgttggaaaagaattagtaaattggctaattagaaacggccacattgccacccgcgctcaggctattgccattgggcaggcaatggtggatgggcgatggctggattgtgtcagccaccacgaccaactgtttagagatgagtatgctctgtatcgtcctttgcagtctacagagttctcggaaacgccctcacctgacagcgactcagtaaactccgtggaggggcactccgagccgtcctggttcaaagatattaaatttgacgactcagataccgaacaaatcgcggaagagggagatgataacctcgcaaatagtgcaagcccatcgaaacgcactagcgtctcaagcttccagtctacggtcgactccgattccgccgctagtatatccctcaatgtggagcttgacaatgtgaacttccacattaaaaaaccatcaaagtacccccacgttccaccccacccggcagatcaaaaagagtacctcattagcgataccggcggacagcagctctccatctcggacgcctttatcaaggagtccctgtttaatcgaagggtggaagaaaaaagcaaggagctgccatttacccctctggggtggcatcacaacaacctggagctgctgagggaagagaacggagagaagcaagcgatggagagactgctgagcgccaaccataaccatatgatggccctgcttcagcaactgctgcattctgattccctgagctcgagctggagagacattattgtgtcgctggtctgccaggtggtgcagacagtcaggcccgatgttaaaaatcaggacgatgatatggatatccgccaattcgtccacatcaagaaaataccaggcggaaagaagttcgactctgtggtagtgaacgggttcgtttgtaccaagaatatcgctcacaagaaaatgtcttcttgtatcaagaatcccaagatactcctgctaaagtgttctattgaatacctctatagggaagagacaaagtttacttgcatagatccgatagtgctacaagagcgggagtttctaaagaactatgtccagcgcatagtggatgtccgccctactctggtgctggtggagaaaaccgtcagtaggatcgctcaggacatgctgcttgagcacggcattaccctcgttatcaatgtcaaaagccaagtgctcgaaagaattagccgcatgacacaaggcgatttggtcatgtcaatggatcagctcctgaccaaaccacatctcggaacctgccataaattttatatgcaaatcttccagctgccaaatgaacaaacaaagacactgatgttcttcgagggttgccctcagcacctgggctgcaccatcaagctccgcggaggctcagactacgagctggcaagggtcaaagaaatcctaatatttatgatctgtgttgcttaccactctcagctggagatttctttcttgatggacgaattcgcaatgcccccaactctcatgcaaaaccccagctttcactctctgattgagggcagaggccatgaaggggcagtccaggagcagtacggcggaggatcaattccctgggatcctgatataccaccagagagcctgccatgtgatgacagcagtctgctggagctcaggatcgtcttcgagaaaggggaacaggaaaataagaatctgccccaggctgtggcttctgtaaaacaccaggaacattccacgaccgcatgtccagccggactcccctgtgccttttttgcacctgtgccagagtctttgcttcctcttcccgttgacgaccagcaggacgccttgggaagcgagcaacccgaaactttgcagcagaccgttgttctgcaggaccccaagtcacagattagggcttttcgggatccgctccaggacgatacaggactctacgttactgaagaagtcaccagttccgaggacaaaaggaaaacttactcgctcgcatttaaacaggaacttaaagacgtaattctttgtatctcccccgtcattacctttcgggaaccattccttctgacagaaaagggcatgcggtgtagcactcgggactatttcgctgagcaggtgtactggtcccccctcctaaacaaagagttcaaggagatggaaaatcgtcgcaaaaaacagctcttgagagatctttctggacttcaaggcatgaatggtagcattcaggctaagagtatacaggtactaccatctcatgaattggtttccacaagaatcgctgaacacctgggcgattcacagtcccttggcaggatgcttgccgactaccgcgcacggggaggcagaattcagccaaagaattcggaccctttcgcccattcaaaagacgccagctccacctcctctggtcagtctggctctaagaacgagggagatgaagagcgcggacttattctgtcggacgccgtctggtccacgaaggttgactgtttgaatccgattaaccaccagcggctgtgcgtgctgttttcctcttcctccgctcagtctagcaacgccccaagtgcctgcgtttccccctggattgtcaccatggagttttatgggaagaatgatttaacgctgggaatcttcctggagcgctactgctttaggcctagttaccagtgtccttcgatgttctgcgacacaccgatggttcaccacatcagacgattcgtccatgggcagggatgtgtgcagattattctcaaagagttagactctccagtccccggatatcagcatacgatcctaacttacagttggtgcagaatctgtaagcaggttactcctgttgtagccctgtcgaatgaaagctggtctatgtccttcgcgaaatatcttgagctccggttctatggtcaccaatatacaaggcgtgccaatgcggaaccgtgtggccacagcatccatcacgattatcatcaatatttttcctacaaccagatggtcgcctcattttcctactctccaattcgcctgctggaagtgtgtgtccccctgcctaagattttcatcaagcgacaagctccactgaaagtatccctgttacaggatttgaaagattttttccagaaggtcagccaagtgtatgtcgctatcgatgagcgcctagcctcactgaagacggacactttttcaaagacacgcgaagagaagatggaggatatctttgctcagaaagaaatggaagagggcgagttcaagaactggatagagaagatgcaggctcgattaatgagctcttctgtggacacccctcaacagctccagtctgtgttcgagagcctgatagctaagaagcagtccttatgtgaagttctgcaggcatggaataacagactgcaagatctcttccagcaggagaagggtcgtaaaagaccctcagtgcctccttcaccgggtcggctgcggcagggcgaagaatcgaagatctctgctatggacgcaagcccacgtaacatttcccccggtctgcagaatggcgaaaaggaagacaggtttcttactaccctgtcgtctcagagttcgacgtccagcacacatctgcaattgccaacaccgcctgaagttatgtccgagcagtcggtgggaggtcctcctgaactggatactgcatcttcctccgaagacgtctttgacgggcatctgctggggagcaccgactctcaagtgaaggaaaaaagcaccatgaaagcgatatttgccaatctcctgccaggcaacagttataatcccatcccctttccctttgaccccgataagcactacctgatgtacgagcacgaacgcgtaccaattgccgtctgcgaaaaggagccaagtagtattattgcatttgcactaagttgtaaggagtatcggaacgctcttgaggaactgagtaaggcaactcagtggaacagtgccgaagagggccttcctaccaattccacatcagatagtagaccaaagagctcctccccgattagactacctgaaatgagcggagggcagaccaacaggacgaccgaaactgaaccgcagcctaccaagaaggcgtccggaatgttatcatttttcaggggcacggcgggtaaaagtcctgacctaagctctcagaagcgcgagactctgcggggagcagactctgcgtattaccaggtcggtcagacagggaaagagggcaccgagaaccaaggggttgagccacaggatgaggtggatggcggtgacacccaaaagaaacagttaataaacccccatgtggaactgcagttctccgacgcgaacgcgaagttttactgccgcctttactatgcgggagagttccacaaaatgcgcgaggtgatactagattctagcgaagaagatttcattcgaagcctttctcattcaagcccttggcaggccaggggtggaaaatctggtgccgcattctacgcaacggaagacgacaggttcattctaaaacaaatgccaagacttgaggtacagtcctttctcgatttcgcacctcactactttaattacatcacaaacgccgttcaacagaaacgtccaacagccctggccaagatactgggggtttacaggatcgggtacaaaaattcgcagaataataccgagaagaagctagacctcctggttatggagaatttgttctacggccgtaagatggcccaggtgttcgatctgaaaggtagcctacggaaccgcaacgtgaaaaccgacactggtaaggaatcctgtgacgtggtgctgcttgatgagaatctactgaagatggtgcgagacaatcccctctatattcgttctcacagtaaagccgtcctccgtacaagcattcactccgattctcattttttgagtagtcacctgatcatcgactactctctcttggtggggagagatgatacctctaacgagctcgtggtaggcatcatagattatattcgcacctttacttgggacaaaaagctcgaaatggtggtgaagagcaccggtattttgggcggacagggcaaaatgcctaccgtggtgagccctgagctgtataggacacggttctgcgaagccatggacaaatacttcctaatggtcccagatcactggacggggctcggactcaattgttag

SEQ ID NO: 183941 - DNA, 6297 bp, Artificial Sequence
  derived and/or modified sequence
atggccaccgacgacaagaccagccccaccctggacagcgccaacgacctgcccagaagccccaccagccccagccacctgacccacttcaagcccctgacccccgaccaggacgagccccccttcaagagcgcctacagcagcttcgtgaacctgttcagattcaacaaggagagagccgagggcggccagggcgagcagcagcccctgagcggcagctggaccagcccccagctgcccagcagaacccagagcgtgagaagccccaccccctacaagaagcagctgaacgaggagctgcagagaagaagcagcgccctggacaccagaagaaaggccgagcccaccttcggcggccacgaccccagaaccgccgtgcagctgagaagcctgagcaccgtgctgaagagactgaaggagatcatggagggcaagagccaggacagcgacctgaagcagtactggatgcccgacagccagtgcaaggagtgctacgactgcagcgagaagttcaccaccttcagaagaagacaccactgcagactgtgcggccagatcttctgcagcagatgctgcaaccaggagatccccggcaagttcatgggctacaccggcgacctgagagcctgcacctactgcagaaagatcgccctgagctacgcccacagcaccgacagcaacagcatcggcgaggacctgaacgccctgagcgacagcgcctgcagcgtgagcgtgctggaccccagcgagcccagaacccccgtgggcagcagaaaggccagcagaaacatcttcctggaggacgacctggcctggcagagcctgatccaccccgacagcagcaacacccccctgagcaccagactggtgagcgtgcaggaggacgccggcaagagccccgccagaaacagaagcgccagcatcaccaacctgagcctggacagaagcggcagccccatggtgcccagctacgagaccagcgtgagcccccaggccaacagaacctacgtgagaaccgagaccaccgaggacgagagaaagatcctgctggacagcgtgcagctgaaggacctgtggaagaagatctgccaccacagcagcggcatggagttccaggaccacagatactggctgagaacccaccccaactgcatcgtgggcaaggagctggtgaactggctgatcagaaacggccacatcgccaccagagcccaggccatcgccatcggccaggccatggtggacggcagatggctggactgcgtgagccaccacgaccagctgttcagagacgagtacgccctgtacagacccctgcagagcaccgagttcagcgagacccccagccccgacagcgacagcgtgaacagcgtggagggccacagcgagcccagctggttcaaggacatcaagttcgacgacagcgacaccgagcagatcgccgaggagggcgacgacaacctggccaacagcgccagccccagcaagagaaccagcgtgagcagcttccagagcaccgtggacagcgacagcgccgccagcatcagcctgaacgtggagctggacaacgtgaacttccacatcaagaagcccagcaagtacccccacgtgcccccccaccccgccgaccagaaggagtacctgatcagcgacaccggcggccagcagctgagcatcagcgacgccttcatcaaggagagcctgttcaacagaagagtggaggagaagagcaaggagctgcccttcacccccctgggctggcaccacaacaacctggagctgctgagagaggagaacggcgagaagcaggccatggagagactgctgagcgccaaccacaaccacatgatggccctgctgcagcagctgctgcacagcgacagcctgagcagcagctggagagacatcatcgtgagcctggtgtgccaggtggtgcagaccgtgagacccgacgtgaagaaccaggacgacgacatggacatcagacagttcgtgcacatcaagaagatccccggcggcaagaagttcgacagcgtggtggtgaacggcttcgtgtgcaccaagaacatcgcccacaagaagatgagcagctgcatcaagaaccccaagatcctgctgctgaagtgcagcatcgagtacctgtacagagaggagaccaagttcacctgcatcgaccccatcgtgctgcaggagagagagttcctgaagaactacgtgcagagaatcgtggacgtgagacccaccctggtgctggtggagaagaccgtgagcagaatcgcccaggacatgctgctggagcacggcatcaccctggtgatcaacgtgaagagccaggtgctggagagaatcagcagaatgacccagggcgacctggtgatgagcatggaccagctgctgaccaagccccacctgggcacctgccacaagttctacatgcagatcttccagctgcccaacgagcagaccaagaccctgatgttcttcgagggctgcccccagcacctgggctgcaccatcaagctgagaggcggcagcgactacgagctggccagagtgaaggagatcctgatcttcatgatctgcgtggcctaccacagccagctggagatcagcttcctgatggacgagttcgccatgccccccaccctgatgcagaaccccagcttccacagcctgatcgagggcagaggccacgagggcgccgtgcaggagcagtacggcggcggcagcatcccctgggaccccgacatcccccccgagagcctgccctgcgacgacagcagcctgctggagctgagaatcgtgttcgagaagggcgagcaggagaacaagaacctgccccaggccgtggccagcgtgaagcaccaggagcacagcaccaccgcctgccccgccggcctgccctgcgccttcttcgcccccgtgcccgagagcctgctgcccctgcccgtggacgaccagcaggacgccctgggcagcgagcagcccgagaccctgcagcagaccgtggtgctgcaggaccccaagagccagatcagagccttcagagaccccctgcaggacgacaccggcctgtacgtgaccgaggaggtgaccagcagcgaggacaagagaaagacctacagcctggccttcaagcaggagctgaaggacgtgatcctgtgcatcagccccgtgatcaccttcagagagcccttcctgctgaccgagaagggcatgagatgcagcaccagagactacttcgccgagcaggtgtactggagccccctgctgaacaaggagttcaaggagatggagaacagaagaaagaagcagctgctgagagacctgagcggcctgcagggcatgaacggcagcatccaggccaagagcatccaggtgctgcccagccacgagctggtgagcaccagaatcgccgagcacctgggcgacagccagagcctgggcagaatgctggccgactacagagccagaggcggcagaatccagcccaagaacagcgaccccttcgcccacagcaaggacgccagcagcaccagcagcggccagagcggcagcaagaacgagggcgacgaggagagaggcctgatcctgagcgacgccgtgtggagcaccaaggtggactgcctgaaccccatcaaccaccagagactgtgcgtgctgttcagcagcagcagcgcccagagcagcaacgcccccagcgcctgcgtgagcccctggatcgtgaccatggagttctacggcaagaacgacctgaccctgggcatcttcctggagagatactgcttcagacccagctaccagtgccccagcatgttctgcgacacccccatggtgcaccacatcagaagattcgtgcacggccagggctgcgtgcagatcatcctgaaggagctggacagccccgtgcccggctaccagcacaccatcctgacctacagctggtgcagaatctgcaagcaggtgacccccgtggtggccctgagcaacgagagctggagcatgagcttcgccaagtacctggagctgagattctacggccaccagtacaccagaagagccaacgccgagccctgcggccacagcatccaccacgactaccaccagtacttcagctacaaccagatggtggccagcttcagctacagccccatcagactgctggaggtgtgcgtgcccctgcccaagatcttcatcaagagacaggcccccctgaaggtgagcctgctgcaggacctgaaggacttcttccagaaggtgagccaggtgtacgtggccatcgacgagagactggccagcctgaagaccgacaccttcagcaagaccagagaggagaagatggaggacatcttcgcccagaaggagatggaggagggcgagttcaagaactggatcgagaagatgcaggccagactgatgagcagcagcgtggacaccccccagcagctgcagagcgtgttcgagagcctgatcgccaagaagcagagcctgtgcgaggtgctgcaggcctggaacaacagactgcaggacctgttccagcaggagaagggcagaaagagacccagcgtgccccccagccccggcagactgagacagggcgaggagagcaagatcagcgccatggacgccagccccagaaacatcagccccggcctgcagaacggcgagaaggaggacagattcctgaccaccctgagcagccagagcagcaccagcagcacccacctgcagctgcccaccccccccgaggtgatgagcgagcagagcgtgggcggcccccccgagctggacaccgccagcagcagcgaggacgtgttcgacggccacctgctgggcagcaccgacagccaggtgaaggagaagagcaccatgaaggccatcttcgccaacctgctgcccggcaacagctacaaccccatccccttccccttcgaccccgacaagcactacctgatgtacgagcacgagagagtgcccatcgccgtgtgcgagaaggagcccagcagcatcatcgccttcgccctgagctgcaaggagtacagaaacgccctggaggagctgagcaaggccacccagtggaacagcgccgaggagggcctgcccaccaacagcaccagcgacagcagacccaagagcagcagccccatcagactgcccgagatgagcggcggccagaccaacagaaccaccgagaccgagccccagcccaccaagaaggccagcggcatgctgagcttcttcagaggcaccgccggcaagagccccgacctgagcagccagaagagagagaccctgagaggcgccgacagcgcctactaccaggtgggccagaccggcaaggagggcaccgagaaccagggcgtggagccccaggacgaggtggacggcggcgacacccagaagaagcagctgatcaacccccacgtggagctgcagttcagcgacgccaacgccaagttctactgcagactgtactacgccggcgagttccacaagatgagagaggtgatcctggacagcagcgaggaggacttcatcagaagcctgagccacagcagcccctggcaggccagaggcggcaagagcggcgccgccttctacgccaccgaggacgacagattcatcctgaagcagatgcccagactggaggtgcagagcttcctggacttcgccccccactacttcaactacatcaccaacgccgtgcagcagaagagacccaccgccctggccaagatcctgggcgtgtacagaatcggctacaagaacagccagaacaacaccgagaagaagctggacctgctggtgatggagaacctgttctacggcagaaagatggcccaggtgttcgacctgaagggcagcctgagaaacagaaacgtgaagaccgacaccggcaaggagagctgcgacgtggtgctgctggacgagaacctgctgaagatggtgagagacaaccccctgtacatcagaagccacagcaaggccgtgctgagaaccagcatccacagcgacagccacttcctgagcagccacctgatcatcgactacagcctgctggtgggcagagacgacaccagcaacgagctggtggtgggcatcatcgactacatcagaaccttcacctgggacaagaagctggagatggtggtgaagagcaccggcatcctgggcggccagggcaagatgcccaccgtggtgagccccgagctgtacagaaccagattctgcgaggccatggacaagtacttcctgatggtgcccgaccactggaccggcctgggcctgaactgctag

SEQ ID NO: 183942 - protein, 413 aa, Artificial Sequence
  derived and/or modified sequence
MSFRDLRNFTEMMRALGYPRHISMENFRTPNFGLVSEVLLWLVKRYEPQTDIPPDVDTEQDRVFFIKAIAQFMATKAHIKLNTKKLYQADGYAVKELLKITSVLYNAMKTKGMEGSEIVEEDVNKFKFDLGSKIADLKAARQLASEITSKGASLYDLLGMEVELREMRTEAIARPLEINETEKVMRIAIKEILTQVQKTKDLLNNVASDEANLEAKIEKRKLELERNRKRLETLQSVRPCFMDEYEKTEEELQKQYDTYLEKFQNLTYLEQQLEDHHRMEQERFEEAKNTLCLIQNKLKEEEKRLLKSGSNDDSDIDIQEDDESDSELEERRLPKPQTAMEMLMQGRPGKRIVGTMQGGDSDDNEDSEESEIDMEDDDDEDDDLEDESISLSPTKPNRRVRKSEPLDESDNDF

SEQ ID NO: 183943 - DNA, 1242 bp, Artificial Sequence
  derived and/or modified sequence
atgtccttccgtgacctgcgtaacttcacggaaatgatgcgtgctttgggctacccacgccacataagtatggagaatttccgaacaccgaatttcgggctggtgagcgaagtacttctctggctggtgaaaaggtacgaaccccagaccgacatcccacccgatgtagataccgagcaggacagggtgttctttattaaagctatcgcccagttcatggccactaaggctcatatcaagctcaatacaaagaagctctaccaggctgacggctatgcagtgaaggaattgttgaaaatcacatctgtcttgtataacgcgatgaaaaccaaagggatggagggatcagaaatcgtggaagaggacgtcaacaagtttaaatttgatttggggtctaagattgccgacttgaaggccgccagacagcttgcctcggagattacttctaagggagccagtctgtacgatcttttaggtatggaggtggaactcagagagatgagaaccgaggccatagcaagacctctggagatcaacgaaaccgaaaaagttatgcgtattgccatcaaggagatcctgactcaagtgcaaaagaccaaagacttactgaacaacgtggcttccgacgaggctaatctggaggccaaaattgaaaaacgcaagcttgagttagagaggaacagaaagcgccttgaaactttgcagtccgtcaggccgtgcttcatggatgagtacgaaaagactgaggaagagcttcagaagcaatacgacacctacctggagaagtttcagaatttgacttatctcgagcagcagttggaggaccaccatcggatggagcaagaacggtttgaagaagcgaagaacactctttgccttattcagaacaaactgaaggaggaggagaagcgcctactgaaaagcggttctaatgacgacagtgacatcgatatccaggaagacgatgaatctgattcagagctcgaggaaagaaggcttccaaaaccgcaaacagctatggaaatgctgatgcagggccgtcctggaaagcggatcgtgggaacaatgcaagggggtgattcagatgataatgaggacagcgaagaaagcgagattgacatggaagatgacgacgacgaggacgatgacctcgaggatgagtccatttcgctcagtcccacaaaacctaaccggcgcgtgcgcaagtccgagccactcgatgagtcagataacgacttctag

SEQ ID NO: 183944 - DNA, 1242 bp, Artificial Sequence
  derived and/or modified sequence
atgtcttttagggacttgcgcaatttcacagagatgatgcgggctctggggtacccacggcacatctccatggagaatttcaggacccccaattttgggctggtgtcagaggtgttgctctggctcgttaagcgatacgagccacagaccgacatcccccctgatgtcgacacagaacaggacagagtgtttttcataaaagctattgcccagtttatggctacgaaggcacacattaagctcaacaccaagaaactttaccaggcggatggctatgccgtgaaggagctcttgaagatcaccagcgtgctatacaacgctatgaagaccaaggggatggagggatccgagattgtggaagaagacgtgaataaattcaagtttgacttgggctctaagatcgcagatctgaaggccgcacgacagttagccagcgaaattacgagcaagggcgcctctctgtatgatctcctgggaatggaggtggaactgcgggaaatgcgcacggaagccatcgcccggcctcttgagatcaatgagaccgaaaaggtcatgcgcattgctataaaagagatcctgacacaggtacaaaagacgaaagatctgctcaacaacgtcgcctcggacgaggccaatttggaggcaaagattgagaaacgcaagttagagctcgaacggaaccggaaacgcctggagaccttgcaatccgttcgtccttgcttcatggacgaatatgagaaaactgaagaggagcttcaaaaacagtacgatacttatctggaaaagtttcagaatctaacctatctggaacaacagcttgaggaccatcacaggatggagcaggagaggtttgaggaggccaagaataccctgtgcctgattcaaaataagctgaaggaggaagagaagcggttactcaagtccgggagcaacgatgactcagacatcgatatccaagaggacgacgagagtgacagcgagctggaagagaggagactccctaagccccagactgcaatggaaatgctgatgcagggaagacccggtaagagaattgtggggaccatgcagggaggcgactctgacgataatgaggactctgaagagtcagagatcgatatggaggatgacgacgacgaggacgatgacctggaggatgaatctatcagcttgagtcccacaaagcctaaccgaagggttagaaaaagcgaacccctagacgaatctgacaacgacttttag

SEQ ID NO: 183945 - DNA, 1242 bp, Artificial Sequence
  derived and/or modified sequence
atgtccttccgggacctgaggaacttcacagagatgatgagggccctgggctaccccaggcacatctccatggagaacttccgcacccccaactttggcctggtgtctgaggtgctgctgtggctggtgaagagatatgagccccagacagacatccccccagatgtggacacagagcaggacagagtcttcttcatcaaggccatcgcccagttcatggccaccaaggcccacatcaagctgaacaccaagaagctgtaccaggctgatggctatgctgtgaaggagctgctgaagatcacctctgtgctgtacaatgccatgaagaccaagggcatggagggcagcgagatcgtggaggaggatgtgaacaagttcaagtttgacctgggcagcaagattgctgacctgaaggccgcccggcagctggccagcgagatcaccagcaagggggccagcctgtatgacctgctgggcatggaggtggagctgcgggagatgaggacagaggccatcgcccggcccctggagatcaatgaaacagagaaggtgatgagaattgccatcaaggagatcctgacccaggtgcagaagaccaaggacctgctgaacaacgtggccagtgatgaggccaacctggaggccaagattgagaagaggaagctggagctggagaggaacaggaagaggctggagaccctgcagagcgtgcggccctgcttcatggatgaatatgagaagacagaggaggagctgcagaagcagtatgacacctacctggagaagttccagaacctgacctacctggagcagcagctggaggaccaccacaggatggagcaggagagatttgaggaggccaagaacaccctgtgcctgatccagaacaagctgaaggaggaggagaagaggctgctgaagagcggcagcaatgatgacagcgacatcgacatccaggaggatgatgaaagtgacagcgagctggaggagcggcggctgcccaagccccagacagccatggagatgctgatgcagggccggcctgggaagagaattgtgggcaccatgcagggcggggacagtgatgacaatgaagattctgaggagagcgagattgacatggaggatgatgatgatgaagatgatgacctggaggatgagagcatcagcctgagccccaccaagcccaacagaagagtgaggaagtctgagcccctggatgaaagtgacaatgacttctag

SEQ ID NO: 183946 - DNA, 1242 bp, Artificial Sequence
  derived and/or modified sequence
atgagcttccgggacctgcggaacttcaccgagatgatgcgggccctgggttatccaagacacattagcatggaaaacttccgcacccctaactttggcttagtcagcgaagtcctgctctggctcgtcaagcgttacgaaccacagactgacattccgcccgatgtggatacagaacaagatcgagtcttctttattaaagcaattgcccagttcatggccaccaaggcgcatatcaagctgaacaccaaaaaattataccaggctgacgggtatgccgtcaaagagttactgaagatcaccagtgtgctatacaatgctatgaaaaccaaaggcatggaggggtccgaaatagtggaggaggacgtgaacaaattcaagtttgacctgggctctaaaatcgccgacttaaaagctgcccggcaactagctagcgaaattacctcaaaaggcgccagtctctacgatctacttggtatggaagtggagttacgagagatgaggacagaggcaattgcccgtcctctcgagattaacgaaacagagaaggtgatgcgaatagctattaaagaaatcctgactcaggtgcaaaagaccaaggatttgctaaacaatgtcgcttctgatgaggccaatttggaggctaaaatagaaaagcgtaaacttgaactagagagaaatcgtaagaggctcgagacactccagtccgtccgcccttgctttatggatgagtacgaaaagaccgaagaggagctgcagaaacagtatgatacctatctggagaagtttcagaacctaacttacctcgagcaacagttagaagaccatcataggatggagcaagaaagattcgaagaagccaaaaatactctgtgccttatccaaaacaaattaaaagaggaggaaaagcgtctcctaaaatccggatcgaacgacgacagtgacatcgacatccaggaggacgacgagtccgatagtgaactcgaggagaggcgcctgccaaaaccgcagacagcaatggagatgctgatgcaggggagacccggtaaacgtatagtggggacaatgcaggggggcgattcagatgacaatgaagatagtgaagagtctgaaatcgatatggaggatgacgacgacgaagacgatgatctggaagatgagagtataagtctgagcccaactaaacccaataggcgagtgaggaagtcagaacctcttgacgagagcgacaatgatttctag

SEQ ID NO: 183947 - DNA, 1242 bp, Artificial Sequence
  derived and/or modified sequence
atgagcttccgggacctgcggaacttcaccgagatgatgcgggccctcgggtatccgcggcatattagcatggaaaactttaggacacctaactttgggctagtgtccgaggtgctgttgtggttggtgaagaggtatgagccccaaaccgatattcctccagacgtggatacagaacaggatagggtcttcttcatcaaggctattgctcagttcatggccaccaaggctcatattaaactgaacacgaaaaagctctatcaggcggacggctatgccgtaaaagaacttctgaagattacctccgtgctctataacgccatgaaaacaaagggcatggaaggcagtgagattgtggaggaggacgttaataaattcaagttcgacctcggatctaagattgctgatcttaaggccgcccggcagttagcgtccgagataacaagtaaaggcgcttcactctacgatctactgggcatggaagttgaactccgagagatgcgcactgaggctatcgctagacctctggaaattaacgaaacagaaaaagtaatgcgaatcgccattaaagagatcctgacacaggttcagaagactaaggacttgctcaacaacgtcgcctcagacgaagccaatcttgaagctaagattgaaaaacggaagttggagctggagcggaatcgtaagcggctggaaacactgcagagtgtgcggccttgcttcatggatgaatatgagaaaactgaggaggagcttcagaagcagtatgatacttaccttgaaaagtttcagaacctgacatacctcgagcagcagctcgaggaccaccatagaatggagcaggaacgtttcgaggaagctaagaataccttgtgcctcattcaaaataaactgaaagaggaggaaaaacgcctgctcaagtcaggcagcaatgacgacagcgacattgatatccaggaagacgatgagtcagactctgagctcgaggaacggaggttgccgaaaccccagaccgccatggagatgttaatgcagggacggccaggcaagcgcattgttgggacaatgcaaggcggggacagcgatgacaatgaggactccgaggaaagtgaaatcgacatggaggatgatgatgatgaggacgatgatctggaggatgagtccatttctctgtctcccacaaaacccaaccggcgtgtaaggaagagcgagcccctcgacgaatccgacaacgacttttag

SEQ ID NO: 183948 - DNA, 1242 bp, Artificial Sequence
  derived and/or modified sequence
atgtcatttagagacctgcgaaattttaccgaaatgatgcgtgctctgggctaccctaggcatatctccatggagaatttccgaacgccaaacttcggcctcgtcagcgaggtcctactgtggctggtgaaacgctacgagcctcagactgacatccccccagacgtagacacagaacaggatcgggttttctttatcaaggccatagctcaatttatggccaccaaggctcatattaagctcaacaccaagaagctgtatcaggctgacgggtacgctgttaaggagctccttaagataacctccgtgctctacaatgccatgaagaccaaggggatggaaggcagcgagatcgtggaagaggacgtgaacaagtttaaattcgatctggggtccaagatcgccgatctgaaggctgcccgtcaattggcctctgaaattacctctaagggagcttctctctacgacctgttggggatggaagtggagctgagggagatgagaacagaggccatcgccagaccattggagataaacgagactgaaaaagtcatgagaatcgccatcaaggagattctgacacaggttcagaaaactaaagacctgcttaacaacgtcgcctctgacgaggccaatctggaggctaagatcgagaaacgtaaactcgagctggaaaggaaccgtaaaaggttagagacgttgcagtctgtgagaccttgcttcatggacgaatacgagaagacagaagaggaattacaaaaacagtatgacacatatcttgaaaaatttcaaaatctgacctacctggagcagcagctggaagaccaccatagaatggaacaagaacgatttgaggaagccaaaaacacactgtgcctgatccagaacaagctaaaggaagaggaaaagaggctcttgaagagcggaagcaatgacgatagtgacatcgacatccaagaagacgacgagtctgatagcgagttagaggagcgcagattgcctaaaccccagaccgcgatggaaatgctcatgcagggtagaccgggaaaacgcattgtagggactatgcagggcggagattcagacgataacgaagactccgaagagagcgagatcgacatggaggacgacgacgatgaggacgacgacttagaggatgagtccatctcactctctcccacgaagccgaatcggcgtgttagaaagtccgagcctttggacgaatccgataatgacttttag

SEQ ID NO: 183949 - DNA, 1242 bp, Artificial Sequence
  derived and/or modified sequence
atgtcattcagggacctgcgaaatttcactgaaatgatgagggcattagggtacccacgtcacattagtatggaaaactttcgaactcccaacttcggtttagtcagtgaagtgttgctgtggctggtaaaaaggtacgagcctcaaactgatataccgcctgacgtggacactgaacaggacagggttttttttatcaaggctatagcccaatttatggcaaccaaggcccatattaagttaaacacaaagaaactctaccaggctgatggatacgctgtgaaggaattactcaaaatcacatccgtcttgtataacgccatgaagaccaaaggcatggaaggttcagaaattgtggaggaggacgttaataagtttaagttcgacctgggctctaaaatcgctgacctgaaggctgcaaggcagctagcatcagagattactagcaagggggcaagcttatatgatctgctgggcatggaggtcgagctgcgcgagatgaggacggaagccatcgcaagaccactcgaaattaacgagacagagaaggttatgcgaatcgctattaaggagatcctgacgcaggtgcagaaaacaaaagatctgttaaacaacgtggccagtgacgaggccaacctggaggccaaaatcgaaaagagaaagcttgagctcgaacgtaacaggaagcgcttggagactctccaatccgttagaccttgtttcatggatgaatatgaaaagaccgaagaggagctgcagaaacaatacgacacatacctggagaaattccagaacctgacctatcttgagcagcagctggaggatcatcatagaatggagcaagagagatttgaagaggctaagaatactttgtgcctcatccagaacaaactgaaggaagaggagaaaagattactcaagtccggcagcaacgatgatagcgacattgatatacaggaagatgacgagtcggatagtgagctggaagaacgcaggttaccaaaaccacagacagcgatggaaatgcttatgcaggggcgacctggcaagcggatagtgggcaccatgcagggcggagactccgatgacaacgaagactcagaggaatccgagatcgatatggaagatgatgacgacgaagacgatgaccttgaagacgagtctataagcttatcaccaaccaagcctaaccgacgcgttagaaagtctgaacctcttgatgagtccgacaacgacttctag

SEQ ID NO: 183950 - DNA, 1657 bp, Artificial Sequence
  derived and/or modified sequence
gccgtccaagggtccattggttgccatagagatcgtcgagcgctgggcctgtgatcgctgaggggcgagcagttgcgaccctgggctcctggggacctgagcgttatgtctttccgcgacctccgcaatttcacagagatgatgagagccctgggataccctcgacatatttctatggaaaatttccgtacacccaattttggacttgtatctgaagtgcttctctggcttgtgaaaagatatgagccccagactgacatcccgcctgacgtggatactgaacaggaccgagttttcttcattaaggcaattgcccagttcatggccaccaaggcacatataaaactcaacactaagaagctttatcaagcagatgggtatgcggtaaaagagctgctgaagatcacatctgtcctttataatgctatgaagaccaaggggatggagggctctgaaatagtagaggaagatgtcaacaagttcaagtttgatcttggctcaaagattgcagatttgaaggcagccaggcagcttgcgtctgaaatcacctccaaaggagcatctctgtatgacttgctcggcatggaagtagagttgagggaaatgagaacagaagccattgccagacctctggaaataaacgagactgaaaaagtgatgagaattgcaataaaagagattttgacacaggttcagaagactaaagacctgctcaataatgtggcctctgatgaagctaatttagaagccaaaatcgaaaagagaaaattagaactggaaagaaatcggaagcgactagagactctgcagagtgtcaggccatgttttatggatgagtatgagaagactgaggaagaattacaaaagcagtatgacacttatctggagaaatttcaaaatctgacttatctggaacaacagcttgaagaccatcataggatggagcaagaaaggtttgaggaagctaaaaacactctctgcctgatacagaacaagctcaaggaggaagagaagcgcctgctcaagagtggaagtaacgatgactcggacatagacatccaggaggacgatgaatccgacagtgagttggaagaaaggcggctgcccaagccacagacagccatggagatgctcatgcaaggaagacctggcaaacgcattgtgggcacgatgcaaggtggagactccgatgacaatgaggactcggaggagagtgaaattgacatggaagatgatgatgacgaggatgacgatttggaagacgagagcatttctctctcaccaaccaagcccaatcgaagggtccggaaatctgaacccctggatgagagtgacaatgacttctgacccttttgccaagggaccctggcagattaaaaccctcagacttgtaggtaaatgggaacttagaaggttaggaaggtaacccctgttttgtttactaagctggctggactcatgatcactgaagcaatacttatttctgctttagcctcctatgtttgcattccatgaagcttaaataagaattgaagcaaatccctaagatttatttttttccaccttatttatcttctaaaacttgaggaatgcatgtgttcttagtgattcacatccacgggacaaaaactcaagaagaaataagagctgacgccac

SEQ ID NO: 183951 - DNA, 1603 bp, Artificial Sequence
  derived and/or modified sequence
tcgctgaggggcgagcagttgcgaccctgggctcctggggacctgagcgttatgtctttccgcgacctccgcaatttcacagagatgatgagagccctgggataccctcgacatatttctatggaaaatttccgtacacccaattttggacttgtatctgaagtgcttctctggcttgtgaaaagatatgagccccagactgacatcccgcctgacgtggatactgaacaggaccgagttttcttcattaaggcaattgcccagttcatggccaccaaggcacatataaaactcaacactaagaagctttatcaagcagatgggtatgcggtaaaagagctgctgaagatcacatctgtcctttataatgctatgaagaccaaggggatggagggctctgaaatagtagaggaagatgtcaacaagttcaagtttgatcttggctcaaagattgcagatttgaaggcagccaggcagcttgcgtctgaaatcacctccaaaggagcatctctgtatgacttgctcggcatggaagtagagttgagggaaatgagaacagaagccattgccagacctctggaaataaacgagactgaaaaagtgatgagaattgcaataaaagagattttgacacaggttcagaagactaaagacctgctcaataatgtggcctctgatgaagctaatttagaagccaaaatcgaaaagagaaaattagaactggaaagaaatcggaagcgactagagactctgcagagtgtcaggccatgttttatggatgagtatgagaagactgaggaagaattacaaaagcagtatgacacttatctggagaaatttcaaaatctgacttatctggaacaacagcttgaagaccatcataggatggagcaagaaaggtttgaggaagctaaaaacactctctgcctgatacagaacaagctcaaggaggaagagaagcgcctgctcaagagtggaagtaacgatgactcggacatagacatccaggaggacgatgaatccgacagtgagttggaagaaaggcggctgcccaagccacagacagccatggagatgctcatgcaaggaagacctggcaaacgcattgtgggcacgatgcaaggtggagactccgatgacaatgaggactcggaggagagtgaaattgacatggaagatgatgatgacgaggatgacgatttggaagacgagagcatttctctctcaccaaccaagcccaatcgaagggtccggaaatctgaacccctggatgagagtgacaatgacttctgacccttttgccaagggaccctggcagattaaaaccctcagacttgtaggtaaatgggaacttagaaggttaggaaggtaacccctgttttgtttactaagctggctggactcatgatcactgaagcaatacttatttctgctttagcctcctatgtttgcattccatgaagcttaaataagaattgaagcaaatccctaagatttatttttttccaccttatttatcttctaaaacttgaggaatgcatgtgttcttagtgattcacatccacgggacaaaaactcaagaagaaataagagctgacgccac

SEQ ID NO: 183952 - DNA, 4163 bp, Artificial Sequence
  derived and/or modified sequence
cgcgtcttcgcttcgctttttgtttgtccctgaccgtgcgccgtccaagggtccattggttgccatagagatcgtcgagcgctgggcctgtgatcgctgaggggcgagcagttgcgaccctgggctcctggggacctgagcgttatgtctttccgcgacctccgcaatttcacagagatgatgagagccctgggataccctcgacatatttctatggaaaatttccgtacacccaattttggacttgtatctgaagtgcttctctggcttgtgaaaagatatgagccccagactgacatcccgcctgacgtggatactgaacaggaccgagttttcttcattaaggcaattgcccagttcatggccaccaaggcacatataaaactcaacactaagaagctttatcaagcagatgggtatgcggtaaaagagctgctgaagatcacatctgtcctttataatgctatgaagaccaaggggatggagggctctgaaatagtagaggaagatgtcaacaagttcaagtttgatcttggctcaaagattgcagatttgaaggcagccaggcagcttgcgtctgaaatcacctccaaaggagcatctctgtatgacttgctcggcatggaagtagagttgagggaaatgagaacagaagccattgccagacctctggaaataaacgagactgaaaaagtgatgagaattgcaataaaagagattttgacacaggttcagaagactaaagacctgctcaataatgtggcctctgatgaagctaatttagaagccaaaatcgaaaagagaaaattagaactggaaagaaatcggaagcgactagagactctgcagagtgtcaggccatgttttatggatgagtatgagaagactgaggaagaattacaaaagcagtatgacacttatctggagaaatttcaaaatctgacttatctggaacaacagcttgaagaccatcataggatggagcaagaaaggtttgaggaagctaaaaacactctctgcctgatacagaacaagctcaaggaggaagagaagcgcctgctcaagagtggaagtaacgatgactcggacatagacatccaggaggacgatgaatccgacagtgagttggaagaaaggcggctgcccaagccacagacagccatggagatgctcatgcaaggaagacctggcaaacgcattgtgggcacgatgcaaggtggagactccgatgacaatgaggactcggaggagagtgaaattgacatggaagatgatgatgacgaggatgacgatttggaagacgagagcatttctctctcaccaaccaagcccaatcgaagggtccggaaatctgaacccctggatgagagtgacaatgacttctgacccttttgccaagggaccctggcagattaaaaccctcagacttgtaggtaaatgggaacttagaaggttaggaaggtaacccctgttttgtttactaagctggctggactcatgatcactgaagcaatacttatttctgctttagcctcctatgtttgcattccatgaagcttaaataagaattgaagcaaatccctaagatttatttttttccaccttatttatcttctaaaacttgaggaatgcatgtgttcttagtgattcacatccacgggacaaaaactcaagaagaaataagagctgacgccacacaagtcttggctgcttttgttactatacattttctctgagactccagcagagttggggctggaacttggcactggggactcatgtttggaatcgtaggggaacatctggctgttaatcacttgcacagttgagaacatttcctatacatcggcttttaattctagctcttatttcattttgtaatcttattttctttcgtctgcatgttcacaataccaagcattaaatgtattttaataactaaacttttctgaaagaaggttagctaaagttaaatgaaaacttggtttctttgaaaatcaggcaatagagacaggctccagatgaggaatcctccattttctgtccgaagctgacattcctctggcagtccagttcaccttggattacagccaccttcatgtttccacggttggtactaaatctggaaactctggtgacctgggctgccctctcagaaactccagactcccatggcaatgacagccgggacacttttcttccctccagccagggtttctctaaaggagctttgttttgtctaaagtgtggcaagacatagtgcacaacacagggacaaaggcaggtttcctgcagctcgctacctaagtgtttctgtaggggaaggagccaattaagaaaaagtgttggtacagattcatgtttctgatttaaaaaaacaacaacacaggattgaattaagtagagtaatagcactagaagaatttttctgttgtgaaattagaagtggagttggtttttttcttttttcttcttctttttttttaatatgaaaagtacttagctgggagtggtggcaagcgcccttgggtccagctactcaggaggccaaggtgggaggatcacttgagcccaggagttttagactagcctggacaactaagtgagactccatctctacaaaaaattaaaaaattagccaggtgtggaggggcatgcctgtggtctcagctattcaggaggctgaggcaggagaatcacttgagaccaggaagttgaggctgcaatgagccgtgatcatgccactgcactccagcctgggtgacagagtgagaccctgtctttaaaaaaaagaaaaagaaaagcacgctgcttgtaaaaagcgtacagtaggtcaggcgtggtggctcatgcctgtaatcctagcactttgagaggctgaggtgggtagatcacctgaggtcaggggtttgagaccagcctggccaacatggcgaaaccccacctctactaaaaatacaaaaattagccgggcgtggtagcgcatgcctgtaaccccagctactggggaggctgaggcaggagaatcgcttgaacctaggaggcggaggttgcagtgagccgagatggcgccactgcactccagcctgggcagcagagtgagactccatctcaaaaaaaaaaaaaaaaaaaaaagcatacagtaaataaaaaagcacaaaacagttttcacttattttacaattaaaaagtcagaagacttctgaagttacttatcttttaatacatgtatttaacaccatacttcatattattaaataggttttacttaaaaatataattattgtatttgtacctgtcagatataaatacttattcaggagttcacaggtacgaaaagatacacataaattttaggaacttttgagttatttctgtcatttttgcttttttctctttcttttcctaaattttatgtataagattacccctaaaaaaaaaaaaacagccagtattcagtgaattcaccagtaatttgaaatgcaccatattgtaaatgatccactgacagggaagccagcgtgttggagccatgccagccacctcagacaccgtggctctaagatgcggaagagtcactgcatcttcttgaatgttacagatttggtttgcctgaatgtgacttgacttctgttttgaaaaaacatacgaatagagttctattttccttatgtgatgctttcttctaacacactttaacacagaagcctaacctagctacaaagagcctatccacagacataggcaacagctccaaagggtatttcattgtgtcacctgcttctagatcatctgttagttaactgactttgtgcaaggtctcaccatgtatagcactgccttgcttgagcacggaagtttctgtcaacagcaagctttatgtgctctatcatttttattaaagtatttcagtcaatagtgacccattgtagaatggatgcaggattcacatgtgcaagtgctttgtgacctggcaccatttggttttggccaagcagcagagcagacctcaggacctaacgaggatggttgtgattaggtcaaatagaaaactagcaggccattgctgacaatttttactatataattagaggacttcctaaaatgctttaaaaaaaaatgtgtatggatggaaaatacaaaggaatttttcaaatactcaa

SEQ ID NO: 183953 - DNA, 1242 bp, Artificial Sequence
  derived and/or modified sequence
atgagcttcagagacctgagaaacttcaccgagatgatgagagccctgggctaccccagacacatcagcatggagaacttcagaacccccaacttcggcctggtgagcgaggtgctgctgtggctggtgaagagatacgagccccagaccgacatcccccccgacgtggacaccgagcaggacagagtgttcttcatcaaggccatcgcccagttcatggccaccaaggcccacatcaagctgaacaccaagaagctgtaccaggccgacggctacgccgtgaaggagctgctgaagatcaccagcgtgctgtacaacgccatgaagaccaagggcatggagggcagcgagatcgtggaggaggacgtgaacaagttcaagttcgacctgggcagcaagatcgccgacctgaaggccgccagacagctggccagcgagatcaccagcaagggcgccagcctgtacgacctgctgggcatggaggtggagctgagagagatgagaaccgaggccatcgccagacccctggagatcaacgagaccgagaaggtgatgagaatcgccatcaaggagatcctgacccaggtgcagaagaccaaggacctgctgaacaacgtggccagcgacgaggccaacctggaggccaagatcgagaagagaaagctggagctggagagaaacagaaagagactggagaccctgcagagcgtgagaccctgcttcatggacgagtacgagaagaccgaggaggagctgcagaagcagtacgacacctacctggagaagttccagaacctgacctacctggagcagcagctggaggaccaccacagaatggagcaggagagattcgaggaggccaagaacaccctgtgcctgatccagaacaagctgaaggaggaggagaagagactgctgaagagcggcagcaacgacgacagcgacatcgacatccaggaggacgacgagagcgacagcgagctggaggagagaagactgcccaagccccagaccgccatggagatgctgatgcagggcagacccggcaagagaatcgtgggcaccatgcagggcggcgacagcgacgacaacgaggacagcgaggagagcgagatcgacatggaggacgacgacgacgaggacgacgacctggaggacgagagcatcagcctgagccccaccaagcccaacagaagagtgagaaagagcgagcccctggacgagagcgacaacgacttctag

SEQ ID NO: 183954 - protein, 1190 aa, Artificial Sequence
  derived and/or modified sequence
MTSRFGKTYSRKGGNGSSKFDEVFSNKRTTLSTKWGETTFMAKLGQKRPNFKPDIQEIPKKPKVEEESTGDPFGFDSDDESLPVSSKNLAQVKCSSYSESSEAAQLEEVTSVLEANSKISHVVVEDTVVSDKCFPLEDTLLGKEKSTNRIVEDDASISSCNKLITSDKVENFHEEHEKNSHHIHKNADDSTKKPNAETTVASEIKETNDTWNSQFGKRPESPSEISPIKGSVRTGLFEWDNDFEDIRSEDCILSLDSDPLLEMKDDDFKNRLENLNEAIEEDIVQSVLRPTNCRTYCRANKTKSSQGASNFDKLMDGTSQALAKANSESSKDGLNQAKKGGVSCGTSFRGTVGRTRDYTVLHPSCLSVCNVTIQDTMERSMDEFTASTPADLGEAGRLRKKADIATSKTTTRFRPSNTKSKKDVKLEFFGFEDHETGGDEGGSGSSNYKIKYFGFDDLSESEDDEDDDCQVERKTSKKRTKTAPSPSLQPPPESNDNSQDSQSGTNNAENLDFTEDLPGVPESVKKPINKQGDKSKENTRKIFSGPKRSPTKAVYNARHWNHPDSEELPGPPVVKPQSVTVRLSSKEPNQKDDGVFKAPAPPSKVIKTVTIPTQPYQDIVTALKCRREDKELYTVVQHVKHFNDVVEFGENQEFTDDIEYLLSGLKSTQPLNTRCLSVISLATKCAMPSFRMHLRAHGMVAMVFKTLDDSQHHQNLSLCTAALMYILSRDRLNMDLDRASLDLMIRLLELEQDASSAKLLNEKDMNKIKEKIRRLCETVHNKHLDLENITTGHLAMETLLSLTSKRAGDWFKEELRLLGGLDHIVDKVKECVDHLSRDEDEEKLVASLWGAERCLRVLESVTVHNPENQSYLIAYKDSQLIVSSAKALQHCEELIQQYNRAEDSICLADSKPLPHQNVTNHVGKAVEDCMRAIIGVLLNLTNDNEWGSTKTGEQDGLIGTALNCVLQVPKYLPQEQRFDIRVLGLGLLINLVEYSARNRHCLVNMETSCSFDSSICSGEGDDSLRIGGQVHAVQALVQLFLERERAAQLAESKTDELIKDAPTTQHDKSGEWQETSGEIQWVSTEKTDGTEEKHKKEEEDEELDLNKALQHAGKHMEDCIVASYTALLLGCLCQESPINVTTVREYLPEGDFSIMTEMLKKFLSFMNLTCAVGTTGQKSISRVIEYLEHC

SEQ ID NO: 183955 - protein, 1275 aa, Artificial Sequence
  derived and/or modified sequence
MVQGPVQTPALTIHRRKRRRSCPPNRASYLPKAESLASLGSHLPALLSRARVPRPPAGRRERERRRRPVAKAPARLRGEYETGVKMTSRFGKTYSRKGGNGSSKFDEVFSNKRTTLSTKWGETTFMAKLGQKRPNFKPDIQEIPKKPKVEEESTGDPFGFDSDDESLPVSSKNLAQVKCSSYSESSEAAQLEEVTSVLEANSKISHVVVEDTVVSDKCFPLEDTLLGKEKSTNRIVEDDASISSCNKLITSDKVENFHEEHEKNSHHIHKNADDSTKKPNAETTVASEIKETNDTWNSQFGKRPESPSEISPIKGSVRTGLFEWDNDFEDIRSEDCILSLDSDPLLEMKDDDFKNRLENLNEAIEEDIVQSVLRPTNCRTYCRANKTKSSQGASNFDKLMDGTSQALAKANSESSKDGLNQAKKGGVSCGTSFRGTVGRTRDYTVLHPSCLSVCNVTIQDTMERSMDEFTASTPADLGEAGRLRKKADIATSKTTTRFRPSNTKSKKDVKLEFFGFEDHETGGDEGGSGSSNYKIKYFGFDDLSESEDDEDDDCQVERKTSKKRTKTAPSPSLQPPPESNDNSQDSQSGTNNAENLDFTEDLPGVPESVKKPINKQGDKSKENTRKIFSGPKRSPTKAVYNARHWNHPDSEELPGPPVVKPQSVTVRLSSKEPNQKDDGVFKAPAPPSKVIKTVTIPTQPYQDIVTALKCRREDKELYTVVQHVKHFNDVVEFGENQEFTDDIEYLLSGLKSTQPLNTRCLSVISLATKCAMPSFRMHLRAHGMVAMVFKTLDDSQHHQNLSLCTAALMYILSRDRLNMDLDRASLDLMIRLLELEQDASSAKLLNEKDMNKIKEKIRRLCETVHNKHLDLENITTGHLAMETLLSLTSKRAGDWFKEELRLLGGLDHIVDKVKECVDHLSRDEDEEKLVASLWGAERCLRVLESVTVHNPENQSYLIAYKDSQLIVSSAKALQHCEELIQQYNRAEDSICLADSKPLPHQNVTNHVGKAVEDCMRAIIGVLLNLTNDNEWGSTKTGEQDGLIGTALNCVLQVPKYLPQEQRFDIRVLGLGLLINLVEYSARNRHCLVNMETSCSFDSSICSGEGDDSLRIGGQVHAVQALVQLFLERERAAQLAESKTDELIKDAPTTQHDKSGEWQETSGEIQWVSTEKTDGTEEKHKKEEEDEELDLNKALQHAGKHMEDCIVASYTALLLGCLCQESPINVTTVREYLPEGDFSIMTEMLKKFLSFMNLTCAVGTTGQKSISRVIEYLEHC

SEQ ID NO: 183956 - DNA, 3573 bp, Artificial Sequence
  derived and/or modified sequence
atgaccagcagattcggcaagacctacagcagaaagggcggcaacggcagcagcaagttcgacgaggtgttcagcaacaagagaaccaccctgagcaccaagtggggcgagaccaccttcatggccaagctgggccagaagagacccaacttcaagcccgacatccaggagatccccaagaagcccaaggtggaggaggagagcaccggcgaccccttcggcttcgacagcgacgacgagagcctgcccgtgagcagcaagaacctggcccaggtgaagtgcagcagctacagcgagagcagcgaggccgcccagctggaggaggtgaccagcgtgctggaggccaacagcaagatcagccacgtggtggtggaggacaccgtggtgagcgacaagtgcttccccctggaggacaccctgctgggcaaggagaagagcaccaacagaatcgtggaggacgacgccagcatcagcagctgcaacaagctgatcaccagcgacaaggtggagaacttccacgaggagcacgagaagaacagccaccacatccacaagaacgccgacgacagcaccaagaagcccaacgccgagaccaccgtggccagcgagatcaaggagaccaacgacacctggaacagccagttcggcaagagacccgagagccccagcgagatcagccccatcaagggcagcgtgagaaccggcctgttcgagtgggacaacgacttcgaggacatcagaagcgaggactgcatcctgagcctggacagcgaccccctgctggagatgaaggacgacgacttcaagaacagactggagaacctgaacgaggccatcgaggaggacatcgtgcagagcgtgctgagacccaccaactgcagaacctactgcagagccaacaagaccaagagcagccagggcgccagcaacttcgacaagctgatggacggcaccagccaggccctggccaaggccaacagcgagagcagcaaggacggcctgaaccaggccaagaagggcggcgtgagctgcggcaccagcttcagaggcaccgtgggcagaaccagagactacaccgtgctgcaccccagctgcctgagcgtgtgcaacgtgaccatccaggacaccatggagagaagcatggacgagttcaccgccagcacccccgccgacctgggcgaggccggcagactgagaaagaaggccgacatcgccaccagcaagaccaccaccagattcagacccagcaacaccaagagcaagaaggacgtgaagctggagttcttcggcttcgaggaccacgagaccggcggcgacgagggcggcagcggcagcagcaactacaagatcaagtacttcggcttcgacgacctgagcgagagcgaggacgacgaggacgacgactgccaggtggagagaaagaccagcaagaagagaaccaagaccgcccccagccccagcctgcagcccccccccgagagcaacgacaacagccaggacagccagagcggcaccaacaacgccgagaacctggacttcaccgaggacctgcccggcgtgcccgagagcgtgaagaagcccatcaacaagcagggcgacaagagcaaggagaacaccagaaagatcttcagcggccccaagagaagccccaccaaggccgtgtacaacgccagacactggaaccaccccgacagcgaggagctgcccggcccccccgtggtgaagccccagagcgtgaccgtgagactgagcagcaaggagcccaaccagaaggacgacggcgtgttcaaggcccccgccccccccagcaaggtgatcaagaccgtgaccatccccacccagccctaccaggacatcgtgaccgccctgaagtgcagaagagaggacaaggagctgtacaccgtggtgcagcacgtgaagcacttcaacgacgtggtggagttcggcgagaaccaggagttcaccgacgacatcgagtacctgctgagcggcctgaagagcacccagcccctgaacaccagatgcctgagcgtgatcagcctggccaccaagtgcgccatgcccagcttcagaatgcacctgagagcccacggcatggtggccatggtgttcaagaccctggacgacagccagcaccaccagaacctgagcctgtgcaccgccgccctgatgtacatcctgagcagagacagactgaacatggacctggacagagccagcctggacctgatgatcagactgctggagctggagcaggacgccagcagcgccaagctgctgaacgagaaggacatgaacaagatcaaggagaagatcagaagactgtgcgagaccgtgcacaacaagcacctggacctggagaacatcaccaccggccacctggccatggagaccctgctgagcctgaccagcaagagagccggcgactggttcaaggaggagctgagactgctgggcggcctggaccacatcgtggacaaggtgaaggagtgcgtggaccacctgagcagagacgaggacgaggagaagctggtggccagcctgtggggcgccgagagatgcctgagagtgctggagagcgtgaccgtgcacaaccccgagaaccagagctacctgatcgcctacaaggacagccagctgatcgtgagcagcgccaaggccctgcagcactgcgaggagctgatccagcagtacaacagagccgaggacagcatctgcctggccgacagcaagcccctgccccaccagaacgtgaccaaccacgtgggcaaggccgtggaggactgcatgagagccatcatcggcgtgctgctgaacctgaccaacgacaacgagtggggcagcaccaagaccggcgagcaggacggcctgatcggcaccgccctgaactgcgtgctgcaggtgcccaagtacctgccccaggagcagagattcgacatcagagtgctgggcctgggcctgctgatcaacctggtggagtacagcgccagaaacagacactgcctggtgaacatggagaccagctgcagcttcgacagcagcatctgcagcggcgagggcgacgacagcctgagaatcggcggccaggtgcacgccgtgcaggccctggtgcagctgttcctggagagagagagagccgcccagctggccgagagcaagaccgacgagctgatcaaggacgcccccaccacccagcacgacaagagcggcgagtggcaggagaccagcggcgagatccagtgggtgagcaccgagaagaccgacggcaccgaggagaagcacaagaaggaggaggaggacgaggagctggacctgaacaaggccctgcagcacgccggcaagcacatggaggactgcatcgtggccagctacaccgccctgctgctgggctgcctgtgccaggagagccccatcaacgtgaccaccgtgagagagtacctgcccgagggcgacttcagcatcatgaccgagatgctgaagaagttcctgagcttcatgaacctgacctgcgccgtgggcaccaccggccagaagagcatcagcagagtgatcgagtacctggagcactgctag

SEQ ID NO: 183957 - DNA, 3828 bp, Artificial Sequence
  derived and/or modified sequence
atggtgcagggccccgtgcagacccccgccctgaccatccacagaagaaagagaagaagaagctgcccccccaacagagccagctacctgcccaaggccgagagcctggccagcctgggcagccacctgcccgccctgctgagcagagccagagtgcccagaccccccgccggcagaagagagagagagagaagaagaagacccgtggccaaggcccccgccagactgagaggcgagtacgagaccggcgtgaagatgaccagcagattcggcaagacctacagcagaaagggcggcaacggcagcagcaagttcgacgaggtgttcagcaacaagagaaccaccctgagcaccaagtggggcgagaccaccttcatggccaagctgggccagaagagacccaacttcaagcccgacatccaggagatccccaagaagcccaaggtggaggaggagagcaccggcgaccccttcggcttcgacagcgacgacgagagcctgcccgtgagcagcaagaacctggcccaggtgaagtgcagcagctacagcgagagcagcgaggccgcccagctggaggaggtgaccagcgtgctggaggccaacagcaagatcagccacgtggtggtggaggacaccgtggtgagcgacaagtgcttccccctggaggacaccctgctgggcaaggagaagagcaccaacagaatcgtggaggacgacgccagcatcagcagctgcaacaagctgatcaccagcgacaaggtggagaacttccacgaggagcacgagaagaacagccaccacatccacaagaacgccgacgacagcaccaagaagcccaacgccgagaccaccgtggccagcgagatcaaggagaccaacgacacctggaacagccagttcggcaagagacccgagagccccagcgagatcagccccatcaagggcagcgtgagaaccggcctgttcgagtgggacaacgacttcgaggacatcagaagcgaggactgcatcctgagcctggacagcgaccccctgctggagatgaaggacgacgacttcaagaacagactggagaacctgaacgaggccatcgaggaggacatcgtgcagagcgtgctgagacccaccaactgcagaacctactgcagagccaacaagaccaagagcagccagggcgccagcaacttcgacaagctgatggacggcaccagccaggccctggccaaggccaacagcgagagcagcaaggacggcctgaaccaggccaagaagggcggcgtgagctgcggcaccagcttcagaggcaccgtgggcagaaccagagactacaccgtgctgcaccccagctgcctgagcgtgtgcaacgtgaccatccaggacaccatggagagaagcatggacgagttcaccgccagcacccccgccgacctgggcgaggccggcagactgagaaagaaggccgacatcgccaccagcaagaccaccaccagattcagacccagcaacaccaagagcaagaaggacgtgaagctggagttcttcggcttcgaggaccacgagaccggcggcgacgagggcggcagcggcagcagcaactacaagatcaagtacttcggcttcgacgacctgagcgagagcgaggacgacgaggacgacgactgccaggtggagagaaagaccagcaagaagagaaccaagaccgcccccagccccagcctgcagcccccccccgagagcaacgacaacagccaggacagccagagcggcaccaacaacgccgagaacctggacttcaccgaggacctgcccggcgtgcccgagagcgtgaagaagcccatcaacaagcagggcgacaagagcaaggagaacaccagaaagatcttcagcggccccaagagaagccccaccaaggccgtgtacaacgccagacactggaaccaccccgacagcgaggagctgcccggcccccccgtggtgaagccccagagcgtgaccgtgagactgagcagcaaggagcccaaccagaaggacgacggcgtgttcaaggcccccgccccccccagcaaggtgatcaagaccgtgaccatccccacccagccctaccaggacatcgtgaccgccctgaagtgcagaagagaggacaaggagctgtacaccgtggtgcagcacgtgaagcacttcaacgacgtggtggagttcggcgagaaccaggagttcaccgacgacatcgagtacctgctgagcggcctgaagagcacccagcccctgaacaccagatgcctgagcgtgatcagcctggccaccaagtgcgccatgcccagcttcagaatgcacctgagagcccacggcatggtggccatggtgttcaagaccctggacgacagccagcaccaccagaacctgagcctgtgcaccgccgccctgatgtacatcctgagcagagacagactgaacatggacctggacagagccagcctggacctgatgatcagactgctggagctggagcaggacgccagcagcgccaagctgctgaacgagaaggacatgaacaagatcaaggagaagatcagaagactgtgcgagaccgtgcacaacaagcacctggacctggagaacatcaccaccggccacctggccatggagaccctgctgagcctgaccagcaagagagccggcgactggttcaaggaggagctgagactgctgggcggcctggaccacatcgtggacaaggtgaaggagtgcgtggaccacctgagcagagacgaggacgaggagaagctggtggccagcctgtggggcgccgagagatgcctgagagtgctggagagcgtgaccgtgcacaaccccgagaaccagagctacctgatcgcctacaaggacagccagctgatcgtgagcagcgccaaggccctgcagcactgcgaggagctgatccagcagtacaacagagccgaggacagcatctgcctggccgacagcaagcccctgccccaccagaacgtgaccaaccacgtgggcaaggccgtggaggactgcatgagagccatcatcggcgtgctgctgaacctgaccaacgacaacgagtggggcagcaccaagaccggcgagcaggacggcctgatcggcaccgccctgaactgcgtgctgcaggtgcccaagtacctgccccaggagcagagattcgacatcagagtgctgggcctgggcctgctgatcaacctggtggagtacagcgccagaaacagacactgcctggtgaacatggagaccagctgcagcttcgacagcagcatctgcagcggcgagggcgacgacagcctgagaatcggcggccaggtgcacgccgtgcaggccctggtgcagctgttcctggagagagagagagccgcccagctggccgagagcaagaccgacgagctgatcaaggacgcccccaccacccagcacgacaagagcggcgagtggcaggagaccagcggcgagatccagtgggtgagcaccgagaagaccgacggcaccgaggagaagcacaagaaggaggaggaggacgaggagctggacctgaacaaggccctgcagcacgccggcaagcacatggaggactgcatcgtggccagctacaccgccctgctgctgggctgcctgtgccaggagagccccatcaacgtgaccaccgtgagagagtacctgcccgagggcgacttcagcatcatgaccgagatgctgaagaagttcctgagcttcatgaacctgacctgcgccgtgggcaccaccggccagaagagcatcagcagagtgatcgagtacctggagcactgctag

SEQ ID NO: 183958 - DNA, 3573 bp, Artificial Sequence
  derived and/or modified sequence
atgactagtaggttcggcaagacctactcaaggaaaggaggcaatggttccagcaagtttgacgaagtgttttctaataaaaggacgaccctgtccacaaaatggggcgaaacaacatttatggccaaactagggcagaaacgccccaactttaaacctgatatacaggagattccaaaaaaacctaaggtggaagaagaatccacaggggatccattcggcttcgatagcgacgatgagtctctgcccgtcagctctaaaaacttggcacaagtcaagtgttctagctattcagaatcctccgaggccgcccagcttgaggaagtgacctctgtcctagaggccaactcaaagatcagccacgtcgttgttgaagataccgtcgtttctgacaaatgctttcccttggaggacacactcttgggcaaggagaaatccaccaacagaattgtggaggacgacgcttctatatcctcatgcaataaactgatcacgagcgacaaagtggaaaatttccatgaggagcatgagaaaaactcccaccacattcataagaatgccgatgactcaactaagaagccaaatgctgagacgaccgtggcaagtgagatcaaggagacgaatgacacctggaactcccagtttggtaaacgcccagagagtccatcagagatctcgccgatcaagggatcagtccgtaccggactttttgagtgggacaacgattttgaggatatccgttcagaggactgcatattaagccttgactccgatccattgctagagatgaaagatgacgatttcaagaatcgactggaaaacttgaacgaggcgatcgaggaggacatcgtgcaatctgtgctgagacctaccaattgtaggacgtactgcagagccaataaaacaaagagctctcagggagcaagcaactttgataaactgatggacgggaccagccaggcactggcaaaggccaattcagagagtagcaaagacggcctgaatcaagctaaaaagggcggcgtgtcgtgcggaacatcatttagggggacagtgggtagaacccgcgattatactgtgctgcaccccagctgcctgtctgtctgtaatgtgactatccaagacacaatggaacgctcaatggatgagttcacagccagtacccctgcagacctgggggaggctggcagattaagaaaaaaggcggatattgctacatcaaagacgactacccgttttaggcccagcaacaccaaaagcaaaaaagacgtcaaactggagttctttggcttcgaagaccacgagaccggtggcgacgagggaggttccggatcctccaattataagattaagtattttggatttgacgatctgtcagaaagcgaggacgacgaagatgacgactgccaggttgaacggaagaccagcaaaaagcgtaccaagactgctcctagtccctctcttcaacccccaccagagtctaacgataatagccaagactctcagagcggcactaacaatgcagagaacctggattttacagaagacctccctggagttcctgagtctgtgaaaaagcccatcaacaaacagggagataagtcgaaggagaatacccggaaaatatttagcggccccaagcggtcccccacaaaggctgtttacaatgcccgccattggaatcatcctgatagcgaggaactgcctggaccccctgtggtgaaaccgcagtccgtgactgtccgcctctcttccaaggaacctaatcagaaagatgacggagtctttaaggctccggcgcctccttcaaaagtgatcaagacagtgacaattcccactcagccctaccaggatatcgtcaccgcactgaagtgtcgaagagaagacaaagagctgtataccgtcgtacagcacgttaaacattttaacgatgtcgttgagttcggagaaaatcaggagttcacggacgacatcgagtatctgttgagtggcctcaaatctacccaacctctcaatactcgatgcttgtcagtgatttctctagccactaagtgtgcaatgccctctttccgcatgcacctccgggcccatggaatggtcgccatggtgttcaaaactctggatgacagccagcaccaccaaaacctaagtttatgcacagccgcgctgatgtacatcctctccagagaccggctcaacatggacctggatagggccagcctcgacttaatgatccgccttctggagttggaacaggacgcctcctctgcgaagcttcttaatgagaaagacatgaataaaattaaagagaaaattcggcgcctatgcgaaaccgtgcacaataaacatcttgacctggagaacatcaccaccggtcaccttgctatggagacactcctttcgctgacctccaagcgggcgggcgactggttcaaagaagaactgagactcctcggtggtcttgaccacatcgtagacaaagtgaaggagtgtgtggaccacctttcgagggacgaggacgaagagaaactggtcgccagtctgtggggagccgagcgctgccttagggtgcttgagagtgtgacagtgcacaatcctgaaaaccaaagctatctgatagcctataaagactctcaacttatcgtgtccagcgctaaagctctgcagcactgcgaggaactgatccaacagtacaatcgagcggaagatagcatatgcctggcagattcaaaacctctgccgcatcagaatgtgaccaaccacgtcggcaaagccgttgaggactgcatgcgcgccatcatcggggtcctgctgaatctgactaacgataacgaatggggtagtacaaagaccggagaacaggatggtttgatcggaacggcactgaattgcgtgcttcaggttccaaaatacctgccccaggaacagagattcgatataagggtgctaggcttgggtcttctgattaatctagtcgagtacagcgcaagaaatagacattgcttagtgaatatggaaaccagctgtagcttcgactcctcaatctgcagtggcgagggtgacgattccctgcggataggagggcaggtgcacgcagtgcaggctctcgttcaactcttcttggagagagagagggctgcccaattggccgagtcaaaaacagatgaactgattaaagatgctcctacgacccagcatgataaatccggagagtggcaggaaacatcaggcgaaattcagtgggtgagtacggaaaaaaccgacggcaccgaggaaaaacacaaaaaggaggaggaggacgaggaattagacctgaacaaagcactccagcacgctggcaagcacatggaggactgcattgttgcctcctacacagccctactcctgggctgtctgtgccaggagtcaccaatcaatgtgaccactgtgcgggagtatttgcctgagggggattttagtattatgactgaaatgctaaagaaatttctatccttcatgaatctcacctgcgcagtcggcacaacaggtcaaaaaagcatatcccgcgtgatcgaatacttggaacactgctag

SEQ ID NO: 183959 - DNA, 3828 bp, Artificial Sequence
  derived and/or modified sequence
atggtacagggccccgtgcaaaccccagccctgacaatccatcgaaggaagcgccgacgctcctgccctcccaatcgcgcatcctacctgcccaaggccgaatccctggcttcactgggctctcacctgcccgctttactatcacgcgctcgtgtgcctaggccgccggcagggagacgcgaaagggaacgcagacgtcggcctgttgcaaaggctccagcacgccttagaggcgaatatgagactggggtcaagatgactagcaggttcgggaagacttattccagaaaaggaggtaacgggagcagcaaatttgacgaggtttttagcaacaaacgcaccactctgtctaccaagtggggtgagacaacatttatggccaaactcggccagaaaagacccaacttcaagccggacatccaggaaatccccaaaaagcccaaagtggaggaagagagtaccggcgatcccttcggctttgactccgacgacgagtcgttgcctgtttcatcaaagaacctggcacaagtaaagtgctcgtcttactctgagtcatcagaggcagctcaactggaggaggttacctcagtactggaagctaactctaaaatttcacacgtagtggttgaggacaccgtcgtctctgacaaatgttttccgctcgaggacacactcctggggaaggagaagtccaccaacaggatagtggaagatgacgcgagcataagctcttgcaataagcttattacctccgacaaagtagagaatttccacgaagaacatgaaaagaactcccaccatatacacaaaaatgccgacgacagtaccaaaaaacctaatgccgaaaccacagtcgcatcagaaataaaggagaccaacgacacatggaattctcagttcgggaagcgtcctgagagcccttctgagatttctccgattaagggctcagtgcggaccggactgtttgagtgggacaacgatttcgaggatattcggtctgaagactgtatcctgtctctggactctgaccctcttcttgagatgaaagacgacgatttcaaaaatcgtctggaaaatctgaatgaagccatcgaggaggatatcgtacaatcagtgttgcggcccaccaactgtcgaacctactgtcgcgcaaacaagacgaaaagctcccaaggggccagcaactttgataaactcatggatggtacctcgcaagccctggcaaaagcaaactccgagagcagtaaggacggactgaatcaggcaaagaaggggggcgtctcatgcggtacctcctttcggggtacggtgggcagaacgagggattatacggtgctgcacccctcgtgccttagtgtctgcaatgtcaccatccaagacacaatggaacgaagtatggacgagtttaccgcctccacccctgccgacctgggggaggccgggcgtctgagaaaaaaggcggatatagcaacatctaagactacaacccggtttcggccttccaatacaaagagcaaaaaggatgtgaagctagagtttttcggtttcgaagaccatgagacagggggagacgaagggggaagtgggtctagcaattataaaataaaatactttgggtttgatgatctctctgaatctgaggatgatgaggacgatgactgccaggtagagaggaagacaagcaaaaagagaaccaaaactgcccctagccctagcctgcagccgcctcccgaatccaacgacaattctcaggacagccaaagcggtacaaacaacgcggagaatctggactttaccgaagatctgcctggcgtgcctgagtccgtgaaaaagccaattaacaaacaaggtgataagtccaaagagaatacgagaaagattttttccggccccaaacggagccccaccaaggccgtctataatgcccgccactggaatcatccagatagtgaggagctgcctgggcctccggttgtaaaaccacagtcggttacagtgcgcttgtcttctaaggaaccaaatcagaaagacgacggtgtgtttaaggccccagctcccccaagcaaagttatcaagaccgttaccatccccacccagccctaccaagatattgtcaccgcgctgaagtgccggagagaggataaagagctgtacactgtcgttcaacatgtcaagcactttaatgacgtggttgagttcggggaaaaccaagagttcactgacgacatcgagtatctgctttcaggcctcaaaagcacccagcctctgaacactagatgtttgtctgtgatctccttggctacaaaatgcgctatgccctccttcaggatgcacctgagagctcacggcatggtcgccatggtctttaagactcttgacgacagtcaacaccaccagaatctgtctctttgcacggcggcacttatgtatatcctcagtcgagatcgcttaaatatggatttggatagagccagcctggacctcatgattcgattgctagagctcgagcaagacgctagcagtgcaaaactgctcaacgaaaaggatatgaataaaatcaaggagaagatccggcggttgtgtgagactgtacataacaagcacttagatctggagaatattaccactgggcacctagccatggagacactcctgagtcttacctccaagcgcgccggcgactggtttaaagaagagctgcgactgctcggcggtctggaccacatcgtggacaaagtgaaagaatgtgttgatcacctctcacgggatgaggacgaagagaaactcgtcgcctcactctggggagcagagaggtgcctgagggtgctggagtcagtgacagttcataacccggaaaaccagtcctacttgattgcgtacaaagacagtcagctcatcgtgtccagtgccaaggccctgcagcactgcgaagagctaatccaacagtacaaccgcgccgaggattccatatgcctggcagattcaaaaccactcccgcaccagaatgtgaccaaccacgtcggcaaagctgtggaagattgtatgcgcgccataatcggggtccttctcaatctcactaacgataatgaatgggggtctacgaaaaccggggagcaggatggacttatcggaactgcattgaattgcgtactgcaggtgcctaagtacctgcctcaggagcagcggtttgatataagagtgttgggcctgggacttctgattaatctggtggaatactcagcgcggaatcgccattgcttggtcaacatggaaacgtcctgctcattcgacagcagcatatgttctggcgaaggcgacgatagcctacggattggaggccaggtgcacgcagtccaagcacttgtgcagttgtttctggagcgcgagcgcgccgcccagcttgctgagtccaagactgatgagctgatcaaagacgcacccactacccagcatgataaatcaggcgaatggcaggagacatctggagagatccaatgggtctcaaccgaaaagacagatggtaccgaggagaagcataagaaagaagaagaagacgaggagttagacctgaacaaggccttacagcatgctggcaaacacatggaggactgcatcgtagccagttacaccgccctactgctgggatgtctttgccaagaaagcccaatcaacgtgaccaccgtccgggagtacttgcccgaaggcgattttagcattatgacagagatgttgaaaaaatttctgagttttatgaatctgacatgtgccgtggggacaactggccagaaatcaatctcccgcgtcattgaatacctcgaacactgctag

SEQ ID NO: 183960 - DNA, 3828 bp, Artificial Sequence
  derived and/or modified sequence
atggtgcagggcccggtgcagacacctgcattgacaatccacagacgcaagcggcggcgctcttgtcctccaaaccgcgcctcctatctccctaaagcagaaagcctggcatctctagggagtcacctcccggcactgctctctcgcgctcgagttccgcgcccccctgcaggccgtcgcgagagggaaagaagaagaagacccgttgctaaagcaccagcacggctgcgcggggagtatgaaaccggggtgaaaatgaccagcaggtttggaaagacatactccaggaagggcgggaatggatcctcgaagttcgatgaagtattcagcaataaacgcaccaccctgagtactaaatggggcgagacaactttcatggccaagttaggacagaagagaccgaacttcaaaccagatatccaggagattccaaaaaaaccaaaggttgaggaggagagcaccggcgatccattcggttttgattcagacgatgaaagcctccctgtcagtagcaaaaacctggctcaggtcaaatgcagttcttacagcgagtcatctgaagcagctcagctcgaagaggtaacttctgtgcttgaagctaacagcaagatctctcatgtcgtggtcgaagacacagtggtgagtgataaatgtttccccctggaggacacactgttaggaaaggagaagtctacaaacaggattgtggaggatgatgccagcattagcagttgcaacaagctcattacaagcgataaagtggaaaactttcacgaagaacacgagaaaaatagtcaccacatccataagaacgcggacgactcaactaaaaaacccaatgcagaaacaacagtcgcgtctgagattaaggagactaatgacacctggaatagtcaatttgggaaaagacctgaaagtcccagcgaaatctctcctatcaagggaagcgttagaaccggtctgtttgagtgggataatgactttgaggatatcagaagcgaggactgtattctaagcttagacagtgaccccctgcttgagatgaaggatgatgattttaagaatcgtctggaaaaccttaatgaggccattgaggaagacatcgtacagtccgtgctgcggcccactaactgtcgaacatattgcagggctaacaaaacaaaaagttcccagggcgcttcaaactttgataaactgatggacgggaccagccaggcactggccaaggccaacagcgagtcatccaaggatggcttaaaccaagctaagaaaggcggggtgtcttgtgggactagttttcgcggcacagtgggaaggacacgggactacaccgtgctgcatccttcctgtctcagtgtatgtaacgtcacgatccaagatactatggagcgcagcatggatgaattcaccgcttccaccccggccgacctcggcgaggctggtcggctgagaaaaaaggccgatattgccaccagtaagaccaccacacgcttcagaccttctaacactaagagcaaaaaggacgtgaaattagagtttttcggatttgaggatcacgagactggaggagatgagggcggctctggaagtagtaattataagatcaagtattttgggttcgacgatcttagtgaatcagaggacgacgaagatgatgactgtcaggtggagaggaaaacgtcaaagaaaaggaccaaaaccgctccttcgccgagtctccagccccccccggagtctaacgataacagccaggattcccaaagcgggaccaacaacgctgagaacctggactttaccgaagatctgcccggcgtgccagagagtgtgaaaaagcccatcaacaaacagggtgacaagagcaaggagaacacccggaagatcttcagcggtccaaaacggagcccaaccaaggctgtctataacgcccgccattggaatcaccccgactctgaggagcttcctggtccccccgtggtgaagccccagtcagtgacggttaggctcagctcaaaagagcccaatcaaaaggatgatggcgtgttcaaggccccagccccaccctccaaggtgatcaagacagtaactatcccgacacaaccataccaagacatcgtaaccgccctgaagtgccgaagggaagataaagagctgtataccgtggtacagcatgttaagcactttaacgacgtggtggagttcggggagaaccaggagttcactgacgacatcgaataccttctttctggcctgaaatccactcagccactcaatacaaggtgcctaagcgtcatttccttggccacaaagtgcgccatgccttcattcagaatgcacctgcgcgcgcatggaatggtcgcaatggtgttcaagacactggacgactcccagcaccaccagaatctgagcctctgcaccgcagctttgatgtatattttatccagagatcgcctgaatatggatttggacagagcctcgttggatctgatgattaggttgcttgagctcgaacaagacgcctcctctgccaaactgctgaatgagaaggatatgaataagattaaagagaagataagaagattatgcgagactgtgcataacaaacacctggacttggagaacatcaccaccggacatctggctatggaaactctgctaagcttaacatccaagagagccggcgactggttcaaggaggaattgcggctgcttgggggcctggaccacatcgtcgataaggtcaaggaatgtgttgaccacttgagcagggatgaggacgaggagaagctggtagcgtccctttggggagcagagagatgcctgcgtgtgttggagtcagtgacggtgcataatcccgagaaccagagttatctgatcgcctacaaggactcccagctgattgtctcttctgctaaagctctccaacactgtgaagagttgatccagcagtacaacagggctgaggatagcatctgtctcgcagattcgaaacccctccctcaccaaaatgtcactaatcatgtggggaaagccgtcgaggactgcatgcgggcaattattggtgtgttattaaacctgactaacgacaacgagtgggggagcaccaaaactggggagcaagacgggcttatcggaacagcattgaactgcgtactacaggtgccaaagtatctccctcaggagcagcggtttgacattagagtactgggcctggggttgcttataaacctggtcgagtacagtgcacggaatcggcattgccttgtcaatatggaaactagctgttccttcgatagctccatctgcagcggtgagggagacgactcccttcgcatcggcggccaggtccatgctgtgcaagccctggtgcaattatttctggaacgcgagcgggcggcgcagctcgccgaaagcaaaactgatgaacttatcaaggatgccccaacaacacagcatgacaaaagcggggagtggcaagagacaagcggggagatccagtgggtgtcgactgagaaaaccgatggtacagaggaaaaacacaagaaggaagaggaagacgaggagctggatctaaacaaagccctgcaacatgccgggaaacatatggaggactgcatcgtcgcctcatacaccgcactactactggggtgtctgtgccaagaatctccaattaatgtcaccaccgtgagggagtatctgcccgagggggatttctccattatgacagagatgctcaaaaaattcctgagttttatgaacctgacctgcgcggtgggcaccaccggccagaaatcaattagccgtgtgatcgagtacctggagcactgctag

SEQ ID NO: 183961 - DNA, 3573 bp, Artificial Sequence
  derived and/or modified sequence
atgaccagcagatttgggaagacctacagcaggaagggcggcaatggcagcagcaagtttgatgaggtgttcagcaacaagaggaccaccctgagcaccaagtggggcgagaccaccttcatggccaagctgggccagaagaggcccaacttcaagccagacatccaggagatccccaagaagcccaaggtggaggaggagagcactggagacccctttggatttgacagtgatgatgagagcctgcctgtgagcagcaagaacctggcccaggtgaagtgcagcagctacagcgagagcagcgaggccgcccagctggaggaggtgacctctgtgctggaggccaacagcaagatcagccacgtggtggtggaggacacagtggtgtctgacaagtgcttccccctggaggacaccctgctgggcaaggagaagagcaccaaccgcatcgtggaggatgatgccagcatcagcagctgcaacaagctgatcaccagtgacaaggtggagaacttccacgaggagcacgagaagaacagccaccacatccacaagaatgctgatgacagcaccaagaagcccaatgctgagaccaccgtggccagcgagatcaaggagaccaatgacacctggaacagccagtttgggaagaggcctgagagccccagcgagatcagccccatcaagggctctgtgaggacaggcctgtttgagtgggacaatgactttgaggacatccgctctgaggactgcatcctgagcctggacagcgaccccctgctggagatgaaggatgatgacttcaagaaccggctggagaacctgaatgaggccattgaagaagatattgtgcagagcgtgctgcggcccaccaactgcaggacctactgccgggccaacaagaccaagagcagccagggcgccagcaactttgacaagctgatggatggcaccagccaggccctggccaaggccaacagcgagagcagcaaggatggcctgaaccaggccaagaagggcggcgtgtcctgtggcaccagcttccggggcaccgtgggccgcacccgggactacacagtgctgcaccccagctgcctgtctgtgtgcaatgtgaccatccaggacaccatggagaggtccatggatgagttcaccgccagcaccccagctgacctgggggaggccggccgcctgaggaagaaggctgacatcgccaccagcaagaccaccacccgcttccggcccagcaacaccaagagcaagaaggatgtgaagctggagttctttggatttgaggaccacgagactggaggagatgaaggaggcagcggcagcagcaactacaagatcaagtactttggatttgatgacctgtctgagagtgaagatgatgaagatgatgactgccaggtggagaggaagaccagcaagaagaggaccaagacagcccccagccccagcctgcagcccccacctgagagcaatgacaacagccaggacagccagagcggcaccaacaatgctgagaacctggacttcacagaggacctgcccggggtgcctgagagcgtgaagaagcccatcaacaagcagggcgacaagagcaaagaaaacaccaggaagatcttcagcggccccaagaggagccccaccaaggctgtgtacaatgcccggcactggaaccacccagattctgaggagctgcccggcccccctgtggtgaagccccagagcgtgacagtgcggctgagcagcaaggagcccaaccagaaggatgatggagtcttcaaggccccagccccacccagcaaggtgatcaagacagtgaccatccccacccagccctaccaggacatcgtgacagccctgaagtgccggcgggaggacaaggagctgtacacagtggtgcagcacgtgaagcacttcaatgatgtggtggagtttggagagaaccaggagttcacagatgacatcgagtacctgctgagcggcctgaagagcacccagcccctgaacacccgctgcctgagcgtcatcagcctggccaccaagtgtgccatgcccagcttcaggatgcacctgcgggcccacggcatggtggccatggtgttcaagaccctggatgacagccagcaccaccagaacctgagcctgtgcacagctgccctgatgtacatcctgagccgggaccggctgaacatggacctggaccgggccagcctggacctgatgatccggctgctggagctggagcaggatgccagcagcgccaagctgctgaatgagaaggacatgaacaagatcaaggagaagatccggcggctgtgtgagaccgtgcacaacaagcacctggacctggagaacatcaccaccggccacctggccatggagaccctgctgagcctgaccagcaagagagctggggactggttcaaggaggagctgcggctgctgggcggcctggaccacatcgtggacaaggtgaaggaatgtgtggaccacctgagcagagatgaagatgaggagaagctggtggccagcctgtggggcgctgagcgctgcctgcgggtgctggagagcgtgacagtgcacaaccctgagaaccagagctacctgattgcctacaaggacagccagctgattgtgagcagcgccaaggccctgcagcactgtgaggagctgatccagcagtacaacagagctgaggacagcatctgcctggccgacagcaagcccctgccccaccagaatgtgaccaaccacgtgggcaaggctgtggaggactgcatgagggccatcatcggcgtgctgctgaacctgaccaatgacaatgagtggggcagcaccaagacaggagagcaggacggcctcatcggcacagccctgaactgtgtgctgcaggtgcccaagtacctgccccaggagcagagatttgacatccgggtgctgggcctgggcctgctgatcaacctggtggagtacagcgccaggaacagacactgcctggtgaacatggagaccagctgcagctttgacagcagcatctgcagcggggagggagatgacagcctgcgcatcggcggccaggtgcatgctgtgcaggccctggtgcagctgttcctggagcgggagcgggccgcccagctggccgagagcaagacagatgagctgatcaaggatgcccccaccacccagcacgacaagtctggagagtggcaggagaccagcggggagatccagtgggtgtccacagagaagacagatggaacagaggagaagcacaagaaggaggaggaggatgaggagctggacctgaacaaggccctgcagcacgccggcaagcacatggaggactgcatcgtggccagctacacagccctgctgctgggctgcctgtgccaggagagccccatcaacgtgaccaccgtgcgggagtacctgcctgagggggacttcagcatcatgacagagatgctgaagaagttcctgtccttcatgaacctgacctgtgctgtgggcaccaccggccagaagagcatcagcagggtcatcgagtacctggagcactgctag

SEQ ID NO: 183962 - DNA, 3828 bp, Artificial Sequence
  derived and/or modified sequence
atggtgcagggccctgtgcagaccccagccctgaccatccacaggaggaagagaagaagaagctgcccccccaacagagccagctacctgcccaaggccgagagcctggccagcctgggcagccacctgcctgccctgctgagccgggcccgggtgcccaggcctcctgctggaagaagagagcgggagaggagaagaagacctgtggccaaggccccagcccggctgcggggggagtatgagaccggggtgaagatgaccagcagatttgggaagacctacagcaggaaaggaggaaatggcagcagcaagtttgatgaggtgttcagcaacaagaggaccaccctgagcaccaagtggggcgagaccaccttcatggccaagctgggccagaagaggcccaacttcaagccagacatccaggagatccccaagaagcccaaggtggaggaggagagcactggagaccccttcggctttgacagtgatgatgagagcctgcctgtgagcagcaagaacctggcccaggtgaagtgcagcagctacagcgagagcagcgaggccgcccagctggaggaggtgacctctgtgctggaggccaacagcaagatcagccacgtggtggtggaggacacagtggtgtctgacaagtgcttccccctggaggacaccctgctgggcaaggagaagagcaccaacagaattgtggaggatgatgccagcatcagcagctgcaacaagctgatcaccagtgacaaggtggagaacttccacgaggagcacgagaagaacagccaccacatccacaagaatgctgatgacagcaccaagaagcccaatgctgagaccaccgtggccagcgagatcaaggagaccaatgacacctggaacagccagtttgggaagaggcctgagagccccagcgagatcagccccatcaagggctctgtgaggacaggcctgtttgagtgggacaatgactttgaggacatccgctctgaggactgcatcctgagcctggacagcgaccccctgctggagatgaaggatgatgacttcaagaaccggctggagaacctgaatgaggccatcgaggaggacatcgtgcagagcgtgctgcggcccaccaactgcaggacctactgccgggccaacaagaccaagagcagccagggcgccagcaactttgacaagctgatggatggcaccagccaggccctggccaaggccaacagcgagagcagcaaggatggcctgaaccaggccaagaagggcggcgtgtcctgtggcaccagcttccggggcaccgtgggccgcacccgggactacacagtgctgcaccccagctgcctgtctgtgtgcaatgtgaccatccaggacaccatggagaggtccatggatgagttcaccgccagcaccccagctgacctgggggaggccggccgcctgaggaagaaggctgacatcgccaccagcaagaccaccacccgcttccggcccagcaacaccaagagcaagaaggatgtgaagctggagttcttcggctttgaagatcatgaaacaggaggagatgagggcggcagcggcagcagcaactacaagatcaagtacttcggctttgatgacctgtctgagagtgaagatgatgaagatgatgactgccaggtggagaggaagaccagcaagaagaggaccaagacagcccccagccccagcctgcagcccccacctgagagcaatgacaacagccaggacagccagagcggcaccaacaatgctgagaacctggacttcacagaggacctgcccggggtgcctgagagcgtgaagaagcccatcaacaagcagggcgacaagagcaaggagaacaccaggaagatcttcagcggccccaagaggagccccaccaaggctgtgtacaatgcccggcactggaaccacccagacagcgaggagctgcccggcccccctgtggtgaagccccagagcgtgacagtgcggctgagcagcaaggagcccaaccagaaggatgatggagtcttcaaggccccagccccacccagcaaggtgatcaagacagtgaccatccccacccagccctaccaggacatcgtgacagccctgaagtgcagaagagaggacaaggagctgtacacagtggtgcagcacgtgaagcacttcaatgatgtggtggagtttggagagaaccaggagttcacagatgacatcgagtacctgctgagcggcctgaagagcacccagcccctgaacacccgctgcctgagcgtcatcagcctggccaccaagtgtgccatgcccagcttcaggatgcacctgcgggcccacggcatggtggccatggtgttcaagaccctggatgacagccagcaccaccagaacctgagcctgtgcacagctgccctgatgtacatcctgagccgggaccggctgaacatggacctggaccgggccagcctggacctgatgatccggctgctggagctggagcaggatgccagcagcgccaagctgctgaatgagaaggacatgaacaagatcaaggagaagatccggcggctgtgtgaaacagtgcacaacaagcacctggacctggagaacatcaccaccggccacctggccatggagaccctgctgagcctgaccagcaagagagctggggactggttcaaggaggagctgcggctgctgggcggcctggaccacatcgtggacaaggtgaaggaatgtgtggaccacctgagcagagatgaagatgaggagaagctggtggccagcctgtggggcgctgagcgctgcctgcgggtgctggagagcgtgacagtgcacaaccctgagaaccagagctacctgattgcctacaaggacagccagctgattgtgtcctctgccaaggccctgcagcactgtgaggagctgatccagcagtacaacagagcagaagattccatctgcctggccgacagcaagcccctgccccaccagaatgtgaccaaccacgtgggcaaggctgtggaggactgcatgagggccatcattggagtgctgctgaacctgaccaatgacaatgagtggggcagcaccaagacaggagagcaggacggcctgattggaacagccctgaactgtgtgctgcaggtgcccaagtacctgccccaggagcagagatttgacatccgggtgctgggcctgggcctgctgatcaacctggtggagtacagcgccaggaacagacactgcctggtgaacatggagaccagctgcagctttgacagcagcatctgcagcggggagggagatgacagcctgagaattggaggccaggtgcatgctgtgcaggccctggtgcagctgttcctggagcgggagagagctgcccagctggccgagagcaagacagatgagctgatcaaggatgcccccaccacccagcacgacaagagcggggagtggcaggagaccagcggggagatccagtgggtgtccacagagaagacagatggaacagaggagaagcacaagaaggaggaggaggatgaggagctggacctgaacaaggccctgcagcacgccggcaagcacatggaggactgcatcgtggccagctacacagccctgctgctgggctgcctgtgccaggagagccccatcaacgtgaccaccgtgcgggagtacctgcctgagggggacttcagcatcatgacagagatgctgaagaagttcctgtccttcatgaacctgacctgtgctgtgggcaccaccggccagaagagcatcagccgggtgattgagtacctggagcactgctag

SEQ ID NO: 183963 - DNA, 3573 bp, Artificial Sequence
  derived and/or modified sequence
atgaccagccggttcggcaagacctacagccggaagggcggcaacggatcctctaagttcgacgaggtgttcagcaataaacgaaccacattatcaaccaaatggggtgagactacgtttatggccaaactgggacagaagcgacctaattttaagcccgacatccaggagatccccaaaaaaccaaaagttgaggaggaatccactggtgacccatttggctttgattcagatgacgagtccttgccagtctccagtaaaaatctagcccaggtcaagtgttcctcttactccgagagttccgaggccgcccagctggaagaggtgacttccgtgcttgaggctaacagcaaaatttctcatgtcgtggtcgaagacacagtggtctccgataaatgtttccctcttgaagataccctactcgggaaggagaaatctacgaaccgtatcgtggaggatgatgccagtatcagttcttgcaacaaattgatcaccagtgacaaggtcgagaactttcatgaagaacatgagaaaaacagtcaccacatccacaagaacgccgacgacagcacaaaaaagcccaatgccgagaccacagttgcttctgagatcaaggagacaaacgacacctggaattcccaattcggaaaaagacctgaaagcccttcagagatcagcccgatcaaaggttccgtgcgaaccggccttttcgaatgggataacgacttcgaggatataagatcagaggactgtattttatccctagacagcgaccctctgctagagatgaaagatgacgattttaagaaccggctggaaaacctgaatgaagcaatcgaggaggacatcgtgcaatcagtgctgaggcctacgaattgccggacctattgtcgggctaataagaccaagtccagccagggagcctcaaacttcgacaaactcatggacgggactagtcaggcgctagccaaagccaacagcgaaagtagtaaggatggattgaaccaggccaaaaaaggcggagtgtcatgcggcacctccttcagaggcaccgttgggcgaactcgggactacacggtcttacacccatcttgtctgtctgtgtgcaacgtaaccatccaggatacaatggagcggtccatggatgagtttaccgcaagcactccagcagacttgggggaagcaggccgactccggaagaaggccgacatcgccacatccaagacaacaacccggttccgccctagcaatactaaatctaagaaagacgttaagctcgaatttttcgggttcgaggaccacgagactggcggtgacgagggggggtcagggagcagtaactacaaaattaagtatttcggttttgacgacttgagcgagtccgaggacgatgaagacgatgactgtcaggtggagcgtaagacctcaaagaagcggacgaagaccgcaccgtccccttccctacaacctcctcctgagagcaacgataatagtcaggatagtcagagcggcaccaataatgcggaaaacttggatttcaccgaagacctgccaggagtgcctgaatccgtaaaaaagcctataaacaaacagggggacaagtcaaaagaaaatacaaggaaaattttctccgggccaaagcgatcacccaccaaggcggtgtacaatgcccgacattggaaccaccccgattctgaagagttaccaggacctccagtggttaaaccacagagcgtcaccgtgcggttaagtagtaaagagccaaaccagaaggatgacggggtcttcaaagcacctgccccccctagcaaggtaataaagaccgtgaccatccctacacagccgtaccaagatatcgtgacagctctcaagtgtcgaagagaggacaaagagctgtataccgtggtccagcatgtgaagcatttcaacgacgtcgtagaattcggagaaaaccaggagttcactgacgacattgagtatctactttcaggtctcaaaagcactcagcctctaaacacacgctgcctaagtgtgatttctctcgccacaaagtgtgccatgccttcttttaggatgcacctgagggctcatggcatggtggcaatggtatttaagaccctagacgattcccagcatcaccaaaatctgagcctgtgtaccgctgcgttgatgtatatccttagtagggatcggttgaatatggatctggaccgagcgtctctcgatttgatgattaggctgttagaactagagcaagatgccagttcggctaaacttcttaacgaaaaggacatgaacaaaatcaaggaaaagatccgccgcttatgtgaaactgtgcacaacaagcatcttgatcttgagaatattaccacgggacacctagctatggaaaccctgctatcattaacaagcaagcgtgctggggattggttcaaggaagaactgcgcttactggggggcttggatcacatcgtggacaaggtcaaagaatgcgtggatcacctatctagggatgaggatgaagagaaactggtggctagtttgtggggagccgagaggtgcctcagggtgctggagtctgttactgtgcataaccccgagaatcagtcttacctgattgcatacaaggatagtcaactcatcgtgtcgagcgccaaggcactgcagcattgcgaagagctgattcaacaatataatcgagcagaggattctatctgcctggccgactccaagcctctccctcaccagaacgtgacgaatcatgtgggaaaagcagtcgaagactgtatgagggcaataatcggtgtcctgctgaatttgaccaatgataacgagtgggggtctacaaagaccggcgagcaggatgggttaattgggacggcccttaattgcgttctgcaagttcccaagtacctgcctcaagaacagcgctttgatatcagggtgctgggactgggactactgattaatctggtggagtattccgcaagaaatcgccactgccttgttaatatggagacctcttgtagttttgatagttccatttgttccggcgagggtgatgactcacttcggatcggaggacaagttcacgctgtgcaagcccttgtacagctcttcctggaacgggagagagcggcccagcttgcagaatctaaaacagatgaactgataaaagacgcaccaactacacagcacgataagtccggagagtggcaggaaacatctggtgagatccagtgggtaagcacagagaagaccgacggtacagaagaaaagcacaaaaaagaggaggaggacgaagagttggatttgaataaagcgctgcagcatgccggcaagcacatggaagattgcatcgtggcgagttatactgccctgctgctcggctgcctgtgccaggagtccccaatcaatgtgaccactgtgcgcgaatatctgcctgaaggtgacttttctattatgaccgaaatgctgaagaagttcctttctttcatgaacctgacatgcgccgtcggaactactggacagaaatcaatttcccgcgtgattgagtatctcgaacactgctag

SEQ ID NO: 183964 - DNA, 3828 bp, Artificial Sequence
  derived and/or modified sequence
atggtgcagggccccgtgcagacccccgccctgaccatccaccggaggaagagacggagaagttgcccgcctaaccgggcaagctacctcccaaaggcagagtccctggcttctttgggttctcacctccccgctctgttatcaagagcaagagtgccccgtccaccggccgggcggagagaaagggagcgccgcagaagacccgttgctaaagcaccagcccgccttagaggagaatacgagacaggggtcaagatgaccagcagatttggaaagacgtactccagaaagggcggaaatggtagctccaaatttgatgaggtcttctccaataagagaacaacactcagcaccaagtggggagagactacttttatggccaagctaggacagaaaaggccgaactttaaacctgatatccaggagattcccaagaagcctaaggttgaagaagagtctacgggggatccatttggctttgacagtgatgacgagtcgttgccggtctcctccaaaaatctggcacaggttaaatgctcatcatactcagaaagctcagaggctgcacagctcgaggaagtgacgagcgttctcgaggcaaacagcaagatctcacacgtggtggttgaagacaccgtggtgagtgacaaatgcttcccactggaagacacactgttaggcaaggagaaatcaacgaatagaatcgtcgaggatgacgcctctattagcagttgtaataagctaatcacttccgacaaagtggagaatttccatgaagagcacgaaaagaattcccaccatatccacaagaacgccgacgatagcacaaagaagccaaacgctgagactaccgtggccagcgagatcaaggagacgaatgacacctggaatagccagttcggcaaaaggcccgagtcgccaagtgaaatctcccccataaagggcagcgtgcgcactggcctgtttgaatgggataatgactttgaggacatccgcagtgaggactgcatcctctcgctcgactccgacccactcctggagatgaaagacgatgactttaaaaatcgcctggagaatcttaacgaggctattgaagaagacatcgtacagagcgtcctgcgcccgactaactgccgaacatactgccgggcaaacaagactaagtcctcacaaggcgctagcaatttcgataagctcatggacggcacaagtcaggcgttagcgaaggccaattctgaatcatccaaggacggactgaaccaagcaaagaaaggtggggttagctgcggaacaagcttccggggcacggtgggcagaacacgcgactacaccgtactgcacccctcttgccttagcgtgtgcaatgtgactattcaagacaccatggagcgctcaatggacgagtttacagcctctactcctgcagacttgggcgaagccgggagactgcgtaaaaaggccgacatcgctacttccaagaccactacgcgcttccgcccctccaacacgaagtcaaaaaaggacgtgaagctagagtttttcgggtttgaggatcacgagaccgggggggacgagggcggctctggaagttcaaattacaaaatcaagtatttcggattcgacgatttgagtgaaagcgaggacgacgaagacgacgactgccaggtggaacgaaaaacttctaagaagcgtaccaagactgccccctcaccatcactgcagccacccccggaaagtaatgataactcccaggactcacagtcagggaccaacaatgccgagaatttagactttacggaggacttgcccggggtccccgaatctgtgaagaaaccaataaataagcagggagacaaatctaaggagaatacccgtaagattttcagcggccctaaacgctcgcctactaaggctgtatacaatgcacgccattggaaccaccccgactccgaagagcttcctggtccccccgtcgttaagccacagtccgtgacagtgcggttgtcctcaaaagaacctaaccagaaggacgatggggtttttaaggcaccagcaccgccatctaaagtcataaagactgtgacaataccgacccagccatatcaggacatagtcacagcactgaagtgccgacgggaggacaaggaactatacacagttgtgcaacatgtcaaacacttcaacgacgtagtggaattcggcgagaatcaggagttcacagacgacatcgagtacctgctgtcaggtctgaaatcaacccagccgctgaatacccgatgcctatcagtgataagtctggccacaaagtgtgcaatgccaagctttagaatgcatttgcgagcacatggcatggttgctatggtcttcaaaactctcgacgactcccagcatcatcagaatctgagcctgtgtaccgcggctcttatgtacatcttatcccgggatcgcctgaatatggacttagaccgcgccagtctggacttgatgatcagacttctggagctggaacaggacgcatcatctgccaagctgctgaatgagaaagacatgaacaagattaaggaaaagatccggcgcctgtgcgagaccgtgcataataaacatctggacctggaaaacattacaacaggtcacctggcaatggagaccctcctgagtcttacctccaagagggccggagattggttcaaggaggagttgcgcttgctgggcgggctcgatcatatagtggataaggtgaaggagtgcgtggatcacctgagcagggatgaagacgaagaaaagcttgtggccagcctgtggggcgcagagagatgtctccgagtcttggaatcggtgacagtgcataaccctgagaaccagtcctatctcatagcatacaaagactcacagctgatcgtgagcagcgctaaggcactacagcattgcgaggagttgatccagcagtataatcgtgcagaggattccatctgcctggctgattcaaagcccctgccacatcagaatgtgacgaatcatgtcggcaaagccgtggaagactgcatgagggctatcataggtgtgttacttaatcttaccaacgacaatgaatggggttctaccaaaaccggtgagcaggatggactgatcggtacagcactgaactgcgtcctgcaggtgccgaaatatctgccgcaggaacagcgatttgatattcgggtcctgggtctgggcttactaattaacctcgtggaatactccgctaggaataggcattgtctcgtcaacatggagacctcttgctcatttgatagcagcatttgctctggggagggggacgactctctgcgaatcggcggccaggttcatgctgttcaggccctggtgcaactgtttttggaacgagagcgcgccgcccagctggcggaatctaaaactgacgaattgatcaaggatgcgcccaccacacagcatgacaagtccggagagtggcaagaaacctccggcgagattcagtgggtgtctaccgagaaaaccgacggaaccgaagagaaacataagaaggaggaggaggacgaggagctcgacctgaataaagccttacagcacgctggtaaacacatggaagattgcatagttgcctcgtacaccgccctgttactgggatgcctgtgccaggagtcccccatcaatgttacaacagtaagagagtacctgcctgaaggcgatttctccataatgactgaaatgcttaagaagtttctctccttcatgaaccttacctgtgctgtcggtacgacgggacagaaatcaatcagcagggtgatagaatacctggaacattgctag

SEQ ID NO: 183965 - DNA, 3828 bp, Artificial Sequence
  derived and/or modified sequence
atggtgcagggccccgtgcagacccccgccctgaccatccaccggcgcaagagacgtagatcttgccctccaaatagagcaagttatctgccaaaggcggaatctttagcatcattgggaagtcatttacctgctctgcttagtagggccagggtgcctcgcccccccgccggacgcagagaacgcgaacgccggcgtcgccccgtggcaaaagcccccgcgcgccttcgcggtgagtacgagaccggagtcaagatgacttccaggttcggtaaaacctatagtcggaagggcgggaatggatcaagcaaattcgatgaggtcttctctaacaaaagaacaaccctaagcactaaatggggcgaaactaccttcatggccaaactgggccagaagcggcccaacttcaaaccagatatacaggagatccctaagaagccaaaagtcgaggaagagtctaccggtgacccctttggatttgattcagacgatgaaagtctgccagtatccagtaagaatctggcacaggtaaagtgctctagctactccgaatcctccgaggctgcacagttggaggaggtaacctcagtcctcgaagccaactctaaaatttctcacgtggtggtcgaggacaccgtggtgagcgacaagtgttttcccttggaagacactttgctgggcaaggagaagtccactaaccgtatcgtggaggacgacgcctccatcagctcttgtaacaagctcatcacatccgacaaagttgaaaattttcacgaggagcacgaaaagaactcacaccacatacacaagaacgccgatgattcaacaaagaaaccgaatgccgagactactgttgcctccgagatcaaagaaaccaacgatacttggaacagtcagttcggaaagcgacctgagagcccctcagaaattagccctatcaaaggatctgtccgtactggcctgtttgagtgggataacgatttcgaagacatacggagcgaggactgcatcctgagcttggactccgatccccttctggaaatgaaagacgacgattttaagaaccggctggagaatctgaacgaggcgatagaggaagacatcgtccaaagtgttctgagaccaacaaactgcagaacatattgtcgcgccaataaaactaagagttcccagggtgcatccaatttcgacaaattgatggatggtacatcccaggccttggccaaagccaactctgaaagcagtaaagacggcctgaatcaagcgaaaaagggaggagtgtcatgcggaaccagcttccgtggaactgtgggcagaacgcgggattacacggtgttacatccttcttgtttgtcagtctgcaatgtcaccatccaagatactatggagagatcaatggacgaattcacagccagtactcctgccgatttaggggaagccggccgcctgaggaagaaagccgatatcgcaactagcaaaaccacgaccagattcaggccatccaacactaagagtaaaaaggacgtcaagctcgaattcttcgggtttgaggaccacgagaccggcggagatgagggcgggtccggctcctcaaattataaaattaaatacttcggatttgacgatctgagtgagagcgaggatgatgaagacgatgactgtcaggtcgaaaggaaaacaagtaaaaagcgcacaaagacagccccaagtccttccttacagcccccaccagagtcaaatgataactcccaggattcacagtccgggaccaacaacgcagaaaatcttgattttacagaggacctgccgggcgtcccagagtctgtcaaaaaaccaatcaacaagcagggagacaaatcaaaggagaacaccaggaagatattcagtggaccaaagcgcagtccaacgaaggccgtgtacaatgctcgccattggaatcatccagattccgaggagcttcccggtccccccgtggtgaagccccagtctgtgaccgtaaggttatccagcaaagaaccgaatcaaaaagacgatggagtcttcaaggcccccgcacccccttccaaagtgattaaaaccgtaacaattccgactcagccctaccaagatatcgtgactgcactgaaatgtcgtcgagaagacaaagagttgtatactgtggtacagcacgttaaacatttcaacgacgtggtggaatttggcgaaaaccaagaattcacagacgacatcgagtacctcctgtcgggcctgaaatctactcagccactgaacactcggtgtctcagcgtgatttctttagccactaagtgtgccatgccttcctttagaatgcacctgcgcgcccacggcatggtggcaatggtgttcaaaaccttggatgacagtcagcaccatcaaaatcttagcctctgcacagcggccttgatgtacattctgagccgcgataggctgaacatggacttggatagggcttctcttgaccttatgatacgcttgctggagctcgagcaggatgcaagtagcgccaagctgttgaatgaaaaggacatgaacaaaatcaaggagaagattcgcaggctgtgcgaaacggttcataacaaacacctggatctcgaaaatatcaccactggccacctggcaatggaaactctgctcagtcttacaagcaagagagccggcgactggtttaaagaggaactgcggttactgggggggttggatcacatcgttgacaaggtcaaagaatgcgtagatcatctcagtagggacgaggacgaggagaaactggtagccagcctttggggagccgagcgatgtttgagagtgctcgaatctgtcaccgtgcataaccccgaaaatcagtcgtacctcattgcttacaaagatagccagctgatcgtctcttctgccaaggcacttcagcattgtgaagagcttatccagcagtacaatcgtgcggaagacagtatttgcctcgcggactcgaagccgttgccgcaccagaatgtgaccaatcatgttgggaaagcagtggaagactgtatgcgagcgatcattggcgtcctgcttaatctgacaaacgataacgagtgggggtccaccaaaaccggggagcaggacggactgattggtaccgcactcaattgtgttctgcaggtgccaaaatacctgccccaggagcagcggttcgatataagagtgctgggactgggacttctgattaacttggtggagtatagtgctagaaacagacactgtttggtaaacatggaaacctcctgcagctttgactcctccatttgctcaggcgagggggatgattctctccgcattggcggacaggtgcacgccgttcaggcccttgtgcagctattcttggagcgggaaagggccgcccaactggcggaatcgaaaacagatgaactcatcaaagatgcgcccacaactcaacatgataagtccggggaatggcaggaaacctcaggggagattcagtgggtcagtactgaaaaaactgacggaaccgaggagaagcataaaaaggaagaggaggacgaagagctggatcttaataaagctctccagcatgcgggaaaacatatggaggactgcatcgtggcttcttacactgctctgctgctaggatgtttatgccaggagtctccgattaacgttacaacagtgcgagaatatttgcctgagggtgattttagcataatgacagagatgttaaaaaagtttctctcttttatgaacttaacttgtgctgtcgggaccaccgggcagaagtcaatctctcgggtgatcgagtatctggagcactgctag

SEQ ID NO: 183966 - DNA, 3573 bp, Artificial Sequence
  derived and/or modified sequence
atgacctcgcggttcgggaagacttactcccgaaagggcggaaatggctctagcaaatttgatgaagtctttagtaataaacggaccacactctctactaagtggggagagacaacattcatggccaagctcggccagaagcgcccaaattttaaacctgatatccaggaaatcccaaaaaagcccaaggtggaggaggaaagcaccggtgacccatttggcttcgactccgacgatgagagcctgcctgtgagcagcaaaaacctcgcgcaagtcaaatgtagttcctacagtgagtcctccgaagcagcccaactcgaggaagtgacctcggtccttgaagcaaactccaagattagccacgtggtggttgaggataccgtagtctctgacaagtgcttcccgctggaggacactttactcggcaaagaaaagagcactaatcggattgtggaagacgatgcctccattagcagctgtaacaagctgatcacctccgacaaagtggagaatttccacgaagaacacgaaaagaattctcaccacattcataaaaatgctgatgactcaacaaagaaacccaacgccgagacaaccgttgccagcgaaatcaaagagaccaacgatacgtggaacagccagtttggcaaaaggcctgaatcaccttctgagatctcacccatcaagggctcagtcagaacaggcctcttcgagtgggacaacgattttgaggacattaggtccgaagattgcatcctgagcttagactcagacccccttttggaaatgaaagatgatgacttcaagaacaggttagaaaatttgaacgaggcaatcgaggaagatattgtccagtccgtcctccgccctacaaattgtcggacttattgccgcgctaacaagacaaagtcctcacagggcgcaagtaattttgacaagctgatggacgggacttcacaggctctggcaaaggccaacagcgagagcagtaaggacggcctgaaccaggctaagaaggggggtgtctcttgcggaacaagtttccgtgggactgtgggaagaacgagagattacaccgtactgcaccccagctgcctgagcgtgtgtaacgtgacaattcaagacaccatggagagatctatggatgaattcacagcttcaaccccggcagatctaggggaggcgggacgcctgagaaaaaaagctgacatcgctacaagtaagacaacgaccaggtttagacctagcaatacaaagtctaaaaaggacgttaagctggagtttttcggcttcgaggaccacgaaaccggaggagatgaaggagggagcgggtccagtaattacaagatcaagtactttggcttcgacgatttatccgaatcagaggacgacgaggatgacgattgccaggtagagcggaaaaccagcaagaaacggacaaaaactgctccgagcccatctcttcagcctcctcctgagagtaatgacaattcacaggatagccaaagcggaaccaacaatgcagaaaacttggattttacggaggacttacctggggtgcccgaaagtgtcaaaaagccaatcaataagcagggcgataaatctaaagaaaacaccaggaaaatctttagcgggcctaagcgctctcccaccaaagcggtatataacgcgagacactggaaccacccagatagcgaggagttgcctggaccgccagtggtaaagcctcagagtgtcaccgtgcgactgtcatccaaagagcccaaccagaaagatgatggggtgttcaaggcgcctgcaccacccagtaaagttatcaaaactgttaccattccaacacagccctaccaggatattgttaccgccttgaaatgcaggcgtgaagacaaggaactctataccgttgtccagcacgtgaagcactttaatgatgttgttgagttcggtgagaatcaggaatttaccgacgacatagaatacctactgtcaggcctcaaatccacacagcccctgaatactcgctgtctctctgtcatcagcctggctacaaagtgcgccatgccctcgttcagaatgcacctgagagctcacgggatggtggctatggtctttaaaacccttgacgactctcagcaccaccagaacctaagtctctgcacggcggcactgatgtatattctgagtcgagaccgcctgaatatggacttggatagggcatctctggacctcatgatccgactactggagttggaacaagatgcttccagcgctaagctactgaacgaaaaggacatgaataaaatcaaggagaagatacgtcgtctttgcgagaccgttcacaataagcatttagatctcgaaaacattaccaccggccacctggcaatggaaactctactgtcgctgaccagtaaaagagccggtgattggtttaaggaggagctgcggctcctgggcggactggatcatattgtcgataaggttaaggagtgcgtggatcatctcagcagggacgaggacgaggagaagctggtggcatcattgtggggcgcagaacgctgtctcagggtgttggagtctgtgacggtgcataatcctgagaaccagagctacctgatcgcatataaggacagtcagttgatcgtgagttctgccaaggctctccagcattgcgaagagctgattcagcagtacaaccgtgcagaggattctatatgtttggctgattctaagcccttgccgcaccagaacgtgacaaatcatgtaggtaaggctgtggaagactgcatgcgcgcaatcattggagtgctgttaaacctgactaacgacaacgaatgggggtccaccaaaactggcgagcaggatggtcttatcggaaccgccctcaattgtgtcctgcaagtccccaagtatctgccgcaggagcagcggttcgacattcgggtactgggcctagggttgctgattaatcttgttgagtactcagcacgcaatcggcactgtttagtgaacatggaaacaagctgttcctttgactcatccatctgtagtggcgaaggggacgactcgctacgtatcggcggacaagtccacgcagtgcaagcgcttgtgcagctgttcttagagcgagaacgcgctgcgcaactggctgaaagtaaaaccgacgaactgataaaggatgcccctacgactcagcacgacaaatctggcgagtggcaggagacatcgggagagattcagtgggtgagtactgaaaagactgacgggactgaggaaaaacacaaaaaagaggaggaagacgaagaactggacttgaataaggcactgcagcacgcgggtaagcacatggaggactgcatcgtagctagctacaccgctttgctgctgggctgcctgtgtcaggagtctcccatcaatgttaccactgtcagagagtacttgcctgagggcgatttctcaatcatgacagagatgctcaagaaattcctgtcctttatgaacctgacatgtgctgtaggcacaactggccagaagtccatatctcgcgtcatcgagtacctggagcattgttag

SEQ ID NO: 183967 - DNA, 3828 bp, Artificial Sequence
  derived and/or modified sequence
atggtccagggccctgttcagacccccgctctgactatccaccgtcggaagcggcgaaggagttgcccacctaatagagcctcatatctccccaaagccgagagcctggcctcgttgggctcccacttacccgctttgctgtctagggccagagtgccccgtcctccagccggtcgtcgggaaagagaaagaagaaggagacctgtggctaaggccccagctagactccgcggagagtacgagacaggggtgaaaatgacaagcaggttcggtaaaacctattcaaggaaaggaggcaatggatcgtctaagttcgatgaagtattttcgaataagagaaccaccctgtcaactaaatggggggagaccacatttatggccaagttgggacaaaaacggccaaactttaagcccgatatccaagagattcctaaaaagcccaaagtggaggaagagtccaccggagaccccttcggcttcgattctgacgacgagtcactgccagttagttccaaaaacctggcccaggtcaagtgctcctcttatagcgaatcctcagaagcagcccagctggaagaggtcacgtcagtgttggaggcaaacagcaaaatttcgcatgtcgtggtcgaggacaccgtcgtctccgacaaatgctttccccttgaagatacactgctaggaaaggagaaaagcacgaatcgaatcgtagaggacgacgcaagcatctcttcctgtaacaagctgattaccagcgacaaagtggagaactttcatgaagaacacgagaagaatagccaccacattcataagaacgcagacgattcaacaaaaaagcctaatgcagagacaacagtggcctccgagatcaaggagaccaacgatacatggaacagccagttcggcaagcgacctgaatcacccagcgagatctcccccatcaaggggtcggtgcgcacaggactcttcgaatgggataacgatttcgaggacattcggtccgaagattgcattctcagcctggattccgaccccctgttggagatgaaagatgacgatttcaaaaaccgtttggaaaacctgaatgaggctattgaggaagatatagtgcagagtgtattgaggcctaccaattgccgtacttactgcagggctaacaagacaaagagctcacaaggagcttcgaattttgacaagctgatggacggcacgagtcaagctttggctaaggcaaatagcgaaagcagtaaggacggcctgaatcaggcaaagaaaggcggtgtcagttgcggcaccagctttcgtgggactgtcggaagaaccagggactataccgtcttacacccgtcgtgtctatccgtgtgcaacgtgaccatccaagacactatggagagaagtatggacgagttcacggcttcaacgcccgctgacctcggggaagctggcagactgcgtaagaaagctgatattgccactagcaaaacgaccacaaggtttaggccctccaacacaaagagtaaaaaggatgtgaaactggagtttttcggtttcgaggatcacgagacgggaggcgatgagggtggcagtggctctagcaactacaaaataaaatactttggctttgatgacctttctgaaagcgaggatgatgaggacgatgattgtcaggttgaaaggaaaacttcgaagaagcggactaagactgctccttcaccgtcgctgcagcctcccccagagagcaacgacaactcacaggacagccagagcggaacaaataacgcagagaacctggattttactgaagatctccctggagtgcctgagtctgtaaagaagccgattaataagcagggtgacaagagcaaagaaaacactaggaagatattctctggcccaaaaagaagtcctacaaaggccgtgtataatgccagacactggaaccaccccgactctgaagagcttcccggtcctcctgtggtgaagccccagagtgtgactgtgcgcctgagctctaaagagcccaatcaaaaagatgacggagttttcaaagcacctgccccaccgagtaaggtgattaagactgtgactatccccacccagccctatcaggacattgtgactgccctgaaatgccgcagagaggacaaggagttgtatacagtcgtccagcacgtgaagcatttcaacgatgtggttgagttcggcgagaaccaggaatttaccgatgacatagagtacttgctctccggactgaagtccacacagcccctcaacacacgctgcctgagcgtgatcagcctggccaccaaatgtgctatgccatccttccgaatgcaccttcgagcacacggcatggtggccatggtctttaagacgttggatgactcacagcaccaccagaatctgtctctatgcaccgctgctttgatgtatatcctcagcagagaccgactgaacatggacctggatagagctagtttagacctcatgatccgcctcctcgagctagaacaggatgcatcctccgcaaagttactgaacgagaaagatatgaacaagattaaagagaagattcggcgactctgtgagaccgtccataacaaacacttagacttggagaatatcacaaccggccatctcgctatggaaacactgttgtctttgacatcaaagcgtgctggcgattggtttaaggaggagcttcgattgctgggagggttggatcacatagtcgacaaggtgaaagaatgtgttgaccatttgagccgcgatgaggatgaggagaaactggtggcttctctgtggggagctgagaggtgtctccgggtgctggagtcagtcactgtgcacaatcccgagaatcagtcttatctgatcgcttacaaggactcccagttgattgtctcctcagccaaagcacttcagcactgcgaggaactgatccaacaatacaaccgagctgaagactcgatctgtttagccgacagtaaacctctcccacaccagaacgtgaccaaccacgtggggaaggccgtagaggactgtatgagggcaatcatcggcgtacttttgaacctcactaatgacaacgaatggggctccacaaagactggcgaacaggacgggctaattggaacggctctgaattgtgtacttcaggtccccaagtacctccctcaggaacagcgcttcgacatacgggtgctgggtctcggcctgctcattaacctcgtagagtatagcgccagaaacaggcattgtcttgtcaacatggagacatcttgtagttttgactcatcgatctgttccggggagggcgatgactcactgcgcattgggggacaggttcacgccgtccaggccctggtgcagttgttcctcgagagagaaagagctgcacagctggctgaatctaagactgacgaattgatcaaggatgcaccaaccacccagcacgacaaatctggggaatggcaggaaacctccggagaaattcagtgggtatctacggaaaaaacggacggtaccgaagagaagcacaagaaggaggaggaggatgaggagctagatttgaataaagccctgcagcacgccggtaagcacatggaggactgcatcgtggccagctatacggcccttctactggggtgcttatgccaggagagccctattaatgtaactacagtcagggaataccttccagaaggcgatttttcaattatgactgagatgcttaagaagttcttatcctttatgaacctcacctgcgcagtcggcacgacgggccagaaatccatatctagagtcatagagtatctggagcactgctag

SEQ ID NO: 183968 - DNA, 3828 bp, Artificial Sequence
  derived and/or modified sequence
atggttcagggacccgtccagacccctgctctgacaatccacaggcgaaaacgtaggcgctcatgccctcccaacagagctagctatctccccaaggcagagtcactagctagcttggggagccacctacccgctctgctcagcagggccagggtgcctcgccctccagccggtcggcgagaacgcgaaaggcggaggaggcctgtcgccaaggcgcctgcccgtctgaggggtgagtacgagacaggcgtgaagatgacttcacggttcggaaagacatactcaagaaaaggcggaaacggcagttccaagtttgacgaagttttctctaacaaacgtacaacacttagcactaaatggggggaaacgacattcatggctaaactgggccagaaacgaccaaacttcaagcccgatattcaggagatccccaaaaaacccaaggttgaagaagaatctactggagatccctttggattcgattctgatgacgagtctcttcccgtgtcaagtaagaacctggcccaggtgaagtgtagttcttactccgagtctagcgaggccgcacagctggaagaagttacctccgtgctggaagcaaattctaagataagccacgtagttgtagaggacacggtggtatcagataagtgttttcctcttgaggataccctactggggaaggagaagtctacaaaccgaattgtggaggatgatgccagcatctcctcctgtaacaagctgattacgagcgataaggttgaaaatttccacgaggagcatgaaaagaacagccatcacatacataagaatgccgacgacagtacgaaaaagcctaatgccgagaccaccgtggcaagcgaaattaaggagacgaatgatacttggaactcccagtttggaaagcggccagaaagcccatctgaaatctcccccattaaaggaagcgtgcgcaccgggctgttcgaatgggataacgatttcgaggacattaggagcgaggattgtatcctaagtcttgattctgaccccctcctcgaaatgaaagacgacgatttcaagaatcgtttagagaacctgaacgaagccatcgaggaagacatagtgcagtctgtacttcggcctactaattgccgcacatattgcagagctaacaaaaccaagagctcccagggcgcatccaacttcgataagctaatggacggtacttcacaggccctcgccaaagcaaacagcgaatcctcaaaggatggtctcaatcaagccaagaaagggggagtctcatgcggcacatcattccggggaacagttggcaggacccgcgattacacagtactacacccttcctgcctgtcagtgtgcaacgttaccattcaggacaccatggaaaggagcatggacgagtttacggcatctacgcccgctgatcttggggaagccggtcgattgcgaaaaaaagcggatatcgccaccagtaagacaacgacaaggttcagacccagcaatacgaagtctaaaaaagacgtgaagctggaattttttggattcgaggatcacgagaccggcggagacgaaggcggaagtggaagttctaattacaaaattaagtactttggcttcgacgacctgtccgagtcggaagacgacgaggatgatgactgtcaggtggagagaaaaacgtctaagaagcggaccaaaaccgccccaagcccctccctgcaacctccacccgagtccaatgataactctcaggatagccagtcgggcacaaacaatgcagagaatctcgacttcactgaagatctgcccggagtgcctgaaagtgtgaagaagccaatcaacaagcagggtgataagtccaaggagaataccaggaagatcttttcagggcctaagagatccccaacaaaagcagtttataacgctagacactggaaccatcctgacagcgaggagctgcccggtcctcctgtcgtgaagcctcagtctgttaccgtgcgattatcctctaaagagccaaatcaaaaagacgatggcgtattcaaagccccagccccaccttccaaagtaattaagacggttactatccccacgcagccctaccaagatatcgtgacggccttaaaatgccgtcgagaagacaaagagctctacactgtagttcaacatgtcaagcactttaacgacgtggttgaattcggcgaaaaccaggagtttacagatgacatagagtacttactgtcaggcctaaagtctacacagccacttaacactagatgtctcagtgttattagcctggctaccaaatgcgctatgccctccttccgcatgcatctgagggctcacggtatggtcgcaatggtcttcaaaaccctagatgactctcagcatcatcagaacttgtccctgtgtacagctgctttaatgtatattttgtcgcgtgaccggttgaacatggatctagatagagcatccctggacctcatgatcaggttgcttgagctggaacaagatgcaagttcggcaaaactgctaaatgagaaagatatgaataagattaaagaaaaaatccgtcgcttgtgtgagacggtgcataacaaacacctcgatctcgaaaatatcactacaggccatttagcgatggaaactctgctgtccctcacgagtaaaagggctggcgactggttcaaggaggaattaagacttctagggggactggaccacatcgttgataaagttaaagaatgtgtggatcatctgagccgggacgaggatgaagaaaagttggtggctagtctttggggtgctgagcgttgtctcagagtcttggaatcagtcaccgtacacaaccctgagaatcagagctacctaatcgcgtacaaggactcacaactgattgtctctagtgctaaagccctacagcactgtgaagaacttattcagcagtacaacagggccgaggactccatctgcctagccgattccaagcctctcccacaccagaacgtgaccaaccatgtcgggaaagctgtcgaggactgcatgcgcgcaatcattggcgtcttactaaatctgacgaacgacaatgagtggggctctaccaagactggcgaacaagatgggctaattggaaccgcgctgaactgcgtcctgcaggttcctaagtacctcccgcaggagcagcgcttcgatatccgtgtgctgggcttgggccttctaatcaacctggtagagtactccgctcgcaaccggcattgtctcgtgaacatggagacttcttgttccttcgatagcagcatatgctctggcgaaggcgacgattccctgagaatcggtggacaggtccacgcagtccaggctctggtgcagctattccttgagagggagcgggcagcccagttggccgagagtaagacagatgaactcattaaggacgcccctacgacccagcacgataaatccggtgagtggcaagagacaagcggcgagattcaatgggtgagcaccgagaagacagacggcaccgaagagaagcacaagaaagaggaggaggacgaggaactggacctgaataaggctctccagcacgccggtaaacacatggaagactgcatcgtcgctagttatacagccctcttgctgggctgtctctgccaggagtctccaatcaacgtgacaacagtcagggagtacctccctgagggcgatttctccattatgactgagatgctcaagaagtttctctccttcatgaacctgacgtgcgctgtggggacaactggacaaaagagtattagccgggtcatagaatatcttgagcactgctag

SEQ ID NO: 183969 - DNA, 6302 bp, Artificial Sequence
  derived and/or modified sequence
gcgagcggctgttggaggaaggaggtgggggccgggagcgcaaatggcgttgagatggttcagggccctgttcaaactccagcactgaccattcaccggcggaagcggcggcgcaggaggcggcggcggcccagcgggggcacacagcaggctctgttaccagctccagcagtggcggccagcgagagctaggcctgggcccggccggcggcgctcgaggcggggagggaagttgcggggccgccgctcctgcccccccaaccgggcttcctatttaccgaaagcagagtccctcgcctctctcggctctcacctgccggccctgctctcccgcgcgagggttccgcgcccgcccgcgggccgtagggagcgggagaggcggaggcggcccgtggccaaagcacccgccaggctccgaggagaatatgaaactggtgtcaaaatgacatccagatttgggaaaacatacagtaggaaaggtggaaatggcagttcaaaattcgatgaagtcttttccaacaaacggactacccttagcacaaaatggggagagaccacatttatggctaaattagggcagaagaggcccaatttcaaaccagatatccaagaaattccgaagaaacctaaagtggaagaagaaagtactggagatccttttggatttgatagtgatgatgagtctctaccagtttcttcaaagaatttagcccaggttaagtgttcctcttattcagaatctagtgaagctgctcagttggaagaggtcacttcagtacttgaagctaatagcaaaattagtcatgtggtcgttgaagacactgtcgtttctgataaatgcttccctttggaggacactttacttgggaaagaaaagagcacaaaccgaattgtagaagatgatgcaagcataagtagctgtaataaattaataacttcagataaagtggagaattttcatgaagaacatgaaaagaatagtcaccatattcacaaaaatgctgatgacagtactaagaaacccaatgcagaaactacagtggcttctgaaatcaaggaaacaaatgatacttggaactcccagtttgggaaaaggccagaatcaccatcagaaatatctccaatcaagggatctgttagaactggtttgtttgaatgggataatgattttgaagatatcagatcagaagactgtattttaagtttggatagtgatccccttttggagatgaaggatgacgattttaaaaatcgattggaaaatctgaatgaagccattgaggaagatattgtacaaagtgttcttaggccaaccaactgtaggacgtactgtagggccaataaaacgaaatcctcccaaggagcatcaaattttgataagctgatggacggcaccagtcaggccttagccaaagcaaacagtgaatcgagtaaagatggcctgaatcaggcaaagaaagggggtgtaagttgtgggaccagttttagagggacagttggacggactagagattacactgttttacatccatcttgcttgtcagtttgtaatgttaccatacaggatactatggaacgcagcatggatgagttcactgcatccactcctgcagatttgggagaagctggtcgtctcagaaaaaaggcagatattgcaacttctaagactactactagatttcgacctagtaatactaaatccaaaaaggatgttaaacttgaattttttggttttgaagatcatgagacaggaggtgatgaaggaggttctggaagttctaattacaaaattaagtattttggctttgatgatctcagtgaaagcgaagatgatgaagatgatgactgtcaagtagaaagaaagacaagcaaaaaaagaactaaaacagctccatcaccctccttgcagcctcccccagaaagcaatgataattcccaggacagtcagtctggtactaacaatgcagaaaacttggattttacagaggacttgcctggtgtgcctgaaagtgtgaagaagcccataaataaacaaggagataaatcaaaggaaaataccagaaagatttttagtggccccaaacggtcacccacaaaagctgtatataatgccagacattggaatcatccagattcagaagaactgcctgggccaccagtagtaaaacctcagagtgtcacagtgaggctgtcttcaaaggaaccaaatcaaaaagatgatggagtttttaaggctcctgcaccaccatccaaagtgataaaaactgtgacaatacctactcagccctaccaagatatagttactgcactgaaatgcagacgagaagacaaagaattatatactgttgttcagcacgtgaagcacttcaacgatgttgtagaatttggtgaaaatcaagagttcactgatgacattgagtacttgttaagtggcttaaagagcactcagcctctaaacacacgttgccttagtgttattagcttggctactaaatgtgccatgcccagttttcgaatgcacctgagagcacatgggatggtagcaatggtctttaaaaccttggatgattcccagcaccatcagaatctgtccctctgtacagctgccctcatgtatatactgagtagagatcgtttgaacatggatcttgatagagctagcttagatctaatgattcgacttttggaactggaacaagatgcttcatcagccaagctactgaatgaaaaagacatgaacaaaattaaagaaaaaatccgaaggctctgtgaaactgtacacaacaagcatcttgatctagaaaatataacgactgggcatttagctatggagacattattatcccttacttctaaacgagcaggagactggtttaaagaagaactccggcttttgggtggtctggatcatattgtagataaagtaaaagaatgtgtggatcatttaagtagagatgaggatgaagagaaactggtagcctcactatggggagcagagagatgtttacgagttttagaaagtgtaactgtgcataatcccgaaaatcaaagctacttgatagcatataaagattcccaacttattgtttcatcagctaaagcattacagcattgtgaagaactgattcagcagtacaaccgtgctgaggacagcatatgcttagctgacagtaagcctctgcctcaccagaatgtaactaaccatgtaggcaaagcagtggaggactgcatgagggccatcatcggggtgttgcttaatttaactaatgataatgagtggggcagcaccaaaacaggagagcaggacggtctcataggcacagcgctgaactgtgtgcttcaggttccaaagtacctacctcaggagcagagatttgatattcgagtgctgggcttaggtctgctgataaatctagtggagtatagtgctcggaatcggcactgtcttgtcaacatggaaacatcgtgctcttttgattcttccatctgtagtggagaaggggatgatagtttaaggataggtggacaagttcatgctgtccaggctttagtgcagctattccttgagcgagagcgggcagcccagctagcagaaagtaaaacagatgagttgatcaaagatgctcccaccactcagcatgataagagtggagagtggcaagaaacaagtggagaaatacagtgggtgtcaactgaaaagactgatggtacagaagagaaacataagaaggaggaggaggatgaagaacttgacctcaataaagcccttcagcatgccggcaaacacatggaggattgcattgtggcctcctacacagcactacttcttgggtgtctctgccaggaaagtccaatcaatgtaaccactgtgcgggaatatctgccagaaggagacttttcaataatgacagagatgctcaaaaaatttttgagttttatgaatctcacttgtgctgttggaacaactggccagaaatctatctctagagtgattgaatatttggaacattgctagctgctttacctttgcttcaggtgctcggtaatgctggagctatccttagacaaagaaaagtcaagtcatgaaagaagtccttgaagatataccaagaacattcatcagtatcattcgtgtttggatttttaaggccacctgatttcttcgtcatgcattcggcatttgctaaatgacagttactacatcaatctgcaactatcaaaaatgaggggaaaaggttcaggctgttaacaattccatgcagtatttaaatacatttactttggcagagtttataccctccccttgttttcttgctttattctgggcaagtttgaaggggaaaatttgtgctgctgttagtgcaactgctgtgtatgttgagccactgttgtcatgccagccaggtgcaaaggcagcttagctactgaggtagcgaatgttctgaggacattctagacaacagcttagttcctttttcaggctcatttgcttttgcttttttgttgaatgattccaatcgtaaataaagcttttaataattttgtgaattttttggttgttgttccctgaactactgtctatatttaaaattagatggaatccaaagatacacgggattaatagtatatttttttattcttgattaggtttgggttattgaactattttttacttttgagaccacaaccatattcaatatcataccataatgtgtcatagctataggcacaagaaaaacaacagtttgagagaatattatataagatgatgtgccctgttaaaaggaggaggcaaaatagtcaaacccagggtagtttacacttaatgctagggaggctcttaaaacattattagattttgaggaaagactctctagatatattttctaatgttcagtacaataaatataaggaagctaaaacaccaatgtggaattcctgtttccagataacatgtatattcttctatagagtgacaggatcaattgcataagcgcaaagccttaaattgctggtttagagaagacccttttttcattcagattctttgttcgtagagcagttatttgaaaaacagttatggaacacaaaacattttatagatttaatatcataacattgcaaatttttcttgtattattcacaccactggttatacttttttttttccttttttattgattgggcctgaatacaggctttctagagatctttttcattaatacttttaaatacctttcaggtagttacatcatgtttcttcattggatttgtaaaacttgaagccataaaaatattagtttggtgtgtattggggaaaatagctaaaagtctaatttttacccatttagactttgttatttccttgtataaagtgacaaatcggggctcttgtatcagtgccagctgtaatgtttttaaatgcagtggctgccttctattgtcttcctatttttgataatgcagattgttgggaaatctgtaaggaagtaactgattccaggcaaattgttttcttccttctacccaccccaacccctacccatcaccttttaagaacatagtacgccagtgtaacgtgggaaccattgagattgtatttgccctgagtattaaagctagcttagcaaaatacttttaaaaacatattggtaaatgatacccgtaaaattaaattagttatattttattttaaaatgcaaaatacattgatatttattaatcattggatttagggaaagggacagatttttggtgaacctgacttgtggcagatggtaaggaatattataaaacatttggatgagaacaatcagggcgaactgcatttttctgttacactggtaatcatttgaaaattgatttacctcagtgtttaacagttttttgttttgttttgttttttaaataataactaattgtcgagcactgatagagatgcagattttggtggggggaggtggtgggggagataatcacttcaccaactgcagtgcatttgtgtgtttttaaccctcagagaactctgcattttagggtacttgaggctgacttaactaaaagttttaaagtaaccttttttccattgtaaatatttctgtaaatactaccaattggaaattagaacagtagagtacttttctgaatccaatcctatttttattttatacagtatttctcagctgtgatctttggagcaaaagccaacggcaggaaaaaatagtttgtaccagtttcatgaagtatgtctttgggtttttgtaaataattttaactcaaataaaattgctactttcaataca

SEQ ID NO: 183970 - DNA, 6200 bp, Artificial Sequence
  derived and/or modified sequence
gcgcggggactgtgggaagcggagtgacggagcgagcggctgttggaggaaggaggtgggggccgggagcgcaaatggcgttgagatggttcagggccctgttcaaactccagcactgaccattcaccggcggaagcggcgccgctcctgcccccccaaccgggcttcctatttaccgaaagcagagtccctcgcctctctcggctctcacctgccggccctgctctcccgcgcgagggttccgcgcccgcccgcgggccgtagggagcgggagaggcggaggcggcccgtggccaaagcacccgccaggctccgaggagaatatgaaactggtgtcaaaatgacatccagatttgggaaaacatacagtaggaaaggtggaaatggcagttcaaaattcgatgaagtcttttccaacaaacggactacccttagcacaaaatggggagagaccacatttatggctaaattagggcagaagaggcccaatttcaaaccagatatccaagaaattccgaagaaacctaaagtggaagaagaaagtactggagatccttttggatttgatagtgatgatgagtctctaccagtttcttcaaagaatttagcccaggttaagtgttcctcttattcagaatctagtgaagctgctcagttggaagaggtcacttcagtacttgaagctaatagcaaaattagtcatgtggtcgttgaagacactgtcgtttctgataaatgcttccctttggaggacactttacttgggaaagaaaagagcacaaaccgaattgtagaagatgatgcaagcataagtagctgtaataaattaataacttcagataaagtggagaattttcatgaagaacatgaaaagaatagtcaccatattcacaaaaatgctgatgacagtactaagaaacccaatgcagaaactacagtggcttctgaaatcaaggaaacaaatgatacttggaactcccagtttgggaaaaggccagaatcaccatcagaaatatctccaatcaagggatctgttagaactggtttgtttgaatgggataatgattttgaagatatcagatcagaagactgtattttaagtttggatagtgatccccttttggagatgaaggatgacgattttaaaaatcgattggaaaatctgaatgaagccattgaggaagatattgtacaaagtgttcttaggccaaccaactgtaggacgtactgtagggccaataaaacgaaatcctcccaaggagcatcaaattttgataagctgatggacggcaccagtcaggccttagccaaagcaaacagtgaatcgagtaaagatggcctgaatcaggcaaagaaagggggtgtaagttgtgggaccagttttagagggacagttggacggactagagattacactgttttacatccatcttgcttgtcagtttgtaatgttaccatacaggatactatggaacgcagcatggatgagttcactgcatccactcctgcagatttgggagaagctggtcgtctcagaaaaaaggcagatattgcaacttctaagactactactagatttcgacctagtaatactaaatccaaaaaggatgttaaacttgaattttttggttttgaagatcatgagacaggaggtgatgaaggaggttctggaagttctaattacaaaattaagtattttggctttgatgatctcagtgaaagcgaagatgatgaagatgatgactgtcaagtagaaagaaagacaagcaaaaaaagaactaaaacagctccatcaccctccttgcagcctcccccagaaagcaatgataattcccaggacagtcagtctggtactaacaatgcagaaaacttggattttacagaggacttgcctggtgtgcctgaaagtgtgaagaagcccataaataaacaaggagataaatcaaaggaaaataccagaaagatttttagtggccccaaacggtcacccacaaaagctgtatataatgccagacattggaatcatccagattcagaagaactgcctgggccaccagtagtaaaacctcagagtgtcacagtgaggctgtcttcaaaggaaccaaatcaaaaagatgatggagtttttaaggctcctgcaccaccatccaaagtgataaaaactgtgacaatacctactcagccctaccaagatatagttactgcactgaaatgcagacgagaagacaaagaattatatactgttgttcagcacgtgaagcacttcaacgatgttgtagaatttggtgaaaatcaagagttcactgatgacattgagtacttgttaagtggcttaaagagcactcagcctctaaacacacgttgccttagtgttattagcttggctactaaatgtgccatgcccagttttcgaatgcacctgagagcacatgggatggtagcaatggtctttaaaaccttggatgattcccagcaccatcagaatctgtccctctgtacagctgccctcatgtatatactgagtagagatcgtttgaacatggatcttgatagagctagcttagatctaatgattcgacttttggaactggaacaagatgcttcatcagccaagctactgaatgaaaaagacatgaacaaaattaaagaaaaaatccgaaggctctgtgaaactgtacacaacaagcatcttgatctagaaaatataacgactgggcatttagctatggagacattattatcccttacttctaaacgagcaggagactggtttaaagaagaactccggcttttgggtggtctggatcatattgtagataaagtaaaagaatgtgtggatcatttaagtagagatgaggatgaagagaaactggtagcctcactatggggagcagagagatgtttacgagttttagaaagtgtaactgtgcataatcccgaaaatcaaagctacttgatagcatataaagattcccaacttattgtttcatcagctaaagcattacagcattgtgaagaactgattcagcagtacaaccgtgctgaggacagcatatgcttagctgacagtaagcctctgcctcaccagaatgtaactaaccatgtaggcaaagcagtggaggactgcatgagggccatcatcggggtgttgcttaatttaactaatgataatgagtggggcagcaccaaaacaggagagcaggacggtctcataggcacagcgctgaactgtgtgcttcaggttccaaagtacctacctcaggagcagagatttgatattcgagtgctgggcttaggtctgctgataaatctagtggagtatagtgctcggaatcggcactgtcttgtcaacatggaaacatcgtgctcttttgattcttccatctgtagtggagaaggggatgatagtttaaggataggtggacaagttcatgctgtccaggctttagtgcagctattccttgagcgagagcgggcagcccagctagcagaaagtaaaacagatgagttgatcaaagatgctcccaccactcagcatgataagagtggagagtggcaagaaacaagtggagaaatacagtgggtgtcaactgaaaagactgatggtacagaagagaaacataagaaggaggaggaggatgaagaacttgacctcaataaagcccttcagcatgccggcaaacacatggaggattgcattgtggcctcctacacagcactacttcttgggtgtctctgccaggaaagtccaatcaatgtaaccactgtgcgggaatatctgccagaaggagacttttcaataatgacagagatgctcaaaaaatttttgagttttatgaatctcacttgtgctgttggaacaactggccagaaatctatctctagagtgattgaatatttggaacattgctagctgctttacctttgcttcaggtgctcggtaatgctggagctatccttagacaaagaaaagtcaagtcatgaaagaagtccttgaagatataccaagaacattcatcagtatcattcgtgtttggatttttaaggccacctgatttcttcgtcatgcattcggcatttgctaaatgacagttactacatcaatctgcaactatcaaaaatgaggggaaaaggttcaggctgttaacaattccatgcagtatttaaatacatttactttggcagagtttataccctccccttgttttcttgctttattctgggcaagtttgaaggggaaaatttgtgctgctgttagtgcaactgctgtgtatgttgagccactgttgtcatgccagccaggtgcaaaggcagcttagctactgaggtagcgaatgttctgaggacattctagacaacagcttagttcctttttcaggctcatttgcttttgcttttttgttgaatgattccaatcgtaaataaagcttttaataattttgtgaattttttggttgttgttccctgaactactgtctatatttaaaattagatggaatccaaagatacacgggattaatagtatatttttttattcttgattaggtttgggttattgaactattttttacttttgagaccacaaccatattcaatatcataccataatgtgtcatagctataggcacaagaaaaacaacagtttgagagaatattatataagatgatgtgccctgttaaaaggaggaggcaaaatagtcaaacccagggtagtttacacttaatgctagggaggctcttaaaacattattagattttgaggaaagactctctagatatattttctaatgttcagtacaataaatataaggaagctaaaacaccaatgtggaattcctgtttccagataacatgtatattcttctatagagtgacaggatcaattgcataagcgcaaagccttaaattgctggtttagagaagacccttttttcattcagattctttgttcgtagagcagttatttgaaaaacagttatggaacacaaaacattttatagatttaatatcataacattgcaaatttttcttgtattattcacaccactggttatacttttttttttccttttttattgattgggcctgaatacaggctttctagagatctttttcattaatacttttaaatacctttcaggtagttacatcatgtttcttcattggatttgtaaaacttgaagccataaaaatattagtttggtgtgtattggggaaaatagctaaaagtctaatttttacccatttagactttgttatttccttgtataaagtgacaaatcggggctcttgtatcagtgccagctgtaatgtttttaaatgcagtggctgccttctattgtcttcctatttttgataatgcagattgttgggaaatctgtaaggaagtaactgattccaggcaaattgttttcttccttctacccaccccaacccctacccatcaccttttaagaacatagtacgccagtgtaacgtgggaaccattgagattgtatttgccctgagtattaaagctagcttagcaaaatacttttaaaaacatattggtaaatgatacccgtaaaattaaattagttatattttattttaaaatgcaaaatacattgatatttattaatcattggatttagggaaagggacagatttttggtgaacctgacttgtggcagatggtaaggaatattataaaacatttggatgagaacaatcagggcgaactgcatttttctgttacactggtaatcatttgaaaattgatttacctcagtgtttaacagttttttgttttgttttgttttttaaataataactaattgtcgagcactgatagagatgcagattttggtggggggaggtggtgggggagataatcacttcaccaactgcagtgcatttgtgtgtttttaaccctcagagaactctgcattttagggtacttgaggctgacttaactaaaagttttaaagtaaccttttttccattgtaaatatttctgtaaatactaccaattggaaattagaacagtagagtacttttctgaatccaatcctatttttattttatacagtatttctcagctgtgatctttggagcaaaagccaacggcaggaaaaaatagtttgtaccagtttcatgaagtatgtctttgggtttttgtaaataattttaactcaaataaaattgctactttcaataca

SEQ ID NO: 183971 - DNA, 6114 bp, Artificial Sequence
  derived and/or modified sequence
atggttcagggccctgttcaaactccagcactgaccattcaccggcggaagcggcgccgctcctgcccccccaaccgggcttcctatttaccgaaagcagagtccctcgcctctctcggctctcacctgccggccctgctctcccgcgcgagggttccgcgcccgcccgcgggccgtagggagcgggagaggcggaggcggcccgtggccaaagcacccgccaggctccgaggagaatatgaaactggtgtcaaaatgacatccagatttgggaaaacatacagtaggaaaggtggaaatggcagttcaaaattcgatgaagtcttttccaacaaacggactacccttagcacaaaatggggagagaccacatttatggctaaattagggcagaagaggcccaatttcaaaccagatatccaagaaattccgaagaaacctaaagtggaagaagaaagtactggagatccttttggatttgatagtgatgatgagtctctaccagtttcttcaaagaatttagcccaggttaagtgttcctcttattcagaatctagtgaagctgctcagttggaagaggtcacttcagtacttgaagctaatagcaaaattagtcatgtggtcgttgaagacactgtcgtttctgataaatgcttccctttggaggacactttacttgggaaagaaaagagcacaaaccgaattgtagaagatgatgcaagcataagtagctgtaataaattaataacttcagataaagtggagaattttcatgaagaacatgaaaagaatagtcaccatattcacaaaaatgctgatgacagtactaagaaacccaatgcagaaactacagtggcttctgaaatcaaggaaacaaatgatacttggaactcccagtttgggaaaaggccagaatcaccatcagaaatatctccaatcaagggatctgttagaactggtttgtttgaatgggataatgattttgaagatatcagatcagaagactgtattttaagtttggatagtgatccccttttggagatgaaggatgacgattttaaaaatcgattggaaaatctgaatgaagccattgaggaagatattgtacaaagtgttcttaggccaaccaactgtaggacgtactgtagggccaataaaacgaaatcctcccaaggagcatcaaattttgataagctgatggacggcaccagtcaggccttagccaaagcaaacagtgaatcgagtaaagatggcctgaatcaggcaaagaaagggggtgtaagttgtgggaccagttttagagggacagttggacggactagagattacactgttttacatccatcttgcttgtcagtttgtaatgttaccatacaggatactatggaacgcagcatggatgagttcactgcatccactcctgcagatttgggagaagctggtcgtctcagaaaaaaggcagatattgcaacttctaagactactactagatttcgacctagtaatactaaatccaaaaaggatgttaaacttgaattttttggttttgaagatcatgagacaggaggtgatgaaggaggttctggaagttctaattacaaaattaagtattttggctttgatgatctcagtgaaagcgaagatgatgaagatgatgactgtcaagtagaaagaaagacaagcaaaaaaagaactaaaacagctccatcaccctccttgcagcctcccccagaaagcaatgataattcccaggacagtcagtctggtactaacaatgcagaaaacttggattttacagaggacttgcctggtgtgcctgaaagtgtgaagaagcccataaataaacaaggagataaatcaaaggaaaataccagaaagatttttagtggccccaaacggtcacccacaaaagctgtatataatgccagacattggaatcatccagattcagaagaactgcctgggccaccagtagtaaaacctcagagtgtcacagtgaggctgtcttcaaaggaaccaaatcaaaaagatgatggagtttttaaggctcctgcaccaccatccaaagtgataaaaactgtgacaatacctactcagccctaccaagatatagttactgcactgaaatgcagacgagaagacaaagaattatatactgttgttcagcacgtgaagcacttcaacgatgttgtagaatttggtgaaaatcaagagttcactgatgacattgagtacttgttaagtggcttaaagagcactcagcctctaaacacacgttgccttagtgttattagcttggctactaaatgtgccatgcccagttttcgaatgcacctgagagcacatgggatggtagcaatggtctttaaaaccttggatgattcccagcaccatcagaatctgtccctctgtacagctgccctcatgtatatactgagtagagatcgtttgaacatggatcttgatagagctagcttagatctaatgattcgacttttggaactggaacaagatgcttcatcagccaagctactgaatgaaaaagacatgaacaaaattaaagaaaaaatccgaaggctctgtgaaactgtacacaacaagcatcttgatctagaaaatataacgactgggcatttagctatggagacattattatcccttacttctaaacgagcaggagactggtttaaagaagaactccggcttttgggtggtctggatcatattgtagataaagtaaaagaatgtgtggatcatttaagtagagatgaggatgaagagaaactggtagcctcactatggggagcagagagatgtttacgagttttagaaagtgtaactgtgcataatcccgaaaatcaaagctacttgatagcatataaagattcccaacttattgtttcatcagctaaagcattacagcattgtgaagaactgattcagcagtacaaccgtgctgaggacagcatatgcttagctgacagtaagcctctgcctcaccagaatgtaactaaccatgtaggcaaagcagtggaggactgcatgagggccatcatcggggtgttgcttaatttaactaatgataatgagtggggcagcaccaaaacaggagagcaggacggtctcataggcacagcgctgaactgtgtgcttcaggttccaaagtacctacctcaggagcagagatttgatattcgagtgctgggcttaggtctgctgataaatctagtggagtatagtgctcggaatcggcactgtcttgtcaacatggaaacatcgtgctcttttgattcttccatctgtagtggagaaggggatgatagtttaaggataggtggacaagttcatgctgtccaggctttagtgcagctattccttgagcgagagcgggcagcccagctagcagaaagtaaaacagatgagttgatcaaagatgctcccaccactcagcatgataagagtggagagtggcaagaaacaagtggagaaatacagtgggtgtcaactgaaaagactgatggtacagaagagaaacataagaaggaggaggaggatgaagaacttgacctcaataaagcccttcagcatgccggcaaacacatggaggattgcattgtggcctcctacacagcactacttcttgggtgtctctgccaggaaagtccaatcaatgtaaccactgtgcgggaatatctgccagaaggagacttttcaataatgacagagatgctcaaaaaatttttgagttttatgaatctcacttgtgctgttggaacaactggccagaaatctatctctagagtgattgaatatttggaacattgctagctgctttacctttgcttcaggtgctcggtaatgctggagctatccttagacaaagaaaagtcaagtcatgaaagaagtccttgaagatataccaagaacattcatcagtatcattcgtgtttggatttttaaggccacctgatttcttcgtcatgcattcggcatttgctaaatgacagttactacatcaatctgcaactatcaaaaatgaggggaaaaggttcaggctgttaacaattccatgcagtatttaaatacatttactttggcagagtttataccctccccttgttttcttgctttattctgggcaagtttgaaggggaaaatttgtgctgctgttagtgcaactgctgtgtatgttgagccactgttgtcatgccagccaggtgcaaaggcagcttagctactgaggtagcgaatgttctgaggacattctagacaacagcttagttcctttttcaggctcatttgcttttgcttttttgttgaatgattccaatcgtaaataaagcttttaataattttgtgaattttttggttgttgttccctgaactactgtctatatttaaaattagatggaatccaaagatacacgggattaatagtatatttttttattcttgattaggtttgggttattgaactattttttacttttgagaccacaaccatattcaatatcataccataatgtgtcatagctataggcacaagaaaaacaacagtttgagagaatattatataagatgatgtgccctgttaaaaggaggaggcaaaatagtcaaacccagggtagtttacacttaatgctagggaggctcttaaaacattattagattttgaggaaagactctctagatatattttctaatgttcagtacaataaatataaggaagctaaaacaccaatgtggaattcctgtttccagataacatgtatattcttctatagagtgacaggatcaattgcataagcgcaaagccttaaattgctggtttagagaagacccttttttcattcagattctttgttcgtagagcagttatttgaaaaacagttatggaacacaaaacattttatagatttaatatcataacattgcaaatttttcttgtattattcacaccactggttatacttttttttttccttttttattgattgggcctgaatacaggctttctagagatctttttcattaatacttttaaatacctttcaggtagttacatcatgtttcttcattggatttgtaaaacttgaagccataaaaatattagtttggtgtgtattggggaaaatagctaaaagtctaatttttacccatttagactttgttatttccttgtataaagtgacaaatcggggctcttgtatcagtgccagctgtaatgtttttaaatgcagtggctgccttctattgtcttcctatttttgataatgcagattgttgggaaatctgtaaggaagtaactgattccaggcaaattgttttcttccttctacccaccccaacccctacccatcaccttttaagaacatagtacgccagtgtaacgtgggaaccattgagattgtatttgccctgagtattaaagctagcttagcaaaatacttttaaaaacatattggtaaatgatacccgtaaaattaaattagttatattttattttaaaatgcaaaatacattgatatttattaatcattggatttagggaaagggacagatttttggtgaacctgacttgtggcagatggtaaggaatattataaaacatttggatgagaacaatcagggcgaactgcatttttctgttacactggtaatcatttgaaaattgatttacctcagtgtttaacagttttttgttttgttttgttttttaaataataactaattgtcgagcactgatagagatgcagattttggtggggggaggtggtgggggagataatcacttcaccaactgcagtgcatttgtgtgtttttaaccctcagagaactctgcattttagggtacttgaggctgacttaactaaaagttttaaagtaaccttttttccattgtaaatatttctgtaaatactaccaattggaaattagaacagtagagtacttttctgaatccaatcctatttttattttatacagtatttctcagctgtgatctttggagcaaaagccaacggcaggaaaaaatagtttgtaccagtttcatgaagtatgtctttgggtttttgtaaataattttaactcaaataaaattgctactttcaatac

SEQ ID NO: 183972 - protein, 2677 aa, Artificial Sequence
  derived and/or modified sequence
MSTCCWCTPGGASTIDFLKRYASNTPSGEFQTADEDLCYCLECVAEYHKARDELPFLHEVLWELETLRLINHFEKSMKAEIGDDDELYIVDNNGEMPLFDITGQDFENKLRVPLLEILKYPYLLLHERVNELCVEALCRMEQANCSFQVFDKHPGIYLFLVHPNEMVRRWAILTARNLGKVDRDDYYDLQEVLLCLFKVIELGLLESPDIYTSSVLEKGKLILLPSHMYDTTNYKSYWLGICMLLTILEEQAMDSLLLGSDKQNDFMQSILHTMEREADDDSVDPFWPALHCFMVILDRLGSKVWGQLMDPIVAFQTIINNASYNREIRHIRNSSVRTKLEPESYLDDMVTCSQIVYNYNPEKTKKDSGWRTAICPDYCPNMYEEMETLASVLQSDIGQDMRVHNSTFLWFIPFVQSLMDLKDLGVAYIAQVVNHLYSEVKEVLNQTDAVCDKVTEFFLLILVSVIELHRNKKCLHLLWVSSQQWVEAVVKCAKLPTTAFTRSSEKSSGNCSKGTAMISSLSLHSMPSNSVQLAYVQLIRSLLKEGYQLGQQSLCKRFWDKLNLFLRGNLSLGWQLTSQETHELQSCLKQIIRNIKFKAPPCNTFVDLTSACKISPASYNKEESEQMGKTSRKDMHCLEASSPTFSKEPMKVQDSVLIKADNTIEGDNNEQNYIKDVKLEDHLLAGSCLKQSSKNIFTERAEDQIKISTRKQKSVKEISSYTPKDCTSRNGPERGCDRGIIVSTRLLTDSSTDALEKVSTSNEDFSLKDDALAKTSKRKTKVQKDEICAKLSHVIKKQHRKSTLVDNTINLDENLTVSNIESFYSRKDTGVQKGDGFIHNLSLDPSGVLDDKNGEQKSQNNVLPKEKQLKNEELVIFSFHENNCKIQEFHVDGKELIPFTEMTNASEKKSSPFKDLMTVPESRDEEMSNSTSVIYSNLTREQAPDISPKSDTLTDSQIDRDLHKLSLLAQASVITFPSDSPQNSSQLQRKVKEDKRCFTANQNNVGDTSRGQVIIISDSDDDDDERILSLEKLTKQDKICLEREHPEQHVSTVNSKEEKNPVKEEKTETLFQFEESDSQCFEFESSSEVFSVWQDHPDDNNSVQDGEKKCLAPIANTTNGQGCTDYVSEVVKKGAEGIEEHTRPRSISVEEFCEIEVKKPKRKRSEKPMAEDPVRPSSSVRNEGQSDTNKRDLVGNDFKSIDRRTSTPNSRIQRATTVSQKKSSKLCTCTEPIRKVPVSKTPKKTHSDAKKGQNRSSNYLSCRTTPAIVPPKKFRQCPEPTSTAEKLGLKKGPRKAYELSQRSLDYVAQLRDHGKTVGVVDTRKKTKLISPQNLSVRNNKKLLTSQELQMQRQIRPKSQKNRRRLSDCESTDVKRAGSHTAQNSDIFVPESDRSDYNCTGGTEVLANSNRKQLIKCMPSEPETIKAKHGSPATDDACPLNQCDSVVLNGTVPTNEVIVSTSEDPLGGGDPTARHIEMAALKEGEPDSSSDAEEDNLFLTQNDPEDMDLCSQMENDNYKLIELIHGKDTVEVEEDSVSRPQLESLSGTKCKYKDCLETTKNQGEYCPKHSEVKAADEDVFRKPGLPPPASKPLRPTTKIFSSKSTSRIAGLSKSLETSSALSPSLKNKSKGIQSILKVPQPVPLIAQKPVGEMKNSCNVLHPQSPNNSNRQGCKVPFGESKYFPSSSPVNILLSSQSVSDTFVKEVLKWKYEMFLNFGQCGPPASLCQSISRPVPVRFHNYGDYFNVFFPLMVLNTFETVAQEWLNSPNRENFYQLQVRKFPADYIKYWEFAVYLEECELAKQLYPKENDLVFLAPERINEEKKDTERNDIQDLHEYHSGYVHKFRRTSVMRNGKTECYLSIQTQENFPANLNELVNCIVISSLVTTQRKLKAMSLLGSRNQLARAVLNPNPMDFCTKDLLTTTSERIIAYLRDFNEDQKKAIETAYAMVKHSPSVAKICLIHGPPGTGKSKTIVGLLYRLLTENQRKGHSDENSNAKIKQNRVLVCAPSNAAVDELMKKIILEFKEKCKDKKNPLGNCGDINLVRLGPEKSINSEVLKFSLDSQVNHRMKKELPSHVQAMHKRKEFLDYQLDELSRQRALCRGGREIQRQELDENISKVSKERQELASKIKEVQGRPQKTQSIIILESHIICCTLSTSGGLLLESAFRGQGGVPFSCVIVDEAGQSCEIETLTPLIHRCNKLILVGDPKQLPPTVISMKAQEYGYDQSMMARFCRLLEENVEHNMISRLPILQLTVQYRMHPDICLFPSNYVYNRNLKTNRQTEAIRCSSDWPFQPYLVFDVGDGSERRDNDSYINVQEIKLVMEIIKLIKDKRKDVSFRNIGIITHYKAQKTMIQKDLDKEFDRKGPAEVDTVDAFQGRQKDCVIVTCVRANSIQGSIGFLASLQRLNVTITRAKYSLFILGHLRTLMENQHWNQLIQDAQKRGAIIKTCDKNYRHDAVKILKLKPVLQRSLTHPPTIAPEGSRPQGGLPSSKLDSGFAKTSVAASLYHTPSDSKEITLTVTSKDPERPPVHDQLQDPRLLKRMGIEVKGGIFLWDPQPSSPQHPGATPPTGEPGFPVVHQDLSHIQQPAAVVAALSSHKPPVRGEPPAASPEASTCQSKCDDPEEELCHRREARAFSEGEQEKCGSETHHTRRNSRWDKRTLEQEDSSSKKRKLL

SEQ ID NO: 183973 - protein, 2644 aa, Artificial Sequence
  derived and/or modified sequence
MSTCCWCTPGGASTIDFLKRYASNTPSGEFQTADEDLCYCLECVAEYHKARDELPFLHEVLWELETLRLINHFEKSMKAEIGDDDELYIVDNNGEMPLFDITGQDFENKLRVPLLEILKYPYLLLHERVNELCVEALCRMEQANCSFQVFDKHPGIYLFLVHPNEMVRRWAILTARNLGKVDRDDYYDLQEVLLCLFKVIELGLLESPDIYTSSVLEKGKLILLPSHMYDTTNYKSYWLGICMLLTILEEQAMDSLLLGSDKQNDFMQSILHTMEREADDDSVDPFWPALHCFMVILDRLGSKVWGQLMDPIVAFQTIINNASYNREIRHIRNSSVRTKLEPESYLDDMVTCSQIVYNYNPEKTKKDSGWRTAICPDYCPNMYEEMETLASVLQSDIGQDMRVHNSTFLWFIPFVQSLMDLKDLGVAYIAQVVNHLYSEVKEVLNQTDAVCDKVTEFFLLILVSVIELHRNKKCLHLLWVSSQQWVEAVVKCAKLPTTAFTRSSEKSSGNCSKGTAMISSLSLHSMPSNSVQLAYVQLIRSLLKEGYQLGQQSLCKRFWDKLNLFLRGNLSLGWQLTSQETHELQSCLKQIIRNIKFKAPPCNTFVDLTSACKISPASYNKEESEQMGKTSRKDMHCLEASSPTFSKEPMKVQDSVLIKADNTIEGDNNEQNYIKDVKLEDHLLAGSCLKQSSKNIFTERAEDQIKISTRKQKSVKEISSYTPKDCTSRNGPERGCDRGIIVSTRLLTDSSTDALEKVSTSNEDFSLKDDALAKTSKRKTKVQKDEICAKLSHVIKKQHRKSTLVDNTINLDENLTVSNIESFYSRKDTGVQKGDGFIHNLSLDPSGVLDDKNGEQKSQNNVLPKEKQLKNEELVIFSFHENNCKIQEFHVDGKELIPFTEMTNASEKKSSPFKDLMTVPESRDEEMSNSTSVIYSNLTREQAPDISPKSDTLTDSQIDRDLHKLSLLAQASVITFPSDSPQNSSQLQRKVKEDKRCFTANQNNVGDTSRGQVIIISDSDDDDDERILSLEKLTKQDKICLEREHPEQHVSTVNSKEEKNPVKEEKTETLFQFEESDSQCFEFESSSEVFSVWQDHPDDNNSVQDGEKKCLAPIANTTNGQGCTDYVSEVVKKGAEGIEEHTRPRSISVEEFCEIEVKKPKRKRSEKPMAEDPVRPSSSVRNEGQSDTNKRDLVGNDFKSIDRRTSTPNSRIQRATTVSQKKSSKLCTCTEPIRKVPVSKTPKKTHSDAKKGQNRSSNYLSCRTTPAIVPPKKFRQCPEPTSTAEKLGLKKGPRKAYELSQRSLDYVAQLRDHGKTVGVVDTRKKTKLISPQNLSVRNNKKLLTSQELQMQRQIRPKSQKNRRRLSDCESTDVKRAGSHTAQNSDIFVPESDRSDYNCTGGTEVLANSNRKQLIKCMPSEPETIKAKHGSPATDDACPLNQCDSVVLNGTVPTNEVIVSTSEDPLGGGDPTARHIEMAALKEGEPDSSSDAEEDNLFLTQNDPEDMDLCSQMENDNYKLIELIHGKDTVEVEEDSVSRPQLESLSGTKCKYKDCLETTKNQGEYCPKHSEVKAADEDVFRKPGLPPPASKPLRPTTKIFSSKSTSRIAGLSKSLETSSALSPSLKNKSKGIQSILKVPQPVPLIAQKPVGEMKNSCNVLHPQSPNNSNRQGCKVPFGESKYFPSSSPVNILLSSQSVSDTFVKEVLKWKYEMFLNFGQCGPPASLCQSISRPVPVRFHNYGDYFNVFFPLMVLNTFETVAQEWLNSPNRENFYQLQVRKFPADYIKYWEFAVYLEECELAKQLYPKENDLVFLAPERINEEKKDTERNDIQDLHEYHSGYVHKFRRTSVMRNGKTECYLSIQTQENFPANLNELVNCIVISSLVTTQRKLKAMSLLGSRNQLARAVLNPNPMDFCTKDLLTTTSERIIAYLRDFNEDQKKAIETAYAMVKHSPSVAKICLIHGPPGTGKSKTIVGLLYRLLTENQRKGHSDENSNAKIKQNRVLVCAPSNAAVDELMKKIILEFKEKCKDKKNPLGNCGDINLVRLGPEKSINSEVLKFSLDSQVNHRMKKELPSHVQAMHKRKEFLDYQLDELSRQRALCRGGREIQRQELDENISKVSKERQELASKIKEVQGRPQKTQSIIILESHIICCTLSTSGGLLLESAFRGQGGVPFSCVIVDEAGQSCEIETLTPLIHRCNKLILVGDPKQLPPTVISMKAQEYGYDQSMMARFCRLLEENVEHNMISRLPILQLTVQYRMHPDICLFPSNYVYNRNLKTNRQTEAIRCSSDWPFQPYLVFDVGDGSERRDNDSYINVQEIKLVMEIIKLIKDKRKDVSFRNIGIITHYKAQKTMIQKDLDKEFDRKGFLASLQRLNVTITRAKYSLFILGHLRTLMENQHWNQLIQDAQKRGAIIKTCDKNYRHDAVKILKLKPVLQRSLTHPPTIAPEGSRPQGGLPSSKLDSGFAKTSVAASLYHTPSDSKEITLTVTSKDPERPPVHDQLQDPRLLKRMGIEVKGGIFLWDPQPSSPQHPGATPPTGEPGFPVVHQDLSHIQQPAAVVAALSSHKPPVRGEPPAASPEASTCQSKCDDPEEELCHRREARAFSEGEQEKCGSETHHTRRNSRWDKRTLEQEDSSSKKRKLL

SEQ ID NO: 183974 - DNA, 8034 bp, Artificial Sequence
  derived and/or modified sequence
atgagcacatgctgttggtgtactccaggaggggcgagcaccattgacttcctcaaacgctacgccagcaacacgcctagtggtgaatttcagaccgccgacgaagacttgtgctattgccttgagtgtgttgcagaataccacaaggctcgagatgagctccccttcttacacgaggtcttgtgggagcttgagactctgcgtctgatcaatcatttcgaaaagagcatgaaagcagaaattggcgacgacgacgagctctacattgtggataataacggggaaatgccactgtttgacatcaccgggcaggacttcgagaataaactgcgcgtgcccctgctagagatcctaaagtatccttacttactgcttcatgagcgggtgaacgagctgtgtgtagaagcgctgtgccgtatggagcaggcgaattgcagcttccaggtatttgataagcacccaggtatttacctgtttctggttcatcccaacgagatggttagaaggtgggctattcttaccgctcgaaatctcggaaaggtggacagggacgattactatgacttacaggaagtcctcctgtgcctgttcaaagtgattgagctggggttgcttgagtccccggacatttacacttcttccgtgctcgaaaaaggcaagctgatccttcttccctcccacatgtatgacacaaccaattataaatcctactggttgggtatttgcatgctcctgaccattctcgaagagcaggctatggactccctgctactcggttctgacaaacagaatgactttatgcagtctatcctgcataccatggaacgcgaggccgatgacgactcagtggatcccttttggccagcgctccactgttttatggtgatccttgatcgcctgggcagtaaggtgtggggccagctcatggaccctatcgtggcctttcagactatcattaacaatgcctcatataacagggaaataaggcatattagaaactcctctgtcagaactaagctggagccagagagttaccttgatgatatggtaacatgctcccagatcgtctataactacaatcccgaaaagactaagaaagattctggttggagaacagccatctgtccggattactgtcctaacatgtacgaggaaatggaaactctcgctagtgtcctgcaaagtgacatcgggcaggacatgagagtccacaatagtacttttctgtggtttattcccttcgtacagtcactgatggatctcaaagatctgggcgtcgcttacattgcacaagtcgtgaatcacctgtacagtgaggttaaagaggtgttaaatcagacagatgcagtctgtgataaagtaacagaattttttctgctgatactcgtgagtgtcatagaactccaccggaataagaagtgtctccatctactgtgggttagcagtcagcagtgggtggaagccgtggtgaagtgtgctaagttgcccacaacagcatttacccgaagttctgaaaagagcagtgggaactgttccaagggcaccgcaatgatttccagccttagtctgcatagcatgccaagcaactctgtgcagctggcctatgtgcaactgatcagaagcctgctcaaggaaggctatcagctcggtcaacagtccctgtgtaagaggttttgggacaaacttaacctgtttctgcgcggtaaccttagcctcggttggcaattgacttcgcaggagactcatgaactccagtcctgtctgaagcagattatcagaaacataaagttcaaggcaccgccctgcaacaccttcgtggatctgacttctgcctgcaaaatctcaccagcatcttacaacaaagaggaaagcgaacaaatgggaaagacgtctcgtaaggacatgcactgcctagaggcatcatccccaactttcagcaaggagccaatgaaagtgcaagatagtgtgttaatcaaggctgataacactattgagggcgataataatgaacaaaactatatcaaggatgtgaaactggaggaccatctgctggccggatcttgcctcaagcagtcatcaaagaacatcttcacagagcgcgcagaagaccagatcaagatatcaactagaaaacagaagagcgtaaaggaaatctcatcctatacacctaaagactgcactagcaggaatggtccggagcgtgggtgtgataggggtataatcgtgtccacccggttgctcacagattccagcacagatgcactggaaaaagtcagtacatccaacgaggactttagcctgaaagacgacgctttagccaagacatcaaagaggaaaactaaggtgcaaaaagacgaaatatgtgctaaattgtctcacgtcattaagaaacaacacaggaagtctactttggtagataatactatcaacttggacgagaacctgaccgtttctaatattgaatctttttattcgcggaaggacaccggcgttcagaagggggatggttttattcacaacctgagcttggatccttccggggtactcgatgataaaaacggggaacagaagtcccagaataacgtgctaccaaaagaaaaacagcttaagaacgaagaacttgtgatcttcagttttcacgaaaataattgcaaaatacaggagttccacgtggatggaaaggagctgatcccgtttacagagatgacaaacgcctctgagaagaagtccagccctttcaaagatctgatgaccgtacctgagtctcgggacgaggagatgtctaacagcacctcagtcatctactctaatctgacacgcgaacaggctcctgacatttcccccaagagcgacaccttgacggattcacaaatcgatcgcgaccttcacaaactcagcctgcttgctcaagcttccgttattacctttccaagcgattcaccacaaaactccagtcagctgcagagaaaggtgaaggaggacaagcggtgttttacagcaaatcagaataatgttggtgatacttcgcgcggacaggtgatcatcatctccgactctgacgacgatgatgatgagaggatcttgagtcttgagaaactcacgaagcaggataagatctgcctggagcgggaacaccctgaacaacacgtgagcacagtgaatagtaaagaggagaaaaaccccgtgaaagaagaaaaaaccgaaaccttgtttcagttcgaggagtccgattcacagtgtttcgaattcgagtcgtccagtgaagtcttctctgtatggcaggaccaccccgacgataataattctgtccaggacggggaaaaaaagtgtttggcccccatagccaacactacgaatggccaggggtgcaccgactacgtctcggaggtggtgaaaaagggtgcagagggcattgaggaacacaccaggcctcggagtatatcagtggaggaattctgcgagatcgaggttaaaaaacccaagcggaaaaggtcggaaaaacctatggccgaagaccctgttaggccctcatcaagcgtaaggaacgagggccagtccgacacaaacaaacgcgacctcgtgggaaacgactttaagtcaatagaccgtaggacaagtacaccaaatagccggatacagcgggcgactactgtatcgcagaagaaaagcagcaagctttgtacatgcacagagcccattcggaaggtgcccgtaagcaagacaccaaagaaaacccactccgatgctaagaaaggccagaatcgatctagcaactatctgagctgccggacgacacctgctatcgtacctcctaagaagtttaggcaatgcccagagcctactagtacggcagagaagctcggactgaagaagggcccccgcaaagcctacgaactctctcagcggagccttgattacgttgcacagctacgggatcatgggaagacagttggagttgtcgatactagaaaaaagaccaagctcatttccccccagaacctttccgtccgcaataataaaaaactactcacctcccaggagctgcagatgcagagacagatccgacctaaaagccagaaaaatcgtagaagacttagtgactgtgagagcacagacgtgaaacgcgctggcagccataccgctcagaattctgacatatttgtgccggaaagcgaccggtccgattacaattgtacagggggcaccgaggtccttgccaactccaacagaaagcaactaatcaagtgcatgccgagtgagcctgagaccattaaagcaaagcacggatctcccgctacagatgacgcctgccccttgaatcagtgcgactctgtcgtgctgaatggcacagtacctacgaatgaggtcatcgttagtaccagcgaagacccactcggagggggggaccccacagcacggcatatcgaaatggctgccctgaaagaaggggaacccgactctagcagcgacgcagaagaagacaatctgttcctgactcagaacgatccagaagacatggatctgtgctcccaaatggagaacgacaactacaagctaattgagcttatccatggaaaagataccgtcgaggtagaggaagattctgtgtcaaggcctcagctagaatccctaagcgggaccaagtgtaaatacaaggattgtttagagactacgaagaaccaaggcgagtactgtccaaaacattccgaggtgaaggccgcagatgaggacgtcttccggaagcctgggcttcccccgcctgcgtccaaaccactgcgacccactactaaaatattttctagtaagtctactagtcgtatcgccggattgagtaagtctctggagacctccagcgccctgtccccctctttgaagaacaaaagtaaggggattcagagcattctcaaagtgccccagccagttcccctcatcgctcagaaaccagtgggagagatgaagaattcctgcaatgtgctgcacccacagtcccctaacaattctaaccggcagggttgcaaggttcctttcggggagagcaagtatttcccctccagtagccctgtgaacattctgctgtcttcgcagagcgtatccgatacattcgtgaaagaagtgctgaaatggaaatatgagatgtttttaaatttcgggcagtgcggccctccggcatctctttgccaatccatttctcgccccgttccagtcaggtttcacaattacggagattattttaatgtcttcttccctttgatggtgctcaatactttcgagaccgtagcacaagaatggctaaattctccgaaccgcgaaaatttctatcagctgcaggttaggaaatttccggcggattacattaagtactgggagtttgccgtatacctcgaggagtgcgagcttgccaagcaactttatcccaaggagaacgacttagtctttctggcgccggagcgcataaacgaggaaaaaaaggacaccgagaggaacgatattcaggatctgcatgagtaccatagcgggtacgtgcacaagttcagacgcacgtctgttatgcgaaatggcaaaaccgagtgctatctgtccattcaaacgcaagagaacttccctgctaatctgaacgagttggtaaattgtatagtgatttcaagcttagttaccacacagcggaaattgaaggcgatgtcgctgctgggcagtcggaaccaactggcgcgagcggtcctcaatccaaatccgatggacttctgcaccaaggacctgctgacgaccaccagcgagcgaattatcgcatacctgcgagattttaacgaggatcagaaaaaagcaatagaaacagcctacgcaatggtgaagcattcccctagcgtagctaaaatctgcttgatccacggaccgccgggcacagggaagtctaagacaatagtcggtctcctgtatagattactcacagaaaatcagcgcaaaggacactccgacgaaaattccaatgcaaagatcaagcagaaccgcgtcttagtgtgtgcccccagtaacgcagcagtggatgagttgatgaagaaaattatcctagagtttaaggagaaatgtaaagacaagaagaacccacttggtaactgtggcgatatcaaccttgtacgtctgggtcccgagaagtctatcaactctgaagtgttaaagttctctttggacagtcaggtgaaccacaggatgaaaaaagaactcccctcccacgtacaggccatgcataagcggaaagagttcctggactatcagctcgacgagttgagccgtcaaagggctctgtgtcggggcggaagagagatccagaggcaagagttagatgagaacatttcaaaggtaagtaaggagcgccaggagttggcgtccaaaatcaaggaggtgcaaggtagacctcaaaagacgcagagcatcattatactcgagtctcatataatctgttgtacgttgtccacttctggtggcctactgctagaatctgcattccgcggccagggcggggtgccatttagctgtgtgattgtggacgaagctggccagagctgtgagattgaaacacttaccccactcattcaccggtgcaataaactgattcttgtgggggaccctaagcaacttccacctacggtcatctctatgaaagctcaggagtacggctacgatcagtccatgatggcaagattctgtagattactggaggagaatgtagagcacaacatgataagtcgccttcccatcttacagctgactgtgcagtacaggatgcaccctgacatctgtctctttcctagtaattatgtctacaacagaaacttaaagaccaatcgacaaaccgaggctatcagatgtagttccgactggccattccaaccatatctggtgttcgacgttggtgacggatcagaaagaagggacaacgacagctacatcaacgtccaggagataaagcttgtgatggagattatcaagctcataaaagacaagaggaaggatgtatcattccgaaatattggcatcatcactcactacaaggcacagaagaccatgatccagaaggatctggacaaggaattcgatcgtaaaggtccagcagaggttgacactgtcgacgcgttccagggaaggcaaaaggactgcgttatcgtgacatgcgtgagagccaacagcattcagggctctatcggctttttggcatccctgcaaagattgaacgtaacaatcacgagggctaagtacagcctctttatcttgggtcatctgagaaccctgatggagaaccagcactggaatcagcttatccaggatgctcagaaaaggggtgccatcattaagacctgtgacaagaactatcggcacgatgcagtgaaaatcctgaagttgaagcctgtcttacagcgatccctcactcatccaccaaccatcgccccagagggctctcgccctcaggggggtctccctagctcgaaactggatagcgggttcgcaaaaaccagcgtggctgccagcttgtatcatacaccctcagatagcaaggagattacactgacagtgacatcaaaagatcctgaacgacccccggtgcacgatcagctgcaggatcccaggctccttaagcgaatgggtatcgaagtcaaaggggggatttttctgtgggacccccagcccagctccccccagcacccaggagccacccctcctaccggagagcctggttttcccgtcgtgcatcaggatctctctcatattcaacagcccgcagccgtagtagcagcactttcaagccacaaacctccagttcgcggggagcctcccgcagcctcgcctgaggcaagtacctgccagagcaagtgtgatgaccccgaagaagagctgtgccaccggcgtgaggccagggcctttagtgagggggaacaagaaaagtgtggctccgaaacccatcacaccagacgcaatagtaggtgggacaaaaggacattggaacaggaagactcttcctccaaaaagcgcaaattactctag

SEQ ID NO: 183975 - DNA, 7935 bp, Artificial Sequence
  derived and/or modified sequence
atgtcaacctgttgctggtgcacacctggcggtgcctcaaccatcgattttctgaaacgctatgctagcaatactccctctggagaatttcaaacagcagacgaggacctgtgttactgtttggagtgtgtggctgagtatcataaggctcgagatgagctgccctttttacacgaggtgctctgggagcttgaaaccttacggcttattaaccatttcgagaagtctatgaaggctgaaataggcgatgatgacgaactgtatatcgtggataacaatggggaaatgcctcttttcgatattaccgggcaggattttgagaataaacttcgcgtaccactgcttgaaatcttaaagtacccctacttgctgttgcacgagcgggtcaacgagctctgtgtcgaagccctgtgtcgcatggagcaggcaaactgctcattccaggtgttcgataagcatccaggcatctatttgttcttagtgcaccccaacgaaatggtgaggcgttgggcgattctgacagcaaggaatttaggaaaggtggacagagacgattattacgaccttcaggaggtcctactgtgcctcttcaaggtaattgagctgggactcttagaatctccagatatctacacaagttcagtactggagaaagggaaattgatccttcttccttctcacatgtatgatacaacaaactataagtcatactggttggggatctgcatgctgctgacgatcctagaagagcaagcgatggattccctgctgttgggctccgacaaacagaacgatttcatgcaatctatactccatactatggagagggaggccgacgacgatagtgtcgaccccttttggccagctttacattgcttcatggtgatcctcgataggctgggcagcaaagtctggggccagctgatggaccccatcgtggcatttcagaccatcatcaacaacgccagctataaccgggagatccgacatattcgaaacagcagtgtcaggaccaaactagagcccgagagctacctggacgatatggttacctgtagccagatagtgtataactataatcctgagaagactaagaaggactcaggctggaggactgccatctgccccgactactgccctaacatgtacgaggagatggagacgctggcgagcgtcctgcaaagcgatattggccaggacatgcgtgtgcataacagcactttcctgtggttcatcccttttgtgcagtcactaatggatctgaaggacttgggagtcgcctatattgctcaggtggtgaatcacttgtactccgaagtaaaggaagtgttgaatcagactgatgcagtctgcgacaaggttactgagtttttcctgctgatcctggtgagcgtcattgaactgcaccgcaacaagaaatgcttgcacctactatgggtgagcagccagcagtgggtggaggcagtggtaaaatgcgccaaattacctacaacggctttcacaagaagctccgaaaaatcaagtgggaactgcagtaaaggcactgccatgattagtagtctctctctgcacagtatgcctagcaattctgtccaactcgcatacgtgcagctgattcgcagcctactgaaagagggatatcagctgggacagcagtctttgtgcaagcggttctgggataaactgaaccttttcctccggggtaacttgtcacttggttggcagctgacctctcaagagacccatgaactgcagtcctgtctgaagcagattattcgaaacatcaagtttaaggcgcccccctgcaatacgtttgtggacttaacatctgcctgtaaaattagtcccgcatcttataataaagaagaaagtgaacagatggggaagacctctcggaaggatatgcactgtttagaagcgagcagccctacattttccaaggagcccatgaaagtgcaggatagtgtcctgatcaaagctgacaatactattgaaggtgacaacaatgagcaaaattacatcaaggatgtgaagctcgaggatcacctgctggctggctcgtgcctcaagcaaagtagtaagaatatttttaccgagcgcgccgaagaccagatcaagatttccacgcgtaagcaaaaatctgtgaaagaaatcagttcttatacccccaaagactgcacctcccgtaacgggcccgagcgcggatgcgaccgaggaatcatcgtgtcaaccagactgctgaccgactcctccaccgatgctctggaaaaggtgagtacctcaaatgaggacttcagtttaaaagatgacgcactcgctaagacatccaagcgtaagacaaaggtgcagaaagacgagatttgtgccaaactgtcccacgtgattaagaagcagcatcgaaaatctaccctagtggataatacaatcaatctggacgagaacctgactgtttccaatattgagagcttctacagcaggaaggacacaggggttcaaaaaggggacggtttcatacataacctatccttggacccatcgggggttttagatgataagaacggggaacagaaaagccagaacaatgtgctgcccaaagagaagcaactgaaaaacgaagagctcgtcatattcagctttcatgaaaacaactgtaagatccaggagtttcatgttgacggcaaagagctcattccatttactgagatgacaaatgcaagcgaaaagaagagctcccccttcaaggacctgatgaccgtgcccgagtcgcgtgacgaggagatgtccaatagcacatccgtcatatacagtaatctgacacgagaacaggcccctgacatctcccctaaatcagataccttaacagactcacaaattgacagagacctccataaactgtccctcttagctcaggccagcgttatcactttcccctctgattccccacaaaactccagccagctgcaacgcaaagtgaaagaagacaagaggtgttttacagctaatcaaaacaacgtcggtgacacctcccgcgggcaggtgatcatcataagcgactccgacgacgacgatgatgaacgcatcctgtcactcgaaaagcttaccaaacaggacaaaatctgtttagagcgggagcatccggagcagcacgtctccacggtcaattcaaaggaagagaaaaatcccgtaaaggaggagaaaaccgaaactctgttccagtttgaagaaagcgattcccagtgttttgagtttgaaagcagcagcgaggtgttctccgtgtggcaggaccatcctgatgacaataacagcgtgcaggatggcgagaaaaaatgtctggctcccatcgccaatacaaccaatggccagggatgcactgactatgtgtctgaggtggtgaaaaagggcgccgagggtatcgaagaacatacaaggccccgatccatctcagtcgaggaattttgcgaaatcgaggtcaagaagccaaagagaaaacggtcagagaagccaatggctgaggaccccgtacggccttcgtcctcggtgaggaatgaaggacaatcagatactaacaaacgagatctcgtggggaatgatttcaaatctattgacaggagaaccagtacccccaacagccggattcagcgcgcgacaactgtgtcccagaaaaaatcatccaaactttgcacctgtactgagccgattagaaaggtacctgtgagcaagactcccaaaaagacccatagcgatgccaagaaaggacagaaccggtctagcaactacctgtcatgcaggacaacaccggctatcgttccaccgaaaaaatttcgccaatgtcctgagcccacttccacagctgaaaaactgggacttaaaaaggggcctagaaaagcctatgaactgtctcaacgatctctcgactacgtggctcagctgagggaccatggcaaaaccgttggggtggtcgacaccagaaagaaaacgaagctgatttccccgcagaatttgagtgtgagaaacaacaagaaactgctcaccagtcaggagttacagatgcagagacagatcagaccaaaatcccagaagaatcggcggaggctgtctgactgtgagtctacggatgtaaaaagagccggatcccacactgcccagaactcagacatcttcgtgcctgaaagcgaccggagcgactacaactgcaccgggggtaccgaggtgctggcgaattcaaatcgcaaacagctcattaagtgtatgccaagcgaacctgagaccataaaggccaagcatgggtcacccgcaactgacgatgcgtgcccccttaaccaatgtgacagtgtggtgttgaatggcactgtacctactaacgaagtgattgtctctactagcgaggaccccctgggagggggcgaccccacagcacggcacatcgagatggccgccctgaaagaaggggaaccggactcctcctctgatgccgaggaggataacctcttcctaacacagaacgatcccgaggacatggatctgtgctctcaaatggagaatgacaactataaattgatcgagctaatacacgggaaggataccgttgaagttgaggaggactcagtgtctcgcccccagctcgaatccctttccgggaccaaatgcaaatacaaggactgtttggagacgaccaaaaatcaaggggagtattgcccgaaacactccgaagtaaaggccgccgatgaggacgtgttccggaaaccaggcctcccaccacctgcctcaaaacccctgcgaccaaccaccaagatttttagcagtaagtcaacgagcagaattgcaggactgtccaagtccctggagactagtagcgctctctcccccagcttgaagaataaaagcaagggcatacagtctatcttgaaggtgccccagcctgtgcctctcatagcccagaaacctgtgggagagatgaagaattcctgcaacgtattgcacccacaaagtccaaataattccaaccgccaaggatgtaaggtgccttttggtgagtcaaaatatttcccatcgagcagtccggtgaacatcctgctgagcagccaatccgtcagtgacacctttgtcaaggaggtactgaagtggaaatacgaaatgtttttaaactttggccagtgcggccctcccgcctccctctgtcaatctatcagtcgacctgtgcccgtgcggtttcataattacggggactacttcaacgtctttttccctctaatggtcctaaacaccttcgaaacagtagcacaggaatggcttaattcacccaaccgagagaatttttaccagctccaggtacggaagttccctgctgattatattaagtactgggagtttgccgtatacctcgaggagtgtgaacttgctaaacagttgtacccaaaagaaaacgatttagtctttctggctcccgagaggataaacgaagagaagaaggacactgagcgcaatgatattcaggacttgcacgaataccacagtggttatgttcacaagtttcgccggacctcagttatgaggaatggcaagaccgaatgctacttgagcatccagacccaggagaacttcccagccaatctaaacgagctggttaactgtatagttatcagtagcctggttaccacccagcgaaagcttaaggccatgagtctgcttggcagtagaaaccagttagctagggcggtgcttaaccccaatcctatggatttctgtaccaaagatctcctgacgaccacatccgagaggattatcgcttatctcagggacttcaacgaggaccaaaaaaaagcaattgagacggcctacgccatggtaaagcattctcccagcgtggccaagatatgcttgatccacggtcccccagggaccggcaaatcaaagacgattgtagggctgttatatcggttgctgacggagaaccagcgaaaagggcactcggacgaaaatagtaacgccaagattaagcagaatagggtcttagtttgcgcaccgtccaacgccgcagtggacgaactgatgaagaagataatcttagaattcaaagaaaaatgtaaggataaaaagaatcctctaggcaactgcggggatataaacttagtgaggctgggaccggagaagtccatcaacagtgaggtcttgaaatttagcctggactctcaggtgaaccacagaatgaaaaaggaattaccttcgcacgtgcaggctatgcacaagcgaaaggagtttctggattatcagcttgatgagctctcccgccagagagccctgtgccgtggtggccgtgaaatccagcgccaggaattggacgagaatatcagcaaagtctcaaaggaacgtcaggagctggcttctaaaattaaagaggtccagggcagacctcaaaaaactcagagcattataatcctagagtcccatatcatatgttgtacactgtctacgtccggcggcctgctgctcgagtccgcattcaggggtcaaggcggggtgccctttagctgtgtgattgtggacgaggccggccagagctgcgagatagagacactgaccccacttatccatcgatgtaacaagttgattctggttggtgatccaaaacagttgccacccacagtcatttcaatgaaagcgcaggagtatgggtatgatcagtctatgatggctcgtttttgtcgtctacttgaggagaacgtggaacataatatgattagtagactgccgattctgcagttaactgtgcagtacaggatgcatcctgatatttgcctcttcccttcaaattacgtgtacaaccgcaatctgaaaacaaatcgacagacggaagccattcgctgtagtagcgattggccatttcagccctatctcgtgtttgatgtgggggatgggtccgagaggcgggacaacgacagctacatcaacgtccaagaaatcaaacttgttatggaaataatcaagctcatcaaggacaagcgaaaggacgtatccttccggaacatcggcattatcacccactacaaagcccagaaaaccatgatccagaaagatttagataaggagttcgacaggaagggattcctggcatccttacagaggctgaacgtgaccatcacacgcgccaaatactcactctttatactcggccatctcagaactcttatggagaatcagcattggaaccagcttatccaggatgcccaaaagcgcggtgccatcattaagacatgtgataagaactatagacatgacgctgtcaagatcctgaagctgaaaccagtcctccagaggtctctgacacatccccctaccatcgctcctgaaggatccagacctcagggtggcttgccctcaagcaagctggactctggattcgctaagaccagtgtggccgcctccctgtaccatactccctcagatagcaaagagatcacattgacagtcacttctaaggacccggaaagacccccagtgcatgaccagcttcaagaccctagactcctgaagcgtatggggatcgaagttaagggaggcatcttcctttgggatccacagccgtcttccccccaacaccccggggccaccccccccacgggggagccgggcttcccagtcgttcatcaggacttgtcccatattcaacaaccagcagccgtggtggcagccctctcaagccataagccacctgtgcgcggcgaaccccccgcagccagccccgaggcatcgacctgccaatctaagtgcgacgacccagaagaggagctctgtcatagacgggaggccagagcctttagcgaaggtgaacaggagaaatgtggaagtgagacacaccacacgaggcggaactcacgttgggacaagcggacgctggaacaagaagattcctcctcaaaaaaaaggaaattgctgtag

SEQ ID NO: 183976 - DNA, 8034 bp, Artificial Sequence
  derived and/or modified sequence
atgagcacctgctgctggtgcaccccaggaggagccagcaccatcgacttcctgaagagatatgccagcaacaccccatctggagagttccagacagcagatgaggacctgtgctactgcctggagtgtgtggccgagtaccacaaggccagagatgagctgcccttcctgcacgaggtgctgtgggagctggagaccctgcggctcatcaaccactttgagaagtccatgaaggccgagattggagatgatgatgagctgtacatcgtggacaacaatggagagatgcccctgtttgacatcaccggccaggactttgagaacaagctgcgggtgcccctgctggagatcctgaagtacccctacctgctgctgcacgagcgggtgaatgagctgtgtgtggaggccctgtgcaggatggagcaggccaactgcagcttccaggtgtttgacaagcaccctggcatctacctgttcctggtgcaccccaatgagatggtgcggcgctgggccatcctgacagccaggaacctgggcaaggtggacagagatgactactatgacctgcaggaggtgctgctgtgcctcttcaaggtgattgagctgggcctgctggagagcccagacatctacaccagctctgtgctggagaagggcaagctgatcctgctgcccagccacatgtatgacaccaccaactacaagagctactggctgggcatctgcatgctgctgaccatcctggaggagcaggccatggacagcctgctgctgggcagtgacaagcagaatgacttcatgcagagcatcctgcacaccatggagcgggaggctgatgatgacagcgtggaccccttctggccagccctgcactgcttcatggtgatcctggaccggctgggcagcaaggtgtggggccagctgatggaccccatcgtggccttccagaccatcatcaacaatgccagctacaaccgggagatccgccacatccggaacagctctgtgaggaccaagctggagcctgagagctacctggatgacatggtgacctgcagccagatcgtgtacaactacaaccctgagaagaccaagaaggacagcggctggaggacagccatctgcccagactactgccccaacatgtatgaggagatggagaccctggcctctgtgctgcagagcgacatcggccaggacatgagggtgcacaacagcaccttcctgtggttcatcccctttgtgcagagcctgatggacctgaaggacctgggcgtggcctacatcgcccaggtggtgaaccacctgtacagcgaggtgaaggaggtgctgaaccagacagatgctgtgtgtgacaaggtgacagagttcttcctgctgatcctggtgtctgtcatcgagctgcacaggaacaagaagtgcctgcacctgctgtgggtgagcagccagcagtgggtggaggccgtggtgaagtgtgccaagctgcccaccacagccttcaccaggagcagcgagaagagcagcggcaactgcagcaaaggaacagccatgatcagcagcctgagcctgcacagcatgcccagcaacagcgtgcagctggcctacgtgcagctgatccgcagcctgctgaaggagggctaccagctgggccagcagagcctgtgcaagcgcttctgggacaagctgaacctcttcctgcggggcaacctgagcctgggctggcagctgaccagccaggagacccatgagctgcagagctgcctgaagcagatcatccggaacatcaagttcaaggccccaccctgcaacacctttgtggacctgaccagcgcctgcaagatcagccctgccagctacaacaaggaggagagcgagcagatgggcaagaccagcaggaaggacatgcactgcctggaggccagcagccccaccttcagcaaggagcccatgaaggtgcaggacagcgtgctgatcaaggctgacaacaccatcgagggggacaacaatgagcagaactacatcaaggatgtgaagctggaggaccacctgctggccggcagctgcctgaagcagagcagcaagaacatcttcacagaaagagctgaggaccagatcaagatcagcaccaggaagcagaagtctgtgaaggagatcagcagctacacccccaaggactgcaccagcagaaatggacctgagcggggctgtgaccggggcatcatcgtgtccacccggctgctgacagacagcagcacagatgccctggagaaggtgtccaccagcaatgaagacttcagcctgaaggatgatgccctggccaagaccagcaagaggaagaccaaggtgcagaaggatgagatctgtgccaagctgagccacgtgatcaagaagcagcacaggaagagcaccctggtggacaacaccatcaacctggatgagaacctgactgtgagcaacatcgagagcttctacagcaggaaggacacaggagtgcagaagggagatggcttcatccacaacctgagcctggaccccagcggcgtgctggatgacaagaatggagagcagaagagccagaacaacgtgctgcccaaggagaagcagctgaagaatgaggagctggtgatcttctccttccacgagaacaactgcaagatccaggagttccacgtggatggcaaggagctgatccccttcacagagatgaccaatgccagcgagaagaagagcagccccttcaaggacctgatgacagtgcctgagagcagagatgaggagatgagcaacagcaccagcgtcatctacagcaacctgacccgggagcaggccccagacatcagccccaagagtgacaccctgacagacagccagattgaccgggacctgcacaagctgagcctgctggcccaggccagcgtcatcaccttccccagcgacagcccccagaacagcagccagctgcagaggaaggtgaaggaggacaagcgctgcttcaccgccaaccagaacaacgtgggggacaccagccggggccaggtgatcatcatcagtgacagtgatgatgatgatgatgagcgcatcctgagcctggagaagctgaccaagcaggacaagatctgcctggagcgggagcaccctgagcagcacgtgtccacagtgaacagcaaggaggagaagaaccctgtgaaggaggagaagacagagaccctcttccagtttgaggagagtgacagccagtgctttgaatttgagagcagcagcgaggtgttttctgtgtggcaggaccacccagatgacaacaacagcgtgcaggatggagagaagaagtgcctggcccccatcgccaacaccaccaacggccagggctgcacagattatgtgtctgaggtggtgaagaagggagctgagggcatcgaggagcacacccggcccaggagcatctctgtggaggagttctgtgaaattgaggtgaagaagcccaagaggaagaggtctgagaagcccatggctgaagatcctgtgcggcccagcagctctgtgagaaatgaaggccagagcgacaccaacaagagggacctggtgggcaatgacttcaagagcattgacaggaggaccagcacccccaacagccgcatccagagggccaccaccgtgtcccagaagaagagcagcaagctgtgcacctgcacagagcccatcaggaaggtgcctgtgtccaagacccccaagaagacccacagtgatgccaagaagggccagaacagaagcagcaactacctgagctgcaggaccaccccagccatcgtgccccccaagaagttccggcagtgcccagagcccaccagcacagctgagaagctgggcctgaagaagggccccaggaaggcctatgagctgagccagaggagcctggactatgtggcccagctgcgggaccacggcaagacagtgggcgtggtggacaccaggaagaagaccaagctgatcagcccccagaacctgtctgtgaggaacaacaagaagctgctgaccagccaggagctgcagatgcagaggcagatccggcccaagagccagaagaacagaagaaggctgagtgactgtgagagcacagatgtgaagagagctggcagccacacagcccagaacagcgacatctttgtgcctgagagtgacagaagtgactacaactgcacaggaggaacagaggtgctggccaacagcaacaggaagcagctgatcaagtgcatgcccagcgagcctgagaccatcaaggccaagcacggcagccctgccacagatgatgcctgccccctgaaccagtgtgacagcgtggtgctgaatggcaccgtgcccaccaatgaggtgattgtgtccaccagcgaggaccccctgggcggcggggaccccacagcccggcacatcgagatggccgccctgaaggagggggagccagacagcagcagtgatgctgaggaggacaacctcttcctgacccagaatgaccctgaggacatggacctgtgcagccagatggagaatgacaactacaagctgattgagctgatccacggcaaggacacagtggaggtggaggaggacagcgtgtcccggccccagctggagagcctgagcggcaccaagtgcaagtacaaggactgcctggagaccaccaagaaccagggcgagtactgccccaagcacagcgaggtgaaggccgcagatgaagatgtgttcaggaagccaggcctgcccccaccagccagcaagcccctgcggcccaccaccaagatcttcagcagcaagagcaccagcagaattgctggcctgagcaagagcctggagaccagcagcgccctgagccccagcctgaagaacaagagcaagggcatccagagcatcctgaaggtgccccagcctgtgcccctcatcgcccagaagcctgtgggggagatgaagaacagctgcaatgtgctgcacccccagagccccaacaacagcaaccggcagggctgcaaggtgccctttggagagagcaagtacttccccagcagcagccctgtgaacatcctgctgagcagccagagcgtgtctgacacctttgtgaaggaggtgctgaagtggaagtatgagatgttcctgaactttggccagtgtggccccccagccagcctgtgccagagcatcagcaggcctgtgcctgtgcgcttccacaactacggggactacttcaacgtgttcttccccctgatggtgctgaacacctttgagaccgtggcccaggagtggctgaacagccccaaccgggagaacttctaccagctgcaggtgaggaagtttcctgctgactacatcaagtactgggagtttgctgtgtacctggaggagtgtgagctggccaagcagctgtaccccaaggaaaatgacctggtgttcctggcccctgagcgcatcaatgaggagaagaaggacacagaaagaaatgacatccaggacctgcacgagtaccacagcggctacgtgcacaagttccggaggacctctgtgatgagaaatggcaagacagagtgctacctgagcatccagacccaggagaacttccctgccaacctgaatgagctggtgaactgcatcgtcatcagcagcctggtgaccacccagaggaagctgaaggccatgagcctgctgggcagcaggaaccagctggcccgggctgtgctgaaccccaaccccatggacttctgcaccaaggacctgctgaccaccaccagcgagcgcatcatcgcctacctgcgggacttcaatgaagaccagaagaaggccatcgagacagcctatgccatggtgaagcacagccccagcgtggccaagatctgcctgatccacggccccccaggcaccgggaagagcaagaccatcgtgggcctgctgtaccgcctgctgacagagaaccagaggaagggccacagtgatgagaacagcaatgccaagatcaagcagaacagagtgctggtgtgtgcccccagcaatgctgctgtggatgagctgatgaagaagatcatcctggagttcaaggagaagtgcaaggacaagaagaaccccctgggcaactgtggggacatcaacctggtgcggctgggccctgagaagagcatcaacagcgaggtgctgaagttcagcctggacagccaggtgaaccacaggatgaagaaggagctgcccagccacgtgcaggccatgcacaagaggaaggagttcctggactaccagctggatgagctgagccggcagagggccctgtgccggggcggccgggagatccagaggcaggagctggatgagaacatcagcaaggtgtccaaggagcggcaggagctggccagcaagatcaaggaggtgcagggccggccccagaagacccagagcatcatcatcctggagagccacatcatctgctgcaccctgagcaccagcggcggcctgctgctggagagcgccttccggggccagggcggcgtgcccttcagctgtgtgattgtggatgaagctggccagagctgtgaaattgagaccctgacccccctcatccaccgctgcaacaagctgatcctggtgggggaccccaagcagctgccccccaccgtcatctccatgaaggcccaggagtatggctatgaccagagcatgatggcccgcttctgccgcctgctggaggagaatgtggagcacaacatgatcagccggctgcccatcctgcagctgactgtgcagtacaggatgcacccagacatctgcctcttccccagcaactacgtgtacaacagaaacctgaagaccaaccggcagacagaggccatccgctgcagcagtgactggcccttccagccctacctggtgtttgatgtgggagatggcagcgagcggcgggacaatgacagctacatcaacgtgcaggagatcaagctggtgatggagatcatcaagctgatcaaggacaagaggaaggatgtgtccttcaggaacatcggcatcatcacccactacaaggcccagaagaccatgatccagaaggacctggacaaggagtttgacaggaagggccctgctgaggtggacacagtggatgccttccagggccggcagaaggactgtgtgattgtgacctgtgtgcgggccaacagcatccagggcagcatcggcttcctggccagcctgcagaggctgaatgtgaccatcacccgggccaagtacagcctcttcatcctgggccacctgcggaccctgatggagaaccagcactggaaccagctgatccaggatgcccagaagagaggagccatcatcaagacctgtgacaagaactacagacatgatgctgtgaagatcctgaagctgaagcctgtgctgcagaggagcctgacccacccccccaccatcgcccctgagggcagccggccccagggcggcctgcccagcagcaagctggacagcggctttgccaagacctctgtggccgccagcctgtaccacacccccagcgacagcaaggagatcaccctgactgtgaccagcaaggaccctgagcggccccctgtgcatgaccagctgcaggacccccggctgctgaagaggatgggcatcgaggtgaagggcggcatcttcctgtgggacccccagcccagcagcccccagcaccctggggccaccccacccaccggggagcccggcttccctgtggtgcaccaggacctgagccacatccagcagcctgctgctgtggtggccgccctgagcagccacaagccccctgtgcggggggagcccccagctgccagccctgaggccagcacctgccagagcaaatgtgatgatcctgaggaggagctgtgccaccggcgggaggcccgggccttcagcgagggggagcaggagaagtgtggcagcgagacccaccacaccaggaggaacagccgctgggacaagaggaccctggagcaggaggacagcagcagcaagaagaggaagctgctgtag

SEQ ID NO: 183977 - DNA, 7935 bp, Artificial Sequence
  derived and/or modified sequence
atgagcacctgctgctggtgcaccccaggaggagccagcaccatcgacttcctgaagagatatgccagcaacaccccatctggagagttccagacagcagatgaggacctgtgctactgcctggagtgtgtggccgagtaccacaaggccagagatgagctgcccttcctgcacgaggtgctgtgggagctggagaccctgcggctcatcaaccactttgagaagtccatgaaggccgagattggagatgatgatgagctgtacatcgtggacaacaatggagagatgcccctgtttgacatcaccggccaggactttgagaacaagctgcgggtgcccctgctggagatcctgaagtacccctacctgctgctgcacgagcgggtgaatgagctgtgtgtggaggccctgtgcaggatggagcaggccaactgcagcttccaggtgtttgacaagcaccctggcatctacctgttcctggtgcaccccaatgagatggtgcggcgctgggccatcctgacagccaggaacctgggcaaggtggacagagatgactactatgacctgcaggaggtgctgctgtgcctcttcaaggtgattgagctgggcctgctggagagcccagacatctacaccagctctgtgctggagaagggcaagctgatcctgctgcccagccacatgtatgacaccaccaactacaagagctactggctgggcatctgcatgctgctgaccatcctggaggagcaggccatggacagcctgctgctgggcagtgacaagcagaatgacttcatgcagagcatcctgcacaccatggagcgggaggctgatgatgacagcgtggaccccttctggccagccctgcactgcttcatggtgatcctggaccggctgggcagcaaggtgtggggccagctgatggaccccatcgtggccttccagaccatcatcaacaatgccagctacaaccgggagatccgccacatccggaacagctctgtgaggaccaagctggagcctgagagctacctggatgacatggtgacctgcagccagatcgtgtacaactacaaccctgagaagaccaagaaggacagcggctggaggacagccatctgcccagactactgccccaacatgtatgaggagatggagaccctggcctctgtgctgcagagcgacatcggccaggacatgagggtgcacaacagcaccttcctgtggttcatcccctttgtgcagagcctgatggacctgaaggacctgggcgtggcctacatcgcccaggtggtgaaccacctgtacagcgaggtgaaggaggtgctgaaccagacagatgctgtgtgtgacaaggtgacagagttcttcctgctgatcctggtgtctgtcatcgagctgcacaggaacaagaagtgcctgcacctgctgtgggtgagcagccagcagtgggtggaggccgtggtgaagtgtgccaagctgcccaccacagccttcaccaggagcagcgagaagagcagcggcaactgcagcaaaggaacagccatgatcagcagcctgagcctgcacagcatgcccagcaacagcgtgcagctggcctacgtgcagctgatccgcagcctgctgaaggagggctaccagctgggccagcagagcctgtgcaagcgcttctgggacaagctgaacctcttcctgcggggcaacctgagcctgggctggcagctgaccagccaggagacccatgagctgcagagctgcctgaagcagatcatccggaacatcaagttcaaggccccaccctgcaacacctttgtggacctgaccagcgcctgcaagatcagccctgccagctacaacaaggaggagagcgagcagatgggcaagaccagcaggaaggacatgcactgcctggaggccagcagccccaccttcagcaaggagcccatgaaggtgcaggacagcgtgctgatcaaggctgacaacaccatcgagggggacaacaatgagcagaactacatcaaggatgtgaagctggaggaccacctgctggccggcagctgcctgaagcagagcagcaagaacatcttcacagaaagagctgaggaccagatcaagatcagcaccaggaagcagaagtctgtgaaggagatcagcagctacacccccaaggactgcaccagcagaaatggacctgagcggggctgtgaccggggcatcatcgtgtccacccggctgctgacagacagcagcacagatgccctggagaaggtgtccaccagcaatgaagacttcagcctgaaggatgatgccctggccaagaccagcaagaggaagaccaaggtgcagaaggatgagatctgtgccaagctgagccacgtgatcaagaagcagcacaggaagagcaccctggtggacaacaccatcaacctggatgagaacctgactgtgagcaacatcgagagcttctacagcaggaaggacacaggagtgcagaagggagatggcttcatccacaacctgagcctggaccccagcggcgtgctggatgacaagaatggagagcagaagagccagaacaacgtgctgcccaaggagaagcagctgaagaatgaggagctggtgatcttctccttccacgagaacaactgcaagatccaggagttccacgtggatggcaaggagctgatccccttcacagagatgaccaatgccagcgagaagaagagcagccccttcaaggacctgatgacagtgcctgagagcagagatgaggagatgagcaacagcaccagcgtcatctacagcaacctgacccgggagcaggccccagacatcagccccaagagtgacaccctgacagacagccagattgaccgggacctgcacaagctgagcctgctggcccaggccagcgtcatcaccttccccagcgacagcccccagaacagcagccagctgcagaggaaggtgaaggaggacaagcgctgcttcaccgccaaccagaacaacgtgggggacaccagccggggccaggtgatcatcatcagtgacagtgatgatgatgatgatgagcgcatcctgagcctggagaagctgaccaagcaggacaagatctgcctggagcgggagcaccctgagcagcacgtgtccacagtgaacagcaaggaggagaagaaccctgtgaaggaggagaagacagagaccctcttccagtttgaggagagtgacagccagtgctttgaatttgagagcagcagcgaggtgttttctgtgtggcaggaccacccagatgacaacaacagcgtgcaggatggagagaagaagtgcctggcccccatcgccaacaccaccaacggccagggctgcacagattatgtgtctgaggtggtgaagaagggagctgagggcatcgaggagcacacccggcccaggagcatctctgtggaggagttctgtgaaattgaggtgaagaagcccaagaggaagaggtctgagaagcccatggctgaagatcctgtgcggcccagcagctctgtgagaaatgaaggccagagcgacaccaacaagagggacctggtgggcaatgacttcaagagcattgacaggaggaccagcacccccaacagccgcatccagagggccaccaccgtgtcccagaagaagagcagcaagctgtgcacctgcacagagcccatcaggaaggtgcctgtgtccaagacccccaagaagacccacagtgatgccaagaagggccagaacagaagcagcaactacctgagctgcaggaccaccccagccatcgtgccccccaagaagttccggcagtgcccagagcccaccagcacagctgagaagctgggcctgaagaagggccccaggaaggcctatgagctgagccagaggagcctggactatgtggcccagctgcgggaccacggcaagacagtgggcgtggtggacaccaggaagaagaccaagctgatcagcccccagaacctgtctgtgaggaacaacaagaagctgctgaccagccaggagctgcagatgcagaggcagatccggcccaagagccagaagaacagaagaaggctgagtgactgtgagagcacagatgtgaagagagctggcagccacacagcccagaacagcgacatctttgtgcctgagagtgacagaagtgactacaactgcacaggaggaacagaggtgctggccaacagcaacaggaagcagctgatcaagtgcatgcccagcgagcctgagaccatcaaggccaagcacggcagccctgccacagatgatgcctgccccctgaaccagtgtgacagcgtggtgctgaatggcaccgtgcccaccaatgaggtgattgtgtccaccagcgaggaccccctgggcggcggggaccccacagcccggcacatcgagatggccgccctgaaggagggggagccagacagcagcagtgatgctgaggaggacaacctcttcctgacccagaatgaccctgaggacatggacctgtgcagccagatggagaatgacaactacaagctgattgagctgatccacggcaaggacacagtggaggtggaggaggacagcgtgtcccggccccagctggagagcctgagcggcaccaagtgcaagtacaaggactgcctggagaccaccaagaaccagggcgagtactgccccaagcacagcgaggtgaaggccgcagatgaagatgtgttcaggaagccaggcctgcccccaccagccagcaagcccctgcggcccaccaccaagatcttcagcagcaagagcaccagcagaattgctggcctgagcaagagcctggagaccagcagcgccctgagccccagcctgaagaacaagagcaagggcatccagagcatcctgaaggtgccccagcctgtgcccctcatcgcccagaagcctgtgggggagatgaagaacagctgcaatgtgctgcacccccagagccccaacaacagcaaccggcagggctgcaaggtgccctttggagagagcaagtacttccccagcagcagccctgtgaacatcctgctgagcagccagagcgtgtctgacacctttgtgaaggaggtgctgaagtggaagtatgagatgttcctgaactttggccagtgtggccccccagccagcctgtgccagagcatcagcaggcctgtgcctgtgcgcttccacaactacggggactacttcaacgtgttcttccccctgatggtgctgaacacctttgagaccgtggcccaggagtggctgaacagccccaaccgggagaacttctaccagctgcaggtgaggaagtttcctgctgactacatcaagtactgggagtttgctgtgtacctggaggagtgtgagctggccaagcagctgtaccccaaggaaaatgacctggtgttcctggcccctgagcgcatcaatgaggagaagaaggacacagaaagaaatgacatccaggacctgcacgagtaccacagcggctacgtgcacaagttccggaggacctctgtgatgagaaatggcaagacagagtgctacctgagcatccagacccaggagaacttccctgccaacctgaatgagctggtgaactgcatcgtcatcagcagcctggtgaccacccagaggaagctgaaggccatgagcctgctgggcagcaggaaccagctggcccgggctgtgctgaaccccaaccccatggacttctgcaccaaggacctgctgaccaccaccagcgagcgcatcatcgcctacctgcgggacttcaatgaagaccagaagaaggccatcgagacagcctatgccatggtgaagcacagccccagcgtggccaagatctgcctgatccacggccccccaggcaccgggaagagcaagaccatcgtgggcctgctgtaccgcctgctgacagagaaccagaggaagggccacagtgatgagaacagcaatgccaagatcaagcagaacagagtgctggtgtgtgcccccagcaatgctgctgtggatgagctgatgaagaagatcatcctggagttcaaggagaagtgcaaggacaagaagaaccccctgggcaactgtggggacatcaacctggtgcggctgggccctgagaagagcatcaacagcgaggtgctgaagttcagcctggacagccaggtgaaccacaggatgaagaaggagctgcccagccacgtgcaggccatgcacaagaggaaggagttcctggactaccagctggatgagctgagccggcagagggccctgtgccggggcggccgggagatccagaggcaggagctggatgagaacatcagcaaggtgtccaaggagcggcaggagctggccagcaagatcaaggaggtgcagggccggccccagaagacccagagcatcatcatcctggagagccacatcatctgctgcaccctgagcaccagcggcggcctgctgctggagagcgccttccggggccagggcggcgtgcccttcagctgtgtgattgtggatgaagctggccagagctgtgaaattgagaccctgacccccctcatccaccgctgcaacaagctgatcctggtgggggaccccaagcagctgccccccaccgtcatctccatgaaggcccaggagtatggctatgaccagagcatgatggcccgcttctgccgcctgctggaggagaatgtggagcacaacatgatcagccggctgcccatcctgcagctgactgtgcagtacaggatgcacccagacatctgcctcttccccagcaactacgtgtacaacagaaacctgaagaccaaccggcagacagaggccatccgctgcagcagtgactggcccttccagccctacctggtgtttgatgtgggagatggcagcgagcggcgggacaatgacagctacatcaacgtgcaggagatcaagctggtgatggagatcatcaagctgatcaaggacaagaggaaggatgtgtccttcaggaacatcggcatcatcacccactacaaggcccagaagaccatgatccagaaggacctggacaaggagtttgacaggaagggcttcctggccagcctgcagaggctgaatgtgaccatcacccgggccaagtacagcctcttcatcctgggccacctgcggaccctgatggagaaccagcactggaaccagctgatccaggatgcccagaagagaggagccatcatcaagacctgtgacaagaactacagacatgatgctgtgaagatcctgaagctgaagcctgtgctgcagaggagcctgacccacccccccaccatcgcccctgagggcagccggccccagggcggcctgcccagcagcaagctggacagcggctttgccaagacctctgtggccgccagcctgtaccacacccccagcgacagcaaggagatcaccctgactgtgaccagcaaggaccctgagaggcctcctgtgcatgaccagctgcaggacccccggctgctgaagaggatgggcatcgaggtgaagggcggcatcttcctgtgggacccccagcccagcagcccccagcaccctggggccaccccacccactggagagcccggcttccctgtggtgcaccaggacctgagccacatccagcagcctgctgctgtggtggccgccctgagcagccacaagccccctgtgcggggggagcccccagctgccagccctgaggccagcacctgccagagcaaatgtgatgatcctgaggaggagctgtgccacagaagagaggcccgggccttcagcgagggggagcaggagaagtgtggcagcgagacccaccacaccaggaggaacagccgctgggacaagaggaccctggagcaggaggacagcagcagcaagaagaggaagctgctgtag

SEQ ID NO: 183978 - DNA, 8034 bp, Artificial Sequence
  derived and/or modified sequence
atgagcacctgctgctggtgcacccccggcggcgccagcaccatcgactttctcaaacggtacgcctcaaatactccaagcggcgagttccaaactgcagatgaggatctttgttattgcttagagtgcgtggcagagtaccataaggcccgagatgagttacctttcctgcacgaagtgctttgggagctcgaaactctgcggctgatcaatcattttgagaagagcatgaaagccgaaattggggatgacgatgaattgtacatcgtggataacaacggggaaatgcctctctttgatatcacgggccaagacttcgagaataagctccgggtccctctcctcgagatcctcaagtacccataccttcttcttcacgagagggtgaatgagctctgtgtggaagccctatgtcggatggaacaagcaaattgtagcttccaggtgttcgataaacaccccgggatttacctgttcctggtacaccccaatgaaatggtacgtcggtgggccattctcaccgctagaaaccttggaaaagttgacagagacgactactacgaccttcaggaagtgttactctgccttttcaaagtgatcgagctgggccttttggagagccctgacatatatacctcctctgtgctggagaagggaaagttaatcctcctgccatctcacatgtacgatacaacgaactacaagagctattggttagggatttgtatgttgctgactattttggaagaacaggcgatggattctttgctgctaggaagtgacaaacaaaacgacttcatgcagagcatcctgcatacaatggagcgtgaggccgacgatgactccgttgaccccttctggcctgcactgcactgctttatggtcattttggatcgcctggggtcaaaggtctgggggcagctgatggaccccattgtggcttttcagactattatcaataacgcctcttataaccgtgagatcaggcatattcgaaattctagcgtgcgcactaagctggagcccgagagctatctcgacgacatggttacctgctcccaaatagtgtataactataatccggagaaaacaaagaaagactctggctggaggaccgccatttgtccggactactgccctaatatgtatgaggagatggaaacactcgcatctgttctgcagagcgacataggccaggatatgagggtccacaatagtacattcttgtggtttattcctttcgtgcagtcgcttatggacttaaaggatcttggcgttgcgtatattgcacaggtggtcaatcacctgtacagcgaagtaaaggaggtgctaaatcagactgatgctgtgtgcgataaagttactgaattttttttactcattctcgtttcggtgatcgagctgcaccggaacaaaaaatgcctacaccttttgtgggtgtcaagccagcagtgggtagaagctgttgtaaaatgtgctaagctaccgaccaccgcctttaccaggtcctcagagaagtccagcggcaattgctcaaagggcactgctatgatctcttccttaagtttacattctatgccgagcaacagtgttcagctggcgtatgtccagcttattaggagtcttctgaaggaaggctaccagctgggccagcaatccctatgtaaaaggttttgggacaaattaaacttgtttctgagggggaatttgagtctggggtggcagctgacatctcaagagacacatgaattgcagtcttgtctgaagcagattattcggaacatcaagtttaaggctcctccttgtaacacattcgtggacctcacctcagcctgtaagatctccccagcctcatacaataaggaagaatctgaacagatgggtaagacctctaggaaggacatgcactgtctggaggcttctagccctactttctccaaggaacctatgaaagtacaggactccgtgttaattaaggctgataataccatcgagggggacaacaacgagcaaaactatatcaaagacgtcaaattagaggaccaccttctggcaggttcttgcctgaagcaaagtagcaaaaatatcttcacagaacgagccgaggatcaaattaagatatcaacgcgaaagcaaaagtccgtaaaagagatcagctcatacacacccaaggattgtacaagtcggaatggacccgagcggggctgcgaccggggaatcattgtcagtactaggctgctcacagattcgtccactgacgctctcgaaaaagtaagcaccagtaacgaggacttctccctcaaagatgatgccctcgccaagactagcaagcgcaagacgaaagttcaaaaggacgagatttgtgccaagctgtctcacgtcattaagaaacaacataggaagtccacgctagtggacaacactatcaacctggatgagaacctgacagttagtaacattgagtcattctatagccgaaaggatactggcgttcagaagggggatggattcatccacaatctgagcctggacccttctggcgtgctggatgacaagaatggtgagcaaaaaagccaaaacaatgttctgcctaaagagaagcagttgaagaatgaggaattggtgatattttcatttcacgaaaataactgcaagatccaggagttccacgtggatgggaaagagttgattccgtttactgagatgacgaacgcttcggagaagaagagcagcccgtttaaagacctgatgaccgttccagaatcacgcgacgaggaaatgtcgaacagtacctccgtgatctactcaaaccttactagggaacaggctccagacatttcaccaaagtccgacactttgaccgattcccaaattgacagagacctccacaagctcagcttgctcgcccaggctagcgtgatcaccttcccttcagacagcccccagaacagttcccagctgcaaagaaaagtgaaggaagataagaggtgtttcaccgccaaccagaataatgtcggagatacctcacggggccaagtaatcatcatctccgactcagacgatgatgatgatgagcgtattctaagcctggagaagctcaccaagcaggacaagatttgcctggaaagggaacaccccgagcaacacgtatcaactgtaaattcaaaagaggaaaaaaatcctgtgaaagaggagaagacagagaccctgtttcagttcgaggagagcgattcccagtgctttgaatttgagtcatccagtgaggttttcagcgtttggcaagaccatcctgatgacaacaactccgtacaagatggagaaaagaaatgcctggcacccatagctaatactacaaatggccagggatgcactgactatgtgtccgaggtcgtcaagaaaggagccgaggggatagaggaacacaccagacccagaagtatttcagtcgaggagttttgcgaaattgaggtgaaaaaacccaagagaaaaagaagtgagaaaccaatggccgaggatcctgtgaggcccagcagttccgtgagaaatgaaggacagtccgacactaataaacgggatctggtgggcaacgatttcaagagcatagaccggcggacatccacccctaacagcaggatacagagggctacgactgtgagtcagaagaaaagcagcaagctctgtacttgcacagagcccattcgtaaggtgcccgtaagcaagacccccaagaagacccacagtgatgccaagaaagggcagaaccgctctagcaattacctgagttgccgaaccactcctgcaatagtccctccaaaaaagttccggcagtgtcccgagccaacgtctacagccgagaaattgggcctgaagaagggtccaagaaaggcttacgaactttcccaacgctctctggattacgttgcacagctcagagaccacgggaaaacagtcggggttgtggatacacgaaaaaagactaagctcatttctcctcagaaccttagcgtgcggaacaacaaaaagctactgacttcccaggaactacaaatgcagcgccagatcagacctaagtctcaaaagaatcgtcgccggttatctgattgcgagtctacggacgttaaaagggcaggcagtcacaccgcccaaaattccgatatattcgtgcctgaaagcgatcggtctgattacaactgcaccggcggcacagaagtgctggccaattcaaataggaagcagctgataaagtgcatgcctagcgaacccgaaacaatcaaggccaaacacggtagcccagccaccgacgatgcatgcccacttaatcaatgtgactccgtggtgctgaacggtactgttccaaccaatgaagttatcgttagcacgagcgaggaccccctggggggcggggacccaacagcccgccacatagagatggcggccttgaaggagggtgaaccggattcctcctccgatgccgaagaggataatctgttcctgacacagaatgatcccgaagatatggatctgtgtagccagatggaaaacgataactataaattgatagagcttattcatggcaaggatactgtcgaagtggaagaagattctgttagccgtcctcagttggagagcctgagcggaactaagtgtaaatacaaggactgtctggagacaacgaagaaccagggagaatactgccccaaacattctgaagtgaaagctgcagacgaagatgttttccggaagccggggctcccaccacctgccagcaaaccactgcgaccgactaccaagatcttcagcagcaagagtacatcccgaatcgccgggctttcaaagagtttagagaccagcagcgccctttcgccgtctcttaagaacaagtccaagggaatccagagcattttgaaggtgcctcagcccgttccgctcatcgctcaaaaaccggtaggggaaatgaagaactcctgcaatgtgttgcatccacagagtccgaacaatagtaaccgccagggatgtaaagtcccttttggcgagtcaaaatactttccttcttcatctcccgtgaatatccttctgagctcccaatcagtgagcgatactttcgtcaaggaggtattgaagtggaagtacgagatgtttttaaactttggccagtgcggaccaccagcgagcttgtgtcagtccatcagtagaccggttcctgtgcggtttcacaactacggagactactttaacgtcttcttccctctgatggtgctcaatacattcgaaactgtggcacaggaatggctgaacagccctaatcgtgaaaacttttaccagttgcaggtaagaaaattccccgcagattatattaaatattgggagtttgcagtatacctggaggaatgtgaattagcaaagcagctgtatccaaaggagaatgacctggtattcctggccccagagaggattaatgaagaaaaaaaggataccgagcggaacgatatccaagacctgcacgaataccactccggatatgtgcataagtttcgtagaacaagcgtgatgagaaatggcaaaacagaatgttatctgagcattcagactcaggagaactttcccgcgaacctgaacgaactcgttaattgtatcgtcattagctccttggtaactacccaaaggaagctgaaggctatgtccctgctggggagtagaaatcaactggctcgggcggtcctgaacccaaatccaatggacttttgcacaaaggacctgctaactaccacaagtgagagaataatcgcctatctgcgcgactttaacgaggaccagaagaaggctatcgagacagcttacgcaatggtgaaacactcaccctctgtcgctaaaatttgtctcatccacggtcctcccggcacgggaaagagtaagactatcgtagggctcctctaccgcctgttgaccgaaaaccagcgcaaaggacacagtgacgaaaacagtaacgccaagataaaacagaatagagtcctggtgtgcgcaccatccaacgctgccgtagacgaattaatgaaaaaaatcattctcgagtttaaagaaaagtgcaaggataagaagaaccctctgggaaactgcggcgacattaacctggtccggctcggaccagagaagagtatcaacagtgaagtcctgaagtttagcttggacagtcaagtgaaccacaggatgaaaaaggagcttccatctcacgtgcaggccatgcataagagaaaggagtttttagactaccagctcgatgagctctcccgtcagagagccctgtgcaggggcgggagggagattcagcggcaagagctggatgagaatatatccaaagtctctaaggagaggcaggaattggcttccaaaatcaaggaggtacaaggtcgaccacagaaaacccagtccataattatcttggaaagtcacattatctgctgcaccctcagcacttctgggggactcctgctggagtccgctttcagaggccagggaggtgtcccattctcttgcgtgattgtggatgaagcgggccagtcctgcgaaatcgagactctgacccctttaatccaccggtgcaataagctcatcctggtcggagatccaaaacagttaccccctaccgtcatttctatgaaagctcaagagtacggctacgatcagagtatgatggccagattttgtcgccttctcgaagagaacgtcgagcacaatatgatatctcgcttgcctatcttgcagcttaccgtgcagtaccgcatgcaccccgacatttgtctgtttccttcaaattacgtgtacaaccggaacttgaaaactaaccggcagaccgaggccattcgctgtagttcggattggccctttcagccctatctggtattcgatgtgggtgacggcagtgagcgtcgggacaatgatagctacattaatgtgcaggagatcaaattagtgatggaaattatcaagctgattaaggataagcgaaaggacgtgtcatttcggaacattggcataatcactcattacaaggcccaaaagaccatgatccagaaagacctcgacaaagagttcgatcgaaaggggccagccgaagtcgatacagtagacgccttccagggccgccagaaggattgtgtgatcgtcacttgtgtccgcgcgaactcaattcagggctctattgggtttcttgcctctctgcagcgactaaacgtcaccataactagggcaaagtatagcctcttcatcctgggacacctgcgtacgctgatggagaaccaacactggaaccaacttatacaagatgctcagaagaggggggccattataaaaacctgtgacaaaaattacagacacgacgccgtgaagatcttaaaactgaagcccgttcttcaaagatccttgacacacccacccaccattgctcccgagggaagccgaccccagggcgggctaccctcgtccaagttagattctggctttgccaaaacatctgtcgccgccagcctgtaccatacaccttctgacagcaaggaaatcaccctgacggtgacctccaaagatcccgaacgaccgcccgtccacgatcagctacaggaccctaggctgcttaaaaggatggggatcgaggtgaagggcggaattttcctttgggacccacaaccatcatctccacagcatccgggtgccacaccccccacaggcgaacctggctttccagttgtccaccaggacctgagccacatacagcagcccgcagccgttgtagcagctttgtcctctcacaaacctcccgtgagaggcgagccacccgccgctagtccagaggctagcacctgtcaatctaaatgtgatgacccagaggaagaactatgccaccgcagagaggctcgtgctttctctgaaggtgaacaggagaaatgtggctccgagacacaccacaccagaaggaattccagatgggataaaaggaccctggagcaggaggattccagctcgaagaagcgaaagctgctgtag

SEQ ID NO: 183979 - DNA, 7935 bp, Artificial Sequence
  derived and/or modified sequence
atgagcacctgctgctggtgcacccccggcggcgccagcaccatcgattttctcaaacgatatgcttctaacacacccagcggcgagttccagaccgccgacgaggacctgtgctactgcttagagtgcgtggcagagtaccacaaggcgcgagacgagctgccctttctgcatgaggtgctgtgggaattagagactctgagactgattaatcacttcgagaaaagtatgaaggctgaaatcggggacgatgacgaactctatatagtggataataacggagagatgcccctgtttgacattacgggccaagacttcgagaacaagctccgcgttccactgctggagattctcaagtatccgtacctccttctccacgaaagagtcaatgagctatgtgtcgaggctctgtgtcgcatggaacaggccaactgctcgttccaggtgtttgataagcatccaggaatctacctatttcttgtccacccaaatgaaatggtcagacgatgggccattctgaccgcccgaaatctaggcaaggttgatagagacgattactacgaccttcaagaagtccttttgtgcctctttaaggtgatcgagttgggactgctcgaatctcccgacatttacacaagtagtgtgctggaaaagggaaagctaattctcctcccgtcacacatgtacgacaccacaaactataaatcatattggctagggatctgcatgttactgaccatactcgaggagcaagctatggatagcctgctcttgggaagtgataaacaaaatgattttatgcagtctattctgcacaccatggagagagaggctgacgacgatagtgtggaccccttttggccagcacttcactgttttatggtaatcctcgatagattagggtcaaaagtgtggggacagctcatggatccaatcgtcgcgttccagactatcatcaataacgcatcttataaccgcgagattcgtcacataagaaatagtagcgttaggaccaagctggaacccgagtcttatttggacgacatggtgacctgcagccagattgtatacaactataatcctgaaaaaacaaagaaagattccggctggagaactgcaatttgcccggattactgcccaaacatgtacgaagaaatggaaacccttgccagcgtcctccagtctgacatcggccaggacatgcgggtgcacaactccacattcctttggtttatacccttcgtccagtcactgatggaccttaaagacctgggtgtagcctacattgcgcaggtagtcaaccatctctacagcgaagtgaaggaggttctgaatcagactgatgcggtgtgtgacaaggtgacagagttcttcctattaattctggtttccgtgatcgagctgcatcgcaacaagaagtgcctccacctcctgtgggtctcttcacagcagtgggtcgaggccgtggttaagtgtgcaaagttgccgacgacggccttcaccagatcttctgagaaaagctcagggaattgcagtaagggcaccgcgatgatcagcagtctgagtcttcacagcatgccctcaaattctgtccagcttgcatatgttcagctcatccggtctctgctcaaagagggctaccagctcgggcagcaatctctgtgtaagcgattctgggacaagcttaatctctttttacgcgggaacctttcactgggttggcagctgaccagccaggaaactcacgagttgcagagttgtctcaaacaaatcatcagaaacattaagttcaaggcaccaccttgtaatactttcgtggacttgacctccgcttgtaaaatttctccagctagttataacaaagaggagtctgagcagatgggaaaaaccagccgcaaagacatgcattgtctcgaagcaagcagtccgactttttcaaaagagcctatgaaggtgcaggactctgtgcttattaaggccgataacactattgaaggcgataataacgagcagaactatatcaaagacgtcaaactagaggaccatctactggccggcagctgtctcaagcagagctccaaaaatattttcacggaacgcgcggaagaccagatcaagatctccacacgaaaacagaaatctgtcaaagagatttcatcatacacacctaaagactgtacgtctaggaatggacccgaacgtggctgcgacagaggcattattgtttccacacgccttttaactgacagttccacggatgcactcgagaaagtgagcacaagcaacgaagatttcagcctgaaagatgacgctctggcaaaaaccagtaaaagaaagaccaaggtccaaaaggatgaaatctgtgcaaaactcagccacgtgatcaaaaaacagcatcggaaaagtacactggtggacaacaccattaacctcgacgagaatcttacagtgtccaacatcgaatctttctacagtagaaaagatacgggggtgcagaaaggtgacgggttcatccataacttgtcactggatcccagcggcgtgctcgatgacaaaaacggcgaacagaagtcacagaataatgtgctccctaaggagaaacagctgaaaaatgaggagttggtgattttttcctttcacgagaataattgcaaaattcaagaatttcacgtggatggcaaggaactgattccattcaccgaaatgactaatgcttctgaaaaaaagtccagtccctttaaagaccttatgaccgtaccagagtctagggacgaagagatgagtaacagcaccagcgttatatactctaaccttacgcgcgagcaggcgccagacatctcccccaaatcagataccctgaccgacagtcagatcgacagggacctacacaagctgtctttactggctcaagcctcggtaatcacattccccagtgacagcccgcagaactcatctcagctgcagcgcaaagtcaaggaggacaaacgatgttttactgccaaccaaaataacgtaggtgatacctcacgaggccaagtgattatcatatctgactctgatgatgacgacgacgagagaattctgtctttggagaaactgacaaaacaagataaaatatgcttagagagagaacaccctgagcagcacgtctccacagtcaactctaaggaagagaaaaacccagtgaaggaggagaagacagaaacactgttccagtttgaggagtctgactcccagtgctttgagttcgagtcctctagcgaagtattctcagtgtggcaggatcatcccgatgacaacaacagtgttcaggacggagagaagaagtgtcttgctcccatcgccaacacaactaacggtcaagggtgcactgactacgtatctgaggttgtcaaaaaaggagcagaagggatcgaagagcacacccggccacgttcaatctcagttgaagagttttgcgagattgaggtgaaaaaaccaaagcgcaagcgtagcgagaaaccgatggctgaagatcctgtcagaccgtcatccagcgtgagaaacgaaggtcagagtgataccaacaagcgagatctggtcggtaacgacttcaagagtatcgatcggcgtacatcaacacccaacagcaggattcaaagagcaacaaccgtctcccagaaaaaaagctccaagctctgcacttgtaccgaacctatccggaaagtgccggtgtcaaaaacaccgaagaagacgcattccgatgcaaagaaagggcagaataggtcttctaattatctgagctgcaggactactccagccatcgtgccccctaaaaaattcagacagtgccccgagcctacctctacagcagagaagcttggcttgaagaagggacctagaaaggcttacgaattgagccagcgctctctggattacgtcgcacagctgagagaccacggtaagactgtcggcgttgtggatacacggaagaaaacaaagctgatcagtcctcagaatctcagcgtgcgcaacaataagaagctgctgacctctcaggaacttcaaatgcagcggcagatccggcccaagtctcagaaaaacagacgtcgattgagcgactgtgaatcaactgatgtgaaacgagcaggtagccatactgctcaaaatagcgacattttcgttcctgagtctgatcggtctgactacaattgcacgggaggaacagaagtgttagctaatagcaaccgcaagcagcttataaagtgtatgccgtctgaacctgagacgataaaggcgaagcacggcagccccgctacagacgatgcatgtcctctcaatcagtgtgactctgtggtccttaatgggaccgtgcctaccaatgaggtcatcgtgtcaaccagtgaggatccgctgggaggcggcgacccaactgcgaggcacattgaaatggctgctttgaaagagggagagcccgattctagctctgatgcagaggaggacaaccttttcctaacccagaatgaccctgaggatatggatttatgcagccagatggagaatgacaactataaacttatcgagctgattcacggaaaagacactgtagaagtggaggaggactcagtgagcaggccacagcttgaatccctctccgggactaagtgtaaatataaggattgccttgaaactacgaagaaccagggtgaatattgtccaaaacatagtgaagtgaaggcagctgatgaggatgttttcaggaagcctggtctccccccccctgcaagcaaacctttaagaccaaccacgaagatcttctcctcaaaatccactagcaggatcgcaggactctccaagtcacttgaaactagttcagccctgtcaccgtcactgaaaaataagagcaaaggcattcaatccattctcaaggtgccacagcccgttccactcattgcccagaaacctgtgggcgagatgaaaaactcttgcaatgtgttgcatccacaatcacccaataactccaatcgccagggttgtaaagtccctttcggagagtccaaatactttcctagctccagtcctgttaatattctgctgtcctcccaatccgtcagtgacacgttcgtgaaggaagtgctcaagtggaaatacgagatgtttcttaatttcgggcaatgcggccctcctgcttctctttgtcagtcaatctctcgcccagtgcctgtgcggttccacaattacggtgactatttcaatgtgttcttccccctgatggtgctcaatacctttgagacagtggcacaggaatggcttaatagccctaatagagagaatttctatcagctccaggtcaggaaatttcccgcggattatatcaagtactgggagttcgcagtttacctggaagaatgtgagttggcaaagcagttgtaccccaaggaaaacgatctggtgtttctggctcccgaaaggattaacgaagaaaagaaggacaccgaaaggaatgatatccaggacttgcatgagtatcactccggatatgtgcataaatttaggcgaacgagcgtgatgcgcaatggaaaaaccgaatgttatctgagcattcagacccaagaaaacttccccgcgaacctcaatgagctcgtcaattgcatcgttatttcttctctggtgactacacagcggaaattgaaagcaatgtcccttttagggtcacgaaatcaactggctcgcgctgtcctcaaccccaaccccatggatttctgcaccaaggacctgcttactactacatccgaacgcatcatcgcatatcttagggacttcaacgaggatcagaaaaaagccatcgaaactgcctacgccatggtgaaacacagtccatctgtggcgaaaatatgtttaatacacggccccccgggtacaggtaaatccaagaccattgtgggcctactgtatagactactgactgagaaccagaggaagggtcactctgacgagaacagtaacgccaaaattaaacaaaaccgggtcctggtctgcgctccatccaacgctgcagtggatgaactgatgaagaaaatcatcctcgagtttaaggaaaagtgcaaggacaagaaaaaccccttgggcaactgtggagacattaaccttgtgcggctgggccccgaaaagtcaataaacagcgaggttctcaagttttcattggattcgcaggtgaatcatcgaatgaaaaaagaacttccatcacacgtccaggcaatgcacaagcgcaaagaattcttggactatcagctcgatgagctttctagacagcgggctctctgtaggggaggccgagagatacaaagacaggaactggatgaaaacataagcaaggtgtccaaggagagacaagagctggccagcaaaatcaaggaggtccagggaaggcctcaaaaaactcaatcaatcattatactggagtcccatataatctgctgtacattgtctacaagcggggggctcctgctggaaagcgcattccgggggcaggggggagtgcccttcagctgtgtgatagtggatgaggctgggcagagttgcgagattgaaacacttactccgttgattcacagatgcaataaactgatccttgtaggggatcctaagcagctgccacctacagtgatctccatgaaggcacaggaatatgggtatgatcaaagtatgatggctaggttttgtagactgcttgaggagaacgttgagcacaacatgatatcgcgattacccattcttcagctgacggtacaatatcggatgcatcccgacatatgcctgttccctagcaattatgtatataaccggaacctaaaaaccaaccgccagaccgaggccattagatgcagctccgattggcccttccagccctacctggtctttgacgtaggagatgggtccgagcggagggataacgatagctacattaacgtgcaggaaattaaactcgttatggaaatcatcaagctcataaaagacaaacgaaaggatgtgagttttcgtaacattgggattataacacattataaagcacagaagacaatgatccagaaagacctcgacaaagaatttgatcgaaagggctttttggcctccctccagcggcttaatgtgaccattacaagagcgaagtatagcctgttcattcttggacatctgcggacactgatggaaaatcagcattggaatcagttgatacaggatgctcaaaaacgcggtgcaatcataaaaacgtgcgacaagaattatcgtcacgatgccgtgaagatactcaagctgaaacccgtccttcagaggagtctgacgcaccctccgaccattgccccagaagggtcccggccccagggaggcttgccaagctcaaaactcgactctggctttgccaagacgagtgtggccgcaagtctctaccataccccctcagactcaaaagaaattaccctgaccgttacatcgaaagacccagagcgcccccctgttcatgatcagctccaggacccccggctgctcaagaggatgggcatagaagtcaaaggaggcatattcctatgggacccccagccaagcagcccgcagcatcccggcgctacaccccctaccggggagccaggcttcccggtcgtccatcaggacttgtcccacatacagcagcctgccgccgtcgtggctgcactctcttcccacaagcccccagttaggggcgaacctcctgcagcttccccggaggcgagcacctgccaaagcaaatgtgatgatcctgaagaggagttgtgccatcgccgagaggccagagctttctcggagggtgaacaggagaagtgtgggagtgaaacccatcatacgaggcgcaacagccgatgggacaaacgaacactggagcaggaggatagctcctccaagaaacggaaattgttatag

SEQ ID NO: 183980 - DNA, 8034 bp, Artificial Sequence
  derived and/or modified sequence
atgagcacatgttgttggtgtactcccggaggcgcaagtaccatagatttcctgaaacgctacgcttccaataccccctctggggagtttcagacggccgatgaggatctctgttactgcctcgagtgtgtagctgaataccacaaagcacgggacgaactgccttttctccatgaggttctctgggagctcgagactctcaggctcataaaccacttcgagaaatctatgaaagccgagatcggggatgacgacgaactgtatattgtggacaataatggcgagatgcctctctttgacattacgggccaggatttcgaaaataagcttcgggtacccctcctcgaaatcttgaaatacccgtacttattactgcacgagcgcgtcaatgagttgtgcgtggaggctttgtgtcggatggaacaggccaattgcagtttccaggtatttgataagcaccccggaatctatctgtttttagtccatcccaacgaaatggtgcggagatgggcaattctgaccgcgcgaaatttgggcaaggtggatcgcgatgattactacgatctgcaggaggtgttactttgcttattcaaggtgattgagctgggtttattagagagcccagatatttatacgtcctccgtgctggaaaaggggaagcttatcttgcttccctcacacatgtatgacactaccaattacaagtcgtattggttggggatctgtatgctactgactatcttggaagaacaggcgatggattctcttctgctgggctcagacaagcaaaacgatttcatgcaatccattttacacactatggaaagagaggcggacgatgatagtgtcgatcctttctggccagctttgcactgcttcatggttattctagatcggctgggatccaaagtctggggccagctaatggatccgattgtcgcatttcagactataatcaataacgcatcctataatagggagattcgacacattaggaactcatctgtacggaccaagctagaacctgagtcttacttggatgacatggtaacatgctcgcagatcgtgtataattataatcctgaaaaaaccaaaaaggactcgggctggaggacagcgatctgcccagattattgcccgaatatgtacgaggagatggagacactcgctagcgtcctccagagtgacattggccaggatatgagagtacacaattcaacattcctgtggtttatccctttcgtacagagcctgatggacctgaaagaccttggggttgcatatatagcccaggtagtgaatcacctgtactccgaagtgaaagaagtgctcaatcagaccgatgctgtgtgcgataaagtgactgagttttttcttttgatactcgtgtctgtgatcgagctacatagaaacaagaaatgtctgcacttattgtgggtgtccagccagcagtgggtcgaggccgtcgtgaagtgtgcaaagctccccacgaccgccttcaccaggtcaagtgagaagagctctggcaactgctcaaagggtaccgctatgataagttccctttcgttacactcaatgccatccaacagcgtccagctggcctatgtccagctcatcaggtctttgctgaaggaggggtatcagctgggacagcaatctctgtgtaagcgcttctgggataaactcaatctattcctgaggggcaacctttctttgggctggcagctaacatcccaggaaacacacgagcttcagtcgtgccttaagcaaattatcagaaatattaaatttaaagcccctccatgcaatacctttgtggaccttacaagcgcttgcaagatttctcccgcttcctataacaaggaggaatccgagcagatgggaaaaactagcaggaaagatatgcattgcttagaggcaagctcacctacgttttccaaggagcccatgaaagtgcaggacagcgtcctcataaaagcagataataccatagaaggtgacaataacgaacaaaattatattaaggatgtgaagctggaagaccacctgttggcaggttcttgtttaaaacagtcttccaaaaatattttcaccgaacgtgctgaagatcagatcaagatcagcacacgaaaacaaaagtccgtcaaagagatttcctcatacaccccgaaggattgtacctctcgtaacggcccagagaggggatgcgaccggggaattatcgtgtccactaggctactcacagatagtagcacagatgctttggagaaggtcagcacatctaacgaggatttttcccttaaagacgacgcccttgccaaaaccagcaagaggaaaactaaagtgcagaaagatgagatttgcgctaaattgtctcatgtgattaaaaagcagcaccgtaaatcaacattggtcgataacacaatcaacctcgacgagaatctcacagtgtcaaatattgaatcgttctactccaggaaagatacaggagttcagaaaggtgacggatttatccacaatttaagcttagaccctagtggtgttctggacgataagaatggggagcagaaaagccaaaataatgttttgcccaaggagaagcagttgaagaatgaggaactggttatttttagttttcatgaaaacaattgcaagatccaggagttccatgtggatggcaaggagctgataccttttactgaaatgacgaacgcttcagaaaaaaagtcatctcccttcaaagacctgatgactgtccccgaatccagagacgaagaaatgagcaactctacttccgtgatttactccaatttgaccagagaacaagcaccagatataagtcccaagtctgacactcttacggactctcagatcgatagggaccttcataaactttcattgttggctcaggccagcgttatcacattcccctccgactcaccccagaatagcagccagctgcagcgcaaggtcaaggaggacaagagatgcttcacagctaatcagaataacgtgggcgataccagcagagggcaggtaatcatcatttccgatagtgacgacgatgatgatgagcgcatcctttctctagagaaactgacaaagcaagataaaatctgtctggaacgagaacatcctgaacaacatgttagtaccgtgaatagtaaggaggaaaagaatccagtcaaggaagagaaaaccgagacgctcttccagtttgaagagtctgacagccaatgtttcgaatttgagtctagctccgaggtcttcagcgtttggcaggaccatccagacgataataatagcgtgcaggatggagagaagaaatgtctcgcacccatcgcaaatacaacaaacggccaaggttgcactgactatgtcagtgaggtagtgaaaaagggcgcagagggaatagaggaacatactcggccaaggagcatttctgtggaagagttttgcgagatagaagtgaagaaacctaagagaaagcgctcagaaaaaccaatggcggaagatccagtccggccttcgtccagtgtcaggaacgaaggccagtctgacacgaataagcgtgatctggtaggaaatgactttaagagcatcgatcgcagaacctcaacccctaacagccggatacaaagagcaactactgtttcccaaaagaagagcagcaaactttgcacgtgcaccgagcccatcaggaaggtgcctgtctcaaagacgcctaaaaagacccactcggatgccaaaaagggccaaaatcgatcctccaactacttaagctgtagaactaccccagccattgtgccacctaagaaattcagacagtgccccgagccaactagtaccgctgagaaattaggcctaaagaaggggccacgcaaggcctacgaactgtctcagaggtccctagattacgtggcacagctccgggatcacgggaagacagtaggcgtcgtggacacacgcaagaagactaaacttatttcaccccagaacctatccgttcgaaacaataaaaaacttctcacatcccaggaactccagatgcagagacaaattagacccaagtctcagaaaaacaggaggaggctgtccgactgtgagagcacagatgtgaaacgcgctggttctcacactgctcagaactctgacattttcgtgcctgaatccgatcgctccgattataattgcacagggggaactgaagtgctcgccaactcgaatcggaagcagctgataaagtgtatgccgagcgaaccggaaacaatcaaggccaagcacgggtcccctgctacggatgacgcctgtcctctgaatcaatgcgactccgtggtactgaacggtactgtccccaccaatgaggttattgtgagcaccagtgaggacccccttggaggaggggacccaaccgcgcgacacatcgaaatggccgcactcaaggagggggagcccgatagcagctcagacgctgaagaagataacctgtttttaacccagaatgatccagaggatatggacctgtgtagtcagatggagaatgacaattacaagctcattgaacttatacacggaaaggacaccgtggaagtggaggaagactccgtttcccggcctcagcttgaatctctgagcggtacgaaatgtaagtataaggattgcctggagactaccaagaaccagggagaatactgccccaaacattccgaagtaaaggccgctgatgaggatgtttttagaaagcccggattacccccacccgcttcaaagcctcttcgccctacaaccaagatattctcttccaaaagcacctctcgtatcgcaggcctgagcaaaagccttgagaccagtagcgccttgtctccatctctgaagaataagagcaaggggattcaatctattctaaaggttcctcagcctgtccccctaatagcgcagaaaccggtgggcgagatgaagaatagctgcaacgtgttgcatccccagtctcctaacaatagcaataggcaaggctgtaaggttccttttggtgagagcaagtacttcccctccagttccccagttaatatcctcctgagcagccagagcgtcagtgacacttttgttaaggaggtgcttaagtggaaatacgagatgttcctgaatttcggacaatgtgggcctccggcaagcctctgccaatcaatctctaggcccgttcctgtgcgtttccataactatggagattatttcaacgtcttttttccactcatggttttaaacacgttcgaaactgttgcccaggaatggctgaatagccccaatagagagaatttttatcagctgcaggtgcggaagtttcccgctgactatatcaagtactgggaattcgccgtttatctcgaggagtgtgagcttgcaaaacagttgtatcctaaggagaatgatctggtcttcttggcacccgaacgcattaatgaagagaaaaaagatactgagagaaatgatatccaggaccttcacgagtatcattccgggtacgtccacaagtttcgccgaacatcagtgatgaggaatggcaagaccgagtgttatctgtcaattcaaacacaggagaacttccccgcaaacttaaacgagctcgtgaactgcatcgtcattagttccctggtgactacacagcgaaagctgaaggccatgagtcttctaggttctcggaatcaattggctagggcagtgctaaaccctaatcccatggacttctgcacaaaagatctgctgacaacgacaagtgagcggattatcgcctacctgcgggattttaatgaggatcaaaaaaaggctattgaaaccgcctatgcgatggtcaagcactcgccaagcgtcgccaaaatttgtctaatccatggtcctccaggcacaggtaaaagcaagacgatcgtgggactgctatatcgccttctgacagagaatcagagaaaaggacattcagatgagaattcaaacgcaaaaattaaacaaaatcgtgtgttggtttgcgcaccatcaaacgccgctgtcgatgaattaatgaagaaaatcatcctggagtttaaagagaagtgcaaagacaaaaagaaccccttgggcaactgcggagacatcaacctcgtgcggctcggaccggagaaatcaatcaattcagaggtcctgaaatttagtttagactcccaggtgaatcaccgcatgaaaaaagagctgccctcccacgtacaggccatgcataagcgtaaagagtttctggactaccaactcgacgaactgtctagacaaagggccctctgtcgagggggtagggaaattcagaggcaggagctggatgagaatatctctaaggtcagcaaggaacggcaagagctggccagcaagattaaagaggtccaaggacgcccacaaaagacccagagtattatcatcctggagtcgcacattatatgctgtaccctgagcacttcaggcggtcttttactggagagcgcattcagggggcaaggtggagtgcctttttcttgtgtgatagtggatgaagccggacagagctgcgagatcgaaaccctcaccccgctcatacacagatgtaataaactgatcttagttggcgaccccaagcagttgccacctaccgtcatctcaatgaaggctcaagaatatggatacgatcagtctatgatggcccgtttctgcagactcttggaggaaaatgtcgaacataacatgatctctcgcctccccatcctccagctcaccgtacaataccggatgcaccccgatatttgcctgtttccttcgaactatgtatataatagaaatctcaagacaaatcgacaaactgaggctattcgctgctcatccgactggccctttcagccctatttagtgtttgatgtcggagacggatctgagaggagagacaacgactcatatattaatgtgcaagaaataaagctcgtgatggagataattaaactgatcaaggataagagaaaggacgtcagcttcaggaatattgggatcataacccactataaggcccagaagactatgattcagaaggatctggataaggaattcgatcggaaggggcctgccgaagtcgacaccgtcgatgctttccaggggaggcagaaggattgcgtgatcgtcacatgtgtacgcgcaaattcgatacagggatccattggttttctcgcctcattgcagagactgaatgtgaccattaccagggccaagtacagtctgtttatcctggggcacctgaggactctaatggagaatcagcattggaatcagctgatccaggacgcccagaagcgaggagccataatcaagacatgcgacaaaaattatcgccatgatgctgtgaaaatcctaaagttgaagccggtgctgcagcgtagcttgacacatccccctactattgcaccagaagggagccgccctcagggcggactcccatcatcaaagttagacagtggattcgctaagaccagcgtcgccgcatctttatatcatacccccagcgatagcaaggaaatcacacttacggttacctccaaggacccagaacgaccccctgtacatgatcagctgcaggatcctagactgctgaagcgcatgggaatagaggtcaagggtgggatcttcctctgggatccgcaaccctcttctccacaacaccccggtgccacaccaccgacaggcgagcctggatttccagtagtgcatcaggatctgagccacatccagcagcctgcagcagtagtcgccgctttatcatctcacaaaccccctgtgagaggggagcccccagcagcgtcaccggaggcgtccacttgccagagcaaatgtgacgacccggaagaagaactttgccaccgccgtgaggcccgtgccttcagcgaaggtgagcaggaaaaatgcgggagtgagacacaccatacaaggcgcaattcacgctgggacaaaaggacattagagcaggaggactccagcagcaaaaagagaaaattgttgtaa

SEQ ID NO: 183981 - DNA, 7934 bp, Artificial Sequence
  derived and/or modified sequence
atgtcaacatgctgctggtgcacccctgggggtgcgagtaccatagactttctgaagcgatacgcatctaataccccctccggtgagttccaaaccgccgacgaagatctttgctattgcctggaatgcgtagccgaatatcacaaggcacgggacgagctaccattcctgcatgaagtgctatgggaattagagacattaagactgatcaaccacttcgaaaagagtatgaaggccgagataggagacgacgatgaattgtacattgtcgataataatggcgaaatgcccttgtttgacatcacaggacaggacttcgagaataagttgagagtccccctgttagagatcttaaagtacccctatcttctgctacacgagcgggtcaatgaactctgcgtggaggctctgtgtcgtatggagcaggccaattgttctttccaggtgttcgataaacacccgggtatctacctgttcctggtgcatccaaatgagatggtaaggaggtgggccatccttacagctaggaatttaggaaaggtggatcgtgacgactactatgatttgcaagaggtgttgctgtgtctttttaaggtgatcgaactgggcttactcgagtcccctgatatctatacgagctcagtgttagagaaagggaaattaatcctgctgccttctcatatgtatgacaccaccaattacaaatcttattggctgggcatttgtatgctgctgactattctcgaagaacaggcgatggactcccttctcctgggtagtgataagcagaatgactttatgcaatccattctgcatactatggagcgagaggctgacgatgattcagtggatcctttttggcctgccctgcattgtttcatggtcattctggaccgcctcggttccaaagtgtggggccagcttatggatcctatcgtggcctttcagacgatcataaacaatgccagttacaaccgggagatcagacacatcaggaacagcagtgtccggaccaagctggaacctgaatcctacttggacgatatggtcacttgttcacagattgtctacaactataatcctgaaaagacaaagaaagactccgggtggcggactgccatctgccctgactactgccccaatatgtacgaagagatggaaacactggcttctgtactgcagtctgatattggtcaggacatgagagtccacaactctacttttctgtggtttatacccttcgtgcagtctctgatggatctgaaggacctcggagtggcatatatcgcccaggtggtgaatcatctgtattctgaagtgaaggaggtgttaaaccagaccgacgccgtatgtgataaagttaccgagttttttctattaattcttgtgtccgtgatcgagttgcacagaaataagaagtgcctgcatctgctctgggtctcttcacagcaatgggtcgaagccgtcgtcaagtgcgctaaactgcccacaaccgccttcacccgtagctccgaaaagagttccgggaactgttccaagggcaccgctatgatcagttcactcagccttcacagtatgcccagtaactcggttcagttggcttatgttcagctgatcaggtcgcttctgaaggaggggtaccagctcgggcagcaatctttatgtaagagattctgggacaaattaaacctattcttgaggggcaacctatcacttggctggcaactgactagccaggagacccacgagctgcagtcctgcctcaaacaaattataaggaacatcaaattcaaagctcccccttgcaatacgtttgttgatttgacctccgcctgcaagatttcacctgcctcttataataaggaggaaagcgaacagatgggtaaaacttcacgcaaagatatgcattgtctggaagcctcttcgcctacctttagcaaagagccaatgaaggtgcaggatagcgtgctaattaaggctgacaacaccattgaaggcgacaacaatgaacaaaattacatcaaagacgttaagctggaggatcatttactggcaggcagctgcctaaaacagagctctaaaaacatcttcactgaacgcgcagaagaccagataaaaatctctactagaaagcagaagtcagtcaaggaaatctcaagctacaccccaaaggactgtaccagccgaaatggtcccgagcgcggatgcgaccgcggaattatcgtctctacacgtctgctgaccgattcttccaccgacgccttggagaaagtttccacatccaacgaagacttcagcctgaaggatgacgctctggccaaaactagcaagagaaaaactaaggtgcagaaagatgagatttgtgcaaagctatcccatgtgatcaaaaaacagcatcgcaagagcacgctggtggacaataccattaatctggatgaaaacctcaccgtctccaacattgaatctttttactctaggaaggatactggtgtccagaagggggatggttttattcacaatctgtctctagatccctccggagtccttgatgacaaaaatggcgaacagaagagccaaaataatgtactgcctaaagaaaagcaattgaaaaatgaagaattggtgattttcagctttcatgagaataattgtaagatccaggagtttcacgtggacggaaaggagctgataccgttcaccgagatgaccaacgcctcggagaagaaatcctcaccattcaaagatttaatgactgtacccgaatcacgtgacgaagaaatgtcaaacagcaccagtgtcatatacagcaatttgaccagagagcaggccccagacatttcccctaaatctgatacgctaactgattctcagatcgatcgggacttacataaactttctctccttgcacaagcaagcgtgatcacttttcccagcgacagcccccagaattcctcccagctgcagcgcaaagtcaaagaggataagaggtgttttacagccaaccagaacaatgtgggggacacgtcccgtggacaggtcataatcataagcgactcggacgacgatgatgacgaacgcatattgagtctggaaaaactgaccaagcaggacaagatctgtctcgaacgggaacaccccgaacagcatgtttctaccgtcaattccaaggaggagaaaaaccctgtgaaggaggaaaaaaccgaaacgctattccagttcgaggagtccgattctcaatgctttgaatttgaatctagtagcgaggttttctccgtgtggcaggaccatccagacgacaataatagtgttcaggatggtgagaaaaagtgcctagccccaattgcgaacacaacaaacggacagggatgtactgattacgtatccgaagttgtgaagaaaggtgccgagggtatcgaggaacatacaaggccaaggtccatcagcgtggaggagttctgcgagatcgaagttaagaagcccaagcgaaagcggtcagaaaaacctatggccgaagatccagtgcgaccgagcagcagtgtgcggaacgagggacagtcagacaccaataagcgcgatttggtaggaaacgattttaaaagcatagataggaggacatctactcctaatagtaggatccaacgagccaccactgtctctcagaaaaaaagctctaaactatgcacatgcaccgagcctattagaaaggtgcccgtgtctaaaacccctaagaaaacacatagcgatgctaaaaaagggcagaacaggagcagcaattacctttcatgtaggactacaccagcgattgtgcctcccaagaagttcagacagtgtcctgagcccaccagcactgctgagaaacttggtctcaagaaggggccacgcaaagcctacgagctcagccagcgctctttggattacgtagcgcagctgagagatcacggaaagaccgtcggcgttgttgatactcgaaaaaaaactaaactgataagcccacagaatttatcagtgcggaataataaaaaattattaacatcacaggagttgcagatgcagcggcagatacgaccgaaatctcagaagaaccgcagaagactgtccgattgtgaaagtaccgacgttaaaagagccggttcacacaccgcccagaattctgacatatttgtgccagagtccgacaggtcagattataattgtacggggggaacagaggtgctggctaattctaatcgcaagcaactcatcaagtgtatgcccagcgagcccgaaactatcaaggctaagcatgggtcccctgcgacagatgacgcctgtccactgaatcagtgtgatagtgttgtcctcaatgggaccgtgccaacaaatgaagttatcgtatctaccagtgaagatccattagggggaggggacccaaccgccaggcatatagaaatggctgctctgaaagaaggcgaacccgatagctcgagtgacgctgaggaagacaacctttttctgacgcaaaacgatcctgaggacatggacctgtgctctcagatggagaacgataattataaactcatcgagctgattcacggcaaggatacagtggaggtggaggaggacagtgtatcacgaccacagctggagtcgctttccggcaccaagtgcaagtacaaagattgtttggagacgacaaagaaccagggagagtactgccccaagcacagtgaggttaaggccgctgacgaagatgtgttccgaaaaccaggccttcccccaccggctagcaaacctctgaggccaacaactaagatcttttcctctaaaagtaccagccgcattgcaggactgtcaaagagtctggaaaccagctcagccctcagccccagtttaaaaaacaaatccaagggtattcaaagtatcctcaaagtgcctcaaccagtgccacttatcgcacagaagcccgtgggcgaaatgaagaattcttgtaacgttttgcacccccagagccctaacaattcaaaccgacaggggtgtaaagttccattcggtgagtccaagtatttcccctcctctagccctgtgaacatcttgctctcaagccagagcgtgtccgacaccttcgtcaaagaggtgctgaaatggaagtacgaaatgtttctaaattttggccaatgtgggccaccagcaagcttgtgtcagtcaatcagtcgacccgtgcccgtgaggttccataactacggcgattactttaatgtgttcttcccactgatggtgcttaatacctttgagaccgtggcccaggaatggttaaatagcccgaatagggaaaatttctaccagctgcaagtgcgcaaattcccagccgactatataaaatattgggaattcgcagtttacctcgaggaatgcgaacttgctaagcaactgtatcctaaagaaaacgatctggtgttcctagcacctgaacgtatcaatgaggaaaaaaaggacactgagagaaacgacattcaggaccttcacgagtatcatagcggatacgttcataaattcagaaggacttctgtgatgcgtaacggcaaaacagagtgttatcttagtatccaaacccaggagaatttccccgcaaatctcaacgagctggtgaactgtatcgttatttcttctcttgtcacaacccagcgcaaactcaaggcaatgtctctactcggcagtcggaaccagcttgccagagctgtgctcaatccaaatcccatggatttctgtactaaggatctgctgaccacaacgtcggagcgcataattgcgtatctgagggatttcaatgaggaccagaaaaaggccatcgaaacggcctatgcgatggtgaaacattcaccctccgtggccaagatctgcctgatacacggacctccgggaacagggaagtccaagactatcgtggggctattatataggctgttgaccgagaatcagagaaagggccactccgatgagaactcgaatgccaagatcaaacagaaccgcgttctggtctgcgccccatcgaacgccgctgtggacgagcttatgaagaaaatcatcctcgagttcaaagagaagtgtaaggataaaaagaaccccctgggaaactgcggtgatataaacctggtccgtctgggaccggagaaaagtataaattcagaagtgttaaaattttcactggactctcaggtgaatcatcggatgaaaaaagagttgccatctcatgttcaggctatgcacaagaggaaagaattcctcgactatcagctggatgagctgagtagacagcgcgctctctgccgtgggggtagggagatccaacggcaggagttggatgaaaacatttctaaagtgagtaaagagcgccaggagctggcctccaagatcaaagaagtgcagggccgtcctcaaaagacacagagcatcataatcctcgagagccacatcatctgctgcaccctgagtacttcaggaggtttactcctggaaagcgctttccgtggccaggggggtgttcccttctcctgtgtcattgtggacgaggccggacagtcatgcgagatcgaaaccctgaccccattaatacacagatgtaataaactgatcttagtgggtgaccccaagcagttaccccctacagttatctcaatgaaggcccaagaatacgggtatgaccaatcaatgatggcgaggttctgcagactcctggaggagaacgtagagcacaatatgatctccaggcttcccattcttcagctgaccgtccagtatcgtatgcacccagacatatgtctgttccctagtaactatgtttacaacagaaatttaaagacaaaccgccagactgaagccatccggtgttcaagtgattggcccttccagccatacctggttttcgacgtcggtgacggatccgagagacgagataatgacagctatattaacgtccaggagatcaaacttgtcatggaaattattaagctgatcaaggataaaaggaaagacgtctcctttcggaatatcggcataatcactcactataaagcccagaaaaccatgatccagaaagatttggacaaagaattcgatcggaagggctttttagccagcctgcagcgtctgaacgtgacgattaccagagccaagtattctctcttcatcctggggcatctgcgaactctaatggagaaccaacactggaatcagttaatacaggatgcccagaaaagaggagccattatcaagacttgcgataagaattatcgtcacgatgcagtcaagatcctaaagctcaagcctgttctccaacgaagcctgacgcatcctccgaccatagctccggaagggtctaggccgcaaggaggtctgcccagttctaaactcgactcaggatttgcgaaaacaagcgtagctgcttctctgtaccatacccctagtgatagcaaggagataactctgactgtaactagcaaggacccagagagacctcccgttcatgaccaacttcaagatccgaggctgcttaaacgaatggggatagaagttaagggtggcatttttctgtgggacccccagccatcctcaccgcagcatccaggagccacaccccctaccggggagcctggctttcctgtggttcaccaggatctgtctcatatccagcagccagctgcagtggtggcagccctgtctagccacaaacccccagtacgtggggaacccccagcagcctcacctgaggcttctacttgtcagtcaaagtgtgatgatcccgaagaagagctctgtcatcgcagggaggccagggctttctctgagggcgaacaagaaaagtgcggttccgagactcaccatacccgtcgaaattcacgctgggacaagaggacactcgagcaggaagatagcagctctaaaaagcggaaactgttgta

SEQ ID NO: 183982 - DNA, 11100 bp, Artificial Sequence
  derived and/or modified sequence
cttccgctggtggcctagagcggggcccggtatggaggtgggctagaggccgacgccagccagagagcgaaatgttcttttggggccagagtctgggcatatatgaatgcaaatccgtgtttgttcacaactaagcccagctgagacgatcacttttctgtaggccatttgtccaggtacagaatgagcacatgttgttggtgtacgccaggtggtgcttccaccattgacttcctaaagcgctatgcttccaacactccgtccggtgaatttcaaacagccgacgaagacctctgctactgcttggagtgtgtggctgagtaccacaaagcaagagatgaattgccattcttgcatgaggttttatgggaattagaaaccttacgtctcataaatcactttgaaaaatccatgaaggcagaaattggagatgatgatgagttatatatagtagacaataatggagagatgccactgtttgacatcactgggcaagactttgaaaataagcttcgagttcctcttcttgaaatactgaaatatccttacttgcttctacatgaacgtgttaacgagttatgtgttgaagcactttgtcggatggaacaagccaattgctcctttcaggtgtttgataaacatccagggatctatttgtttttagtccatcccaatgaaatggttcggcgttgggctatcttgactgcaagaaacttggggaaagtggacagagatgattattatgacttacaagaagttttactttgcctttttaaagtcattgagttggggcttttagagagtccagacatttatacttcttctgtcctagagaagggtaaactgattcttctgccctcacacatgtatgatactaccaactacaaaagctattggttaggtatttgcatgttgctgaccattcttgaggaacaagccatggattccctgttgttgggctcagacaaacaaaatgattttatgcaatcgatacttcacactatggagagggaagcagatgatgatagtgtggatcctttctggccagcgttacactgttttatggtgattctggatcgccttggatctaaggtctggggtcaacttatggatcctattgtggcatttcaaaccattatcaacaacgcaagctacaatagagagatccgacatatacggaacagctctgtaaggaccaagttagaaccggagtcctatttggatgatatggtgacttgcagccagatcgtatacaattataatcctgaaaagaccaaaaaggattctggatggagaacagccatttgcccagattattgtcctaacatgtatgaagaaatggaaacattagccagtgtacttcagtcagatattggtcaagacatgcgtgttcataacagcacatttctatggttcatcccttttgtccagtccctcatggatcttaaggatttgggtgtggcttacatagcacaggttgttaatcatctgtactctgaagtcaaagaagtcctcaaccaaacagatgctgtgtgtgacaaagtcactgaattttttcttctaattttggtatcagtgattgaactgcatagaaataaaaaatgtttgcatttgctgtgggtaagttcccagcaatgggtggaagccgtcgtcaaatgtgccaagcttcctaccactgcgtttacacggagttctgagaaatcatctggaaattgctccaaaggaacagcaatgatatcttcactgtcattgcattccatgccatctaactctgtacaacttgcttatgtgcagctgattagaagtctccttaaagaaggttatcagcttgggcagcagtctctttgcaagcgattctgggataagctcaacttattccttagaggaaatttatctctaggttggcagttgactagtcaggaaacccatgagctacaaagttgcttaaagcaaattattagaaacataaaattcaaagcacctccatgtaacacttttgtggatctgacttctgcatgtaaaatctctcctgcatcttataataaagaagaaagtgaacaaatggggaagacgtctagaaaagatatgcattgtttggaagcttccagcccaacattttctaaagaaccaatgaaagtgcaagacagtgtattgatcaaagcagataacactatagaaggtgacaataatgagcaaaattatataaaggatgtgaaactagaggaccatctcttagctgggtcatgcttaaagcagagtagtaaaaacatttttactgaaagagctgaagatcaaattaaaataagtacaaggaagcagaagtctgtaaaagagatctcttcatatacaccaaaggactgtacttcaagaaatggtccagaaaggggatgtgacagaggaataatagtatcaacacgtttgttgactgattctagcactgatgctttggaaaaagtgtccacatcgaatgaagatttctctttaaaggatgatgctcttgctaaaacctcaaaacgaaaaactaaggtacagaaagatgaaatctgtgcaaagttatcacatgtaataaagaagcaacacaggaagagtactttggtcgataatactatcaatttagatgaaaatttgactgtatctaacattgagagtttctattcaaggaaagatacaggagttcagaaaggagatggtttcatacacaatctttctttagaccctagtggtgttctggatgataagaatggagaacaaaaatctcaaaacaatgtattgccaaaagagaaacaattaaagaatgaagaattagttattttctctttccatgaaaacaattgtaaaatacaggaatttcatgttgatggtaaagaattgatcccttttacagaaatgaccaatgcttcagagaagaaatcatctccctttaaagatcttatgactgtacctgaatcaagagatgaggagatgagtaatagtaccagtgtgatttattctaacttgacaagagaacaggcccctgacatcagtcctaaatctgacaccttaacggattctcagatagacagagaccttcacaaattatctttactagctcaagccagtgttattacgttcccatccgattcacctcagaactcatcgcagctgcaaaggaaagtaaaagaagataaaagatgtttcacagctaaccaaaataatgttggagatacctcccgtggacaggttattattatttcagattctgatgatgatgatgatgaaagaatcctgagtcttgagaaactcactaaacaggacaaaatatgccttgagagggaacatccagagcagcacgtttcaacagttaatagtaaggaggaaaagaatccagtaaaggaagaaaagacagagactctttttcagtttgaggaatctgattctcagtgttttgagtttgaaagttcatctgaagtgttttcagtttggcaagatcatccagacgataataattcagttcaagatggtgagaaaaaatgtttggctcctatagccaatactacaaatggtcagggttgtacagattatgtatctgaagttgttaaaaaaggagcagagggcattgaagaacacacaagaccacggagtatttctgttgaagaattttgtgaaattgaagtaaaaaagcctaagagaaaacgatctgaaaaaccaatggctgaagatcctgtgaggccttcatcttctgtcagaaatgagggccagtctgatactaataagagagatcttgtgggaaatgattttaaaagtattgatagaaggacttcaactcccaattcacgtattcagagagccactacggtttcacaaaagaagtcttcaaagctttgtacttgtacagaacccatcaggaaagttccagtttctaagacccctaagaaaactcattcagatgccaaaaaaggacagaatagaagttcaaattacctaagttgtagaacaactcctgctatagtgccgccaaagaaatttcgtcagtgtcctgagccaacttcaacagctgagaaacttggcctgaaaaagggtcctcgtaaggcatatgagttgtcccagcggtctttggattatgtagctcaattacgtgatcatggcaaaactgttggagtagttgatacccgaaaaaagactaaattaatttctcctcagaacctgtctgtcagaaataataagaaacttctgactagtcaagaacttcagatgcaaaggcagatcagacccaaatcacaaaaaaatagacgaagactttctgattgtgaaagtacagatgttaaaagagcagggtcacatacagcacagaattctgacatatttgtaccagaatctgataggtcagattataattgtacaggaggaactgaggtacttgccaacagtaacagaaaacagttaataaaatgcatgccttctgaaccagaaaccataaaagcaaaacatgggtctccagcaactgatgatgcttgccctttgaaccagtgtgattctgtagtgttaaatggaacagtaccaacaaatgaagtaattgtctccacttcagaagaccctctgggtggaggtgatccaacagcacgtcatatagagatggcagctttgaaagaaggagagcctgactccagcagtgatgcagaggaagataacttatttttaacccaaaatgatcctgaagatatggatttatgttcacaaatggagaatgacaattataaactcattgaactaattcatggaaaagatacagttgaggttgaagaagattctgtaagtcggcctcagttggaatctttgagtggcacaaagtgtaagtacaaagattgtcttgaaaccacaaaaaaccagggtgaatactgcccaaaacactctgaagtgaaagcagcagatgaagatgtatttcgtaaacctggcttgcctcctcctgcatctaaacctttgagacctaccactaagatttttagctcaaagagtacttcacgaattgctggtctttctaaatctttggaaacttcttcagcactttcaccgtctctaaaaaataagtcaaaggggatacagtcgattttgaaagtaccacagccagttcccctcatagctcagaagccagttggtgaaatgaagaattcgtgcaatgttcttcatcctcagtctccgaataattccaacaggcaaggttgcaaagttccatttggtgaaagcaaatattttccatcttcctctccagtaaacattcttttgtcatcacagtctgtctctgacaccttcgttaaagaggtcttaaaatggaaatatgaaatgtttttgaactttggtcagtgtgggccccctgcaagtctttgtcagtccatctcaagacctgtgcctgtcagatttcacaattatggagattattttaatgtttttttccctttgatggtattgaatacttttgaaacagtggcacaagaatggctcaactctccaaatagagagaatttctatcagttgcaagtacgaaaatttcctgccgattatataaaatactgggagtttgcagtttatctggaagaatgtgaactggctaaacagctttatccaaaggaaaacgatttggtgtttttagctcctgagagaataaatgaagagaagaaagatacagagagaaatgacatacaagatctccacgaatatcattctggttatgttcataaatttcgccgcacgtcagtcatgcgtaatgggaaaactgagtgttacctttccatccagactcaagagaactttccggccaatttaaacgaacttgtgaattgtattgtaatcagttctctggtaactacacaaaggaagttgaaagccatgtctctgttgggtagtcggaaccaactggctagagctgttctgaatccaaaccctatggacttctgtacaaaagatttactgactacaacatctgagagaattattgcgtacttaagagatttcaatgaagatcaaaagaaagcaatagaaactgcatatgctatggtgaaacactcaccatcagttgccaaaatctgcttgattcatggaccacctggaacaggaaaatcaaaaactattgttggcctcctctatcgtctactgacagagaaccagaggaaggggcattcagacgaaaactccaatgccaaaatcaaacaaaaccgtgtcctcgtgtgtgcaccttccaatgcagctgttgatgaactcatgaaaaaaattatccttgaattcaaagaaaaatgtaaagacaagaagaatcctttaggaaactgtggagatataaatttagtacgactgggtccagaaaagtctattaatagtgaggttctaaagttcagtttggacagccaagtaaaccacagaatgaaaaaagagttaccttctcatgttcaggcgatgcataaaagaaaggaatttctagattatcagctggatgagctttcccggcagcgagctctatgccgaggtggacgggaaatacagaggcaagaattagatgaaaacatttccaaagtttctaaggaaaggcaggaacttgcttctaaaattaaagaggttcaaggacgcccacagaaaacacagagtatcatcatcttagagtcccatatcatctgctgcacgttgagcacaagtggtggtttactacttgagtctgctttccgtgggcaagggggtgtccccttcagctgtgtcattgttgatgaggctggacagtcttgtgaaattgagactcttactccactcatccatcgctgcaataagctcatcctagtaggagatcctaagcagctccctccgacagtcatctctatgaaagcacaggagtatggctacgaccagtcaatgatggctcgcttctgcagactgctggaagagaatgtagaacacaacatgatcagcaggctgcccattctacagctcactgttcagtacaggatgcatccagacatatgcctcttcccttctaattatgtttataacagaaacttaaaaacaaatagacagacagaagccattcgatgttcatcagattggccatttcagccataccttgtgtttgatgttggagatggttcagaaagacgggataatgactcatatataaatgttcaagaaataaaactggtgatggaaataattaagcttattaaagacaaaagaaaggatgttagttttcgaaacattggcataataactcattacaaggcccagaagacgatgattcagaaggatttggacaaagagttcgatagaaaaggaccagcagaagtagacactgtggatgcattccagggtcggcagaaggattgtgttattgttacgtgtgtcagagcaaatagcatccaaggttcaattggattcctggcaagtttgcagagattgaatgtcaccatcacacgagccaagtacagcctcttcatcctcggacatttgaggaccctgatggaaaaccagcattggaatcagctgattcaggatgctcagaagcgtggtgccattattaagacctgtgacaaaaactatagacatgatgcagtgaagattctgaaactcaagcctgtgctgcagagaagtctcactcaccctcctaccatagccccagaggggtccagaccccagggtggtttgcccagcagcaagctagacagtggatttgccaagacatctgttgctgcttctctataccacacaccctctgactccaaggaaattactcttactgttacttcaaaggaccctgaaagacctcctgttcatgaccaacttcaggacccacgactgctgaagaggatgggcattgaggtcaaaggaggaatattcctttgggatccacaaccctcgagcccccagcatcctggagcaacacctcctacgggcgagccgggcttccctgtcgttcaccaggacctgagccatatacagcagcccgctgctgtagtggctgctctgagcagccacaaacctcccgtgcggggcgaacctccagctgccagtcccgaggcttccacgtgtcagagcaaatgtgatgacccggaagaggagctctgtcacaggagagaggccagggctttcagtgaaggggagcaggagaagtgtggttccgagacccatcacaccaggaggaactctaggtgggacaagaggacactggagcaggaggacagcagttccaagaaaagaaagcttttataggaaagcccagtgacatgggccagcagccacagcatattgtaaactgaagatgaccagctcgtgggaccatctagataagcttgttttttgtaaggagtttgtgtgctgttggaaaacatggaaaatgcatccttaacacctgagcctctggtcatcttcagtattttctgtcatttgcaaaagctttcagagggcattgtgtatccgtaataatgtccttgaagtcagagactggaaatgttgatctcttagtcttctatagacaaggaggtcagactggagtgaatgttgtaaaagttgaaatgtatatttgtatagcaaataacaaaatccttttaaaatttaatctagtagaccgcttttctttccccctgtttaaaatgttaatcagttttcaacagaacaaactttatattaccaaaaaaaaaaagatgggaggagggcgggtcctttcaaccattgttagagcaagacagataattatttaacagcctagcttggaataagctgagttagtgctggtgggtcaggtgtctctggctctattaaaaaaagcaaaaacccccccaaaaacctggagtctcctaggggacactttgggcagcacggttatgttaggtaaagtcttgctgacatggtgcatttttagatagagtgcattggcccagggtattatatttctgtgatgagttcatttacctgtttcagtatgcacatagttccctagctaaaattcctaatcttcttgagagagaagaatatggagtgaaagaataattcttgagctatcattcaaatgctcccagcatattgtgagccttgtgtgactggtgaggtacagacatttggttgccaaatgctagattagcgctgggtcagctgtggaagaatcgcctcagcttacagattgtcagacagatctaactagttttccagaaagcctgggaagctgtgtgttcaacatttcccaagggattctgatcaccaggcagcttgggaaccactggggcaggccaaatagaatattttgggcgggaaagaagcacccgatttaaaatgaagcgtaaccagaggagttcagaactgggaagagagtggtagacttcctgtgatcttcagaaatcatctacctggtaaaaatacatgctgtttagaatatctgataggtgtttccagctactattagaggtgatagtgcttttgtgggggaaaaaattggtcatggtgaatggagatcgaggaagctcgggacaagggaggggtgggctgcctgattttgtccagttttccaaatatccacgcagtgaactggagtatcctaaacatgagaatgtacagttgacagttgtaaaaactagggatctgtagtgaatgctgtgcagccccatatctcatttgggggtaggaaaatagctgaagattcatgtgcattatttgacatttcctttgtcatctgctttttaagcaaaaaagggttttgtgttagaaattctacttgagcagattataaagagctttaaaaaacaactttcggttgccaaaagtttgagcatttgatttcattacctgtgtctccctcactggtgtccagacggtcaactgaatactcctgaaacccagggagcaggtgacttcctggagtgctttgtccccagagtcagccactgcttcctctgtgggggtggagagtttgtctttggccatgcagtgtgcgacagttcaggacgggtagggatgggtcccattctgtctgggtcaagggctctatcagcttcttccatgtgcctttgggaagaaatctcgttactttaagtttgctttcctgttatcttgatgaagtgcccattttagcagacacttgtagtgctgaccacttagggaatgtacaaactcctaagcttctaaagggaggcatggcaaaaacgttggggtcaggatgtctctcacgctgctcatgttaatactattaacacatgatttgagaaataagttttctctaaaatgcatattttgccgccacacactgaacaatattatttccagtgaagtttgatgcctgttcttacgttgtgttcacctgttggttcaccactcagcagatctgattctgcaagaattaatggtagaactagatcatcctttctaacagacgagcctgtgtcctgtgacggcctttcacagcggaatgcagttgtacctcacattacttttgaaacttcactcgttccagttggtacaagtatttgccaaagccatttcctatgttcaccgtggcccctcctgatgtggctgtcagcgcagcgttgttgaacagggctattctttttacaaggtgtgaagtgtggctcttcgcttcgtctttgccatggcattaaaagaaagttccctgtcttctttcaatattagttatttcaaatgaatatgtgctacttaaaagcttgttttgtttctttgtatataatttgccttggatttattgtgcacagtttgttgagttgtatgtttttgtgaattatcaggagtaaatttgacaagtacatgtgaataacctcctgtaaatgaattttataacaaaaatgtactgaactattttttaaagttgtgcagattagcaattttttgctatagctttgacttttctatgctgtgaattaatagctgcgatttggcaaacagccctgttgtctttgttaaaccctaaattttaagaggaaatggcagaattaaaagcagaaacaagaagatggacatggattagaggttatgtattatgaagtaaactacaaggtactaacatcatttcgtctgccatttggtttgctttatgctgaaattacttggtggggatttgtgcaattcagatataaaaagtttcattatcca

SEQ ID NO: 183983 - DNA, 10917 bp, Artificial Sequence
  derived and/or modified sequence
cttccgctggtggcctagagcggggcccggtatggaggtgggctagaggccgacgccagccagagagcgaaatgttcttttggggccagagtctgggcatatatgaatgcaaatccgtgtttgttcacaactaagcccagctgagacgatcacttttctgtaggccatttgtccaggtacagaatgagcacatgttgttggtgtacgccaggtggtgcttccaccattgacttcctaaagcgctatgcttccaacactccgtccggtgaatttcaaacagccgacgaagacctctgctactgcttggagtgtgtggctgagtaccacaaagcaagagatgaattgccattcttgcatgaggttttatgggaattagaaaccttacgtctcataaatcactttgaaaaatccatgaaggcagaaattggagatgatgatgagttatatatagtagacaataatggagagatgccactgtttgacatcactgggcaagactttgaaaataagcttcgagttcctcttcttgaaatactgaaatatccttacttgcttctacatgaacgtgttaacgagttatgtgttgaagcactttgtcggatggaacaagccaattgctcctttcaggtgtttgataaacatccagggatctatttgtttttagtccatcccaatgaaatggttcggcgttgggctatcttgactgcaagaaacttggggaaagtggacagagatgattattatgacttacaagaagttttactttgcctttttaaagtcattgagttggggcttttagagagtccagacatttatacttcttctgtcctagagaagggtaaactgattcttctgccctcacacatgtatgatactaccaactacaaaagctattggttaggtatttgcatgttgctgaccattcttgaggaacaagccatggattccctgttgttgggctcagacaaacaaaatgattttatgcaatcgatacttcacactatggagagggaagcagatgatgatagtgtggatcctttctggccagcgttacactgttttatggtgattctggatcgccttggatctaaggtctggggtcaacttatggatcctattgtggcatttcaaaccattatcaacaacgcaagctacaatagagagatccgacatatacggaacagctctgtaaggaccaagttagaaccggagtcctatttggatgatatggtgacttgcagccagatcgtatacaattataatcctgaaaagaccaaaaaggattctggatggagaacagccatttgcccagattattgtcctaacatgtatgaagaaatggaaacattagccagtgtacttcagtcagatattggtcaagacatgcgtgttcataacagcacatttctatggttcatcccttttgtccagtccctcatggatcttaaggatttgggtgtggcttacatagcacaggttgttaatcatctgtactctgaagtcaaagaagtcctcaaccaaacagatgctgtgtgtgacaaagtcactgaattttttcttctaattttggtatcagtgattgaactgcatagaaataaaaaatgtttgcatttgctgtgggtaagttcccagcaatgggtggaagccgtcgtcaaatgtgccaagcttcctaccactgcgtttacacggagttctgagaaatcatctggaaattgctccaaaggaacagcaatgatatcttcactgtcattgcattccatgccatctaactctgtacaacttgcttatgtgcagctgattagaagtctccttaaagaaggttatcagcttgggcagcagtctctttgcaagcgattctgggataagctcaacttattccttagaggaaatttatctctaggttggcagttgactagtcaggaaacccatgagctacaaagttgcttaaagcaaattattagaaacataaaattcaaagcacctccatgtaacacttttgtggatctgacttctgcatgtaaaatctctcctgcatcttataataaagaagaaagtgaacaaatggggaagacgtctagaaaagatatgcattgtttggaagcttccagcccaacattttctaaagaaccaatgaaagtgcaagacagtgtattgatcaaagcagataacactatagaaggtgacaataatgagcaaaattatataaaggatgtgaaactagaggaccatctcttagctgggtcatgcttaaagcagagtagtaaaaacatttttactgaaagagctgaagatcaaattaaaataagtacaaggaagcagaagtctgtaaaagagatctcttcatatacaccaaaggactgtacttcaagaaatggtccagaaaggggatgtgacagaggaataatagtatcaacacgtttgttgactgattctagcactgatgctttggaaaaagtgtccacatcgaatgaagatttctctttaaaggatgatgctcttgctaaaacctcaaaacgaaaaactaaggtacagaaagatgaaatctgtgcaaagttatcacatgtaataaagaagcaacacaggaagagtactttggtcgataatactatcaatttagatgaaaatttgactgtatctaacattgagagtttctattcaaggaaagatacaggagttcagaaaggagatggtttcatacacaatctttctttagaccctagtggtgttctggatgataagaatggagaacaaaaatctcaaaacaatgtattgccaaaagagaaacaattaaagaatgaagaattagttattttctctttccatgaaaacaattgtaaaatacaggaatttcatgttgatggtaaagaattgatcccttttacagaaatgaccaatgcttcagagaagaaatcatctccctttaaagatcttatgactgtacctgaatcaagagatgaggagatgagtaatagtaccagtgtgatttattctaacttgacaagagaacaggcccctgacatcagtcctaaatctgacaccttaacggattctcagatagacagagaccttcacaaattatctttactagctcaagccagtgttattacgttcccatccgattcacctcagaactcatcgcagctgcaaaggaaagtaaaagaagataaaagatgtttcacagctaaccaaaataatgttggagatacctcccgtggacaggttattattatttcagattctgatgatgatgatgatgaaagaatcctgagtcttgagaaactcactaaacaggacaaaatatgccttgagagggaacatccagagcagcacgtttcaacagttaatagtaaggaggaaaagaatccagtaaaggaagaaaagacagagactctttttcagtttgaggaatctgattctcagtgttttgagtttgaaagttcatctgaagtgttttcagtttggcaagatcatccagacgataataattcagttcaagatggtgagaaaaaatgtttggctcctatagccaatactacaaatggtcagggttgtacagattatgtatctgaagttgttaaaaaaggagcagagggcattgaagaacacacaagaccacggagtatttctgttgaagaattttgtgaaattgaagtaaaaaagcctaagagaaaacgatctgaaaaaccaatggctgaagatcctgtgaggccttcatcttctgtcagaaatgagggccagtctgatactaataagagagatcttgtgggaaatgattttaaaagtattgatagaaggacttcaactcccaattcacgtattcagagagccactacggtttcacaaaagaagtcttcaaagctttgtacttgtacagaacccatcaggaaagttccagtttctaagacccctaagaaaactcattcagatgccaaaaaaggacagaatagaagttcaaattacctaagttgtagaacaactcctgctatagtgccgccaaagaaatttcgtcagtgtcctgagccaacttcaacagctgagaaacttggcctgaaaaagggtcctcgtaaggcatatgagttgtcccagcggtctttggattatgtagctcaattacgtgatcatggcaaaactgttggagtagttgatacccgaaaaaagactaaattaatttctcctcagaacctgtctgtcagaaataataagaaacttctgactagtcaagaacttcagatgcaaaggcagatcagacccaaatcacaaaaaaatagacgaagactttctgattgtgaaagtacagatgttaaaagagcagggtcacatacagcacagaattctgacatatttgtaccagaatctgataggtcagattataattgtacaggaggaactgaggtacttgccaacagtaacagaaaacagttaataaaatgcatgccttctgaaccagaaaccataaaagcaaaacatgggtctccagcaactgatgatgcttgccctttgaaccagtgtgattctgtagtgttaaatggaacagtaccaacaaatgaagtaattgtctccacttcagaagaccctctgggtggaggtgatccaacagcacgtcatatagagatggcagctttgaaagaaggagagcctgactccagcagtgatgcagaggaagataacttatttttaacccaaaatgatcctgaagatatggatttatgttcacaaatggagaatgacaattataaactcattgaactaattcatggaaaagatacagttgaggttgaagaagattctgtaagtcggcctcagttggaatctttgagtggcacaaagtgtaagtacaaagattgtcttgaaaccacaaaaaaccagggtgaatactgcccaaaacactctgaagtgaaagcagcagatgaagatgtatttcgtaaacctggcttgcctcctcctgcatctaaacctttgagacctaccactaagatttttagctcaaagagtacttcacgaattgctggtctttctaaatctttggaaacttcttcagcactttcaccgtctctaaaaaataagtcaaaggggatacagtcgattttgaaagtaccacagccagttcccctcatagctcagaagccagttggtgaaatgaagaattcgtgcaatgttcttcatcctcagtctccgaataattccaacaggcaaggttgcaaagttccatttggtgaaagcaaatattttccatcttcctctccagtaaacattcttttgtcatcacagtctgtctctgacaccttcgttaaagaggtcttaaaatggaaatatgaaatgtttttgaactttggtcagtgtgggccccctgcaagtctttgtcagtccatctcaagacctgtgcctgtcagatttcacaattatggagattattttaatgtttttttccctttgatggtattgaatacttttgaaacagtggcacaagaatggctcaactctccaaatagagagaatttctatcagttgcaagtacgaaaatttcctgccgattatataaaatactgggagtttgcagtttatctggaagaatgtgaactggctaaacagctttatccaaaggaaaacgatttggtgtttttagctcctgagagaataaatgaagagaagaaagatacagagagaaatgacatacaagatctccacgaatatcattctggttatgttcataaatttcgccgcacgtcagtcatgcgtaatgggaaaactgagtgttacctttccatccagactcaagagaactttccggccaatttaaacgaacttgtgaattgtattgtaatcagttctctggtaactacacaaaggaagttgaaagccatgtctctgttgggtagtcggaaccaactggctagagctgttctgaatccaaaccctatggacttctgtacaaaagatttactgactacaacatctgagagaattattgcgtacttaagagatttcaatgaagatcaaaagaaagcaatagaaactgcatatgctatggtgaaacactcaccatcagttgccaaaatctgcttgattcatggaccacctggaacaggaaaatcaaaaactattgttggcctcctctatcgtctactgacagagaaccagaggaaggggcattcagacgaaaactccaatgccaaaatcaaacaaaaccgtgtcctcgtgtgtgcaccttccaatgcagctgttgatgaactcatgaaaaaaattatccttgaattcaaagaaaaatgtaaagacaagaagaatcctttaggaaactgtggagatataaatttagtacgactgggtccagaaaagtctattaatagtgaggttctaaagttcagtttggacagccaagtaaaccacagaatgaaaaaagagttaccttctcatgttcaggcgatgcataaaagaaaggaatttctagattatcagctggatgagctttcccggcagcgagctctatgccgaggtggacgggaaatacagaggcaagaattagatgaaaacatttccaaagtttctaaggaaaggcaggaacttgcttctaaaattaaagaggttcaaggacgcccacagaaaacacagagtatcatcatcttagagtcccatatcatctgctgcacgttgagcacaagtggtggtttactacttgagtctgctttccgtgggcaagggggtgtccccttcagctgtgtcattgttgatgaggctggacagtcttgtgaaattgagactcttactccactcatccatcgctgcaataagctcatcctagtaggagatcctaagcagctccctccgacagtcatctctatgaaagcacaggagtatggctacgaccagtcaatgatggctcgcttctgcagactgctggaagagaatgtagaacacaacatgatcagcaggctgcccattctacagctcactgttcagtacaggatgcatccagacatatgcctcttcccttctaattatgtttataacagaaacttaaaaacaaatagacagacagaagccattcgatgttcatcagattggccatttcagccataccttgtgtttgatgttggagatggttcagaaagacgggataatgactcatatataaatgttcaagaaataaaactggtgatggaaataattaagcttattaaagacaaaagaaaggatgttagttttcgaaacattggcataataactcattacaaggcccagaagacgatgattcagaaggatttggacaaagagttcgatagaaaaggattcctggcaagtttgcagagattgaatgtcaccatcacacgagccaagtacagcctcttcatcctcggacatttgaggaccctgatggaaaaccagcattggaatcagctgattcaggatgctcagaagcgtggtgccattattaagacctgtgacaaaaactatagacatgatgcagtgaagattctgaaactcaagcctgtgctgcagagaagtctcactcaccctcctaccatagccccagaggggtccagaccccagggtggtttgcccagcagcaagctagacagtggatttgccaagacatctgttgctgcttctctataccacacaccctctgactccaaggaaattactcttactgttacttcaaaggaccctgaaagacctcctgttcatgaccaacttcaggacccacgactgctgaagaggatgggcattgaggtcaaaggaggaatattcctttgggatccacaaccctcgagcccccagcatcctggagcaacacctcctacgggcgagccgggcttccctgtcgttcaccaggacctgagccatatacagcagcccgctgctgtagtggctgctctgagcagccacaaacctcccgtgcggggcgaacctccagctgccagtcccgaggcttccacgtgtcagagcaaatgtgatgacccggaagaggagctctgtcacaggagagaggccagggctttcagtgaaggggagcaggagaagtgtggttccgagacccatcacaccaggaggaactctaggtgggacaagaggacactggagcaggaggacagcagttccaagaaaagaaagcttttataggaaagcccagtgacatgggccagcagccacagcatattgtaaactgaagatgaccagctcgtgggaccatctagataagcttgttttttgtaaggagtttgtgtgctgttggaaaacatggaaaatgcatccttaacacctgagcctctggtcatcttcagtattttctgtcatttgcaaaagctttcagagggcattgtgtatccgtaataatgtccttgaagtcagagactggaaatgttgatctcttagtcttctatagacaaggaggtcagactggagtgaatgttgtaaaagttgaaatgtatatttgtatagcaaataacaaaatccttttaaaatttaatctagtagaccgcttttctttccccctgtttaaaatgttaatcagttttcaacagaacaaactttatattaccaaaaaaaaaaagatgggaggagggcgggtcctttcaaccattgttagagcaagacagataattatttaacagcctagcttggaataagctgagttagtgctggtgggtcaggtgtctctggctctattaaaaaaagcaaaaacccccccaaaaacctggagtctcctaggggacactttgggcagcacggttatgttaggtaaagtcttgctgacatggtgcatttttagatagagtgcattggcccagggtattatatttctgtgatgagttcatttacctgtttcagtatgcacatagttccctagctaaaattcctaatcttcttgagagagaagaatatggagtgaaagaataattcttgagctatcattcaaatgctcccagcatattgtgagccttgtgtgactggtgaggtacagacatttggttgccaaatgctagattagcgctgggtcagctgtggaagaatcgcctcagcttacagattgtcagacagatctaactagttttccagaaagcctgggaagctgtgtgttcaacatttcccaagggattctgatcaccaggcagcttgggaaccactggggcaggccaaatagaatattttgggcgggaaagaagcacccgatttaaaatgaagcgtaaccagaggagttcagaactgggaagagagtggtagacttcctgtgatcttcagaaatcatctacctggtaaaaatacatgctgtttagaatatctgataggtgtttccagctactattagaggtgatagtgcttttgtgggggaaaaaattggtcatggtgaatggagatcgaggaagctcgggacaagggaggggtgggctgcctgattttgtccagttttccaaatatccacgcagtgaactggagtatcctaaacatgagaatgtacagttgacagttgtaaaaactagggatctgtagtgaatgctgtgcagccccatatctcatttgggggtaggaaaatagctgaagattcatgtgcattatttgacatttcctttgtcatctgctttttaagcaaaaaagggttttgtgttagaaattctacttgagcagattataaagagctttaaaaaacaactttcggttgccaaaagtttgagcatttgatttcattacctgtgtctccctcactggtgtccagacggtcaactgaatactcctgaaacccagggagcaggtgacttcctggagtgctttgtccccagagtcagccactgcttcctctgtgggggtggagagtttgtctttggccatgcagtgtgcgacagttcaggacgggtagggatgggtcccattctgtctgggtcaagggctctatcagcttcttccatgtgcctttgggaagaaatctcgttactttaagtttgctttcctgttatcttgatgaagtgcccattttagcagacacttgtagtgctgaccacttagggaatgtacaaactcctaagcttctaaagggaggcatggcaaaaacgttggggtcaggatgtctctcacgctgctcatgttaatactattaacacatgatttgagaaataagttttctctaaaatgcatattttgccgccacacactgaacaatattatttccagtgaagtttgatgcctgttcttacgttgtgttcacctgttggttcaccactcagcagatctgattctgcaagaattaatggtagaactagatcatcctttctaacagacgagcctgtgtcctgtgacggcctttcacagcggaatgcagttgtacctcacattacttttgaaacttcactcgttccagttggtacaagtatttgccaaagccatttcctatgttcaccgtggcccctcctgatgtggctgtcagcgcagcgttgttgaacagggctattctttttacaaggtgtgaagtgtggctcttcgcttcgtctttgccatggcattaaaagaaagttccctgtcttctttcaatattagttatttcaaatgaatatgtgctacttaaaagcttgttttgtttctttgtatataatttgccttggatttattgtgcacagtttgttgagttgtatgtttttgtgaattatcaggagtaaatttgacaagtacatgtgaataacctcctgtaaatgaattttataacaaaaatgtactgaactattttttaaagttgtgcagattagcaattttttgctatagctttgacttttctatgctgtgaattaatagctgcgatttggcaaacagccctgttgtctttgttaaaccctaaattttaagaggaaatggcagaattaaaagcagaaacaagaagatggacatggattagaggttatgtattatgaagtaaactacaaggtactaacatca

SEQ ID NO: 183984 - DNA, 8034 bp, Artificial Sequence
  derived and/or modified sequence
atgagcacctgctgctggtgcacccccggcggcgccagcaccatcgacttcctgaagagatacgccagcaacacccccagcggcgagttccagaccgccgacgaggacctgtgctactgcctggagtgcgtggccgagtaccacaaggccagagacgagctgcccttcctgcacgaggtgctgtgggagctggagaccctgagactgatcaaccacttcgagaagagcatgaaggccgagatcggcgacgacgacgagctgtacatcgtggacaacaacggcgagatgcccctgttcgacatcaccggccaggacttcgagaacaagctgagagtgcccctgctggagatcctgaagtacccctacctgctgctgcacgagagagtgaacgagctgtgcgtggaggccctgtgcagaatggagcaggccaactgcagcttccaggtgttcgacaagcaccccggcatctacctgttcctggtgcaccccaacgagatggtgagaagatgggccatcctgaccgccagaaacctgggcaaggtggacagagacgactactacgacctgcaggaggtgctgctgtgcctgttcaaggtgatcgagctgggcctgctggagagccccgacatctacaccagcagcgtgctggagaagggcaagctgatcctgctgcccagccacatgtacgacaccaccaactacaagagctactggctgggcatctgcatgctgctgaccatcctggaggagcaggccatggacagcctgctgctgggcagcgacaagcagaacgacttcatgcagagcatcctgcacaccatggagagagaggccgacgacgacagcgtggaccccttctggcccgccctgcactgcttcatggtgatcctggacagactgggcagcaaggtgtggggccagctgatggaccccatcgtggccttccagaccatcatcaacaacgccagctacaacagagagatcagacacatcagaaacagcagcgtgagaaccaagctggagcccgagagctacctggacgacatggtgacctgcagccagatcgtgtacaactacaaccccgagaagaccaagaaggacagcggctggagaaccgccatctgccccgactactgccccaacatgtacgaggagatggagaccctggccagcgtgctgcagagcgacatcggccaggacatgagagtgcacaacagcaccttcctgtggttcatccccttcgtgcagagcctgatggacctgaaggacctgggcgtggcctacatcgcccaggtggtgaaccacctgtacagcgaggtgaaggaggtgctgaaccagaccgacgccgtgtgcgacaaggtgaccgagttcttcctgctgatcctggtgagcgtgatcgagctgcacagaaacaagaagtgcctgcacctgctgtgggtgagcagccagcagtgggtggaggccgtggtgaagtgcgccaagctgcccaccaccgccttcaccagaagcagcgagaagagcagcggcaactgcagcaagggcaccgccatgatcagcagcctgagcctgcacagcatgcccagcaacagcgtgcagctggcctacgtgcagctgatcagaagcctgctgaaggagggctaccagctgggccagcagagcctgtgcaagagattctgggacaagctgaacctgttcctgagaggcaacctgagcctgggctggcagctgaccagccaggagacccacgagctgcagagctgcctgaagcagatcatcagaaacatcaagttcaaggcccccccctgcaacaccttcgtggacctgaccagcgcctgcaagatcagccccgccagctacaacaaggaggagagcgagcagatgggcaagaccagcagaaaggacatgcactgcctggaggccagcagccccaccttcagcaaggagcccatgaaggtgcaggacagcgtgctgatcaaggccgacaacaccatcgagggcgacaacaacgagcagaactacatcaaggacgtgaagctggaggaccacctgctggccggcagctgcctgaagcagagcagcaagaacatcttcaccgagagagccgaggaccagatcaagatcagcaccagaaagcagaagagcgtgaaggagatcagcagctacacccccaaggactgcaccagcagaaacggccccgagagaggctgcgacagaggcatcatcgtgagcaccagactgctgaccgacagcagcaccgacgccctggagaaggtgagcaccagcaacgaggacttcagcctgaaggacgacgccctggccaagaccagcaagagaaagaccaaggtgcagaaggacgagatctgcgccaagctgagccacgtgatcaagaagcagcacagaaagagcaccctggtggacaacaccatcaacctggacgagaacctgaccgtgagcaacatcgagagcttctacagcagaaaggacaccggcgtgcagaagggcgacggcttcatccacaacctgagcctggaccccagcggcgtgctggacgacaagaacggcgagcagaagagccagaacaacgtgctgcccaaggagaagcagctgaagaacgaggagctggtgatcttcagcttccacgagaacaactgcaagatccaggagttccacgtggacggcaaggagctgatccccttcaccgagatgaccaacgccagcgagaagaagagcagccccttcaaggacctgatgaccgtgcccgagagcagagacgaggagatgagcaacagcaccagcgtgatctacagcaacctgaccagagagcaggcccccgacatcagccccaagagcgacaccctgaccgacagccagatcgacagagacctgcacaagctgagcctgctggcccaggccagcgtgatcaccttccccagcgacagcccccagaacagcagccagctgcagagaaaggtgaaggaggacaagagatgcttcaccgccaaccagaacaacgtgggcgacaccagcagaggccaggtgatcatcatcagcgacagcgacgacgacgacgacgagagaatcctgagcctggagaagctgaccaagcaggacaagatctgcctggagagagagcaccccgagcagcacgtgagcaccgtgaacagcaaggaggagaagaaccccgtgaaggaggagaagaccgagaccctgttccagttcgaggagagcgacagccagtgcttcgagttcgagagcagcagcgaggtgttcagcgtgtggcaggaccaccccgacgacaacaacagcgtgcaggacggcgagaagaagtgcctggcccccatcgccaacaccaccaacggccagggctgcaccgactacgtgagcgaggtggtgaagaagggcgccgagggcatcgaggagcacaccagacccagaagcatcagcgtggaggagttctgcgagatcgaggtgaagaagcccaagagaaagagaagcgagaagcccatggccgaggaccccgtgagacccagcagcagcgtgagaaacgagggccagagcgacaccaacaagagagacctggtgggcaacgacttcaagagcatcgacagaagaaccagcacccccaacagcagaatccagagagccaccaccgtgagccagaagaagagcagcaagctgtgcacctgcaccgagcccatcagaaaggtgcccgtgagcaagacccccaagaagacccacagcgacgccaagaagggccagaacagaagcagcaactacctgagctgcagaaccacccccgccatcgtgccccccaagaagttcagacagtgccccgagcccaccagcaccgccgagaagctgggcctgaagaagggccccagaaaggcctacgagctgagccagagaagcctggactacgtggcccagctgagagaccacggcaagaccgtgggcgtggtggacaccagaaagaagaccaagctgatcagcccccagaacctgagcgtgagaaacaacaagaagctgctgaccagccaggagctgcagatgcagagacagatcagacccaagagccagaagaacagaagaagactgagcgactgcgagagcaccgacgtgaagagagccggcagccacaccgcccagaacagcgacatcttcgtgcccgagagcgacagaagcgactacaactgcaccggcggcaccgaggtgctggccaacagcaacagaaagcagctgatcaagtgcatgcccagcgagcccgagaccatcaaggccaagcacggcagccccgccaccgacgacgcctgccccctgaaccagtgcgacagcgtggtgctgaacggcaccgtgcccaccaacgaggtgatcgtgagcaccagcgaggaccccctgggcggcggcgaccccaccgccagacacatcgagatggccgccctgaaggagggcgagcccgacagcagcagcgacgccgaggaggacaacctgttcctgacccagaacgaccccgaggacatggacctgtgcagccagatggagaacgacaactacaagctgatcgagctgatccacggcaaggacaccgtggaggtggaggaggacagcgtgagcagaccccagctggagagcctgagcggcaccaagtgcaagtacaaggactgcctggagaccaccaagaaccagggcgagtactgccccaagcacagcgaggtgaaggccgccgacgaggacgtgttcagaaagcccggcctgcccccccccgccagcaagcccctgagacccaccaccaagatcttcagcagcaagagcaccagcagaatcgccggcctgagcaagagcctggagaccagcagcgccctgagccccagcctgaagaacaagagcaagggcatccagagcatcctgaaggtgccccagcccgtgcccctgatcgcccagaagcccgtgggcgagatgaagaacagctgcaacgtgctgcacccccagagccccaacaacagcaacagacagggctgcaaggtgcccttcggcgagagcaagtacttccccagcagcagccccgtgaacatcctgctgagcagccagagcgtgagcgacaccttcgtgaaggaggtgctgaagtggaagtacgagatgttcctgaacttcggccagtgcggcccccccgccagcctgtgccagagcatcagcagacccgtgcccgtgagattccacaactacggcgactacttcaacgtgttcttccccctgatggtgctgaacaccttcgagaccgtggcccaggagtggctgaacagccccaacagagagaacttctaccagctgcaggtgagaaagttccccgccgactacatcaagtactgggagttcgccgtgtacctggaggagtgcgagctggccaagcagctgtaccccaaggagaacgacctggtgttcctggcccccgagagaatcaacgaggagaagaaggacaccgagagaaacgacatccaggacctgcacgagtaccacagcggctacgtgcacaagttcagaagaaccagcgtgatgagaaacggcaagaccgagtgctacctgagcatccagacccaggagaacttccccgccaacctgaacgagctggtgaactgcatcgtgatcagcagcctggtgaccacccagagaaagctgaaggccatgagcctgctgggcagcagaaaccagctggccagagccgtgctgaaccccaaccccatggacttctgcaccaaggacctgctgaccaccaccagcgagagaatcatcgcctacctgagagacttcaacgaggaccagaagaaggccatcgagaccgcctacgccatggtgaagcacagccccagcgtggccaagatctgcctgatccacggcccccccggcaccggcaagagcaagaccatcgtgggcctgctgtacagactgctgaccgagaaccagagaaagggccacagcgacgagaacagcaacgccaagatcaagcagaacagagtgctggtgtgcgcccccagcaacgccgccgtggacgagctgatgaagaagatcatcctggagttcaaggagaagtgcaaggacaagaagaaccccctgggcaactgcggcgacatcaacctggtgagactgggccccgagaagagcatcaacagcgaggtgctgaagttcagcctggacagccaggtgaaccacagaatgaagaaggagctgcccagccacgtgcaggccatgcacaagagaaaggagttcctggactaccagctggacgagctgagcagacagagagccctgtgcagaggcggcagagagatccagagacaggagctggacgagaacatcagcaaggtgagcaaggagagacaggagctggccagcaagatcaaggaggtgcagggcagaccccagaagacccagagcatcatcatcctggagagccacatcatctgctgcaccctgagcaccagcggcggcctgctgctggagagcgccttcagaggccagggcggcgtgcccttcagctgcgtgatcgtggacgaggccggccagagctgcgagatcgagaccctgacccccctgatccacagatgcaacaagctgatcctggtgggcgaccccaagcagctgccccccaccgtgatcagcatgaaggcccaggagtacggctacgaccagagcatgatggccagattctgcagactgctggaggagaacgtggagcacaacatgatcagcagactgcccatcctgcagctgaccgtgcagtacagaatgcaccccgacatctgcctgttccccagcaactacgtgtacaacagaaacctgaagaccaacagacagaccgaggccatcagatgcagcagcgactggcccttccagccctacctggtgttcgacgtgggcgacggcagcgagagaagagacaacgacagctacatcaacgtgcaggagatcaagctggtgatggagatcatcaagctgatcaaggacaagagaaaggacgtgagcttcagaaacatcggcatcatcacccactacaaggcccagaagaccatgatccagaaggacctggacaaggagttcgacagaaagggccccgccgaggtggacaccgtggacgccttccagggcagacagaaggactgcgtgatcgtgacctgcgtgagagccaacagcatccagggcagcatcggcttcctggccagcctgcagagactgaacgtgaccatcaccagagccaagtacagcctgttcatcctgggccacctgagaaccctgatggagaaccagcactggaaccagctgatccaggacgcccagaagagaggcgccatcatcaagacctgcgacaagaactacagacacgacgccgtgaagatcctgaagctgaagcccgtgctgcagagaagcctgacccacccccccaccatcgcccccgagggcagcagaccccagggcggcctgcccagcagcaagctggacagcggcttcgccaagaccagcgtggccgccagcctgtaccacacccccagcgacagcaaggagatcaccctgaccgtgaccagcaaggaccccgagagaccccccgtgcacgaccagctgcaggaccccagactgctgaagagaatgggcatcgaggtgaagggcggcatcttcctgtgggacccccagcccagcagcccccagcaccccggcgccaccccccccaccggcgagcccggcttccccgtggtgcaccaggacctgagccacatccagcagcccgccgccgtggtggccgccctgagcagccacaagccccccgtgagaggcgagccccccgccgccagccccgaggccagcacctgccagagcaagtgcgacgaccccgaggaggagctgtgccacagaagagaggccagagccttcagcgagggcgagcaggagaagtgcggcagcgagacccaccacaccagaagaaacagcagatgggacaagagaaccctggagcaggaggacagcagcagcaagaagagaaagctgctgtag

SEQ ID NO: 183985 - DNA, 7935 bp, Artificial Sequence
  derived and/or modified sequence
atgagcacctgctgctggtgcacccccggcggcgccagcaccatcgacttcctgaagagatacgccagcaacacccccagcggcgagttccagaccgccgacgaggacctgtgctactgcctggagtgcgtggccgagtaccacaaggccagagacgagctgcccttcctgcacgaggtgctgtgggagctggagaccctgagactgatcaaccacttcgagaagagcatgaaggccgagatcggcgacgacgacgagctgtacatcgtggacaacaacggcgagatgcccctgttcgacatcaccggccaggacttcgagaacaagctgagagtgcccctgctggagatcctgaagtacccctacctgctgctgcacgagagagtgaacgagctgtgcgtggaggccctgtgcagaatggagcaggccaactgcagcttccaggtgttcgacaagcaccccggcatctacctgttcctggtgcaccccaacgagatggtgagaagatgggccatcctgaccgccagaaacctgggcaaggtggacagagacgactactacgacctgcaggaggtgctgctgtgcctgttcaaggtgatcgagctgggcctgctggagagccccgacatctacaccagcagcgtgctggagaagggcaagctgatcctgctgcccagccacatgtacgacaccaccaactacaagagctactggctgggcatctgcatgctgctgaccatcctggaggagcaggccatggacagcctgctgctgggcagcgacaagcagaacgacttcatgcagagcatcctgcacaccatggagagagaggccgacgacgacagcgtggaccccttctggcccgccctgcactgcttcatggtgatcctggacagactgggcagcaaggtgtggggccagctgatggaccccatcgtggccttccagaccatcatcaacaacgccagctacaacagagagatcagacacatcagaaacagcagcgtgagaaccaagctggagcccgagagctacctggacgacatggtgacctgcagccagatcgtgtacaactacaaccccgagaagaccaagaaggacagcggctggagaaccgccatctgccccgactactgccccaacatgtacgaggagatggagaccctggccagcgtgctgcagagcgacatcggccaggacatgagagtgcacaacagcaccttcctgtggttcatccccttcgtgcagagcctgatggacctgaaggacctgggcgtggcctacatcgcccaggtggtgaaccacctgtacagcgaggtgaaggaggtgctgaaccagaccgacgccgtgtgcgacaaggtgaccgagttcttcctgctgatcctggtgagcgtgatcgagctgcacagaaacaagaagtgcctgcacctgctgtgggtgagcagccagcagtgggtggaggccgtggtgaagtgcgccaagctgcccaccaccgccttcaccagaagcagcgagaagagcagcggcaactgcagcaagggcaccgccatgatcagcagcctgagcctgcacagcatgcccagcaacagcgtgcagctggcctacgtgcagctgatcagaagcctgctgaaggagggctaccagctgggccagcagagcctgtgcaagagattctgggacaagctgaacctgttcctgagaggcaacctgagcctgggctggcagctgaccagccaggagacccacgagctgcagagctgcctgaagcagatcatcagaaacatcaagttcaaggcccccccctgcaacaccttcgtggacctgaccagcgcctgcaagatcagccccgccagctacaacaaggaggagagcgagcagatgggcaagaccagcagaaaggacatgcactgcctggaggccagcagccccaccttcagcaaggagcccatgaaggtgcaggacagcgtgctgatcaaggccgacaacaccatcgagggcgacaacaacgagcagaactacatcaaggacgtgaagctggaggaccacctgctggccggcagctgcctgaagcagagcagcaagaacatcttcaccgagagagccgaggaccagatcaagatcagcaccagaaagcagaagagcgtgaaggagatcagcagctacacccccaaggactgcaccagcagaaacggccccgagagaggctgcgacagaggcatcatcgtgagcaccagactgctgaccgacagcagcaccgacgccctggagaaggtgagcaccagcaacgaggacttcagcctgaaggacgacgccctggccaagaccagcaagagaaagaccaaggtgcagaaggacgagatctgcgccaagctgagccacgtgatcaagaagcagcacagaaagagcaccctggtggacaacaccatcaacctggacgagaacctgaccgtgagcaacatcgagagcttctacagcagaaaggacaccggcgtgcagaagggcgacggcttcatccacaacctgagcctggaccccagcggcgtgctggacgacaagaacggcgagcagaagagccagaacaacgtgctgcccaaggagaagcagctgaagaacgaggagctggtgatcttcagcttccacgagaacaactgcaagatccaggagttccacgtggacggcaaggagctgatccccttcaccgagatgaccaacgccagcgagaagaagagcagccccttcaaggacctgatgaccgtgcccgagagcagagacgaggagatgagcaacagcaccagcgtgatctacagcaacctgaccagagagcaggcccccgacatcagccccaagagcgacaccctgaccgacagccagatcgacagagacctgcacaagctgagcctgctggcccaggccagcgtgatcaccttccccagcgacagcccccagaacagcagccagctgcagagaaaggtgaaggaggacaagagatgcttcaccgccaaccagaacaacgtgggcgacaccagcagaggccaggtgatcatcatcagcgacagcgacgacgacgacgacgagagaatcctgagcctggagaagctgaccaagcaggacaagatctgcctggagagagagcaccccgagcagcacgtgagcaccgtgaacagcaaggaggagaagaaccccgtgaaggaggagaagaccgagaccctgttccagttcgaggagagcgacagccagtgcttcgagttcgagagcagcagcgaggtgttcagcgtgtggcaggaccaccccgacgacaacaacagcgtgcaggacggcgagaagaagtgcctggcccccatcgccaacaccaccaacggccagggctgcaccgactacgtgagcgaggtggtgaagaagggcgccgagggcatcgaggagcacaccagacccagaagcatcagcgtggaggagttctgcgagatcgaggtgaagaagcccaagagaaagagaagcgagaagcccatggccgaggaccccgtgagacccagcagcagcgtgagaaacgagggccagagcgacaccaacaagagagacctggtgggcaacgacttcaagagcatcgacagaagaaccagcacccccaacagcagaatccagagagccaccaccgtgagccagaagaagagcagcaagctgtgcacctgcaccgagcccatcagaaaggtgcccgtgagcaagacccccaagaagacccacagcgacgccaagaagggccagaacagaagcagcaactacctgagctgcagaaccacccccgccatcgtgccccccaagaagttcagacagtgccccgagcccaccagcaccgccgagaagctgggcctgaagaagggccccagaaaggcctacgagctgagccagagaagcctggactacgtggcccagctgagagaccacggcaagaccgtgggcgtggtggacaccagaaagaagaccaagctgatcagcccccagaacctgagcgtgagaaacaacaagaagctgctgaccagccaggagctgcagatgcagagacagatcagacccaagagccagaagaacagaagaagactgagcgactgcgagagcaccgacgtgaagagagccggcagccacaccgcccagaacagcgacatcttcgtgcccgagagcgacagaagcgactacaactgcaccggcggcaccgaggtgctggccaacagcaacagaaagcagctgatcaagtgcatgcccagcgagcccgagaccatcaaggccaagcacggcagccccgccaccgacgacgcctgccccctgaaccagtgcgacagcgtggtgctgaacggcaccgtgcccaccaacgaggtgatcgtgagcaccagcgaggaccccctgggcggcggcgaccccaccgccagacacatcgagatggccgccctgaaggagggcgagcccgacagcagcagcgacgccgaggaggacaacctgttcctgacccagaacgaccccgaggacatggacctgtgcagccagatggagaacgacaactacaagctgatcgagctgatccacggcaaggacaccgtggaggtggaggaggacagcgtgagcagaccccagctggagagcctgagcggcaccaagtgcaagtacaaggactgcctggagaccaccaagaaccagggcgagtactgccccaagcacagcgaggtgaaggccgccgacgaggacgtgttcagaaagcccggcctgcccccccccgccagcaagcccctgagacccaccaccaagatcttcagcagcaagagcaccagcagaatcgccggcctgagcaagagcctggagaccagcagcgccctgagccccagcctgaagaacaagagcaagggcatccagagcatcctgaaggtgccccagcccgtgcccctgatcgcccagaagcccgtgggcgagatgaagaacagctgcaacgtgctgcacccccagagccccaacaacagcaacagacagggctgcaaggtgcccttcggcgagagcaagtacttccccagcagcagccccgtgaacatcctgctgagcagccagagcgtgagcgacaccttcgtgaaggaggtgctgaagtggaagtacgagatgttcctgaacttcggccagtgcggcccccccgccagcctgtgccagagcatcagcagacccgtgcccgtgagattccacaactacggcgactacttcaacgtgttcttccccctgatggtgctgaacaccttcgagaccgtggcccaggagtggctgaacagccccaacagagagaacttctaccagctgcaggtgagaaagttccccgccgactacatcaagtactgggagttcgccgtgtacctggaggagtgcgagctggccaagcagctgtaccccaaggagaacgacctggtgttcctggcccccgagagaatcaacgaggagaagaaggacaccgagagaaacgacatccaggacctgcacgagtaccacagcggctacgtgcacaagttcagaagaaccagcgtgatgagaaacggcaagaccgagtgctacctgagcatccagacccaggagaacttccccgccaacctgaacgagctggtgaactgcatcgtgatcagcagcctggtgaccacccagagaaagctgaaggccatgagcctgctgggcagcagaaaccagctggccagagccgtgctgaaccccaaccccatggacttctgcaccaaggacctgctgaccaccaccagcgagagaatcatcgcctacctgagagacttcaacgaggaccagaagaaggccatcgagaccgcctacgccatggtgaagcacagccccagcgtggccaagatctgcctgatccacggcccccccggcaccggcaagagcaagaccatcgtgggcctgctgtacagactgctgaccgagaaccagagaaagggccacagcgacgagaacagcaacgccaagatcaagcagaacagagtgctggtgtgcgcccccagcaacgccgccgtggacgagctgatgaagaagatcatcctggagttcaaggagaagtgcaaggacaagaagaaccccctgggcaactgcggcgacatcaacctggtgagactgggccccgagaagagcatcaacagcgaggtgctgaagttcagcctggacagccaggtgaaccacagaatgaagaaggagctgcccagccacgtgcaggccatgcacaagagaaaggagttcctggactaccagctggacgagctgagcagacagagagccctgtgcagaggcggcagagagatccagagacaggagctggacgagaacatcagcaaggtgagcaaggagagacaggagctggccagcaagatcaaggaggtgcagggcagaccccagaagacccagagcatcatcatcctggagagccacatcatctgctgcaccctgagcaccagcggcggcctgctgctggagagcgccttcagaggccagggcggcgtgcccttcagctgcgtgatcgtggacgaggccggccagagctgcgagatcgagaccctgacccccctgatccacagatgcaacaagctgatcctggtgggcgaccccaagcagctgccccccaccgtgatcagcatgaaggcccaggagtacggctacgaccagagcatgatggccagattctgcagactgctggaggagaacgtggagcacaacatgatcagcagactgcccatcctgcagctgaccgtgcagtacagaatgcaccccgacatctgcctgttccccagcaactacgtgtacaacagaaacctgaagaccaacagacagaccgaggccatcagatgcagcagcgactggcccttccagccctacctggtgttcgacgtgggcgacggcagcgagagaagagacaacgacagctacatcaacgtgcaggagatcaagctggtgatggagatcatcaagctgatcaaggacaagagaaaggacgtgagcttcagaaacatcggcatcatcacccactacaaggcccagaagaccatgatccagaaggacctggacaaggagttcgacagaaagggcttcctggccagcctgcagagactgaacgtgaccatcaccagagccaagtacagcctgttcatcctgggccacctgagaaccctgatggagaaccagcactggaaccagctgatccaggacgcccagaagagaggcgccatcatcaagacctgcgacaagaactacagacacgacgccgtgaagatcctgaagctgaagcccgtgctgcagagaagcctgacccacccccccaccatcgcccccgagggcagcagaccccagggcggcctgcccagcagcaagctggacagcggcttcgccaagaccagcgtggccgccagcctgtaccacacccccagcgacagcaaggagatcaccctgaccgtgaccagcaaggaccccgagagaccccccgtgcacgaccagctgcaggaccccagactgctgaagagaatgggcatcgaggtgaagggcggcatcttcctgtgggacccccagcccagcagcccccagcaccccggcgccaccccccccaccggcgagcccggcttccccgtggtgcaccaggacctgagccacatccagcagcccgccgccgtggtggccgccctgagcagccacaagccccccgtgagaggcgagccccccgccgccagccccgaggccagcacctgccagagcaagtgcgacgaccccgaggaggagctgtgccacagaagagaggccagagccttcagcgagggcgagcaggagaagtgcggcagcgagacccaccacaccagaagaaacagcagatgggacaagagaaccctggagcaggaggacagcagcagcaagaagagaaagctgctgtag

SEQ ID NO: 183986 - protein, 1923 aa, Artificial Sequence
  derived and/or modified sequence
MENSHPPHHHHQQPPPQPGPSGERRNHHWRSYKLMIDPALKKGHHKLYRYDGQHFSLAMSSNRPVEIVEDPRVVGIWTKNKELELSVPKFKIDEFYVGPVPPKQVTFAKLNDNIRENFLRDMCKKYGEVEEVEILYNPKTKKHLGIAKVVFATVRGAKDAVQHLHSTSVMGNIIHVELDTKGETRMRFYELLVTGRYTPQTLPVGELDAVSPIVNETLQLSDALKRLKDGGLSAGCGSGSSSVTPNSGGTPFSQDTAYSSCRLDTPNSYGQGTPLTPRLGTPFSQDSSYSSRQPTPSYLFSQDPAVTFKARRHESKFTDAYNRRHEHHYVHNSPAVTAVAGATAAFRGSSDLPFGAVGGTGGSSGPPFKAQPQDSATFAHTPPPAQATPAPGFKSAFSPYQTPVAHFPPPPEEPTATAAFGARDSGEFRRAPAPPPLPPAEPLAKEKPGTPPGPPPPDTNSMELGGRPTFGWSPEPCDSPGTPTLESSPAGPEKPHDSLDSRIEMLLKEQRTKLLFLREPDSDTELQMEGSPISSSSSQLSPLAPFGTNSQPGFRGPTPPSSRPSSTGLEDISPTPLPDSDEDEELDLGLGPRPPPEPGPPDPAGLLSQTAEVALDLVGDRTPTSEKMDEGQQSSGEDMEISDDEMPSAPITSADCPKPMVVTPGAAAVAAPSVLAPTLPLPPPPGFPPLPPPPPPPPPQPGFPMPPPLPPPPPPPPPAHPAVTVPPPPLPAPPGVPPPPILPPLPPFPPGLFPVMQVDMSHVLGGQWGGMPMSFQMQTQVLSRLMTGQGACPYPPFMAAAAAAASAGLQFVNLPPYRGPFSLSNSGPGRGQHWPPLPKFDPSVPPPGYMPRQEDPHKATVDGVLLVVLKELKAIMKRDLNRKMVEVVAFRAFDEWWDKKERMAKASLTPVKSGEHKDEDRPKPKDRIASCLLESWGKGEGLGYEGLGLGIGLRGAIRLPSFKVKRKEPPDTTSSGDQKRLRPSTSVDEEDEESERERDRDMADTPCELAKRDPKGVGVRRRPARPLELDSGGEEDEKESLSEEQESTEEEEEAEEEEEEEDDDDDDSDDRDESENDDEDTALSEASEKDEGDSDEEETVSIVTSKAEATSSSESSESSEFESSSESSPSSSEDEEEVVAREEEEEEEEEEMVAEESMASAGPEDFEQDGEEAALAPGAPAVDSLGMEEEVDIETEAVAPEERPSMLDEPPLPVGVEEPADSREPPEEPGLSQEGAMLLSPEPPAKEVEARPPLSPERAPEHDLEVEPEPPMMLPLPLQPPLPPPRPPRPPSPPPEPETTDASHPSVPPEPLAEDHPPHTPGLCGSLAKSQSTETVPATPGGEPPLSGGSSGLSLSSPQVPGSPFSYPAPSPSLSSGGLPRTPGRDFSFTPTFSEPSGPLLLPVCPLPTGRRDERSGPLASPVLLETGLPLPLPLPLPLPLALPAVLRAQARAPTPLPPLLPAPLASCPPPMKRKPGRPRRSPPSMLSLDGPLVRPPAGAALGRELLLLPGQPQTPVFPSTHDPRTVTLDFRNAGIPAPPPPLPPQPPPPPPPPPVEPTKLPFKELDNQWPSEAIPPGPRGRDEVTEEYMELAKSRGPWRRPPKKRHEDLVPPAGSPELSPPQPLFRPRSEFEEMTILYDIWNGGIDEEDIRFLCVTYERLLQQDNGMDWLNDTLWVYHPSTSLSSAKKKKRDDGIREHVTGCARSEGFYTIDKKDKLRYLNSSRASTDEPPADTQGMSIPAQPHASTRAGSERRSEQRRLLSSFTGSCDSDLLKFNQLKFRKKKLKFCKSHIHDWGLFAMEPIAADEMVIEYVGQNIRQVIADMREKRYEDEGIGSSYMFRVDHDTIIDATKCGNFARFINHSCNPNCYAKVITVESQKKIVIYSKQHINVNEEITYDYKFPIEDVKIPCLCGSENCRGTLN

SEQ ID NO: 183987 - DNA, 5772 bp, Artificial Sequence
  derived and/or modified sequence
atggagaattcccacccaccgcaccaccaccatcaacagccgcctccccagcccgggccctccggagagcggaggaatcaccattggagatcgtacaagctgatgatcgacccagccctcaagaaagggcatcacaaactttataggtacgacggccagcactttagccttgcgatgagcagcaacagaccagttgagatagtcgaggatccaagggtagttggaatctggaccaaaaataaggaacttgaactcagcgtcccgaaattcaagatcgatgaattctacgtgggaccagtgccaccaaaacaagtcacattcgcaaaactcaatgacaatatccgcgaaaacttcctgagagatatgtgcaaaaagtacggagaggttgaggaggtggaaattctgtacaaccctaagacaaaaaagcacctgggtattgctaaggtcgtgtttgctactgttagaggggcaaaggacgcggtgcagcatctgcactccacttccgtcatgggtaacatcatccacgtggagttggataccaagggtgagactaggatgcgcttttacgaacttttggtgaccggccgctatacaccacagaccttaccagtgggagagctcgacgctgtatctcctattgttaatgaaaccctgcaactctccgacgcactgaaacggcttaaagatggaggcctttccgccggatgtggatcagggagcagttccgtgacaccaaactccggcggtacacccttcagtcaggacacagcctactctagttgtcgactggatacgccgaattcctatggccagggaacccccttgaccccgcggctgggcacaccttttagccaagattcctcatattcatcgcggcaaccaaccccgagctacttattttctcaagatcccgccgtcacatttaaagcgagacggcacgaatcgaaatttactgacgcatacaaccggcggcatgaacatcactacgtgcacaattccccagccgtgaccgcagtcgcaggggcaaccgctgcattccggggaagttcagaccttccttttggcgccgtggggggtacgggagggagctcaggcccccctttcaaggcccagccccaggatagcgccacattcgctcacaccccacctccggcacaagcaaccccggcccctggatttaagtccgccttctctccatatcaaacaccagtggcccacttcccgcctccccccgaggagcctacagcaacggccgcctttggtgcacgtgactctggagaatttaggagggccccggctcccccaccgttgcctccggctgagccactggcgaaggaaaagcccgggactcctcccggcccccctcccccggatactaactccatggagctgggagggcgccccaccttcgggtggtctcccgaaccgtgtgattcccctgggacccccacgctcgagagcagcccagcaggacccgaaaagcctcacgactccctggacagccgaattgaaatgctgttgaaggaacagcgcacgaagttgctcttcctgagggaacccgactctgatacggagctacagatggagggaagtcctatctcctcttcctcctcacaattgagccccctggcaccttttggaactaacagccagccagggttcaggggccctactccaccgagcagccgcccatcatcaactggtctcgaggacatctcccccacccccctgccagactctgacgaggacgaggagctagacctaggcctgggcccacggcctccaccagaacctggaccgcctgatcctgcggggttactgtcccagaccgccgaagtggctctcgacctcgtgggagacaggacgcctacctcagagaagatggacgaagggcaacagtcttcgggcgaagacatggagatctcagatgacgaaatgcccagcgccccaattacttcagccgactgtcctaagcctatggtcgtaacacccggcgccgcagccgtggcagctccatcagttctggcaccaactttgcccttacccccaccccccggatttcccccattgcccccaccccctccaccccctccaccacagcctggatttcccatgcccccgcccctcccaccaccgccccccccacctccacccgctcaccccgcagttacggtacctccccctccactgccagctcctcctggtgtcccacctcccccaattctgcctcctttacctcccttccctccaggcctttttccagttatgcaggtagacatgagccacgtgctcggcggccaatggggcggtatgcccatgtcattccaaatgcagacccaggtgttgtctaggctaatgacgggacagggcgcttgcccctacccccccttcatggctgcggccgcagccgcggcctcagctggcttgcagtttgtgaatttacctccatatcgggggcccttttccctatcaaattctggaccgggacgcggtcagcactggcctcctctgcctaagttcgacccatctgtgcctccccctgggtacatgccccgtcaggaggaccctcacaaggcgaccgtcgatggcgtgttgctggtcgtcttgaaggagctcaaggccatcatgaaacgagacctcaaccgtaaaatggtcgaagtggttgcctttagggccttcgacgagtggtgggacaagaaagaacgcatggccaaagcctcccttacccctgtcaaaagtggggagcacaaggacgaggatcgaccgaaacccaaagaccgtatagcttcgtgcctcctcgagagttggggaaagggggaaggcctgggctacgagggtttagggctgggaatcggactgcggggagccataagactgcctagctttaaagtaaaaaggaaggaacctcctgacaccacgtcatccggtgaccaaaagaggttgcggccatctacctccgttgatgaggaagacgaggagtccgaacgtgagcgggatcgggacatggcggacaccccctgcgagctagccaaaagagatccaaagggggtgggcgttcgaaggcgccctgcccggcccttggaactggatagtggtggcgaagaagatgagaaagaatccctcagcgaagagcaagagagcactgaggaagaggaagaggccgaagaggaagaagaggaagaggacgacgacgacgacgatagtgatgatcgcgacgaaagcgaaaacgacgacgaggatacagctctgagtgaggcttccgaaaaggacgagggagattcggacgaagaagagaccgtgtccatcgtaaccagcaaggccgaggctacgagctctagtgagagcagcgagagtagcgaatttgaatcatcttctgaatcaagtccatcctcgagcgaagatgaagaggaggtggtggcacgggaggaagaggaagaagaggaggaagaagagatggtggcagaagaaagcatggctagtgcagggccagaagacttcgaacaggacggtgaagaggcggctctggccccaggagcccctgccgtggactctctgggaatggaagaagaggtggatatcgaaaccgaggccgttgctcctgaggaaagaccatctatgcttgatgagccacccctgcccgtgggagtagaagaacctgctgatagccgggaacctcctgaggagccgggactcagtcaggagggagcaatgctcttgtctccggagcccccagcaaaagaagtggaagctcgcccaccactgagccctgaacgtgccccagaacacgatttggaggtagagccggaaccacctatgatgctgccactgccccttcagccccctctgcccccccctagaccccctcgaccaccgtcgccaccccctgaaccagagactaccgatgcatcacacccctctgttcccccagagccactggccgaggatcaccctccccacacacctggcctgtgcggttctctcgctaagtctcagagcactgagacagtacccgcgactccgggcggcgagccccccttgtccggcggtagtagcggcctgtctttgagcagtcctcaggttcccgggtcaccattttcatatcctgcaccaagcccttctctgtcaagtggcgggctgccgcgaaccccagggcgggacttttcctttacccctacttttagtgaaccatcgggtcccctgcttttgcctgtgtgccccctgccaaccggcagacgagacgaaagaagtggtcctctagccagcccagtactgcttgagacagggctccccctgcctttgcctttgcccctgcccctccccttggcccttccggccgttcttcgcgcccaggctcgggctcctactccactgcccccactcctgccagcaccactcgcttcctgtccgccacccatgaagaggaaacccggtagaccacgacgctctccaccctcaatgttgtctctggacggtccactcgtcaggccacccgccggcgcagccttgggacgggagttgctgctcctgccaggacagccccagacgccagtctttccttcaacccatgacccccgaactgtgactttagacttccgcaacgccggtataccggccccaccgccacccttgcctccccaaccaccccccccacccccgccacctcccgtcgagcctaccaaactgccattcaaagagctggataatcagtggccttctgaggcgattcctcccgggcctcgcggcagggacgaagtgacagaggagtatatggagctcgctaaatctcgagggccgtggagaagacctcctaaaaagcgtcacgaggatctggtgcctccggccggctcaccagagctgagccccccccagcctctcttccgccctagatcggaatttgaggagatgaccatcctgtacgatatctggaacggcgggatagatgaggaggatatcaggtttttgtgtgtcacctatgaacggctgctccaacaggacaatggcatggattggttaaatgacactctgtgggtgtatcacccctctacttctctttcctccgcaaagaagaagaaacgggacgatgggatacgtgaacacgtcacgggttgcgcaaggagcgaagggttctacacaattgataaaaaggataagctgcggtatcttaacagttctagggcctccacagatgaaccacctgctgatacccagggaatgtccatacctgcccagcctcatgcttccacccgcgctggcagtgagagacggtccgaacaaagacgactcctgtcctctttcactgggtcttgcgacagcgatctgctgaaattcaatcagctgaaatttcggaagaagaaactgaaattttgtaaaagccacattcacgactggggcctttttgctatggagcccatcgccgcggacgaaatggtcatcgagtatgtggggcagaatattcgccaagtcatagccgacatgagggagaagcggtacgaggacgaaggaattggaagttcctacatgttcagagtagatcatgacaccattatagacgcaacaaagtgtggaaactttgcccgttttattaaccacagctgtaaccccaactgctatgcaaaggtgattaccgtggaatcccaaaagaaaatcgttatatactctaagcagcacattaacgtgaatgaggaaattacatacgactacaagttcccaattgaagatgtgaaaatcccctgcctgtgtggcagtgagaactgcagaggcacactgaattag

SEQ ID NO: 183988 - DNA, 5772 bp, Artificial Sequence
  derived and/or modified sequence
atggaaaatagccatcctccccaccatcaccatcagcagcccccccctcagccaggcccctctggagagagacgcaatcaccactggcgtagctataagctgatgattgatcctgctctcaagaagggacaccacaaactttatcgatatgatggtcagcacttttctctggccatgagtagcaaccgccctgtggaaatagttgaggacccaagagttgtcggaatctggactaagaataaagagttagagctgtctgtgcccaaatttaagatcgatgagttttatgtcggtcctgttccgccaaaacaagtcacattcgccaagttgaacgacaacatcagagaaaacttcctacgggacatgtgcaaaaaatacggtgaggtcgaggaagtagaaatcttgtacaaccccaaaactaagaagcacctaggaatcgccaaagttgtgtttgccacagttcggggagccaaggatgctgtgcagcacctgcactccacctccgtgatggggaacattatccatgtcgagctggacactaaaggcgagaccagaatgcgattttatgagctgttggtcacaggccgctataccccacaaacactgcctgtgggcgaactggatgccgtgtcaccaatcgtgaatgagacacttcagttgtccgatgccctaaagcgtctgaaagatggtggcctgagtgcaggatgtggctcaggatcctcctcagtgacacccaattctggcggaacaccattttcccaggataccgcatacagcagctgcagactcgatacacccaactcttatgggcaggggacccctctgaccccaagactgggtacccccttttcgcaggattcctcttacagttccaggcagcccacgccatcctatctgttctcccaggatcctgcagtgaccttcaaagcacgccggcacgagagtaagttcacagacgcttacaatcgaagacatgagcaccattacgttcacaacagtccagctgtcacagcagtggccggcgctaccgccgctttcagaggtagttcagatcttccattcggggctgtcggcggtacagggggatcaagcggccccccatttaaagcacagccacaagattccgccacctttgctcacaccccccctcccgcacaggctacaccggcgcccggattcaagtctgccttctccccttaccagacaccagtggcgcactttccgcccccccctgaagagcctacagccaccgcggctttcggcgctcgcgattcaggggagttccggcgcgccccggcacctcctccgcttccacctgccgaacctttggccaaggaaaaaccaggcactccccccggcccacccccccccgacacaaacagcatggagctggggggtcgcccgacatttggatggtccccagagccttgtgattcccctggcaccccaaccttggagagtagtcctgccggaccagaaaagccacacgatagtttagattctcgtattgagatgctcctgaaggaacagcggaccaaacttttgttcctgagagaacccgatagcgacacagagctacagatggaagggagtcctatttcctcaagcagcagccagctgagtccactggccccatttgggacgaactcccaacctggtttccgggggcccacacctccatcctcccgaccgtcatcaaccggactggaggatattagtccaacacccctgccagatagcgacgaggatgaggagctcgatctcggcttaggtccccggcctcccccggagccaggcccaccggaccccgcgggtctcctgtcacagactgctgaagtggcattagatctagttggagaccggactcctacgagcgagaagatggatgagggacagcaaagctcaggcgaagatatggagatcagcgatgacgaaatgcccagtgctccaatcaccagtgctgattgtccgaagcctatggtggtaacaccgggggctgcagctgttgctgctccatctgtcctggcacctactctgccactgccaccaccccccggattcccaccactgcctccaccaccaccccctccaccaccgcagcccgggttccccatgcctccgccactgcctcctccacccccgcctcccccccccgcacaccccgcagtcaccgtgccacccccccctcttcccgcccccccgggtgttcctccccctcccatcctgccccccctaccccccttccctcctggcctcttccctgttatgcaggtggacatgagtcatgtgctgggcggacaatggggggggatgccaatgtcgttccagatgcagacacaggtgctgagcaggttaatgacaggacagggcgcttgtccctatccaccattcatggcagcagccgcagccgccgcctctgcgggacttcaattcgttaatctcccgccttacagaggtcccttctcactgagcaacagcggacccggccgtgggcagcactggccacctctgccaaaatttgatcccagtgtcccccccccaggatatatgccccggcaggaagacccccacaaagctaccgtcgatggtgttctgctggtggttttaaaagagctgaaagcgataatgaagcgtgacttgaatagaaaaatggtggaggtcgtagcttttcgagccttcgatgaatggtgggataagaaagaacgaatggccaaggctagcttaacccccgtgaagagcggggaacataaggatgaggatagacctaaaccaaaagataggatcgcaagttgcctacttgagtcgtggggcaagggagaaggcttggggtatgagggcttagggttggggataggcctacggggcgcaattcggctcccaagtttcaaggtgaagcgtaaggaaccacccgacacaacctcatcaggtgaccagaagcgcctacgcccttccactagcgtggacgaggaagatgaagaaagcgagcgtgagagagatcgggacatggcggacactccatgtgagctggcaaagcgggatccaaagggcgtgggtgtgagacggaggcccgcaaggccactggaactggacagtgggggcgaagaagatgagaaggagagcctgtctgaagagcaagagtctactgaagaagaggaggaggccgaagaggaggaggaggaggaggatgacgacgatgatgactcagatgaccgcgatgaaagcgagaacgatgacgaggatacggctctttcagaggcatccgagaaagacgagggggactctgatgaggaggagaccgtatctatcgtgacatctaaggcagaagcaacctctagcagcgagagctccgagagcagcgaattcgaatcctcgtcggaaagtagcccctctagcagcgaagatgaggaggaagttgtggccagagaggaggaggaagaggaagaagaagaggaaatggttgccgaggagagcatggcctcagcagggcctgaagattttgaacaagatggtgaggaagccgcactggcacccggcgctcccgcagtcgatagtctggggatggaggaagaagttgatatcgagacagaggctgtggcacctgaggagaggccgagcatgcttgacgaacctcctctccccgtgggagtggaggagccggcggattccagagagcctcccgaagaacccggcctgagccaggagggtgccatgttactgtcacccgaaccccctgcaaaggaggttgaagcccgtccccctctgagtccagagcgggcccctgaacatgatttagaggtagagcccgagccgccaatgatgctgcctctgcctttgcagcctcctcttcctcctcctaggcccccccgcccaccatcacccccacctgaaccagagacaacggacgccagccacccttccgtgcctccagaacccctggcagaagatcaccccccacatacacctggtctatgcggaagcctggccaaaagccagtccaccgaaaccgtgcctgctacacctgggggcgagcctccactgagcggaggatcatccggactgtccttatcttcaccacaagtgccaggatcgccattttcctacccagccccatcccctagcctttccagcggcggattgcccaggacgcccggccgagacttctcattcactccgactttttcagaacccagcgggcctttgttgttacccgtctgcccgttgccaaccggacgccgtgacgagaggagcgggcccctcgcatcgcctgtgctactggagaccggcctgcccttgccgctccctctgccactccctctacctctcgcactgcccgccgtgctccgagctcaggcccgagctccaacccccctgccacccctcttacccgctcctctggcctcctgcccgccaccaatgaagcggaagcccgggcggcctcggcgcagccctccctccatgctgagtctcgatgggccccttgtcagaccccccgccggtgcagctctcggtcgcgaacttctgttgctcccaggccaaccccagacacccgttttcccatccacacatgacccacgtacggttactttggactttcgtaatgcagggatcccagcgccccctccccctcttccgcctcagcctcctccccccccacccccccctccagtggaaccgaccaaactcccttttaaagagttggataatcaatggcccagtgaagccatccccccaggccctagaggacgcgacgaagtcactgaggaatatatggaactcgcaaagagccgcgggccatggcgtcgaccaccaaaaaagcggcatgaagacctcgtcccgcctgccggcagccctgagctaagtcctcctcagcccctgttccgtccacggagcgagtttgaagagatgaccattctgtatgatatttggaatggaggcattgatgaggaggacattaggtttctctgcgtgacatacgagcgcctcctccagcaagataacggaatggactggctgaacgatacattgtgggtctatcatccttcgacatcactgtcgagtgcaaagaaaaagaaaagagacgatggcattcgcgagcatgtgacaggatgcgctcggtctgaaggcttttataccattgacaaaaaagataagctgcgctacttaaatagctctcgcgccagtactgatgaacccccagccgatacccaaggcatgtccatccctgcgcaaccacatgcttccacaagggctggctcagaacgccgaagcgaacagcggcgactcctgtccagttttaccggaagttgcgatagcgatctcctgaagttcaatcagctgaaatttaggaagaagaagctgaagttctgcaagagtcatatccacgactggggcctttttgccatggaaccaatcgcagcggacgaaatggtgattgaatatgtggggcagaacattcggcaggttatcgctgacatgcgtgagaagcgttacgaagatgaaggcatcggatctagctatatgttcagagttgatcatgacactatcatagacgccacaaaatgtggcaattttgctaggtttataaaccatagctgtaatccaaactgctacgcaaaggttattacggttgaaagccagaagaagatcgtgatttactcgaagcagcatatcaatgtgaatgaggagatcacctatgactataaattccccatcgaggatgtgaagattccctgtctgtgtggttctgagaactgcaggggcactctgaactag

SEQ ID NO: 183989 - DNA, 5772 bp, Artificial Sequence
  derived and/or modified sequence
atggagaacagccaccccccccaccaccaccaccagcagcccccaccccagcccggccccagcggggagaggaggaaccaccactggaggagctacaagctgatgattgatcctgccctgaagaagggccaccacaagctgtaccgctatgatggccagcacttcagcctggccatgagcagcaacagacctgtggagatcgtggaggacccccgggtggtgggcatctggaccaagaacaaggagctggagctgtctgtgcccaagttcaagattgatgagttctacgtgggccctgtgccccccaagcaggtgacctttgccaagctgaatgacaacatccgggagaacttcctgcgggacatgtgcaagaagtacggggaggtggaggaggtggagatcctgtacaaccccaagaccaagaagcacctgggcatcgccaaggtggtgtttgccaccgtgcggggggccaaggatgctgtgcagcacctgcacagcacctctgtgatgggcaacatcatccacgtggagctggacaccaagggggagaccaggatgaggttctatgagctgctggtgacaggccgctacaccccccagaccctgcctgtgggggagctggatgctgtgagccccatcgtgaatgagaccctgcagctgagtgatgccctgaagaggctgaaggatggcggcctgtctgctggctgcggcagcggcagcagctctgtgacccccaacagcggcggcacccccttcagccaggacacagcctacagcagctgccgcctggacacccccaacagctatggccagggcacccccctgaccccccggctgggcacccccttcagccaggacagcagctacagcagccggcagcccacccccagctacctgttcagccaggaccctgctgtgaccttcaaggccaggagacatgagagcaagttcacagatgcctacaacagaagacatgagcaccactacgtgcacaacagccctgctgtgacagctgtggccggggccacagctgccttccggggcagcagtgacctgccctttggagctgtgggcggcaccggcggcagcagcggcccccccttcaaggcccagccccaggacagcgccacctttgcccacaccccacctccagcccaggccaccccagcccctggcttcaagagcgccttcagcccctaccagacccctgtggcccacttccccccacctcctgaggagcccacagccacagctgccttcggggcccgggacagcggggagttcagaagagccccagcccccccacccctgcccccagctgagcccctggccaaggagaagccaggcaccccacctggccccccacctccagacaccaacagcatggagctgggcggccggcccaccttcggctggagccctgagccctgtgacagccctggcacccccaccctggagagcagccctgctggccctgagaagccccatgacagcctggacagcagaattgagatgctgctgaaggagcagaggaccaagctgctcttcctgcgggagccagacagcgacacagagctgcagatggagggcagccccatcagcagcagcagcagccagctgagccccctggcccccttcggcaccaacagccagcccggcttccggggccccaccccacccagcagccggcccagcagcacaggcctggaggacatcagccccacccccctgcctgacagtgatgaagatgaggagctggacctgggcctgggcccccggcccccacctgagcccggccccccagaccctgctggcctgctgagccagacagctgaggtggccctggacctggtgggggacaggacccccaccagcgagaagatggatgagggccagcagagcagtggagaggacatggagatcagtgatgatgagatgcccagcgcccccatcaccagcgctgactgccccaagcccatggtggtgaccccaggagctgctgctgtggccgcccccagcgtgctggcccccaccctgcccctgcccccacctcctggcttcccccccctgcccccacctcctcctcctcctccaccccagcccggcttccccatgcccccacccctgcccccacctcctcctcctcctcctccagcccaccctgctgtgacagtgcccccaccacccctgcctgcccctcctggggtgcccccaccacccatcctgccccccctgccccccttccccccaggcctcttccctgtgatgcaggtggacatgagccacgtgctgggcggccagtggggcggcatgcccatgtccttccagatgcagacccaggtgctgagccggctgatgacaggccagggcgcctgcccctacccacccttcatggctgctgctgctgctgctgccagcgctggcctgcagtttgtgaacctgcccccctaccggggccccttcagcctgagcaacagcggccctggccggggccagcactggccacccctgcccaagtttgaccccagcgtgcccccacctggctacatgccccggcaggaggacccccacaaggccaccgtggatggagtgctgctggtggtgctgaaggagctgaaggccatcatgaagagggacctgaacaggaagatggtggaggtggtggccttccgggcctttgatgagtggtgggacaagaaggagaggatggccaaggccagcctgacccctgtgaagtctggagagcacaaggatgaagatcggcccaagcccaaggaccgcatcgccagctgcctgctggagagctggggcaagggggagggcctgggctatgagggcctgggcctgggcatcggcctgcggggggccatccggctgcccagcttcaaggtgaagaggaaggagcccccagacaccaccagcagcggggaccagaagaggctgcggcccagcacctctgtggatgaggaggatgaggagagcgagcgggagcgggaccgggacatggctgacaccccctgtgagctggccaagagggaccccaagggcgtgggcgtgagaagaagacctgcccggcccctggagctggacagcggcggggaggaggatgagaaggagagcctgtctgaggagcaggagagcacagaggaggaggaggaggccgaggaggaggaggaggaggaggatgatgatgatgatgacagtgatgacagagatgaaagtgaaaatgatgatgaggacacagccctgtctgaggccagcgagaaggatgaaggagacagtgatgaggaggagaccgtgtccatcgtgaccagcaaggccgaggccaccagcagcagcgagagcagcgagagcagcgagtttgagagcagcagcgagagcagccccagcagcagtgaagatgaggaggaggtggtggcccgggaggaggaggaggaggaggaggaggaggagatggtggccgaggagagcatggccagcgctggccctgaggactttgagcaggatggagaggaggccgccctggcccctggggccccagctgtggacagcctgggcatggaggaggaggtggacattgaaacagaagctgtggcccctgaggagcggcccagcatgctggatgagccccccctgcctgtgggcgtggaggagcctgctgacagccgggagcccccagaggagcccggcctgagccaggagggcgccatgctgctgagccctgagcccccagccaaggaggtggaggcccggccccccctgagccctgagcgggcccctgagcatgacctggaggtggagcctgagccccccatgatgctgcccctgcccctgcagccccccctgcccccacccaggcctccccggccccccagccccccacctgagcctgagaccacagatgccagccaccccagcgtgcccccagagcccctggccgaggaccaccccccccacaccccaggcctgtgtggcagcctggccaagagccagagcacagaaacagtgcctgccaccccaggaggagagccccccctgagcggcggcagcagcggcctgagcctgagcagcccccaggtgcccggcagccccttctcctacccagcccccagccccagcctgagcagcggcggcctgcccaggaccccaggccgggacttctccttcacccccaccttcagcgagcccagcggccccctgctgctgcctgtgtgccccctgcccactggaagaagagatgagaggagcggccccctggccagccctgtgctgctggagaccggcctgcccctgcccctgcccctgcccctgcccctgcccctggccctgcctgctgtgctgcgggcccaggcccgggcccccacccccctgccccccctgctgcctgcccccctggccagctgccccccacccatgaagaggaagccaggccggccccggcgcagccccccatccatgctgagcctggatggccccctggtgcggcccccagctggggccgccctgggccgggagctgctgctgctgcccggccagccccagacccctgtgttccccagcacccatgaccccaggacagtgaccctggacttcagaaatgccggcatcccagcccctcctccacccctgcccccccagcccccacctcctcctcctcctcctcctgtggagcccaccaagctgcccttcaaggagctggacaaccagtggcccagcgaggccatccccccaggcccccggggcagagatgaggtgacagaggagtacatggagctggccaagagccggggcccctggaggcggccccccaagaagagacatgaggacctggtgcccccagctggcagccctgagctgagccccccccagcccctcttccggcccaggagtgaatttgaggagatgaccatcctgtatgacatctggaatggaggcattgatgaggaggacatccgcttcctgtgtgtgacctatgaaaggctgctgcagcaggacaatggcatggactggctgaatgacaccctgtgggtgtaccaccccagcaccagcctgagcagcgccaagaagaagaagagagatgatggcatccgggagcacgtgacaggctgtgcccggtctgagggcttctacaccatcgacaagaaggacaagctgcgctacctgaacagcagccgggccagcacagatgagcccccagctgacacccagggcatgagcatcccagcccagccccacgccagcacccgggccggcagcgagcggcgctctgagcagaggcggctgctgagcagcttcaccggcagctgtgacagcgacctgctgaagttcaaccagctgaagttcaggaagaagaagctgaagttctgcaagagccacatccatgactggggcctgtttgccatggagcccatcgccgcagatgagatggtgattgaatatgtgggccagaacatccggcaggtgattgctgacatgagggagaagagatatgaagatgagggcatcggcagcagctacatgttccgggtggaccatgacaccatcattgatgccaccaagtgtggcaactttgcccgcttcatcaaccacagctgcaaccccaactgctacgccaaggtgatcaccgtggagagccagaagaagatcgtcatctacagcaagcagcacatcaacgtgaatgaggagatcacctatgactacaagttccccattgaagatgtgaagatcccctgcctgtgtggcagcgagaactgccggggcaccctgaactag

SEQ ID NO: 183990 - DNA, 5772 bp, Artificial Sequence
  derived and/or modified sequence
atggagaacagccaccccccccaccaccaccaccagcagcccccccctcagcccgggccttctggggaacgcaggaatcatcactggcgctcctacaagctgatgattgatcccgctctgaagaagggacaccacaagttgtatcgatacgacggccagcacttctctctcgccatgagctctaatagacccgtagaaattgtagaagacccccgcgtggtcggcatctggacaaagaacaaagaacttgaactcagcgtccctaaatttaaaatcgatgaattttacgtggggccagttccaccaaagcaggttacctttgctaagttaaatgacaacatccgggaaaactttctgcgagatatgtgtaagaaatacggggaggtggaagaagtcgagatcctatataaccctaagaccaagaaacacctcgggatcgctaaagtagtcttcgctacagtcagaggggctaaagatgccgttcagcatctgcacagcaccagcgtgatgggaaatattatccatgtggaattagacacgaagggcgagacgagaatgagattctacgagcttctcgtaactggtcgatatacacctcagaccttgcctgtgggcgaactggacgccgtctctcccatagtgaacgaaaccctccaactgagcgacgccctgaagcggctaaaggacggtgggctgtccgcgggctgcggcagcggatcatcttccgtcacacccaactctgggggcacaccattcagtcaggatacagcatactccagctgccgcctagacacacctaattcatatggccagggcacaccactcacgcctcggctggggacaccattttcacaagacagtagctatagtagtcgccagcccacgccctcatatttgttttcccaggatcccgccgtgaccttcaaggcacgaagacatgaatctaaatttactgacgcatacaaccgcagacacgaacaccattatgtgcacaactccccggccgtcacggcggtggccggagctacggctgcttttaggggcagctctgatcttcccttcggggccgtggggggcacgggcgggtcatctggtccccctttcaaggcccagccacaagacagtgccaccttcgcccacaccccccctccagcccaggctaccccagctcctggctttaaatcagcattcagcccgtaccaaacacccgtggcccacttccctccaccacccgaggagccgaccgccaccgcagcattcggggctcgggattctggtgagttcaggagagctccagcccccccaccattaccaccagctgagcccttagccaaagagaaacccgggacacctcccggaccgcctcctcccgatactaatagtatggagctgggagggaggccgacgtttggttggtcccccgagccctgcgatagccctggaacacccacgctggagagctcgccggccggcccggagaagccccatgactccttggattctcgaatcgagatgttgttaaaagagcaacgcaccaagctgctttttctgcgtgagcctgattcggatacagagttgcagatggagggaagccctatttccagctcttcctctcagctgtctcctttagcacctttcggaactaactcccagccagggtttcgcgggcccacacccccatcttcacggcccagctctaccgggctagaggacatctcccctacgccattaccggactccgatgaggatgaggagctggatctgggactgggccctagaccaccacccgaaccaggcccccccgaccccgccgggttgttgtcacaaaccgctgaggtggcgctggacttagttggcgacaggactccgacctccgaaaagatggacgagggtcagcagtcatccggcgaggacatggaaatctccgatgacgagatgccgtctgcgcctataacatccgctgactgccctaaacccatggtcgttaccccaggggctgcagctgtggcagccccttcagtgttagctccgacactccctctgcctcccccgccaggcttcccacctctcccccctccaccaccaccaccaccacctcaaccaggcttcccgatgcccccacccttaccgcctcccccaccgcctcccccaccagcccacccagcggtgactgttcctccaccgcccttgcccgccccacccggggtgccaccgccacctattttgcctccgctgcctccgtttcctccggggctgtttccagttatgcaggttgatatgtctcatgtactggggggccaatggggcgggatgccaatgagttttcagatgcagacccaggtgctcagcagactcatgaccggacaaggagcgtgcccctatccccctttcatggcagctgccgcagctgcagcctctgctggcttacagtttgtgaatctcccaccgtatagaggacctttttctctatcaaacagcggccctggacgcgggcagcattggccccccctgcccaaattcgaccccagtgtgccccctccaggatacatgccccggcaggaagatccacacaaggctacagttgatggtgtgctactggtcgtacttaaagagctaaaagcaattatgaagagagacttgaaccgcaaaatggtcgaggtggttgccttcagggcctttgatgagtggtgggacaaaaaagagcggatggcaaaggcctcactgaccccagtgaagtccggggagcacaaagatgaggacagaccaaagcccaaagatcgcatcgccagctgcctactggagagctggggtaagggagaagggttggggtacgagggcctgggtctcggcattgggttgcggggcgccatcagactgcccagctttaaggtgaaaagaaaggaaccacctgatacgacgtcgtccggcgatcaaaaacgcttgagacccagcacatcagtagacgaggaagacgaagagtccgagagagagagagaccgcgacatggctgatactccctgtgagctggccaagcgggatcctaagggagtgggagtgagacggagaccagcgcgacccctagaactggacagtggaggagaagaagatgaaaaagaaagtctgtccgaggagcaggaatccacagaagaagaggaagaggccgaagaggaggaggaagaagaagatgacgacgacgacgatagcgatgaccgagacgagtcagagaacgatgatgaggataccgccctctctgaagcttctgaaaaggatgagggggatagcgacgaggaggagacagtctctattgtgacatccaaggccgaagcaacctcttcttccgagtctagtgagagcagcgagttcgagagcagctctgagtctagcccttcctcttcagaggatgaggaggaggttgtggcccgcgaggaggaggaggaggaggaggaagaggagatggtagccgaggagagtatggcttctgccggacccgaagattttgaacaggacggcgaggaagcagctttggcccctggcgccccggccgtagattcccttggcatggaggaggaggtggacattgaaaccgaggccgtggccccagaggaaagaccaagtatgctggatgagccacctctccccgtgggggtcgaagagcccgccgattccagagagccgcccgaggagccaggtctgagccaggaaggcgcgatgctcctcagccccgagccccctgcgaaagaggttgaggctcgacctccactgagccctgagagggctcctgaacacgacctcgaagttgagcctgaaccccctatgatgcttcctctccccttgcaaccacctctaccaccacctagaccccccagacctcctagccctcctccagaaccggaaacaacggacgcttcccaccctagcgtccccccagaacctctcgccgaagatcacccaccgcacactcctgggctgtgcggatcgctggccaagagccagtccacagagacagtccccgctacgccgggcggcgagccacccctctctggaggctcatccggcctctctttgagctccccccaggtgccaggcagcccgttctcataccctgccccgagtcccagtcttagctcgggtggtttgcctcggacccctgggcgagacttctctttcacgccaaccttttccgagccatcgggacctctgctgctgcctgtatgccctctgcctacgggccgccgagacgagcgctctgggcctttagctagcccagttctgctcgagaccggcttgccactgccgctgccccttcccctacccctaccccttgccttgcccgctgtgctgcgcgcccaggccagagcccccacacccctgcccccactcctccccgcccctctcgcttcttgtccccctcccatgaagcgaaaacccggacgcccacgcaggagccctccatctatgctgtcactcgacggaccactggtgcggcctcctgccggtgctgctttaggcagggagttactgctacttccagggcaaccccagactcccgtctttccctctactcacgatcctcgtactgtcacactggatttcagaaacgcagggattcccgctcccccccctcccttacctccccagccacccccgcctcctcccccacccccagtggaacctacaaaattgccttttaaggaactcgataaccagtggcccagcgaggctatcccacccgggccccggggtcgcgacgaagttacagaagaatatatggaactggccaaaagcaggggcccttggaggagaccccctaagaagagacacgaggacctggtgcccccggccggatcaccggaactctccccgcctcagcctctgttcaggccacgcagtgagttcgaggagatgacaattctttatgatatatggaatggtgggattgatgaagaagatataaggttcctgtgtgtgacttacgaacgacttctgcagcaggataacggcatggactggctgaatgatacactgtgggtgtaccaccccagcacctcactgtcctctgccaagaagaagaaaagagacgacgggatccgggagcacgtaactgggtgcgcccgctcagaaggcttctacacaatcgataaaaaggataagttgcgctatttaaatagcagccgggcttcaacggacgagcctcctgccgacactcaaggcatgtccatacctgcccagccccacgcttctactcgagccgggtccgaacgaaggtccgagcagcggaggctgctttcctcgtttaccgggtcctgcgactcagatctgttgaagtttaaccagttgaagtttcggaaaaagaaactcaaattctgcaaaagccatattcatgactggggcttatttgctatggagccaatcgctgcggatgagatggtgatagagtatgtcgggcaaaacatccgacaagtcattgccgacatgcgagaaaaaaggtacgaggacgagggaatcggcagcagttatatgttcagagtggaccacgatactattattgatgccaccaagtgtggtaactttgctcgcttcattaaccattcgtgtaatcctaattgctatgccaaggtgataaccgtggagagccagaaaaagatagttatttattccaaacagcatattaatgtcaacgaggaaataacatacgactacaagtttccaatcgaggacgtaaagataccttgtctctgtggcagcgagaactgtcgcggtactctgaattag

SEQ ID NO: 183991 - DNA, 5772 bp, Artificial Sequence
  derived and/or modified sequence
atggagaacagccaccccccccaccaccaccaccagcagccccccccacaacccggtccatctggagagaggagaaaccaccattggcggtcttacaagctgatgatcgaccctgctctgaaaaaagggcaccataagctatatcggtacgacggtcaacactttagtttggccatgtccagtaaccgtcccgttgaaatcgtggaggatcccagagtcgttggaatttggaccaaaaacaaggagttggagctttctgtgcctaaatttaagatcgacgaattttatgttggtcccgtacccccaaagcaggtgactttcgcgaagctgaacgataacatcagggaaaattttctgcgcgatatgtgcaaaaaatatggagaggttgaggaagttgagatcctgtacaacccgaagacaaagaaacatttaggaatcgcaaaagtggtgttcgccaccgttagaggcgcaaaagacgctgtgcagcatctgcactctacctcggtcatgggtaatatcatccacgtcgaactggataccaagggagaaaccagaatgaggttttatgaactgctggtgactgggagatacacaccccagacactgccagtgggtgaactggatgcggtatcgccaattgttaatgaaacactgcagttatccgacgcgctgaagcgcctaaaggacggcggactgtcggcaggatgtggatctgggagttctagcgtaacacccaactccggaggaactcccttctctcaagataccgcctattcaagctgtagactggacacgcccaacagctatggacaggggacccctctgacccccaggctcggtacaccttttagccaagatagctcatattcctcaaggcaaccgactccttcctacctattttcccaagaccctgccgtaacatttaaggcaagacggcacgaatctaagttcacagacgcatacaatcgccgccatgaacaccactatgttcacaattctcccgccgtgactgctgttgctggagcaaccgccgctttccgcgggagcagtgatcttccttttggcgccgtcggaggcactggagggagctccggcccacccttcaaagcccagcctcaggatagcgcgacattcgcccatacgcccccccctgcacaggcaacccccgcccccgggttcaaaagtgctttttctccctaccagacccccgtggcccattttccaccaccccccgaagagcccactgcaacagcggcgttcggtgcccgcgattcaggggaattccgacgggctccggcaccacctcctctgccgcccgctgagccacttgcaaaggaaaagccagggactcctccaggtcctcctccccctgataccaacagtatggaactcggaggcagacctacctttggctggtcaccggaaccttgtgactcccccggcacaccaactctggaaagctcgcccgccggcccagagaagccacatgacagtcttgatagcaggatcgaaatgctcttgaaagaacagcgcactaaattgctgttcttaagagagcccgattctgatacagaactgcagatggagggctcacccatttcctcatcctccagtcagctgtccccgctcgctccgttcggaactaattctcagcccggatttcgaggcccgacccccccatctagccgaccaagttccacaggtctcgaggacataagcccgacccccctcccggactcagacgaggacgaagagctcgaccttggtcttgggcccagaccaccccctgagccggggcccccagatcctgccggacttctgagtcaaaccgccgaagtagcacttgatttggtgggagaccgcaccccaacaagcgaaaagatggatgaagggcagcagtcctctggcgaggacatggaaatatcagatgacgaaatgccatccgctcccataacaagtgctgactgtccgaaacctatggtcgttactcccggcgccgccgcggtggcagcgcctagcgtgttggccccaactctcccccttcccccacctcccggctttccacccctgccacctcccccgccccctccccctccccagccgggattcccaatgccaccccccctacctcctccccccccccctccccctccggcccatcccgcagtgacagtgccaccacctcccttacctgcgcctccgggggtcccgccgccccccattttaccaccgctgccccctttccctcccgggttgtttcccgtcatgcaggtagacatgagtcacgtgttgggcggacagtggggaggaatgccgatgtccttccagatgcaaacgcaggttctgagtagactgatgacagggcagggagcttgcccgtacccaccattcatggcagcagcggcggccgccgcgtctgcaggcctccagttcgtgaatctgcctccctatcgcggaccttttagcttgagcaactccggtcctgggagggggcagcactggccacctctccccaagtttgacccttctgtgcccccacctggatacatgccccggcaagaagatccacacaaggctacagtcgatggcgtactgctcgttgtcttaaaggagctgaaggcgatcatgaagcgggatctgaaccggaagatggtggaggttgtcgccttccgagccttcgacgaatggtgggacaaaaaggagaggatggccaaagcatcccttacacctgtcaaaagcggagaacacaaggatgaggaccgacccaagcccaaggaccgcatcgctagttgtcttctggagtcttggggtaaaggtgaggggttaggatacgaagggttgggacttggcattggcctgcggggggctattcgccttcccagttttaaggtaaaaagaaaagaaccccccgacacaacaagctctggggatcagaagcggctgcgcccttcgacgagcgtcgatgaggaggacgaggaaagtgagcgggagcgtgaccgggacatggccgacacgccctgtgagctagccaagcgggatcccaaaggggtgggggtgagaaggagacccgctagacctctcgaactcgattccggcggggaagaggatgagaaagaaagcctctctgaggagcaggagtctaccgaggaggaagaggaggctgaagaagaagaggaggaggaagacgatgatgatgacgactcagacgacagggatgaaagcgaaaacgatgatgaggataccgcactgagcgaagcctctgagaaagacgaaggagacagcgacgaagaggagactgtgagtatagtcacatccaaggccgaggctacgtcctcctcagagtctagtgagagcagcgagttcgaatccagttcagaatcaagccccagctcatcggaggatgaggaggaggtggttgctagggaggaagaagaggaagaagaggaggaggagatggtggctgaagagtctatggccagcgccgggcctgaagattttgaacaggatggagaggaggccgcattggcacctggggctccggccgtcgacagcctgggaatggaagaagaagtggacatcgaaacagaggctgtggcgccagaggaaagaccctccatgcttgatgagccaccactgccggtgggagtggaggagcccgccgactccagggagccccctgaagaacctgggctctcacaggaaggcgcaatgctgctgagccctgagccaccagctaaggaagtggaagcccgtcctccactcagccccgagcgcgccccagagcacgatttagaggtggaaccagagccgccaatgatgcttccccttcccctccagcctcctctgccacctcctcgaccaccccgacctccatccccgcccccagaacctgagacaactgacgcttcgcatccctcagtgccaccggagccactggccgaggaccacccgcctcacacccccggcctttgtgggagcctcgctaaaagtcagtcaacggagaccgtgcctgccacaccaggcggcgagccacctctgtccggcggcagtagcgggctcagcttgtctagtccacaagttcctggctcccccttctcttaccccgccccctcaccctccctgtcatcaggcggtctgccccgaacgccagggagggatttctccttcacacctaccttcagcgaaccaagcggaccactgctcttgcccgtttgcccattgcccaccgggaggagagatgagcgcagcggtcccctggcttctccggtgctgctcgaaaccggactcccccttcctctacctctaccactgcctctcccactggctctgccagccgtactcagagcccaagcgcgcgccccaactcccttacccccactgctgccagcgcctctcgccagctgtcctccaccgatgaaacggaagcctggccgtccccgccggtcgcccccaagcatgctgagtctggacggcccgctggtgcgccccccggccggtgccgccttgggccgggaattgctgctcctgcctggccagccccagaccccagtgtttcctagcacgcacgaccctcgaaccgtgacactagatttccgcaatgccgggattccagccccccccccaccgctccctccacagcctccaccacccccaccgccgccccctgtagaacccacgaagctgccttttaaggagttggacaatcagtggccttcagaggctatccctcccggacccaggggccgggatgaggtgaccgaagaatacatggaactcgccaagagccgtggaccttggcgccggcctcccaagaagcgccacgaggacctagttccacctgcagggtcacccgagctcagccctcctcagcccttattccgccctaggtctgagtttgaggaaatgactatcctgtacgacatctggaatgggggcattgacgaggaggacataagattcctctgcgtaacgtatgaaagactccttcagcaggacaacggcatggactggctgaatgacaccttgtgggtgtatcacccttcaacatcactgtcttcagctaaaaagaagaagcgagacgacgggattagggagcatgtgacagggtgcgcgagatctgaaggtttctatacaatcgataaaaaagataaactaagatacctcaacagttcccgcgccagcaccgacgaaccccctgctgacactcagggtatgtcaatcccagctcagccccacgcgagcacccgcgccggctcagaacggagatcagagcagcgccgactcctctcctccttcaccgggagctgcgattctgacttgcttaaatttaaccagctaaaatttaggaagaaaaaactgaagttttgtaagtctcacattcatgattgggggttgttcgccatggagcccatcgcggcggatgagatggtaatcgaatatgtggggcagaacatcaggcaagttatcgccgacatgcgggagaagagatacgaggatgagggcataggtagctcttacatgtttcgggtggaccatgacacgatcattgacgctacgaagtgtgggaacttcgccaggtttataaaccactcctgcaacccaaattgctatgctaaagttatcacagttgagagccagaaaaaaattgtcatttactctaaacagcacattaatgtgaacgaggaaataacatacgattataaatttcccattgaggacgttaaaataccctgcttgtgcggctcagagaactgtaggggcacgttgaattag

SEQ ID NO: 183992 - DNA, 5771 bp, Artificial Sequence
  derived and/or modified sequence
atggagaactcccaccctccgcatcatcaccaccagcaacctccccctcagcctggcccttctggagaaagaagaaaccaccactggcgcagttacaaactgatgatcgaccccgctctgaaaaaaggacatcataagctgtataggtacgacggccagcattttagtctcgctatgtccagcaatcgcccagtcgagatagttgaggaccctcgggtggtgggaatttggactaagaataaggaactggagctttctgtgcccaagtttaaaatagatgagttttatgttggtccagtgcctcctaagcaggtgactttcgccaaactgaacgataacatccgagagaacttcctcagagatatgtgtaaaaaatacggggaagtggaagaagttgagatcttgtataacccgaagacaaagaaacacttgggtattgctaaggttgtgtttgccaccgttagaggcgctaaagacgctgtacagcatctacactcaacaagcgtgatggggaacattatccacgttgagttggacactaagggcgagacccgcatgagattctatgagctcctggtcactgggaggtacactccacagactctgcctgtcggggaactggatgcagtctccccaatcgtcaatgagacccttcaactgagcgatgctctgaaacgcctgaaggatggaggtttgtcagcaggttgcggcagcggaagctcttctgtgacgcccaattcagggggaacacccttctctcaggataccgcctacagttcctgtaggttggatacccctaacagctatggtcaggggacacccctgaccccccgactgggcactccttttagccaggacagttcatactcaagcaggcagcccaccccatcatacctttttagccaggaccctgccgttacatttaaagccaggcgtcacgagtcaaaattcacggacgcctataataggcgccatgagcaccattacgtgcataactccccagccgttaccgccgtagcaggtgccactgctgcatttcggggtagctctgacctcccatttggcgctgtgggcggtacgggcggatcaagcggcccaccattcaaggcccagcctcaggactcagccacatttgcacacactccacctcccgcacaggccacaccggcacccggtttcaaaagtgctttctccccgtatcagacacccgtggctcatttcccccctccacctgaagaaccaacagccacagctgcattcggtgccagggactcaggtgagtttagacgcgctcccgcaccccctccacttccgccagcagaaccactggctaaagagaagcctggcaccccaccagggccacctccgcctgatactaatagtatggaattgggcggtagacccacttttgggtggtcaccagaaccctgcgattctcctggaactcccactctagaatcaagccctgcaggccctgagaagccccatgattcgctggatagccggattgaaatgctgcttaaggaacagagaacgaagctcctgtttttacgggagcccgattcagatacagagttgcagatggagggaagccccataagcagctccagctctcagctctccccactggctccgtttgggaccaatagccaaccaggattcagaggccctacacccccatcatcaaggccaagcagtaccgggctagaggatatcagtccaacccccctaccggatagtgatgaggacgaggagctcgacctgggtctggggcctcgcccaccccctgagcctggcccacccgaccctgccggattgctgtcccagacagccgaggttgcactggatctcgtgggggatcgaacccctacatctgagaagatggatgagggccagcagagctcaggagaagacatggaaatcagtgacgatgagatgcccagtgctcctatcactagcgctgactgtccaaagcctatggttgtgaccccaggtgccgctgctgttgccgcacctagcgtcctggctccaactctgcctctcccccctccccctggctttcctcccctcccccctccccctccgccacctccaccccaaccaggttttccaatgcctcccccactcccaccccctccacctcccccacccccagcccaccctgctgtgaccgtccctccacctcctctgcctgctcctccaggcgtgcctccacctcccattctgccgcctctgcctcccttcccccctggtctcttccccgtaatgcaagtggacatgagccatgtgcttgggggtcagtggggagggatgcccatgtcattccagatgcaaacccaagtgctcagccggctgatgacagggcaaggagcttgcccttacccaccatttatggctgccgctgccgctgccgcttccgccggtttgcagttcgtcaacctgccaccctacagaggccctttttccttgtctaacagtggtcccggtaggggacagcattggcctcccttgccaaagttcgatcctagcgtcccccctccaggctacatgcccaggcaggaggacccccacaaagccaccgtcgacggcgtcctattagttgtactgaaagaactaaaggctataatgaaacgggatctgaacaggaaaatggtcgaagtcgtcgcttttcgggctttcgatgaatggtgggacaagaaggagcgcatggctaaggcctccctgactcccgtgaagagcggcgagcataaggatgaagaccgtcccaagccgaaagaccgcatagcttcgtgcttactggaaagttggggcaaaggggaaggcctgggctacgaaggcctgggtctagggattggtctgcggggagcaatcaggctccctagctttaaggtgaagcgcaaggagcctccagacacgacatcttcaggagatcagaaacgcttgaggccttccacaagtgtcgacgaggaggatgaggagtcagagcgggagcgggacagagatatggctgacactccttgtgaactggctaaacgcgatcctaaaggcgtcggggttcggagacgaccggctaggccgctggaacttgacagtgggggagaggaggacgagaaggagtctctgtccgaggaacaagagtccactgaagaagaggaagaggctgaagaggaggaggaagaagaggacgacgacgacgacgattctgacgaccgcgatgagtccgagaacgatgacgaagacaccgctctgtccgaggccagcgaaaaagatgagggagacagcgacgaagaagaaactgtatctatcgttacgagcaaagcggaggccacttcatcaagcgaatcatctgagtcgtccgagttcgagtcctcctctgaatcatcaccctcatcctccgaggacgaggaggaagtggtggccagagaggaagaggaggaggaagaggaggaggagatggttgccgaagagtctatggcttcagccggacccgaggacttcgaacaggacggcgaggaggctgcacttgcgccaggagcccctgccgtggactccctgggcatggaggaagaagtggatatcgagacagaggccgtggctcccgaagaaagaccctccatgttagatgagccaccacttccggtgggcgtggaagagcctgctgatagccgtgagccaccagaagagcccggactctctcaggagggcgctatgttgctgtctccagaacccccagccaaagaggttgaagcaagaccgccactaagtcccgagcgagcacctgagcacgatctggaagtcgagccggaaccccctatgatgttgccgcttcccttgcagccaccattaccccctcctagacccccaaggcccccaagcccacctcctgagccagagacaacagacgcctcacatccgagtgttcctcctgaacctctggccgaggaccatccaccgcacactccaggtctgtgcggcagccttgccaaatcacaaagcacagagacggttcctgccacaccgggaggtgaaccgcctctcagcggagggtcatctgggttatccctgtcgtctcctcaggtccccggttcaccgttttcttacccggctccctctcccagtctgtctagtggtgggctgccgaggactcccggaagggatttctctttcacaccaacattctctgaacccagtggccctctgctgctgcctgtttgtcccctgccaacaggcaggagggatgagaggtccggacctcttgccagcccggtgctcctggaaaccggactgccactgccactcccactgcctctaccattaccgctagcattgcctgcagtcctccgggctcaagcccgagctccgacccccctaccacccctactccccgcacccctggccagctgtcccccacccatgaaaagaaaacccggaagaccaagacgctctccgccatcaatgctgagtcttgacggtccactggtacgacctcctgccggtgccgcacttggtcgggagctgctgcttcttcctggacagcctcagacacctgtctttccaagcactcatgatcccagaactgtaacactcgacttcagaaatgccggtatccccgcacccccacctccacttccccctcagccaccccctccaccgcctccccctcctgtagaaccaacaaagctccctttcaaggagcttgacaaccagtggccatctgaagcaataccccctggcccaagggggagagatgaggtgactgaagaatacatggaattggctaaatctcggggaccttggcggaggcctcctaaaaaacgtcacgaagacctggtgcctccagccggaagtcccgagttatcccctcctcagccgctttttcgaccacggagcgagttcgaagagatgactatcttgtacgacatatggaacggtggcattgacgaagaagacatcaggtttctgtgtgttacctatgagaggctgctccagcaggataacggcatggattggcttaacgacaccttgtgggtataccaccctagcaccagtctcagctccgccaagaagaaaaagcgcgacgacgggatccgcgaacatgtcaccgggtgtgccagaagcgaaggattttacactatcgataaaaaggataagttaagatatctgaattcctcacgcgcttcaaccgatgagcctccagctgacacccagggcatgtctatccctgcacaaccacatgcctccactcgagctggcagcgagagacggtcagagcaaaggcggttattgtcatctttcacaggctcctgcgactcagatctcctaaaattcaatcaactgaaattcagaaagaagaagctgaagttctgtaagtcgcacatacatgactggggattattcgctatggaaccaatagcagcagatgagatggtgatcgaatatgtgggacagaatataaggcaggtgatagctgacatgagagagaagcggtacgaggacgaaggaatcggttcctcttacatgtttcgcgtggaccacgataccataattgatgcaacaaagtgtgggaactttgcacggtttatcaaccacagttgcaacccaaactgctacgccaaggtgataacagtggaatcccagaaaaaaattgtgatttatagcaagcagcacattaatgtcaatgaagaaataacctatgactataagtttcctattgaggacgttaagatcccatgtctatgtgggagtgagaattgccgcggtaccctcaatta

SEQ ID NO: 183993 - DNA, 5771 bp, Artificial Sequence
  derived and/or modified sequence
atggaaaacagccaccccccacaccaccatcatcagcagcctcctccacaacctggaccctccggtgagcgcaggaaccatcactggagatcttataaacttatgatagatcctgctctcaagaaggggcaccataagctgtatcgctacgatggacagcacttctctctcgctatgtcatctaaccggccagtggagatcgtcgaagaccctcgagtcgtgggcatttggaccaagaataaggagctcgagctaagcgtaccaaaattcaagatcgatgagttctacgtagggccagtgcccccaaaacaagtgacattcgccaaactgaacgataacatcagagagaattttctcagagacatgtgtaagaagtatggcgaggtggaggaagtcgaaattctttacaaccccaaaacgaagaagcatctgggaatcgccaaagtggtatttgcaacagtgcgcggagctaaggatgcagttcagcacttacatagcacgagcgtaatggggaatatcatccatgtcgaactggacaccaagggggagactagaatgagattctacgaactcctggtgacaggacggtacactccccaaactcttcctgtcggagagctggatgcagtgagccctatcgttaacgagacactccaactcagcgacgctctgaagagactgaaagacggcggactgagcgctggatgcggatccgggtcttcttccgtgactcctaattcaggtgggacgccgttttcccaagatactgcatactcttcatgtcgcctagatacccctaactcgtatgggcaaggtaccccgctgactccacgcttaggaactcctttcagtcaagattccagttacagttcccggcagccaaccccaagctacctcttttctcaggacccagcagtgacttttaaagcacgccgacacgagagcaagttcaccgacgcatataaccgacgccacgagcatcactacgtgcacaactcgccagcagtgacggcggtagcaggcgcaaccgccgcattccgaggaagctcagatttgcccttcggcgctgtggggggaacaggcggtagttccggccctccatttaaagcccaaccacaggactcggcgacgtttgcccacactcctcctcctgcgcaggcaactcccgcaccaggtttcaagtccgcctttagcccataccagaccccagttgcacatttccccccacccccagaagaacctactgcgacagccgctttcggggcaagagacagcggagagtttaggcgagcccctgctccacccccattaccccctgccgaacctctggccaaggaaaagcccggaaccccacctgggccacctccccctgataccaacagtatggagctgggaggacggccaacgtttggatggtcccccgaaccctgcgactcccccggaactcctaccttagaaagcagcccagccggtcctgaaaagcctcacgacagtttggatagcagaattgagatgctgttgaaggagcagcggacaaaactgctgtttctcagggagccagattccgataccgagctgcagatggaaggctcccccatcagttcatcttcctctcagttgagcccattggctcccttcggtaccaacagtcagccagggttcagggggccaaccccaccctcatcacgaccctccagcacggggctggaggacatctctccaacaccactgcccgacagcgacgaagacgaagaactcgacctcggcttgggcccaaggcccccaccggaacctggacccccagatccggctgggctgctctcccagactgctgaggtggcgctggatctggttggcgaccgcactcccactagtgaaaagatggatgagggacaacagagcagcggcgaggacatggagattagcgatgatgaaatgccaagcgcccctatcacttccgccgactgcccaaagcctatggttgttacccccggtgccgctgccgttgccgctccctcagttctcgccccaacgctaccccttccaccacctccaggctttcccccattgcccccacccccacctcccccaccaccacagccaggttttccaatgccccctcctctgcccccacccccaccccctcctcctcctgcacaccccgctgttaccgtcccacccccaccactgcccgctccaccaggagtgcctcctccgccaatcttgcctcctctgcctccctttccccctggattgttccctgtcatgcaggtggacatgagccacgtgctgggcggacaatggggcggaatgcctatgtctttccagatgcaaactcaagtcctgagtcgccttatgactgggcaaggtgcttgcccctatccccctttcatggctgcagccgctgccgctgcatcagcagggctacagtttgtgaacctgcccccttatagaggaccattttcactgtcaaactcaggccctggcaggggacagcactggcccccactgccaaaatttgacccctcagtaccccctccaggttatatgcctaggcaagaggatcctcacaaggcgactgtggacggcgtgcttctggtcgtccttaaggagctgaaagccataatgaagcgggacctgaaccggaaaatggtggaagtcgtggcttttcgggcattcgacgaatggtgggataagaaggaaagaatggctaaggcgtcattaacccctgtgaagagtggtgaacacaaagatgaggacaggcccaagcctaaagataggattgcttcttgtctgttagagtcatggggtaagggcgagggtctcgggtacgaagggttgggacttggaattggtctcagaggggctatccgcctgccctcgttcaaagttaaaaggaaagaaccgcctgacactacctcttctggcgatcagaagcgactgcgaccctctacctcggtcgacgaagaggatgaggagtctgagcgagaacgggacagggacatggctgatacaccttgtgagctcgccaagcgcgacccgaaaggagtgggcgtgaggcggagacctgcaaggcccctggaactggactctgggggagaagaggatgagaaagagagcctctcggaagaacaggagagcacagaagaggaagaggaggctgaggaggaggaagaagaggaagatgatgacgacgacgattcagatgatagagacgagtcagagaacgatgatgaggatacagccttaagcgaagcgagcgagaaggacgagggcgactccgacgaggaagagacggttagcattgtcaccagcaaggcagaagcaacatctagttccgagagtagcgagagctctgaattcgagtcttctagtgaatcctccccttccagcagcgaggacgaagaagaggtggtagccagggaggaggaggaggaagaggaggaggaggaaatggtggctgaggaaagcatggcctcagctgggcctgaagatttcgagcaagacggagaagaagccgcattggcgccaggtgcccctgccgtcgatagtctggggatggaggaagaagtggacatcgagacagaggccgttgcccctgaggagaggccttccatgctggatgaaccaccccttcccgttggcgtcgaagagcccgctgattctagagagcctccagaggagcctgggctctctcaggagggggcaatgctattaagccctgagcccccagcaaaggaggtggaagcacgaccaccattgagcccggaacgggcaccagagcatgacctggaagtggagcctgagccacccatgatgctccccttgccactgcagccaccccttccccctccaagaccccctagaccaccgtccccaccaccggagcctgaaacgacagatgcatctcatccttcggtgccccctgaacccctggccgaagatcatcctccccacacaccaggcctgtgcggcagtctggccaagtcccaatcaaccgaaactgtccctgcaacaccagggggagaacccccactcagtggaggcagctcagggctgtcccttagttccccccaagtgccgggatccccttttagctaccccgcaccttctccgagtttatcctcaggagggttgcctaggacaccgggaagagatttctcttttactccaacattctctgaaccatccggccctctactgctccccgtctgtcccctccccaccggtcgacgagacgaaagatctgggccactggcaagtcccgtgctcttggaaacaggcttgcccctgccactgccactgccgctgccgctacccctggctctgccagctgtactgcgcgcacaagcgagggccccaactcctctgccaccactgctccctgccccattggccagctgtcctccccctatgaagcgaaagcccggaagacctagacgctctccgcctagtatgctcagcctggatggtcccctggtaagaccaccggctggagcagctttaggacgcgaattgctgctcctgcctgggcaaccacaaactcccgtctttccttccactcacgacccaaggaccgtaacactggatttcagaaatgccggaatccccgcacctcccccaccgctgccaccacagcctcccccaccacctcccccacctcccgtcgagcccaccaagctcccttttaaagaactcgacaaccagtggccctcggaagccatcccacccggaccacgaggacgggatgaggtcacagaagaatacatggagctcgcaaaaagcaggggaccctggagacggcctcctaagaagaggcatgaagacctcgttcccccagctggcagtccagagttgtctccccctcagccactgttcaggccaagatcagaattcgaagaaatgactatattgtacgatatctggaacggcggaatagatgaggaggacatcaggtttctttgtgtcacctatgaacgactcctgcagcaggataatggaatggactggctgaatgataccctctgggtgtaccaccctagcacctccctctcttcggcgaagaaaaagaaacgggatgacgggatccgcgagcacgtgacaggatgtgctcggagcgagggtttctacactatcgataagaaggataagttgagatacctcaacagtagccgtgcctcaactgatgagccccctgccgacacacaggggatgtctattcccgcacaacctcacgcaagtacccgggcaggcagcgaaaggaggtctgagcagaggcgtttgctctctagcttcaccggtagttgcgattccgacctgctcaagtttaaccaacttaaatttaggaaaaagaagctcaagttctgcaagtcccacatccacgattggggacttttcgctatggagccaatagccgcagacgagatggtgattgagtatgttggccagaacattcgccaggtaatagcggatatgagagagaagaggtatgaggatgaaggcattggatcctcgtatatgttcagggtggatcatgatactataatcgatgccactaagtgcggcaacttcgcacgctttattaaccacagttgcaatcccaactgctatgctaaggtgataaccgttgagtcacagaagaagatagtgatctacagcaagcaacatatcaacgtcaacgaagagataacttatgactacaagttcccaatagaggacgtaaaaataccgtgtctgtgtgggtccgagaactgccgtggcacacttaacta

SEQ ID NO: 183994 - DNA, 8195 bp, Artificial Sequence
  derived and/or modified sequence
aacggcatggagaacagtcaccccccccaccaccaccaccagcagcccccgccgcagcccggcccttcgggcgagaggaggaaccaccattggagaagttacaagttgatgattgacccggctctgaaaaaggggcatcataaactgtaccgctacgatgggcagcatttcagcctggcgatgtccagcaaccgcccggtggaaattgtcgaagatccccgggtcgtcgggatctggaccaaaaacaaggagctggagctgtcggtgcccaaattcaagatcgatgagttctacgtgggcccggtgcctccgaagcaggtgacatttgccaagctgaatgataacatccgtgaaaacttcctgagggacatgtgcaagaagtatggggaggtggaggaggtggagattttgtacaaccccaagaccaagaagcacctgggcatcgccaaggtggtctttgccacggtccggggagccaaggatgccgttcagcacttgcacagcacttccgtcatgggcaacattatccacgtggagctggacaccaaaggggaaacccgaatgcggttctatgaactgttggtcactggccgatacaccccccagaccctcccagtgggcgagctggacgctgtctctccaatcgtgaatgagaccctgcagctgtcagatgccctgaagcgcctcaaggatggaggcctgtctgcaggctgtggctccggctcctcctctgtcacccccaatagcggtgggacacccttctcccaggacacagcttattccagctgccgcctggacacacccaactcctatggacagggcaccccgctcacaccgcgcctgggcacccctttctcacaggactccagctactccagccgccagcccacaccctcatacctcttcagccaggaccctgcagtgaccttcaaggcccggcgccacgagagcaagttcacggacgcctacaaccgccgccacgaacatcattatgtacacaattctcccgcggtcactgcggtggccggggccacagccgctttccggggttcctcggacctcccgttcggagcagtcggcggcactgggggcagcagcggtcccccgttcaaggctcaaccacaggattcagccacatttgcccacactccaccacccgcccaagcaacccctgctcctggattcaagtctgctttctctccgtatcagaccccagtggcccacttccctccacccccggaagagcccaccgccacagccgcttttggggcccgcgacagtggggagttccggagggcaccggcgcccccacccctgccacctgctgagcctctggccaaggagaagccaggcacgccacccggcccgccgccccccgacaccaacagcatggagctgggcggccggcccaccttcggctggagtcctgagccctgtgacagccctggcacgcccacgctggagtcgtcccctgcagggccagagaaaccccacgacagcctggactcgcgcatcgagatgctgctgaaggagcagcgcaccaagctgctcttcctgagggagccggactcggacaccgagctgcagatggagggcagccccatctcctcctcctcctcccagctctccccactggccccctttggcaccaactcccagccaggcttccggggccccacgcccccctcgtcacgcccctccagcaccggcctggaggatatcagcccaacacccctcccagactccgacgaggacgaggagctcgacctgggccttgggcctcggcctccacctgagccaggccccccggaccctgctgggcttctgagccagacagctgaggtggccttggacctggttggagacagaaccccgacctcagagaagatggatgagggccagcagtcctcaggcgaggacatggagatctcggatgacgagatgccctcggcccccatcaccagcgctgactgccccaagcccatggtggtgaccccaggagcggcagccgtggcagccccttctgtgctagccccaaccctgccgctgcccccgccacctggcttccccccgctgccccccccaccaccaccacccccaccgcagcctggcttccccatgcccccaccgctgcccccaccgccgcccccaccccctccagcccaccctgctgtgacagtgcccccaccacccttgccagcgccgcctggagtcccgcccccacccatcctgccaccactgcccccctttccgccgggcctgttccctgtgatgcaggtggacatgagccacgtgctgggtggccagtggggcggcatgcccatgtccttccagatgcaaacgcaggtgctcagccggctgatgacgggccagggcgcctgcccctacccgcccttcatggccgctgcggccgccgctgcctcagctgggctccagtttgtcaacctgccgccctaccggggccccttctccctgagcaactccggcccaggccgcgggcagcactggccaccactgcccaagtttgacccgtcagtgcctccaccaggctacatgccacgccaggaggacccacacaaagccacggtggatggcgtcctgctggtggtcctcaaagaactcaaggccatcatgaagcgtgacctgaaccgcaagatggtggaagtggtggctttccgggcctttgacgagtggtgggacaagaaggagcggatggccaaggcctcgctgaccccggtgaagtcgggcgagcacaaggacgaggacaggccgaagcccaaggaccgcatcgcctcgtgcctgctggagtcatggggcaagggcgagggcctgggctacgagggcctgggcctgggcattgggctgcgtggggccattcgcctgccctccttcaaggtcaagaggaaggagccaccagacaccacctcatctggcgaccagaagcggctgcggccctcgacctctgtggatgaggaagatgaagagtccgagcgagagcgagaccgggatatggcagacaccccctgtgagctcgccaagcgggaccccaagggcgtgggtgtgcggcggcggccggcgcggcctctggagctggacagtggtggggaggaggacgagaaggagtcattgtcggaggaacaggagagcaccgaggaggaagaggaggcggaggaggaggaggaggaggaagatgacgacgatgacgacagtgatgaccgggacgagtctgagaacgatgacgaggacacagccctgtcagaggcgagtgagaaggacgaaggggactcggatgaagaggagacagtgagcattgtaacctccaaggccgaagccacgtcgtccagtgagagttccgagtcttctgagtttgagtcaagctccgagtcctcgccctcatcctcggaggatgaggaggaggtagtggccagggaagaggaggaagaagaggaggaggaggagatggtggccgaggaaagcatggcttctgcaggccctgaggactttgagcaggacggggaggaagcggctctggccccgggggcacctgcagtggactcgttgggcatggaagaggaggtggacatcgagactgaggctgtggcccctgaggagcggccctccatgctggacgagccccccttgcctgtgggtgttgaagagccagcggactccagggagccgcctgaggaaccaggcctgagccaggaaggggccatgttgctgtctccagagccccctgccaaggaggtggaggctcgacccccattgtcccctgagcgagctccagaacatgacctggaagtggagccggagccccctatgatgctccccttgccgctgcaaccaccattgccgcccccacgaccaccccggccacccagcccaccgccggagcctgagaccacagatgcctcacacccatctgtccctccggagccccttgccgaggaccaccccccgcatactccaggcctctgtggcagcctggccaagtcgcagagcacagagacggtgccagccacaccaggcggggagcccccgctatcagggggcagcagtggcctgtccctgagctctccgcaagtgcccggcagccccttctcctacccagccccgtcccctagcttgagcagtgggggcctccctcggacacctggccgggacttcagcttcacacccaccttctccgagcccagcgggcccttgctcctgcccgtctgcccactccccactggccgacgcgatgaacgctccgggcccctggcctccccggtgctcctggagacgggcctgcccctccctctgccccttcccctgcccttgcccttggcattgcccgccgtcttgcgggcccaggctcgtgcgcccaccccgctgccacccctgctgcccgcccccctggcctcttgccctcccccaatgaagaggaagccgggccggccccggcgatccccaccatctatgctctccttggatgggcccttggtccgaccaccagcaggggccgcccttggaagggaactcctgctcctgccgggccagccacagacccccgtcttccccagcacccatgacccccggacggtgaccctggacttccggaacgcggggatcccagcccctccaccaccccttcccccccagccacccccacccccacctcccccacctgtagagcccaccaagctgccctttaaggagctagacaaccagtggccctccgaggccattcctccgggcccccgtgggcgcgatgaggtcactgaggaatacatggagttggccaagagccgggggccgtggcgccggccacctaagaagcgccatgaggacctggtgccacctgcgggctcgcccgaactctcgccaccccagcccctcttccggccccgctcggagtttgaggagatgaccatcctgtatgacatctggaacggtggcatcgatgaggaggacatccgcttcctgtgtgtcacctacgagcgactgctacagcaggacaatggcatggactggcttaacgacacgctctgggtctaccatccctccaccagcctctcttcagctaagaagaagaaacgggacgatggcatccgcgagcacgtgacgggctgtgcccgcagtgagggcttctacaccatcgacaagaaggacaagctcagatacctcaacagcagccgtgccagcaccgatgagccccccgcagacacccagggcatgagcatcccagcacagccccacgcctccacccgggcaggctcggagcggcgttcggagcagcgccgcctgctgtcctccttcactggcagctgtgacagtgacctgctcaagttcaaccagctcaagttccggaagaaaaagctcaagttctgcaagagccacattcacgactggggcttgttcgccatggagcccatcgcggctgacgagatggtcatcgagtacgtgggccagaatatccgtcaggtgatcgcagacatgcgggagaagcgttatgaggacgagggcatcgggagcagctacatgttccgggtggaccatgacaccatcatcgacgccaccaagtgcggcaacttcgcgcgcttcatcaaccacagctgcaaccccaactgctatgccaaggtgatcacggtggagtcacagaagaagatagtcatctactcgaagcagcacattaacgtcaatgaggagattacctatgactataagttccccatcgaggacgtcaagatcccctgcctctgtggctccgagaactgccgggggaccctcaactaggccccggcaccagactcaaaggatgtcagccgtagccctgggactcccgagcgtggagcccctggccccggggcccggccccccgcgcccgcccccatttcaggtgctgtcctctacccagcggccattcagggcctggcgccccacactaccccctggagcccctggctccggcccctccgcgggaaagggcttctctgtcgttcagcccacgtctctctcattttaacaaacgcccctttcaggatttctgtttaactccagcatcagcttctctctctccgtctctcctcccctctctctcttctctgtctcttctctctcccaccatcaccctcggcctcttcctgtgaatgctgctacgttgttttgtcttctctatttttttcctcgttgtgagaaaagacatttaaccgttgaaatgtgaaggtggaatcagagaggggccccgcgggggtctgcagaggcctcagtgtggctgtgcgtggcccgtgtcctggaagccacccggacctggacgcagggccaggtgctgtgggaaggatggaggcccccacggccttgacctcagaacactacgccctgaaagcgcccctcactgcccgtgggcacagtgaggagaccccacacctttccccacccgagctgcagcctgttccttccccagaggcctggggcaccactgacccggtggaccctgatggagctaagctgtcccaggcaggggtctccgctctgggctttccctgccacctcacaccccagcaccccctaaaccttgggttcaatgtttactttctcattcggatgccagcaacgcgggagcctctcggaggccccagtgcaggtgaggggcgctgagaacgcgggcagccactctcttctgcccttgccttcgccctgggtgggacagggctcccaagggcaggcgggtcccccagtcccgccattacgggttgtcagaccgtctgcgtgtggcattttttggcttataagcttcacccactcacccccaacccacaccccacatccccctgccggcagcccctcaacctaagaaggccagagcatatttattttcggagggagcagattacttctcccagagaaaggaaaatcttggaaaagatttaaaaacacaaatctaagccttgacggtttttttttcccttttgacccccttcccatctcttcagaatttattcccatggcttttttttttcttgtgcgtgtataaaatcaaaaggaaggggaaaaaggtttttgaagttcagaaccaacttctgtatatagaggctgccgcaaaggactttctcttgggaacattgtttcttgtagaaacatgcgggaagacattttttgctcatttctttgtacttccaaaaaaaaaggaaaaaaaagacaaaagcaagtccccccgtaccccagaaagcagaggaggcgtgtaaataatttctggaaagtgactgttgtgacccggagtcctcatcaagatgagcgcgctccatgagggagctgctcccaccctgcggacgcaggcggccggagcctctggtatctcagcttgtgtcaagcttgttatcatgtaaattctgtacaaagaattgttatttttctcttttttgttgttggtggttttgttgtgtgttttttgttgttttttttttattcctttcccccaggccctctctatttgagactgtgcccgccggtttcaagatcaaggaaattggtggcaacaagacacagatggggtacctgggcacagcggcgaacttctcttccgtttgcggttttctgcctaattgtgcaactgaggaaataatttatttttcacatgaggaaatgcgtagcttgtagagacggctgattcaagttacatgtacagcctccaaagggctgtctccattctgtccccttcccataaaagaagtgggggtgttcgagaagaccagggaagggacccttgcctcacccctccccctggcctcaccttgctcccagccatcgtgcccagtgttaacctcggctggccttcactaaggggactagacctccctctccccaggagccccagccccagagtggtttgcaataatcaagatatgtgtcgagtcatttttctttcaactccctcatttttcattgaacaaatctctgcttttcaagagttgggggtttctgctattttttgctttctctccctccccctgcaaagatgagaaccaatgagttttagggatgtttgtgcgggtagactccatcatccatatgtaacttgttttgaagagaagtgtttccgttgtgtgtcttgatgtaaatatttgttcatatttttgtgaattcaatactatgtaccattgtattatagtaacttttataaagcaaaccataaatatactgacttttcttacaga

SEQ ID NO: 183995 - DNA, 8185 bp, Artificial Sequence
  derived and/or modified sequence
gggggacaccatgtactggctggcggcgcagggaggccggcgcccggcggggatgttgggttaacggcatggagaacagtcaccccccccaccaccaccaccagcagcccccgccgcagcccggcccttcgggcgagaggaggaaccaccattggagaagttacaagttgatgattgacccggctctgaaaaaggggcatcataaactgtaccgctacgatgggcagcatttcagcctggcgatgtccagcaaccgcccggtggaaattgtcgaagatccccgggtcgtcgggatctggaccaaaaacaaggagctggagctgtcggtgcccaaattcaagatcgatgagttctacgtgggcccggtgcctccgaagcaggtgacatttgccaagctgaatgataacatccgtgaaaacttcctgagggacatgtgcaagaagtatggggaggtggaggaggtggagattttgtacaaccccaagaccaagaagcacctgggcatcgccaaggtggtctttgccacggtccggggagccaaggatgccgttcagcacttgcacagcacttccgtcatgggcaacattatccacgtggagctggacaccaaaggggaaacccgaatgcggttctatgaactgttggtcactggccgatacaccccccagaccctcccagtgggcgagctggacgctgtctctccaatcgtgaatgagaccctgcagctgtcagatgccctgaagcgcctcaaggatggaggcctgtctgcaggctgtggctccggctcctcctctgtcacccccaatagcggtgggacacccttctcccaggacacagcttattccagctgccgcctggacacacccaactcctatggacagggcaccccgctcacaccgcgcctgggcacccctttctcacaggactccagctactccagccgccagcccacaccctcatacctcttcagccaggaccctgcagtgaccttcaaggcccggcgccacgagagcaagttcacggacgcctacaaccgccgccacgaacatcattatgtacacaattctcccgcggtcactgcggtggccggggccacagccgctttccggggttcctcggacctcccgttcggagcagtcggcggcactgggggcagcagcggtcccccgttcaaggctcaaccacaggattcagccacatttgcccacactccaccacccgcccaagcaacccctgctcctggattcaagtctgctttctctccgtatcagaccccagtggcccacttccctccacccccggaagagcccaccgccacagccgcttttggggcccgcgacagtggggagttccggagggcaccggcgcccccacccctgccacctgctgagcctctggccaaggagaagccaggcacgccacccggcccgccgccccccgacaccaacagcatggagctgggcggccggcccaccttcggctggagtcctgagccctgtgacagccctggcacgcccacgctggagtcgtcccctgcagggccagagaaaccccacgacagcctggactcgcgcatcgagatgctgctgaaggagcagcgcaccaagctgctcttcctgagggagccggactcggacaccgagctgcagatggagggcagccccatctcctcctcctcctcccagctctccccactggccccctttggcaccaactcccagccaggcttccggggccccacgcccccctcgtcacgcccctccagcaccggcctggaggatatcagcccaacacccctcccagactccgacgaggacgaggagctcgacctgggccttgggcctcggcctccacctgagccaggccccccggaccctgctgggcttctgagccagacagctgaggtggccttggacctggttggagacagaaccccgacctcagagaagatggatgagggccagcagtcctcaggcgaggacatggagatctcggatgacgagatgccctcggcccccatcaccagcgctgactgccccaagcccatggtggtgaccccaggagcggcagccgtggcagccccttctgtgctagccccaaccctgccgctgcccccgccacctggcttccccccgctgccccccccaccaccaccacccccaccgcagcctggcttccccatgcccccaccgctgcccccaccgccgcccccaccccctccagcccaccctgctgtgacagtgcccccaccacccttgccagcgccgcctggagtcccgcccccacccatcctgccaccactgcccccctttccgccgggcctgttccctgtgatgcaggtggacatgagccacgtgctgggtggccagtggggcggcatgcccatgtccttccagatgcaaacgcaggtgctcagccggctgatgacgggccagggcgcctgcccctacccgcccttcatggccgctgcggccgccgctgcctcagctgggctccagtttgtcaacctgccgccctaccggggccccttctccctgagcaactccggcccaggccgcgggcagcactggccaccactgcccaagtttgacccgtcagtgcctccaccaggctacatgccacgccaggaggacccacacaaagccacggtggatggcgtcctgctggtggtcctcaaagaactcaaggccatcatgaagcgtgacctgaaccgcaagatggtggaagtggtggctttccgggcctttgacgagtggtgggacaagaaggagcggatggccaaggcctcgctgaccccggtgaagtcgggcgagcacaaggacgaggacaggccgaagcccaaggaccgcatcgcctcgtgcctgctggagtcatggggcaagggcgagggcctgggctacgagggcctgggcctgggcattgggctgcgtggggccattcgcctgccctccttcaaggtcaagaggaaggagccaccagacaccacctcatctggcgaccagaagcggctgcggccctcgacctctgtggatgaggaagatgaagagtccgagcgagagcgagaccgggatatggcagacaccccctgtgagctcgccaagcgggaccccaagggcgtgggtgtgcggcggcggccggcgcggcctctggagctggacagtggtggggaggaggacgagaaggagtcattgtcggaggaacaggagagcaccgaggaggaagaggaggcggaggaggaggaggaggaggaagatgacgacgatgacgacagtgatgaccgggacgagtctgagaacgatgacgaggacacagccctgtcagaggcgagtgagaaggacgaaggggactcggatgaagaggagacagtgagcattgtaacctccaaggccgaagccacgtcgtccagtgagagttccgagtcttctgagtttgagtcaagctccgagtcctcgccctcatcctcggaggatgaggaggaggtagtggccagggaagaggaggaagaagaggaggaggaggagatggtggccgaggaaagcatggcttctgcaggccctgaggactttgagcaggacggggaggaagcggctctggccccgggggcacctgcagtggactcgttgggcatggaagaggaggtggacatcgagactgaggctgtggcccctgaggagcggccctccatgctggacgagccccccttgcctgtgggtgttgaagagccagcggactccagggagccgcctgaggaaccaggcctgagccaggaaggggccatgttgctgtctccagagccccctgccaaggaggtggaggctcgacccccattgtcccctgagcgagctccagaacatgacctggaagtggagccggagccccctatgatgctccccttgccgctgcaaccaccattgccgcccccacgaccaccccggccacccagcccaccgccggagcctgagaccacagatgcctcacacccatctgtccctccggagccccttgccgaggaccaccccccgcatactccaggcctctgtggcagcctggccaagtcgcagagcacagagacggtgccagccacaccaggcggggagcccccgctatcagggggcagcagtggcctgtccctgagctctccgcaagtgcccggcagccccttctcctacccagccccgtcccctagcttgagcagtgggggcctccctcggacacctggccgggacttcagcttcacacccaccttctccgagcccagcgggcccttgctcctgcccgtctgcccactccccactggccgacgcgatgaacgctccgggcccctggcctccccggtgctcctggagacgggcctgcccctccctctgccccttcccctgcccttgcccttggcattgcccgccgtcttgcgggcccaggctcgtgcgcccaccccgctgccacccctgctgcccgcccccctggcctcttgccctcccccaatgaagaggaagccgggccggccccggcgatccccaccatctatgctctccttggatgggcccttggtccgaccaccagcaggggccgcccttggaagggaactcctgctcctgccgggccagccacagacccccgtcttccccagcacccatgacccccggacggtgaccctggacttccggaacgcggggatcccagcccctccaccaccccttcccccccagccacccccacccccacctcccccacctgtagagcccaccaagctgccctttaaggagctagacaaccagtggccctccgaggccattcctccgggcccccgtgggcgcgatgaggtcactgaggaatacatggagttggccaagagccgggggccgtggcgccggccacctaagaagcgccatgaggacctggtgccacctgcgggctcgcccgaactctcgccaccccagcccctcttccggccccgctcggagtttgaggagatgaccatcctgtatgacatctggaacggtggcatcgatgaggaggacatccgcttcctgtgtgtcacctacgagcgactgctacagcaggacaatggcatggactggcttaacgacacgctctgggtctaccatccctccaccagcctctcttcagctaagaagaagaaacgggacgatggcatccgcgagcacgtgacgggctgtgcccgcagtgagggcttctacaccatcgacaagaaggacaagctcagatacctcaacagcagccgtgccagcaccgatgagccccccgcagacacccagggcatgagcatcccagcacagccccacgcctccacccgggcaggctcggagcggcgttcggagcagcgccgcctgctgtcctccttcactggcagctgtgacagtgacctgctcaagttcaaccagctcaagttccggaagaaaaagctcaagttctgcaagagccacattcacgactggggcttgttcgccatggagcccatcgcggctgacgagatggtcatcgagtacgtgggccagaatatccgtcaggtgatcgcagacatgcgggagaagcgttatgaggacgagggcatcgggagcagctacatgttccgggtggaccatgacaccatcatcgacgccaccaagtgcggcaacttcgcgcgcttcatcaaccacagctgcaaccccaactgctatgccaaggtgatcacggtggagtcacagaagaagatagtcatctactcgaagcagcacattaacgtcaatgaggagattacctatgactataagttccccatcgaggacgtcaagatcccctgcctctgtggctccgagaactgccgggggaccctcaactaggccccggcaccagactcaaaggatgtcagccgtagccctgggactcccgagcgtggagcccctggccccggggcccggccccccgcgcccgcccccatttcaggtgctgtcctctacccagcggccattcagggcctggcgccccacactaccccctggagcccctggctccggcccctccgcgggaaagggcttctctgtcgttcagcccacgtctctctcattttaacaaacgcccctttcaggatttctgtttaactccagcatcagcttctctctctccgtctctcctcccctctctctcttctctgtctcttctctctcccaccatcaccctcggcctcttcctgtgaatgctgctacgttgttttgtcttctctatttttttcctcgttgtgagaaaagacatttaaccgttgaaatgtgaaggtggaatcagagaggggccccgcgggggtctgcagaggcctcagtgtggctgtgcgtggcccgtgtcctggaagccacccggacctggacgcagggccaggtgctgtgggaaggatggaggcccccacggccttgacctcagaacactacgccctgaaagcgcccctcactgcccgtgggcacagtgaggagaccccacacctttccccacccgagctgcagcctgttccttccccagaggcctggggcaccactgacccggtggaccctgatggagctaagctgtcccaggcaggggtctccgctctgggctttccctgccacctcacaccccagcaccccctaaaccttgggttcaatgtttactttctcattcggatgccagcaacgcgggagcctctcggaggccccagtgcaggtgaggggcgctgagaacgcgggcagccactctcttctgcccttgccttcgccctgggtgggacagggctcccaagggcaggcgggtcccccagtcccgccattacgggttgtcagaccgtctgcgtgtggcattttttggcttataagcttcacccactcacccccaacccacaccccacatccccctgccggcagcccctcaacctaagaaggccagagcatatttattttcggagggagcagattacttctcccagagaaaggaaaatcttggaaaagatttaaaaacacaaatctaagccttgacggtttttttttcccttttgacccccttcccatctcttcagaatttattcccatggcttttttttttcttgtgcgtgtataaaatcaaaaggaaggggaaaaaggtttttgaagttcagaaccaacttctgtatatagaggctgccgcaaaggactttctcttgggaacattgtttcttgtagaaacatgcgggaagacattttttgctcatttctttgtacttccaaaaaaaaaggaaaaaaaagacaaaagcaagtccccccgtaccccagaaagcagaggaggcgtgtaaataatttctggaaagtgactgttgtgacccggagtcctcatcaagatgagcgcgctccatgagggagctgctcccaccctgcggacgcaggcggccggagcctctggtatctcagcttgtgtcaagcttgttatcatgtaaattctgtacaaagaattgttatttttctcttttttgttgttggtggttttgttgtgtgttttttgttgttttttttttattcctttcccccaggccctctctatttgagactgtgcccgccggtttcaagatcaaggaaattggtggcaacaagacacagatggggtacctgggcacagcggcgaacttctcttccgtttgcggttttctgcctaattgtgcaactgaggaaataatttatttttcacatgaggaaatgcgtagcttgtagagacggctgattcaagttacatgtacagcctccaaagggctgtctccattctgtccccttcccataaaagaagtgggggtgttcgagaagaccagggaagggacccttgcctcacccctccccctggcctcaccttgctcccagccatcgtgcccagtgttaacctcggctggccttcactaaggggactagacctccctctccccaggagccccagccccagagtggtttgcaataatcaagatatgtgtcgagtcatttttctttcaactccctcatttttcattgaacaaatctctgcttttcaagagttgggggtttctgctattttttgctttctctccctccccctgcaaagatgagaaccaatgagttttagggatgtttgtgcgggtagactccatcatccatatgtaacttgttttgaagagaagtgtttccgttgtgtgtcttgatgtaaatatttgttcatatttttgtgaatt

SEQ ID NO: 183996 - DNA, 5772 bp, Artificial Sequence
  derived and/or modified sequence
atggagaacagccaccccccccaccaccaccaccagcagccccccccccagcccggccccagcggcgagagaagaaaccaccactggagaagctacaagctgatgatcgaccccgccctgaagaagggccaccacaagctgtacagatacgacggccagcacttcagcctggccatgagcagcaacagacccgtggagatcgtggaggaccccagagtggtgggcatctggaccaagaacaaggagctggagctgagcgtgcccaagttcaagatcgacgagttctacgtgggccccgtgccccccaagcaggtgaccttcgccaagctgaacgacaacatcagagagaacttcctgagagacatgtgcaagaagtacggcgaggtggaggaggtggagatcctgtacaaccccaagaccaagaagcacctgggcatcgccaaggtggtgttcgccaccgtgagaggcgccaaggacgccgtgcagcacctgcacagcaccagcgtgatgggcaacatcatccacgtggagctggacaccaagggcgagaccagaatgagattctacgagctgctggtgaccggcagatacaccccccagaccctgcccgtgggcgagctggacgccgtgagccccatcgtgaacgagaccctgcagctgagcgacgccctgaagagactgaaggacggcggcctgagcgccggctgcggcagcggcagcagcagcgtgacccccaacagcggcggcacccccttcagccaggacaccgcctacagcagctgcagactggacacccccaacagctacggccagggcacccccctgacccccagactgggcacccccttcagccaggacagcagctacagcagcagacagcccacccccagctacctgttcagccaggaccccgccgtgaccttcaaggccagaagacacgagagcaagttcaccgacgcctacaacagaagacacgagcaccactacgtgcacaacagccccgccgtgaccgccgtggccggcgccaccgccgccttcagaggcagcagcgacctgcccttcggcgccgtgggcggcaccggcggcagcagcggcccccccttcaaggcccagccccaggacagcgccaccttcgcccacacccccccccccgcccaggccacccccgcccccggcttcaagagcgccttcagcccctaccagacccccgtggcccacttcccccccccccccgaggagcccaccgccaccgccgccttcggcgccagagacagcggcgagttcagaagagcccccgcccccccccccctgccccccgccgagcccctggccaaggagaagcccggcaccccccccggcccccccccccccgacaccaacagcatggagctgggcggcagacccaccttcggctggagccccgagccctgcgacagccccggcacccccaccctggagagcagccccgccggccccgagaagccccacgacagcctggacagcagaatcgagatgctgctgaaggagcagagaaccaagctgctgttcctgagagagcccgacagcgacaccgagctgcagatggagggcagccccatcagcagcagcagcagccagctgagccccctggcccccttcggcaccaacagccagcccggcttcagaggccccaccccccccagcagcagacccagcagcaccggcctggaggacatcagccccacccccctgcccgacagcgacgaggacgaggagctggacctgggcctgggccccagacccccccccgagcccggcccccccgaccccgccggcctgctgagccagaccgccgaggtggccctggacctggtgggcgacagaacccccaccagcgagaagatggacgagggccagcagagcagcggcgaggacatggagatcagcgacgacgagatgcccagcgcccccatcaccagcgccgactgccccaagcccatggtggtgacccccggcgccgccgccgtggccgcccccagcgtgctggcccccaccctgcccctgccccccccccccggcttcccccccctgccccccccccccccccccccccccccccagcccggcttccccatgcccccccccctgcccccccccccccccccccccccccccgcccaccccgccgtgaccgtgccccccccccccctgcccgccccccccggcgtgccccccccccccatcctgccccccctgccccccttcccccccggcctgttccccgtgatgcaggtggacatgagccacgtgctgggcggccagtggggcggcatgcccatgagcttccagatgcagacccaggtgctgagcagactgatgaccggccagggcgcctgcccctacccccccttcatggccgccgccgccgccgccgccagcgccggcctgcagttcgtgaacctgcccccctacagaggccccttcagcctgagcaacagcggccccggcagaggccagcactggccccccctgcccaagttcgaccccagcgtgcccccccccggctacatgcccagacaggaggacccccacaaggccaccgtggacggcgtgctgctggtggtgctgaaggagctgaaggccatcatgaagagagacctgaacagaaagatggtggaggtggtggccttcagagccttcgacgagtggtgggacaagaaggagagaatggccaaggccagcctgacccccgtgaagagcggcgagcacaaggacgaggacagacccaagcccaaggacagaatcgccagctgcctgctggagagctggggcaagggcgagggcctgggctacgagggcctgggcctgggcatcggcctgagaggcgccatcagactgcccagcttcaaggtgaagagaaaggagccccccgacaccaccagcagcggcgaccagaagagactgagacccagcaccagcgtggacgaggaggacgaggagagcgagagagagagagacagagacatggccgacaccccctgcgagctggccaagagagaccccaagggcgtgggcgtgagaagaagacccgccagacccctggagctggacagcggcggcgaggaggacgagaaggagagcctgagcgaggagcaggagagcaccgaggaggaggaggaggccgaggaggaggaggaggaggaggacgacgacgacgacgacagcgacgacagagacgagagcgagaacgacgacgaggacaccgccctgagcgaggccagcgagaaggacgagggcgacagcgacgaggaggagaccgtgagcatcgtgaccagcaaggccgaggccaccagcagcagcgagagcagcgagagcagcgagttcgagagcagcagcgagagcagccccagcagcagcgaggacgaggaggaggtggtggccagagaggaggaggaggaggaggaggaggaggagatggtggccgaggagagcatggccagcgccggccccgaggacttcgagcaggacggcgaggaggccgccctggcccccggcgcccccgccgtggacagcctgggcatggaggaggaggtggacatcgagaccgaggccgtggcccccgaggagagacccagcatgctggacgagccccccctgcccgtgggcgtggaggagcccgccgacagcagagagccccccgaggagcccggcctgagccaggagggcgccatgctgctgagccccgagccccccgccaaggaggtggaggccagaccccccctgagccccgagagagcccccgagcacgacctggaggtggagcccgagccccccatgatgctgcccctgcccctgcagccccccctgcccccccccagaccccccagaccccccagccccccccccgagcccgagaccaccgacgccagccaccccagcgtgccccccgagcccctggccgaggaccaccccccccacacccccggcctgtgcggcagcctggccaagagccagagcaccgagaccgtgcccgccacccccggcggcgagccccccctgagcggcggcagcagcggcctgagcctgagcagcccccaggtgcccggcagccccttcagctaccccgcccccagccccagcctgagcagcggcggcctgcccagaacccccggcagagacttcagcttcacccccaccttcagcgagcccagcggccccctgctgctgcccgtgtgccccctgcccaccggcagaagagacgagagaagcggccccctggccagccccgtgctgctggagaccggcctgcccctgcccctgcccctgcccctgcccctgcccctggccctgcccgccgtgctgagagcccaggccagagcccccacccccctgccccccctgctgcccgcccccctggccagctgccccccccccatgaagagaaagcccggcagacccagaagaagcccccccagcatgctgagcctggacggccccctggtgagaccccccgccggcgccgccctgggcagagagctgctgctgctgcccggccagccccagacccccgtgttccccagcacccacgaccccagaaccgtgaccctggacttcagaaacgccggcatccccgccccccccccccccctgcccccccagcccccccccccccccccccccccccccgtggagcccaccaagctgcccttcaaggagctggacaaccagtggcccagcgaggccatcccccccggccccagaggcagagacgaggtgaccgaggagtacatggagctggccaagagcagaggcccctggagaagaccccccaagaagagacacgaggacctggtgccccccgccggcagccccgagctgagccccccccagcccctgttcagacccagaagcgagttcgaggagatgaccatcctgtacgacatctggaacggcggcatcgacgaggaggacatcagattcctgtgcgtgacctacgagagactgctgcagcaggacaacggcatggactggctgaacgacaccctgtgggtgtaccaccccagcaccagcctgagcagcgccaagaagaagaagagagacgacggcatcagagagcacgtgaccggctgcgccagaagcgagggcttctacaccatcgacaagaaggacaagctgagatacctgaacagcagcagagccagcaccgacgagccccccgccgacacccagggcatgagcatccccgcccagccccacgccagcaccagagccggcagcgagagaagaagcgagcagagaagactgctgagcagcttcaccggcagctgcgacagcgacctgctgaagttcaaccagctgaagttcagaaagaagaagctgaagttctgcaagagccacatccacgactggggcctgttcgccatggagcccatcgccgccgacgagatggtgatcgagtacgtgggccagaacatcagacaggtgatcgccgacatgagagagaagagatacgaggacgagggcatcggcagcagctacatgttcagagtggaccacgacaccatcatcgacgccaccaagtgcggcaacttcgccagattcatcaaccacagctgcaaccccaactgctacgccaaggtgatcaccgtggagagccagaagaagatcgtgatctacagcaagcagcacatcaacgtgaacgaggagatcacctacgactacaagttccccatcgaggacgtgaagatcccctgcctgtgcggcagcgagaactgcagaggcaccctgaactag

SEQ ID NO: 183997 - DNA, 147 bp, Artificial Sequence
  derived and/or modified sequence
tgataataggctggagcctcggtggccatgcttcttgccccttgggcctccccccagcccctcctccccttcctgcacccgtaccccccaaacaccattgtcacactccagtggtctttgaataaagtctgagtgggcggctctaga

SEQ ID NO: 183998 - protein, 914 aa, Artificial Sequence
  derived and/or modified sequence
MSQSQNAIFTSPTGEENLMNSNHRDSESITDVCSNEDLPEVELVSLLEEQLPQYRLKVDTLFLYENQDWTQSPHQRQHASDALSPVLAEETFRYMILGTDRVEQMTKTYNDIDMVTHLLAERDRDLELAARIGQALLKRNHVLSEQNESLEEQLGQAFDQVNQLQHELCKKDELLRIVSIASEESETDSSCSTPLRFNESFSLSQGLLQLEMLQEKLKELEEENMALRSKACHIKTETVTYEEKEQQLVSDCVKELRETNAQMSRMTEELSGKSDELIRYQEELSSLLSQIVDLQHKLKEHVIEKEELKLHLQASKDAQRQLTMELHELQDRNMECLGMLHESQEEIKELRSRSGPTAHLYFSQSYGAFTGESLAAEIEGTMRKKLSLDEESSLFKQKAQQKRVFDTVRIANDTRGRSISFPALLPIPGSNRSSVIMTAKPFESGLQQTEDKSLLNQGSSSEEVAGSSQKMGQPGPSGDSDLATALHRLSLRRQNYLSEKQFFAEEWQRKIQVLADQKEGVSGCVTPTESLASLCTTQSEITDLSSASCLRGFMPEKLQIVKPLEGSQTLYHWQQLAQPNLGTILDPRPGVITKGFTQLPGDAIYHISDLEEDEEEGITFQVQQPLEVEEKLSTSKPVTGIFLPPITSAGGPVTVATANPGKCLSCTNSTFTFTTCRILHPSDITQVTPSSGFPSLSCGSSGSSSSNTAVNSPALSYRLSIGESITNRRDSTTTFSSTMSLAKLLQERGISAKVYHSPISENPLQPLPKSLAIPSTPPNSPSHSPCPSPLPFEPRVHLSENFLASRPAETFLQEMYGLRPSRNPPDVGQLKMNLVDRLKRLGIARVVKNPGAQENGRCQEAEIGPQKPDSAVYLNSGSSLLGGLRRNQSLPVIMGSFAAPVCTSSPKMGVLKED

SEQ ID NO: 183999 - protein, 311 aa, Artificial Sequence
  derived and/or modified sequence
MSQSQNAIFTSPTGEENLMNSNHRDSESITDVCSNEDLPEVELVSLLEEQLPQYRLKVDTLFLYENQDWTQSPHQRQHASDALSPVLAEETFRYMILGTDRVEQMTKTYNDIDMVTHLLAERDRDLELAARIGQALLKRNHVLSEQNESLEEQLGQAFDQVNQLQHELCKKDELLRIVSIASEESETDSSCSTPLRFNESFSLSQGLLQLEMLQEKLKELEEENMALRSKACHIKTETVTYEEKEQQLVSDCVKELRETNAQMSRMTEELSGKSDELIRYQEELSSLLSQIVDLQHKLKEVGLFIHSTDIC

SEQ ID NO: 184000 - protein, 779 aa, Artificial Sequence
  derived and/or modified sequence
MILGTDRVEQMTKTYNDIDMVTHLLAERDRDLELAARIGQALLKRNHVLSEQNESLEEQLGQAFDQVNQLQHELCKKDELLRIVSIASEESETDSSCSTPLRFNESFSLSQGLLQLEMLQEKLKELEEENMALRSKACHIKTETVTYEEKEQQLVSDCVKELRETNAQMSRMTEELSGKSDELIRYQEELSSLLSQIVDLQHKLKEHVIEKEELKLHLQASKDAQRQLTMELHELQDRNMECLGMLHESQEEIKELRSRSGPTAHLYFSQSYGAFTGESLAAEIEGTMRKKLSLDEESSLFKQKAQQKRVFDTVRIANDTRGRSISFPALLPIPGSNRSSVIMTAKPFESGLQQTEDKSLLNQGSSSEEVAGSSQKMGQPGPSGDSDLATALHRLSLRRQNYLSEKQFFAEEWQRKIQVLADQKEGVSGCVTPTESLASLCTTQSEITDLSSASCLRGFMPEKLQIVKPLEGSQTLYHWQQLAQPNLGTILDPRPGVITKGFTQLPGDAIYHISDLEEDEEEGITFQVQQPLEVEEKLSTSKPVTGIFLPPITSAGGPVTVATANPGKCLSCTNSTFTFTTCRILHPSDITQVTPSSGFPSLSCGSSGSSSSNTAVNSPALSYRLSIGESITNRRDSTTTFSSTMSLAKLLQERGISAKVYHSPISENPLQPLPKSLAIPSTPPNSPSHSPCPSPLPFEPRVHLSENFLASRPAETFLQEMYGLRPSRNPPDVGQLKMNLVDRLKRLGIARVVKNPVPKRMEDARRQKLVLKNQILLFI

SEQ ID NO: 184001 - DNA, 2745 bp, Artificial Sequence
  derived and/or modified sequence
atgagccagagccagaacgccatcttcaccagccccaccggcgaggagaacctgatgaacagcaaccacagagacagcgagagcatcaccgacgtgtgcagcaacgaggacctgcccgaggtggagctggtgagcctgctggaggagcagctgccccagtacagactgaaggtggacaccctgttcctgtacgagaaccaggactggacccagagcccccaccagagacagcacgccagcgacgccctgagccccgtgctggccgaggagaccttcagatacatgatcctgggcaccgacagagtggagcagatgaccaagacctacaacgacatcgacatggtgacccacctgctggccgagagagacagagacctggagctggccgccagaatcggccaggccctgctgaagagaaaccacgtgctgagcgagcagaacgagagcctggaggagcagctgggccaggccttcgaccaggtgaaccagctgcagcacgagctgtgcaagaaggacgagctgctgagaatcgtgagcatcgccagcgaggagagcgagaccgacagcagctgcagcacccccctgagattcaacgagagcttcagcctgagccagggcctgctgcagctggagatgctgcaggagaagctgaaggagctggaggaggagaacatggccctgagaagcaaggcctgccacatcaagaccgagaccgtgacctacgaggagaaggagcagcagctggtgagcgactgcgtgaaggagctgagagagaccaacgcccagatgagcagaatgaccgaggagctgagcggcaagagcgacgagctgatcagataccaggaggagctgagcagcctgctgagccagatcgtggacctgcagcacaagctgaaggagcacgtgatcgagaaggaggagctgaagctgcacctgcaggccagcaaggacgcccagagacagctgaccatggagctgcacgagctgcaggacagaaacatggagtgcctgggcatgctgcacgagagccaggaggagatcaaggagctgagaagcagaagcggccccaccgcccacctgtacttcagccagagctacggcgccttcaccggcgagagcctggccgccgagatcgagggcaccatgagaaagaagctgagcctggacgaggagagcagcctgttcaagcagaaggcccagcagaagagagtgttcgacaccgtgagaatcgccaacgacaccagaggcagaagcatcagcttccccgccctgctgcccatccccggcagcaacagaagcagcgtgatcatgaccgccaagcccttcgagagcggcctgcagcagaccgaggacaagagcctgctgaaccagggcagcagcagcgaggaggtggccggcagcagccagaagatgggccagcccggccccagcggcgacagcgacctggccaccgccctgcacagactgagcctgagaagacagaactacctgagcgagaagcagttcttcgccgaggagtggcagagaaagatccaggtgctggccgaccagaaggagggcgtgagcggctgcgtgacccccaccgagagcctggccagcctgtgcaccacccagagcgagatcaccgacctgagcagcgccagctgcctgagaggcttcatgcccgagaagctgcagatcgtgaagcccctggagggcagccagaccctgtaccactggcagcagctggcccagcccaacctgggcaccatcctggaccccagacccggcgtgatcaccaagggcttcacccagctgcccggcgacgccatctaccacatcagcgacctggaggaggacgaggaggagggcatcaccttccaggtgcagcagcccctggaggtggaggagaagctgagcaccagcaagcccgtgaccggcatcttcctgccccccatcaccagcgccggcggccccgtgaccgtggccaccgccaaccccggcaagtgcctgagctgcaccaacagcaccttcaccttcaccacctgcagaatcctgcaccccagcgacatcacccaggtgacccccagcagcggcttccccagcctgagctgcggcagcagcggcagcagcagcagcaacaccgccgtgaacagccccgccctgagctacagactgagcatcggcgagagcatcaccaacagaagagacagcaccaccaccttcagcagcaccatgagcctggccaagctgctgcaggagagaggcatcagcgccaaggtgtaccacagccccatcagcgagaaccccctgcagcccctgcccaagagcctggccatccccagcaccccccccaacagccccagccacagcccctgccccagccccctgcccttcgagcccagagtgcacctgagcgagaacttcctggccagcagacccgccgagaccttcctgcaggagatgtacggcctgagacccagcagaaacccccccgacgtgggccagctgaagatgaacctggtggacagactgaagagactgggcatcgccagagtggtgaagaaccccggcgcccaggagaacggcagatgccaggaggccgagatcggcccccagaagcccgacagcgccgtgtacctgaacagcggcagcagcctgctgggcggcctgagaagaaaccagagcctgcccgtgatcatgggcagcttcgccgcccccgtgtgcaccagcagccccaagatgggcgtgctgaaggaggactag

SEQ ID NO: 184002 - DNA, 93 bp, Artificial Sequence
  derived and/or modified sequence
atgagccagagccagaacgccatcttcaccagccccaccggcgaggagaacctgatgaacagcaaccacagagacagcgagagcatcacctag

SEQ ID NO: 184003 - DNA, 2340 bp, Artificial Sequence
  derived and/or modified sequence
atgatcctgggcaccgacagagtggagcagatgaccaagacctacaacgacatcgacatggtgacccacctgctggccgagagagacagagacctggagctggccgccagaatcggccaggccctgctgaagagaaaccacgtgctgagcgagcagaacgagagcctggaggagcagctgggccaggccttcgaccaggtgaaccagctgcagcacgagctgtgcaagaaggacgagctgctgagaatcgtgagcatcgccagcgaggagagcgagaccgacagcagctgcagcacccccctgagattcaacgagagcttcagcctgagccagggcctgctgcagctggagatgctgcaggagaagctgaaggagctggaggaggagaacatggccctgagaagcaaggcctgccacatcaagaccgagaccgtgacctacgaggagaaggagcagcagctggtgagcgactgcgtgaaggagctgagagagaccaacgcccagatgagcagaatgaccgaggagctgagcggcaagagcgacgagctgatcagataccaggaggagctgagcagcctgctgagccagatcgtggacctgcagcacaagctgaaggagcacgtgatcgagaaggaggagctgaagctgcacctgcaggccagcaaggacgcccagagacagctgaccatggagctgcacgagctgcaggacagaaacatggagtgcctgggcatgctgcacgagagccaggaggagatcaaggagctgagaagcagaagcggccccaccgcccacctgtacttcagccagagctacggcgccttcaccggcgagagcctggccgccgagatcgagggcaccatgagaaagaagctgagcctggacgaggagagcagcctgttcaagcagaaggcccagcagaagagagtgttcgacaccgtgagaatcgccaacgacaccagaggcagaagcatcagcttccccgccctgctgcccatccccggcagcaacagaagcagcgtgatcatgaccgccaagcccttcgagagcggcctgcagcagaccgaggacaagagcctgctgaaccagggcagcagcagcgaggaggtggccggcagcagccagaagatgggccagcccggccccagcggcgacagcgacctggccaccgccctgcacagactgagcctgagaagacagaactacctgagcgagaagcagttcttcgccgaggagtggcagagaaagatccaggtgctggccgaccagaaggagggcgtgagcggctgcgtgacccccaccgagagcctggccagcctgtgcaccacccagagcgagatcaccgacctgagcagcgccagctgcctgagaggcttcatgcccgagaagctgcagatcgtgaagcccctggagggcagccagaccctgtaccactggcagcagctggcccagcccaacctgggcaccatcctggaccccagacccggcgtgatcaccaagggcttcacccagctgcccggcgacgccatctaccacatcagcgacctggaggaggacgaggaggagggcatcaccttccaggtgcagcagcccctggaggtggaggagaagctgagcaccagcaagcccgtgaccggcatcttcctgccccccatcaccagcgccggcggccccgtgaccgtggccaccgccaaccccggcaagtgcctgagctgcaccaacagcaccttcaccttcaccacctgcagaatcctgcaccccagcgacatcacccaggtgacccccagcagcggcttccccagcctgagctgcggcagcagcggcagcagcagcagcaacaccgccgtgaacagccccgccctgagctacagactgagcatcggcgagagcatcaccaacagaagagacagcaccaccaccttcagcagcaccatgagcctggccaagctgctgcaggagagaggcatcagcgccaaggtgtaccacagccccatcagcgagaaccccctgcagcccctgcccaagagcctggccatccccagcaccccccccaacagccccagccacagcccctgccccagccccctgcccttcgagcccagagtgcacctgagcgagaacttcctggccagcagacccgccgagaccttcctgcaggagatgtacggcctgagacccagcagaaacccccccgacgtgggccagctgaagatgaacctggtggacagactgaagagactgggcatcgccagagtggtgaagaaccccgtgcccaagagaatggaggacgccagaagacagaagctggtgctgaagaaccagatcctgctgttcatctag

SEQ ID NO: 184004 - DNA, 2745 bp, Artificial Sequence
  derived and/or modified sequence
atgtctcagtcccaaaacgccatattcacttcaccaacaggggaagaaaacctgatgaactccaaccaccgcgactcagaaagcattaccgacgtctgctctaacgaggacctgccagaggttgagttggtgtccttgctggaggaacagttgccccagtacaggttaaaggtagataccctttttctctatgagaaccaggattggactcagtcaccccatcagcgtcagcacgcaagcgatgccctatctcccgttctggctgaggaaacatttcgctatatgatcttgggaacagatagagtcgaacagatgaccaaaacatataacgatattgatatggttacacatcttctcgccgaacgggacagagaccttgaactggctgcgagaattggccaggcactgctaaagcggaaccacgttttgtccgaacagaatgagtctctagaggaacagttaggtcaggcgtttgatcaagtcaatcagctgcagcacgagttgtgcaaaaaggacgaactgctccggatcgtgtcaatcgcttcggaggagtctgaaactgactcttcgtgttctacccctctgcgcttcaacgaatccttcagcctctcccagggtttattgcaacttgaaatgctgcaagagaagttaaaagaactagaagaggagaatatggccctgaggtccaaagcttgccacataaagactgaaaccgttacttacgaggaaaaagaacagcagcttgtaagcgactgtgtgaaggagttgagagagaccaacgcgcagatgtcccgcatgacagaagagttgagtggcaaaagcgatgaattaatcaggtatcaggaagagctctcaagcctcctgagccaaatcgttgacctgcagcataaactgaaagagcatgtgatagaaaaggaagaattgaaactgcatctgcaggccagcaaggatgcgcagcgacaactgaccatggagctccacgagctacaggacagaaacatggagtgcctcggcatgctgcacgagtcccaggaagaaataaaggagctgcgtagtcgcagtggacctacagcacacttgtatttttcccaaagttacggagcgttcacgggcgagagcctggcagcagaaatcgagggcaccatgagaaagaaactttccttggatgaggagagctcgttgtttaagcagaaagctcaacagaagagagtctttgacactgtcagaattgcaaacgacactcggggccggagcatatccttccccgcccttcttcccatacctgggtccaataggtcatccgtgatcatgactgctaagcctttcgagtcggggctccagcagacagaagacaagagtctgttgaatcaaggcagcagtagcgaggaggtcgccggaagctcacagaagatgggccagccaggcccgtcaggagattccgaccttgcgactgctctccatcgtttgagccttcgcagacaaaattacctgtcagagaaacagttcttcgctgaggaatggcagcgcaagatacaggttcttgctgatcagaaagagggggtctccggatgtgtgacgccaaccgaaagtctcgcaagcctgtgtactacgcaatccgagataaccgatctttcttccgctagttgcctgcggggcttcatgcctgagaaactgcagatcgtgaagcctctggaggggtcacaaactctgtaccattggcagcaactggcgcagcccaatctgggtactattttagatccgagacctggcgtaatcactaaaggctttacacagcttcccggtgacgcaatctaccacatcagcgatctggaggaggacgaggaagaaggaataacatttcaagtccagcagcccctcgaagttgaggaaaagttgtctactagtaagcctgtgactggtatcttcctgcccccaatcacgagtgccggagggcctgtgaccgtggctactgccaatcccggtaagtgtctgtcttgcaccaatagtaccttcaccttcaccacgtgccgcatcctgcacccttctgacattacacaggtgaccccatcctctggctttccctcgttaagctgtggaagcagtggttccagctcttcaaataccgctgttaattctccggctctgagttatagattaagcatcggtgaaagcataactaatcgacgtgatagcacaactactttttcctctaccatgagcttggccaaactgcttcaggagcgaggtatctccgccaaagtttaccactctccaatctctgaaaaccctctacagcccttgccgaagagcctggctataccatctaccccaccaaattctccatcgcatagcccctgcccctctccgctgcctttcgagcctagggttcacttgtctgaaaactttttggcatctcgaccggccgaaaccttcctccaggagatgtacgggctgcggccctctcgaaacccacccgacgttgggcaactgaaaatgaacttggtagaccgacttaaacgtctcgggatagccagggttgtcaaaaaccctggggcccaggagaacggtaggtgtcaggaagctgaaataggtccgcagaaaccagattcagcagtgtacttgaactccgggtcttcacttctgggcggactgcgtcggaaccagtcactccctgttattatgggctcatttgcagctcctgtgtgcacttcatcacccaagatgggagtcctgaaagaggattag

SEQ ID NO: 184005 - DNA, 93 bp, Artificial Sequence
  derived and/or modified sequence
atgagtcagtctcaaaacgcaattttcacaagcccaactggagaagagaatctgatgaatagcaatcatcgagatagcgagtcaattacatag

SEQ ID NO: 184006 - DNA, 2340 bp, Artificial Sequence
  derived and/or modified sequence
atgatcttgggcacggatagagtggagcaaatgactaaaacctacaacgacattgacatggtcacgcatcttctggcggagcgtgatagagacctcgaattagcagcgaggattggccaggcccttctgaagaggaaccatgtgttgtctgaacagaacgagtcactggaagagcagctgggccaagctttcgatcaggtaaaccagctgcagcacgagctctgtaaaaaggacgagctgctgcggatcgttagcattgcatccgaggagtccgagacggatagttcttgctccacacccttacggtttaatgagagtttctccctatcccaggggttgctgcagcttgaaatgctccaggagaagctgaaagaactcgaagaggaaaacatggctttgaggagcaaggcttgtcacattaagactgagacagtcacatatgaggagaaggagcaacagctggtgagtgattgtgttaaagagctcagggagactaatgcccagatgagtcgaatgactgaagaactatccggtaaatctgacgagctgatccgctaccaggaggagctcagttctctcctgtcgcaaatcgtggatctgcagcacaagcttaaggagcacgtgattgagaaggaggagctgaaactgcacctgcaagcttcaaaagatgctcaacgacagctgaccatggaactccacgagctccaagatagaaatatggaatgtctgggcatgctgcacgagagtcaggaggagatcaaggaactgcggtccagatctggcccaacagcccacctttattttagtcagtcttacggcgcctttacgggggaatccctcgctgctgagatcgagggaacaatgaggaagaagctgtccttggatgaggaatcatctctgttcaaacagaaagcccagcagaaaagagtgtttgacacggtgcggatcgcaaatgatacccgcgggaggtcgatctccttcccggcgctgctacctattcctggctcaaatcgtagttccgtgattatgaccgccaagcctttcgaatcaggactgcaacagaccgaagataaaagtcttctgaatcagggaagctcctccgaagaggtagcaggctcaagccagaagatgggacagcccgggccctcaggggacagcgacctcgccaccgctctccacagactctctctcagaaggcagaattatttgtctgagaaacagttctttgcagaggaatggcagcgcaaaatacaggttctggcagatcaaaaggagggggttagcggttgcgtgaccccaacagagtccctggcgagcctttgtaccacacagagtgagataacggacctgtcctcggcaagctgtctgcgcgggttcatgccagagaaattgcagattgtgaaaccactggaagggtcccagaccttgtatcactggcagcagttggctcagcccaatttgggtacaatcttagaccctcggcctggagtcataactaaggggtttactcaattgccaggagacgccatctatcatatctctgatcttgaagaagatgaggaggaaggaatcaccttccaggtacagcaacctttagaagtggaggagaagttatccactagcaaacccgtgaccggcatttttctgcccccaatcaccagcgctggagggcccgtgactgttgcgacggccaatcctgggaagtgcctctcttgcacaaactcgacgttcacctttaccacttgtagaatccttcacccatctgacattacccaggtgaccccatcctctggatttccctcattatcttgtggctcatctggctccagctctagcaatacggcggtgaactcaccagccctgagctaccggcttagcatcggtgagtctataacaaaccgccgcgactccactacaactttctccagtactatgtctctggcgaaactattacaagaacgggggatcagcgcaaaggtttatcactcgcctatttctgagaaccctttgcagccgctgccaaaaagtctcgctatcccctctacaccgcctaatagtccctcccatagcccatgccccagcccactcccatttgaaccacgggtccatctctccgagaattttctagcaagcaggccagccgagacatttctccaggagatgtatggccttagaccgtcccgcaatccgccagacgtggggcagctgaaaatgaacttagtggaccgactgaaacggttgggaattgctagagtggtcaagaacccagtgcctaaaagaatggaggatgcgcgcaggcagaagctggttcttaaaaatcaaatcttgttgttcatctag

SEQ ID NO: 184007 - DNA, 2745 bp, Artificial Sequence
  derived and/or modified sequence
atgagccagagccagaatgccatcttcaccagccccactggagaggagaacctgatgaacagcaaccaccgggacagcgagagcatcacagatgtgtgcagcaatgaagacctgcctgaggtggagctggtgtccctgctggaggagcagctgccccagtaccgcctgaaggtggacaccctcttcctgtatgagaaccaggactggacccagagcccccaccagaggcagcacgccagtgatgccctgagccctgtgctggccgaggagaccttccgctacatgatcctgggcacagacagagtggagcagatgaccaagacctacaatgacatcgacatggtgacccacctgctggccgagcgggaccgggacctggagctggccgcccgcatcggccaggccctgctgaagagaaatcatgtgctgtctgagcagaatgaaagcctggaggagcagctgggccaggcctttgaccaggtgaaccagctgcagcacgagctgtgcaagaaggatgagctgctgagaattgtgtccatcgccagcgaggagagcgagacagacagcagctgcagcacccccctgcgcttcaatgaaagcttcagcctgagccagggcctgctgcagctggagatgctgcaggagaagctgaaggagctggaggaggagaacatggccctgcggagcaaggcctgccacatcaagacagagaccgtgacctatgaggagaaggagcagcagctggtgtctgactgtgtgaaggagctgcgggagaccaatgcccagatgagcaggatgacagaggagctgagcggcaagagtgatgagctgatccgctaccaggaggagctgagcagcctgctgagccagatcgtggacctgcagcacaagctgaaggagcacgtgattgagaaggaggagctgaagctgcacctgcaggccagcaaggatgcccagaggcagctgaccatggagctgcacgagctgcaggacaggaacatggagtgcctgggcatgctgcacgagagccaggaggagatcaaggagctgcggagccgcagcggccccacagcccacctgtacttcagccagagctatggagccttcaccggggagagcctggccgctgagattgagggcaccatgaggaagaagctgagcctggatgaggagagcagcctcttcaagcagaaggcccagcagaagagggtgtttgacacagtgcgcatcgccaatgacacccggggccgcagcatctccttccctgccctgctgcccatccctggcagcaacagaagcagcgtcatcatgacagccaagccctttgagagcggcctgcagcagacagaggacaagagcctgctgaaccagggcagcagcagcgaggaggtggccggcagcagccagaagatgggccagcccggccccagcggggacagcgacctggccacagccctgcaccggctgagcctgcggcggcagaactacctgtctgagaagcagttctttgctgaggagtggcagaggaagatccaggtgctggccgaccagaaggagggcgtgtctggctgtgtgacccccacagagagcctggccagcctgtgcaccacccagagcgagatcacagacctgagcagcgccagctgcctgcggggcttcatgcctgagaagctgcagatcgtgaagcccctggagggcagccagaccctgtaccactggcagcagctggcccagcccaacctgggcaccatcctggaccccaggcctggggtcatcaccaagggcttcacccagctgcctggagatgccatctaccacatcagtgacctggaggaggatgaggaggagggcatcaccttccaggtgcagcagcccctggaggtggaggagaagctgagcaccagcaagcctgtgacaggcatcttcctgccccccatcaccagcgctgggggccctgtgacagtggccacagccaaccctgggaagtgcctgagctgcaccaacagcaccttcaccttcaccacctgccgcatcctgcaccccagcgacatcacccaggtgacccccagcagcggcttccccagcctgagctgtggcagcagcggcagcagcagcagcaacacagctgtgaacagccctgccctgagctaccgcctgagcattggagagagcatcaccaacagaagagacagcaccaccaccttcagcagcaccatgagcctggccaagctgctgcaggagcggggcatcagcgccaaggtgtaccacagccccatcagcgagaaccccctgcagcccctgcccaagagcctggccatccccagcaccccacccaacagccccagccacagcccctgccccagccccctgccctttgagccccgggtgcacctgtctgagaacttcctggccagcaggcctgctgagaccttcctgcaggagatgtatggcctgcggcccagcaggaaccccccagatgtgggccagctgaagatgaacctggtggaccggctgaagaggctgggcatcgcccgggtggtgaagaaccctggggcccaggagaatggccgctgccaggaggccgagatcggcccccagaagccagacagcgctgtgtacctgaacagcggcagcagcctgctgggcggcctgcggaggaaccagagcctgcctgtgatcatgggcagctttgctgcccctgtgtgcaccagcagccccaagatgggcgtgctgaaggaggactag

SEQ ID NO: 184008 - DNA, 93 bp, Artificial Sequence
  derived and/or modified sequence
atgagccagagccagaatgccatcttcaccagccccactggagaggagaacctgatgaacagcaaccaccgggacagcgagagcatcacctag

SEQ ID NO: 184009 - DNA, 2340 bp, Artificial Sequence
  derived and/or modified sequence
atgatcctgggcacagacagagtggagcagatgaccaagacctacaatgacatcgacatggtgacccacctgctggccgagcgggaccgggacctggagctggccgcccgcatcggccaggccctgctgaagagaaatcatgtgctgtctgagcagaatgaaagcctggaggagcagctgggccaggcctttgaccaggtgaaccagctgcagcacgagctgtgcaagaaggatgagctgctgagaattgtgtccatcgccagcgaggagagcgagacagacagcagctgcagcacccccctgcgcttcaatgaaagcttcagcctgagccagggcctgctgcagctggagatgctgcaggagaagctgaaggagctggaggaggagaacatggccctgcggagcaaggcctgccacatcaagacagagaccgtgacctatgaggagaaggagcagcagctggtgtctgactgtgtgaaggagctgcgggagaccaatgcccagatgagcaggatgacagaggagctgagcggcaagagtgatgagctgatccgctaccaggaggagctgagcagcctgctgagccagatcgtggacctgcagcacaagctgaaggagcacgtgattgagaaggaggagctgaagctgcacctgcaggccagcaaggatgcccagaggcagctgaccatggagctgcacgagctgcaggacaggaacatggagtgcctgggcatgctgcacgagagccaggaggagatcaaggagctgcggagccgcagcggccccacagcccacctgtacttcagccagagctatggagccttcaccggggagagcctggccgctgagattgagggcaccatgaggaagaagctgagcctggatgaggagagcagcctcttcaagcagaaggcccagcagaagagggtgtttgacacagtgcgcatcgccaatgacacccggggccgcagcatctccttccctgccctgctgcccatccctggcagcaacagaagcagcgtcatcatgacagccaagccctttgagagcggcctgcagcagacagaggacaagagcctgctgaaccagggcagcagcagcgaggaggtggccggcagcagccagaagatgggccagcccggccccagcggggacagcgacctggccacagccctgcaccggctgagcctgcggcggcagaactacctgtctgagaagcagttctttgctgaggagtggcagaggaagatccaggtgctggccgaccagaaggagggcgtgtctggctgtgtgacccccacagagagcctggccagcctgtgcaccacccagagcgagatcacagacctgagcagcgccagctgcctgcggggcttcatgcctgagaagctgcagatcgtgaagcccctggagggcagccagaccctgtaccactggcagcagctggcccagcccaacctgggcaccatcctggaccccaggcctggggtcatcaccaagggcttcacccagctgcctggagatgccatctaccacatcagtgacctggaggaggatgaggaggagggcatcaccttccaggtgcagcagcccctggaggtggaggagaagctgagcaccagcaagcctgtgacaggcatcttcctgccccccatcaccagcgctgggggccctgtgacagtggccacagccaaccctgggaagtgcctgagctgcaccaacagcaccttcaccttcaccacctgccgcatcctgcaccccagcgacatcacccaggtgacccccagcagcggcttccccagcctgagctgtggcagcagcggcagcagcagcagcaacacagctgtgaacagccctgccctgagctaccgcctgagcattggagagagcatcaccaacagaagagacagcaccaccaccttcagcagcaccatgagcctggccaagctgctgcaggagcggggcatcagcgccaaggtgtaccacagccccatcagcgagaaccccctgcagcccctgcccaagagcctggccatccccagcaccccacccaacagccccagccacagcccctgccccagccccctgccctttgagccccgggtgcacctgtctgagaacttcctggccagcaggcctgctgagaccttcctgcaggagatgtatggcctgcggcccagcaggaaccccccagatgtgggccagctgaagatgaacctggtggaccggctgaagaggctgggcatcgcccgggtggtgaagaaccctgtgcccaagaggatggaggatgcccggcggcagaagctggtgctgaagaaccagatcctgctcttcatctag

SEQ ID NO: 184010 - DNA, 2745 bp, Artificial Sequence
  derived and/or modified sequence
atgagccagagccagaacgccatcttcaccagccccaccggcgaggagaacctcatgaactccaaccaccgcgacagtgagagtattacggatgtatgctcaaacgaggacttaccagaagtggagctcgtctcgttactggaggaacagctgcctcagtacaggctaaaagtcgacaccctgttcctctatgagaatcaggattggacacagtcccctcatcagcggcagcatgcctccgacgcactttcccccgtgctggctgaggaaacctttaggtacatgatcctgggtactgacagggtggagcagatgacaaaaacttacaacgacatcgacatggtgacgcacctcttggccgagcgtgatcgtgatctggagctggctgctcggattggccaggctctgctaaagcgtaaccacgtccttagcgaacagaacgagtccctggaagagcagttagggcaggcgttcgaccaggtcaatcaattacaacatgaactgtgtaaaaaggacgaactcttaaggattgtctctatagcctcagaggaatccgaaacagatagtagttgttccacaccgctccgtttcaacgaatccttttctctttcacaaggactgctgcagcttgagatgttgcaggaaaagctaaaggagctggaagaggaaaacatggccctgaggtccaaagcctgccatatcaaaacagaaactgtgacctacgaggaaaaagagcaacaattagtttccgactgtgtgaaggaactgagagagacaaacgcccagatgtcacgcatgacagaggagctcagcggcaagagcgacgaactcatccggtaccaggaagaactgagcagtctgctgtcacagatcgtcgatttgcagcacaaactcaaggagcacgtgattgaaaaggaggaattaaagttacacctgcaggcatccaaggacgcacagcgccaactcacaatggagttacatgagctccaggatcgcaatatggaatgcttagggatgcttcatgagtcacaggaggaaataaaggagcttcggtcccgatctggtcctactgctcacctgtattttagtcagtcatacggagcatttacaggtgaaagcttggctgcagagatagagggaaccatgaggaagaagttgtcccttgacgaggaatcctccctgtttaaacaaaaagcccagcagaaacgagtgttcgacaccgtcagaatcgccaacgataccagagggcgctctatcagttttcccgcactacttccaatacctggatcaaacagatcgtctgtgattatgacggccaagccgtttgaaagcggtttgcagcaaactgaggataagagcttgctgaatcagggtagctcttctgaggaggtggctgggtcgagccaaaaaatgggacagcctggcccttccggtgacagtgatttggcgaccgctttgcacagactcagcctcaggcgacagaactacctctcggagaaacagttttttgcggaggagtggcagcgaaaaattcaagttctggccgatcagaaggagggcgtgtccggatgtgtcacgcccaccgaatcacttgcaagtctctgtacaacccagtccgagatcaccgacctgtcgtctgccagttgcctccgaggcttcatgccagagaagctgcaaattgtcaagcccctggaggggtctcagaccctataccactggcagcagttggcccaaccgaatcttggcacaattctcgacccccggccgggcgtgattacaaaaggattcacccaactaccgggggacgccatctatcatatcagtgacctcgaggaagacgaagaggaaggcattacgttccaggttcagcagcctctggaggtggaggaaaaattgagtacatctaagcccgtcactgggatatttctgcctccgatcactagtgccggcggccccgtcactgttgccacggccaaccccggaaagtgtttgagctgtactaacagtacatttacatttactacatgccgcatccttcacccgagcgacatcacccaagtaacacccagctcgggatttccgagcctgtcctgcggaagcagtggaagttcctcctcaaacaccgccgtcaattctcccgcactcagttatcgcctctcgattggagagtctatcacaaaccggcgcgatagcactaccacgtttagctcaactatgagtcttgctaagctgctccaggagcggggcatcagtgccaaagtgtaccatagtcccatttcggagaacccattgcagcccctccccaaaagccttgctattcccagtaccccaccaaactcaccctcgcattcgccttgtccttctcctctccccttcgagccacgagtgcacctttccgaaaatttcctggcctcgcgccccgccgagactttcttacaggagatgtacggcctgagaccgtcgaggaaccccccagacgtcgggcagcttaagatgaacctggtagacagactgaaacggctgggcatcgcccgcgtcgtgaaaaatccgggtgcccaggaaaatggaaggtgtcaggaggccgaaattgggccgcagaaacccgattcagccgtgtatttaaactccgggagctctctgctggggggactgcggagaaaccagtcattacccgtaatcatggggtcattcgcagcccctgtgtgcacctcgtcacctaagatgggcgtgttaaaagaagattag

SEQ ID NO: 184011 - DNA, 93 bp, Artificial Sequence
  derived and/or modified sequence
atgagccagagccagaacgccatcttcaccagccccaccggcgaggagaatctgatgaatagcaaccatcgcgactcagagtctattacatag

SEQ ID NO: 184012 - DNA, 2340 bp, Artificial Sequence
  derived and/or modified sequence
atgatcctgggcaccgaccgggtggagcagatgaccaagacctacaatgatatagacatggtgacacatctgttggctgaacgtgatagagaccttgaactggctgcccgcattggacaggccctattgaagcggaaccacgttctaagtgaacaaaatgagtcgcttgaggaacagctaggtcaggccttcgaccaagtgaaccagctgcagcacgaactctgtaaaaaggacgagctgctgagaatcgtgtccattgccagcgaggaatcagaaaccgacagctcctgctccacaccactgcgcttcaacgaaagcttttccctcagccagggcctgcttcagttggaaatgttgcaggaaaaactaaaagaactggaggaagagaacatggctcttagaagcaaggcatgccatattaaaacggaaaccgtaacctacgaagaaaaggagcagcagttagtctcagactgtgtcaaggagcttagagagaccaacgcccagatgtcaagaatgacagaggagctgtccgggaagagcgacgaactcatcagatatcaagaagaattgagcagcctcctgtctcagattgtcgatctacaacacaaactgaaggagcacgtgatcgagaaggaggaacttaagctgcatctccaagcaagcaaagacgcccagcggcagttgactatggagctgcatgagctccaggaccgcaacatggaatgcctaggaatgttacatgaaagccaggaggagatcaaagaactgcgttctcgctcgggccctactgctcacctgtacttttcacaaagttatggcgctttcactggcgaaagccttgctgccgaaatcgagggcactatgagaaaaaaactgagtctggacgaggaaagtagccttttcaaacagaaagctcaacagaagcgcgtgttcgatactgtgcgcatcgccaatgatactaggggtcgatccatctccttccccgctctgcttccgattccgggatcaaatcgcagttcagttatcatgacagcaaagcccttcgaaagcggtcttcagcagacagaggataagtctttgctaaatcaggggtcatcaagcgaggaagtagcaggatcgagtcaaaagatgggccaacccgggccatctggtgactccgatcttgccacagcgttgcatcgcctgagtttaaggaggcagaactacctgagtgaaaagcagttcttcgccgaagaatggcagagaaaaattcaggtactggccgaccagaaagagggtgtcagcggctgtgtcacccctaccgaaagcctggcttcactatgcacgacacagtctgaaattactgacctctcatccgcctcgtgcctccgaggcttcatgcctgaaaaactccagattgtcaaacctttagagggttcacaaaccttgtaccactggcagcagttggcacagcctaacttggggacaattctggacccacggcccggcgtcatcactaaaggcttcacacagttacccggtgacgcaatttaccatatcagcgatctggaagaagatgaagaggagggtattaccttccaagttcaacagcctttagaggtagaggaaaaactgagcacgtctaaacccgtcactggcatcttcctgccgcccatcacaagcgcggggggcccagtgacagtggcgaccgccaatcctgggaagtgcttgtcttgtacgaattccacattcacttttacgacatgtcgaatcttacatccaagcgatatcactcaggtgacaccctctagcgggttccctagcctgtcctgtgggagcagcgggtcttcaagttctaatactgcagttaactcacccgcattgagctatcgcctcagcatcggtgaatctattaccaatcggagggacagcacaaccacattcagttctaccatgtcgctggccaagttgctgcaggagagagggatatctgccaaggtgtatcacagccctattagcgagaatccactccaaccgctgcccaaatccctcgccatccccagcacaccacctaacagtccttcccatagcccctgtccgagccccctgccctttgagccacgcgtccacctttctgaaaattttctggcctctcgtcctgcggaaacttttctgcaggagatgtacgggttgcgtccctcccgaaatccgcctgatgtgggtcagctgaaaatgaatctggttgatcgattgaagagactggggatagctagagtcgtgaagaacccagtcccaaaaagaatggaagacgcacggcgacaaaagcttgtgctgaagaaccaaattctgctttttatctag

SEQ ID NO: 184013 - DNA, 2745 bp, Artificial Sequence
  derived and/or modified sequence
atgtctcagtcccagaacgcgatctttaccagccctaccggggaggagaatctgatgaacagtaaccacagggatagcgagtccatcaccgacgtttgtagtaatgaggatctcccagaggtggaactggtcagtctgttggaggagcagcttccccagtaccgtctcaaggtggatacgttgttcctgtacgaaaaccaggactggacacagtctccacaccagcgtcagcacgcctccgacgccctcagccctgttctggctgaggaaaccttcagatatatgattctgggaacagacagggtggagcagatgaccaagacctataacgatatagatatggtcacccatctgctggctgagagagaccgggatctggaactcgcggcacggatcgggcaagctctcctgaagcgcaatcatgtcctcagtgagcagaacgaaagcttggaagagcagctgggacaagcattcgaccaggtcaatcagctccagcacgaactgtgtaaaaaggatgagcttctgaggatagtgagcatcgctagcgaagagtccgagaccgactcctcatgctccacacccctaaggttcaatgagtcatttagtttaagtcaaggcttgctgcagctggaaatgctccaggaaaagctaaaagagttggaagaggagaatatggcgttgagatctaaggcatgccacatcaaaactgaaactgtgacctacgaggaaaaggaacagcagttggtgtcagattgtgtgaaagagctaagggagacgaatgctcaaatgagccgtatgactgaggagttatcaggcaaatccgatgaacttatccgatatcaggaggaactcagctctctgctttcacagatcgtcgatcttcagcataaactgaaggagcacgtaatcgaaaaggaagagctgaaactgcatctccaggccagcaaggacgcacagcggcagctcaccatggaactccacgagcttcaggatagaaacatggagtgcctgggcatgctgcacgaatcccaggaggagataaaggaattaaggtctcggtctggacctacagcacacctgtacttttctcagtcttatggcgcttttaccggtgagtctttagccgcagagattgagggcactatgcgaaagaagctgagtcttgacgaagaaagctccctgtttaagcagaaggctcaacaaaaacgggtctttgatactgtaagaatagcaaatgacacaagaggcagatccataagcttccctgcgctcctaccgattcccggatctaatagaagcagtgttataatgactgccaaaccattcgaatccggcttgcagcagactgaggacaagagccttctgaatcagggatccagctcagaggaagtggccggaagctcacagaagatggggcagccgggtcccagcggagacagtgatttagcaaccgcccttcaccggctgtccttgagacgacagaactatttgagcgagaagcaatttttcgctgaggagtggcagcgaaagatccaggtgcttgcggaccagaaagagggagtttcagggtgcgtcactcctacagagtcattagcaagtctgtgcactacccaatctgagatcacggatctttcttcagcaagctgtctccggggatttatgcccgagaaactgcagatcgtaaaaccgctggagggatcacagactttgtatcattggcaacagctggcccagcccaatctgggtaccatcctggatcctaggccaggcgtgattacaaaaggatttactcagctgcctggagatgctatataccacatctctgacttagaggaggatgaggaggagggaattaccttccaggtgcaacagcccctcgaagtcgaggaaaagcttagcacaagtaagccggtcaccgggatctttctccctccgatcacatcggctggcggaccagttactgtggccaccgcaaaccctggcaagtgcctgtcctgtacaaattccaccttcacatttacaacttgtcgaatactgcaccctagcgacattactcaagtcacgcccagctcgggctttccctctctgagctgtggatctagcggaagctcctcttcaaacacagccgttaacagccccgctttatcttatagactgagcattggagaatctatcaccaacaggcgtgacagcaccactaccttctccagcaccatgtcactcgctaagctgttgcaagaacgcggaatcagcgccaaagtatatcatagccctataagtgaaaatcccctgcaacccctgcccaagtctctggcaattccgtcaactcctccgaactctccttctcacagcccctgcccttctccactgcccttcgaaccgcgagtgcacctctctgaaaacttcctggcttcacgcccagcggagaccttcctgcaggaaatgtacggtctgcgcccttccagaaatccccctgatgttggtcaactgaagatgaatctcgtagatcgactgaagaggctgggcattgccagagttgtgaagaatcccggagcacaggaaaacggtcggtgtcaggaggccgagattggaccacaaaaaccagacagtgctgtctacctgaactctggttcttccctcttgggcggtcttcgcagaaaccagagtctccccgtgatcatgggtagcttcgctgcccctgtatgtacttcatctccaaaaatgggcgtcttgaaagaggactag

SEQ ID NO: 184014 - DNA, 93 bp, Artificial Sequence
  derived and/or modified sequence
atgagccagagccagaatgctatatttaccagccctactggggaggagaacctcatgaacagcaaccacagagatagtgagagcataacctag

SEQ ID NO: 184015 - DNA, 2340 bp, Artificial Sequence
  derived and/or modified sequence
atgattctgggtaccgaccgtgtggagcagatgaccaaaacttacaatgacatcgatatggttactcacctgctagcagagcgtgacagggatctcgaactcgcagccagaatcggacaggcccttctcaagcgcaaccacgttttgtcagaacagaatgagtctttggaagagcagctgggacaggcatttgatcaggtgaaccagctgcaacatgagctatgtaaaaaagatgagcttctgcggatagtatccattgcatcagaggaatccgagacagacagctcatgtagtaccccgctgaggttcaatgagtctttctctctctctcaaggcctcctgcagctcgagatgctccaagaaaagctcaaagagttagaggaggagaatatggcactgaggtctaaggcctgccatataaagaccgagaccgtaacctacgaggagaaagagcagcagctggtatctgattgcgtcaaagagctgcgcgagacgaacgcgcagatgtctcgcatgacagaagagctctctggcaagtcagatgagctgattcggtatcaagaggaattgtcttccctactgtcccagattgttgatcttcagcacaagttgaaggaacacgttatcgaaaaggaggagctcaaactgcacctacaggcctcgaaagatgcccaacgccagctcacaatggagctgcacgagctccaggacagaaacatggagtgcctggggatgcttcacgagtcacaggaagagattaaagaacttagatctcgatcaggcccaactgctcatctatacttttcacagagttacggcgcattcaccggcgaatcgctggcagcggaaatcgaaggaactatgaggaaaaagttaagcctggacgaagagtcaagcctttttaagcagaaggcccagcagaagagagtgttcgataccgtgcgcattgccaatgatacccgtggaagaagtatcagttttcccgcactgttacctattcctggcagcaataggagctctgtgattatgaccgccaaacccttcgagtcggggctgcaacaaaccgaagataaatccttgctcaatcagggatcttcttctgaagaggtggcaggcagcagccagaagatgggccaacccggtcctagtggggactcagatcttgctacagccctgcaccgacttagtctgaggcgtcagaactatctcagcgaaaagcaattttttgctgaggaatggcagagaaagatccaggtattggccgatcagaaggagggagtctcagggtgtgtcacacccaccgaatcattagcttcactctgcaccacacagtccgagattaccgacctgagcagcgcctcctgcctccgagggttcatgccagagaagctgcaaattgtgaagcccttagaagggtcgcagacgctctaccactggcagcagttagcccaaccgaatttagggacgattctggatcctagaccaggggtgattaccaagggctttacgcagctaccaggagatgcgatctaccacatctcagacctagaagaggatgaggaggagggtatcacctttcaagtgcagcagccactcgaggtcgaggaaaaactcagcaccagcaaaccagtgactggaatcttcctaccacctatcacttctgcaggaggtcccgtgacagtcgcgacagccaaccccggtaaatgtctgagctgtaccaatagcacgtttacctttactacgtgtcggattcttcatccctccgacattacccaggtcacaccaagctccggctttccttccctgtcctgcggatcttctggctcctccagcagcaatacagccgttaattctcccgctctcagttacaggttgtccatcggtgaatcaatcaccaacagacgtgatagcaccaccacattttcctctactatgtctctggcaaagctgttgcaagagaggggaattagcgcgaaagtttaccattcaccaatttccgaaaaccccctgcagccactgccgaagtccctcgcaattcccagtaccccgcctaacagcccctcacattccccctgtcccagccccctcccatttgagccccgtgtacatttgtcggagaattttctagcctcaaggcccgcagaaacatttcttcaagaaatgtatggccttcggccaagtagaaaccctccggacgtgggccaactaaagatgaatcttgtggatagactgaaaagactggggatcgcacgagtcgtcaagaacccagtgcccaagcgtatggaagacgcgaggcgacagaaactcgtgctcaaaaaccagatcctccttttcatctag

SEQ ID NO: 184016 - DNA, 6510 bp, Artificial Sequence
  derived and/or modified sequence
cctttggcttccccaattgtgtgggggctgccattgacccggtgtcgccgcagaaccgaggtcgccgagtgatgatgttgtgaagtcgcccgcctgtccctgccacgcccgggcggttgctggcagtgggagcagcggcagcagcttcggctgctgctttcaggctgccgctgcattaggggcttcctgaggaagcgcgggcggacgacagaggatgccgaaccactccagtcatgactgtccaaagtatgataatcacatgagagtgctcgttgctacggatgtcatttgactcatcagagaaaatctgtctaaaagaaaatatccatgtgaccaaatccatttcattattgaatggcttgatggatttcctttactctgattcataccaaagctgtccttctcaaccaaagcaagaaaggatcctgcatgagtcaatcccagaatgcaatttttacatcaccaacaggtgaagaaaacctcatgaatagcaatcacagagactcggagagcatcactgatgtctgctccaatgaggatctccctgaagttgagctggtgagtctgctagaagaacaactaccacagtataggctaaaagtagacactctctttctatatgaaaatcaagactggactcagtctccacaccagcggcagcatgcatctgatgctctctctccagtccttgctgaagagactttccgttacatgattctaggcacagacagggtggagcagatgaccaaaacttacaatgacatcgacatggttacacatctcctggcagagagggatcgtgatctggaactcgctgctcgaattggacaagctctcttaaagcggaaccatgtcttatctgagcagaacgaatccctggaggagcaattgggacaagcctttgatcaagttaatcagctgcagcatgagctatgcaagaaagatgagttacttcgaatcgtctccattgcttctgaagaaagtgaaactgattccagctgttctacacctcttcggttcaatgagtcctttagcttatctcaagggttgctgcagttggaaatgctgcaagaaaagctcaaggaactggaagaagagaatatggctcttcgatccaaggcttgtcacataaagacagaaactgttacctatgaagaaaaggaacaacagcttgtcagcgactgtgttaaagaacttcgtgaaacaaatgctcagatgtccagaatgactgaagaattgtcagggaagagtgatgagctgattcgataccaagaagagctttcctctcttttgtcacagattgtagaccttcagcacaaacttaaagaacatgtgattgagaaggaagaactaaaacttcacctgcaagcttccaaagatgcccaacggcaactgacaatggagctgcacgagttacaagacaggaatatggagtgtctaggaatgttacatgaatcccaagaagaaataaaggaacttcgtagtagatctggccctactgctcatctctacttctcccaatcatatggagcttttactggggaatctttggcagctgagattgaggggactatgcgtaaaaagctgagtttggatgaggaatcttctctctttaaacaaaaagcccaacagaagcgggtatttgataccgtcaggattgccaatgacacacggggccgctctatctcattcccagctctgttacccattccaggctccaaccgttcaagtgtcatcatgacagcaaaaccttttgagtctggtcttcagcaaacagaggacaaatcactcctgaaccaggggagcagctcagaggaggttgcagggagctcccagaagatgggccaaccaggaccctcaggagatagtgatttggctacagcactgcatcgccttagcttgcgtcgacaaaactatttaagtgagaagcagttctttgctgaagaatggcagcggaagatccaggttctggcagaccagaaggaaggagttagtggctgtgtcaccccgacagagagccttgcctctctctgcaccacccagtcagagatcacagacctcagcagtgccagttgccttcgaggttttatgccagaaaaattacaaattgtcaagccccttgaaggatcacaaactctgtatcactggcagcagcttgctcaaccaaacttgggaaccatccttgatccacgaccaggtgtcattactaaaggctttacccagttgcccggggatgctatttatcacatctcagatttagaagaggatgaagaggagggtattacttttcaggttcagcaacctcttgaagtggaagagaaactttcaacatccaagccagtaacagggatcttcctgccacccattacttcagcaggtggaccagttacagttgcaaccgccaacccaggaaagtgcctgtcgtgcacaaactcaacattcactttcaccacctgtagaatattacatccctctgacatcactcaggttacccccagctctgggttcccttcattatcctgtggaagtagcggtagcagttcatccaacacggctgtgaattctcctgccttgtcctatagactcagcattggtgagtccatcaccaaccgacgagattccactacaaccttcagtagcaccatgagcttggccaaacttctacaagagcgaggcatctctgccaaagtgtaccacagcccaatttcagagaaccccctccagcctctccctaaatccctggctatcccttccacaccaccaaattcaccatctcactcaccttgcccttctcctttaccctttgagcctcgagtgcatctctctgaaaattttttggcctctcgaccagctgagacattcctccaggagatgtatggcttgagaccctcccggaaccctcctgatgttggccagttgaagatgaacttagtggacaggctgaagagactggggatagccagagtggtcaagaaccctggtgcccaagagaatggaagatgccaggaggcagaaattggtcctcaaaaaccagattctgctgtttatttaaattcaggtagcagtttattaggtggactaaggaggaatcagagtcttccagtcataatgggtagctttgctgccccagtttgcacatcctcacccaaaatgggtgtcctgaaggaggactgaggttcagcagttaactgaccttttatacaagttagcacatgaaggatagatatgcactgaaacatgtggtctggtctgacttgagagaaaaggaatgttgcacaagggttgtgaatgtgaaagggggaatggaggaatggaaataaaattgggatgagccctaatggaggaagtcgggcaaattgaaagtataaatgaatgggccatgagtgttcagagggagaaaagaaaggtttaatatactccttcagttgagttttcttgtcttgaacataaaaagtgaatacaaataaattcagtaatactaaaacatacagagatactgaacttgctggcacatttacttctggtaagcataaagcagagagaacccaggttagaaggatgggaagagaaaaggagcagttttattgcttatagaaagccgttctgaggggttggtggggtaagctcagtctattactgagacaatagtgagatggcttatatgtttcccctgttaatatctggttaaattatgtatccatcaaatggtatgctcgcagcattagcaaaattaggagtttcatctttttcattgaatcacaggtggagactcctattttcctttctgttttcaggcctttgagcccctgggagcccaaataccactcaattattttgtatttatgattaataaaagttcattttttaaatttgtatttttatacaacctccaaaaaaaaaaacaactgggtagagggtgggagggatttacttttaagaggcaaaatgtgagtaaattgaaaccaagaaaacttgtttttagaatatttcgtctgaataagtacagtagccaaggaatacaaacataattgcatgtttttaaaaattccttggaggctggaaggggttaagccagaagtgcaatcaataggaattagggaatgttgtatatttatatatgtaaactttttttgtaagaaaagttggtgacaactaaaccaactttttccaaagtgcgctatgcatatttttaatgaaagatgacatgtatttgcacaaaaattctcaggcacattaaattattgtaaactgaagtaaaacccgggtgcttgctttgagattgtggttttttcttcctaatgtaaaataaaataaaacacatctgccttcttgatatttatagaattagagaataaactttttaatgggggagtcaaagctttttctttttctctaaggttctttttttttattcaaactgtatgaaatggcaaagtgaggctctggggttagatttcagcattcagcagttgacacaggctaagaaatggaaagaagtagatctgttttttctcaatgttgctgagcaaagtctgcttctcatcagatgacgtggctttgtctagacagcacgcagttcagaaagaaatgtctttatacaaaagacatgatagagaaaagatgagagaggggactaattattttgtttatgaaaatggcaagtaaattacttgatctttttggtgcttaatttgcaaatgttttgttcctttgtcctgacttaaaggcagttttctgaagaactcttgactcttgctcctatggttcccataggcacacctattcccaggccaaggagagtccttcctctccccttttgaggcatccccgccatccccccacttagagctatgtgctcaaaaagccaacatgaatgcagtggtaaaaatttgttagtttcttatactttttagaatctctcaataaaatttttctaaataaattccacaaaaacaaagggtgaagatggtctctccctttcgttccccttcactcagttgtgctgaggtcaatagagtgtagagtttcagaaaggattccagcaggtttatatgtgaatataagtgtccctgaatggggcaggcattaaatagaagaatccctgctgtttaaatttcccgcatattccaattcacttttaaaaaataccatttgaatttgtatttcataaagtgactctggggtgcttactttagtcaattcttaaaattttttatttgttccctaagaaagtaattactgtttctgttgcctggacagttacagtttccaggaaacatcaggaagtaggaaactgtagggccagagagtagtacaacgttaaattgtccgatttatgtgtattacttaaagctataaattgaactagatcttgccgtgctctgtattgagtataatttgtatacttttttataattaatgactaaatgatcactttggaggcagggtggtgggggtgtattagcagccaaataagcacatctgatcaaaaagaaccaggcttagattttttttaagtacattgatgttgatgttccaccagaaacaccttaagtgtatactgttgtgtaatgtctctagaaaggaatcctgtcttaaaactgggttttgctgttttttgaagtttctacctaaaatcatttttggtatatcctgataatctctataatactagaattgtctgcaaaatatagtaagaagaattggagcctaatagctgattcctcccaatttatctgttatgttttgtcactattcacattttagtcttttctacgataaaaattgtatgtgtactttcatgccagtataggaaacctcaatcttttttttttttcgcctttaagaaggttttcagtgattatacctcaggtatttctgagtgtcctattgtctaataggagaaatatcttcccgagctcagaattaaaagttctcctaaattatgaagatcccaaatcttatgtaaataaccttaggcatgagtccttagggagaagttaatgaccattgttaaagtgcttttttagaaaatgttgtgctgtatgttcttgatttgacataaatgaatagactttggcaagggaggaaataagttaaaaggcagcttacaagagcctattccctataaagggtataattttacacagtactcaaagcttgttatcttttctgaccattttagtacagaattagtacttggtggttactaacatcaacttgtgacatctagaactagggctcttagtgtttagtgggccacttctctgatgtcagatgcatgcagacctgtactccacatgcaacccaacagcagtgcagtgtgataactgagcggtcgcatggcagaggacatccccctcagagtgggcacaagtgccctctagggcagccaggggaatactattgttcgatacctgggatttgactttgtcaaacagctctttgtgcccctatctttgttttgtcaaatgtagatcagttaataaacatgagtagcttgaattttca

SEQ ID NO: 184017 - DNA, 3896 bp, Artificial Sequence
  derived and/or modified sequence
ggggccgtggaggccgctgggagagtggctctcctttggcttccccaattgtgtgggggctgccattgacccggtgtcgccgcagaaccgaggtcgccgagtgatgatgttgtgaagtcgcccgcctgtccctgccacgcccgggcggttgctggcagtgggagcagcggcagcagcttcggctgctgctttcaggctgccgctgcattaggggcttcctgaggaagcgcgggcggacgacagaggatgccgaaccactccagtcatgactgtccaaagtatgataatcacatgagagtgctcgttgctacggatgtcatttgactcatcagagaaaatctgtctaaaagaaaatatccatgtgaccaaatccatttcattattgaatggcttgatggatttcctttactctgattcataccaaagctgtccttctcaaccaaagcaagaaaggatcctgcatgagtcaatcccagaatgcaatttttacatcaccaacaggtgaagaaaacctcatgaatagcaatcacagagactcggagagcatcactgatgtctgctccaatgaggatctccctgaagttgagctggtgagtctgctagaagaacaactaccacagtataggctaaaagtagacactctctttctatatgaaaatcaagactggactcagtctccacaccagcggcagcatgcatctgatgctctctctccagtccttgctgaagagactttccgttacatgattctaggcacagacagggtggagcagatgaccaaaacttacaatgacatcgacatggttacacatctcctggcagagagggatcgtgatctggaactcgctgctcgaattggacaagctctcttaaagcggaaccatgtcttatctgagcagaacgaatccctggaggagcaattgggacaagcctttgatcaagttaatcagctgcagcatgagctatgcaagaaagatgagttacttcgaatcgtctccattgcttctgaagaaagtgaaactgattccagctgttctacacctcttcggttcaatgagtcctttagcttatctcaagggttgctgcagttggaaatgctgcaagaaaagctcaaggaactggaagaagagaatatggctcttcgatccaaggcttgtcacataaagacagaaactgttacctatgaagaaaaggaacaacagcttgtcagcgactgtgttaaagaacttcgtgaaacaaatgctcagatgtccagaatgactgaagaattgtcagggaagagtgatgagctgattcgataccaagaagagctttcctctcttttgtcacagattgtagaccttcagcacaaacttaaagaacatgtgattgagaaggaagaactaaaacttcacctgcaagcttccaaagatgcccaacggcaactgacaatggagctgcacgagttacaagacaggaatatggagtgtctaggaatgttacatgaatcccaagaagaaataaaggaacttcgtagtagatctggccctactgctcatctctacttctcccaatcatatggagcttttactggggaatctttggcagctgagattgaggggactatgcgtaaaaagctgagtttggatgaggaatcttctctctttaaacaaaaagcccaacagaagcgggtatttgataccgtcaggattgccaatgacacacggggccgctctatctcattcccagctctgttacccattccaggctccaaccgttcaagtgtcatcatgacagcaaaaccttttgagtctggtcttcagcaaacagaggacaaatcactcctgaaccaggggagcagctcagaggaggttgcagggagctcccagaagatgggccaaccaggaccctcaggagatagtgatttggctacagcactgcatcgccttagcttgcgtcgacaaaactatttaagtgagaagcagttctttgctgaagaatggcagcggaagatccaggttctggcagaccagaaggaaggagttagtggctgtgtcaccccgacagagagccttgcctctctctgcaccacccagtcagagatcacagacctcagcagtgccagttgccttcgaggttttatgccagaaaaattacaaattgtcaagccccttgaaggatcacaaactctgtatcactggcagcagcttgctcaaccaaacttgggaaccatccttgatccacgaccaggtgtcattactaaaggctttacccagttgcccggggatgctatttatcacatctcagatttagaagaggatgaagaggagggtattacttttcaggttcagcaacctcttgaagtggaagagaaactttcaacatccaagccagtaacagggatcttcctgccacccattacttcagcaggtggaccagttacagttgcaaccgccaacccaggaaagtgcctgtcgtgcacaaactcaacattcactttcaccacctgtagaatattacatccctctgacatcactcaggttacccccagctctgggttcccttcattatcctgtggaagtagcggtagcagttcatccaacacggctgtgaattctcctgccttgtcctatagactcagcattggtgagtccatcaccaaccgacgagattccactacaaccttcagtagcaccatgagcttggccaaacttctacaagagcgaggcatctctgccaaagtgtaccacagcccaatttcagagaaccccctccagcctctccctaaatccctggctatcccttccacaccaccaaattcaccatctcactcaccttgcccttctcctttaccctttgagcctcgagtgcatctctctgaaaattttttggcctctcgaccagctgagacattcctccaggagatgtatggcttgagaccctcccggaaccctcctgatgttggccagttgaagatgaacttagtggacaggctgaagagactggggatagccagagtggtcaagaaccctgtgcccaagagaatggaagatgccaggaggcagaaattggtcctcaaaaaccagattctgctgtttatttaaattcaggtagcagtttattaggtggactaaggaggaatcagagtcttccagtcataatgggtagctttgctgccccagtttgcacatcctcacccaaaatgggtgtcctgaaggaggactgaggttcagcagttaactgaccttttatacaagttagcacatgaaggatagatatgcactgaaacatgtggtctggtctgacttgagagaaaaggaatgttgcacaagggttgtgaatgtgaaagggggaatggaggaatggaaataaaattgggatgagccctaatggaggaagtcgggcaaattgaaagtataaatgaatgggccatgagtgttcagagggagaaaagaaaggtttaatatactccttcagttgagttttcttgtcttgaacataaaaagtgaatacaaataaattcagtaatactaaaacatacagagatactgaacttgctggcacatttacttctggtaagcataaagcagagagaacccaggttagaaggatgggaagagaaaaggagcagttttattgcttatagaaagccgttctgaggggttggtggggtaagctcagtctattactgagacaatagtgagatggcttatatgtttcccctgttaatatctggttaaattatgtatccatcaaatggtatgctcgcagcattagcaaaattaggagtttcatctttttcattgaatcacaggtggagactcctattttcctttctgttttcaggcctttgagcccctgggagcccaaataccactcaattattttgtatttatgattaataaaagttcattttt

SEQ ID NO: 184018 - protein, 835 aa, Artificial Sequence
  derived and/or modified sequence
MKRRTDPECTAPIKKQKKRVAELALSLSSTSDDEPPSSVSHGAKASTTSLSGSDSETEGKQHSSDSFDDAFKADSLVEGTSSRYSMYNSVSQKLMAKMGFREGEGLGKYSQGRKDIVEASSQKGRRGLGLTLRGFDQELNVDWRDEPEPSACEQVSWFPECTTEIPDTQEMSDWMVVGKRKMIIEDETEFCGEELLHSVLQCKSVFDVLDGEEMRRARTRANPYEMIRGVFFLNRAAMKMANMDFVFDRMFTNPRDSYGKPLVKDREAELLYFADVCAGPGGFSEYVLWRKKWHAKGFGMTLKGPNDFKLEDFYSASSELFEPYYGEGGIDGDGDITRPENISAFRNFVLDNTDRKGVHFLMADGGFSVEGQENLQEILSKQLLLCQFLMALSIVRTGGHFICKTFDLFTPFSVGLVYLLYCCFERVCLFKPITSRPANSERYVVCKGLKVGIDDVRDYLFAVNIKLNQLRNTDSDVNLVVPLEVIKGDHEFTDYMIRSNESHCSLQIKALAKIHAFVQDTTLSEPRQAEIRKECLRLWGIPDQARVAPSSSDPKSKFFELIQGTEIDIFSYKPTLLTSKTLEKIRPVFDYRCMVSGSEQKFLIGLGKSQIYTWDGRQSDRWIKLDLKTELPRDTLLSVEIVHELKGEGKAQRKISAIHILDVLVLNGTDVREQHFNQRIQLAEKFVKAVSKPSRPDMNPIRVKEVYRLEEMEKIFVRLEMKIIKGSSGTPKLSYTGRDDRHFVPMGLYIVRTVNEPWTMGFSKSFKKKFFYNKKTKDSTFDLPADSIAPFHICYYGRLFWEWGDGIRVHDSQKPQDQDKLSKEDVLSFIQMHRA

SEQ ID NO: 184019 - DNA, 2508 bp, Artificial Sequence
  derived and/or modified sequence
atgaagagaagaaccgaccccgagtgcaccgcccccatcaagaagcagaagaagagagtggccgagctggccctgagcctgagcagcaccagcgacgacgagccccccagcagcgtgagccacggcgccaaggccagcaccaccagcctgagcggcagcgacagcgagaccgagggcaagcagcacagcagcgacagcttcgacgacgccttcaaggccgacagcctggtggagggcaccagcagcagatacagcatgtacaacagcgtgagccagaagctgatggccaagatgggcttcagagagggcgagggcctgggcaagtacagccagggcagaaaggacatcgtggaggccagcagccagaagggcagaagaggcctgggcctgaccctgagaggcttcgaccaggagctgaacgtggactggagagacgagcccgagcccagcgcctgcgagcaggtgagctggttccccgagtgcaccaccgagatccccgacacccaggagatgagcgactggatggtggtgggcaagagaaagatgatcatcgaggacgagaccgagttctgcggcgaggagctgctgcacagcgtgctgcagtgcaagagcgtgttcgacgtgctggacggcgaggagatgagaagagccagaaccagagccaacccctacgagatgatcagaggcgtgttcttcctgaacagagccgccatgaagatggccaacatggacttcgtgttcgacagaatgttcaccaaccccagagacagctacggcaagcccctggtgaaggacagagaggccgagctgctgtacttcgccgacgtgtgcgccggccccggcggcttcagcgagtacgtgctgtggagaaagaagtggcacgccaagggcttcggcatgaccctgaagggccccaacgacttcaagctggaggacttctacagcgccagcagcgagctgttcgagccctactacggcgagggcggcatcgacggcgacggcgacatcaccagacccgagaacatcagcgccttcagaaacttcgtgctggacaacaccgacagaaagggcgtgcacttcctgatggccgacggcggcttcagcgtggagggccaggagaacctgcaggagatcctgagcaagcagctgctgctgtgccagttcctgatggccctgagcatcgtgagaaccggcggccacttcatctgcaagaccttcgacctgttcacccccttcagcgtgggcctggtgtacctgctgtactgctgcttcgagagagtgtgcctgttcaagcccatcaccagcagacccgccaacagcgagagatacgtggtgtgcaagggcctgaaggtgggcatcgacgacgtgagagactacctgttcgccgtgaacatcaagctgaaccagctgagaaacaccgacagcgacgtgaacctggtggtgcccctggaggtgatcaagggcgaccacgagttcaccgactacatgatcagaagcaacgagagccactgcagcctgcagatcaaggccctggccaagatccacgccttcgtgcaggacaccaccctgagcgagcccagacaggccgagatcagaaaggagtgcctgagactgtggggcatccccgaccaggccagagtggcccccagcagcagcgaccccaagagcaagttcttcgagctgatccagggcaccgagatcgacatcttcagctacaagcccaccctgctgaccagcaagaccctggagaagatcagacccgtgttcgactacagatgcatggtgagcggcagcgagcagaagttcctgatcggcctgggcaagagccagatctacacctgggacggcagacagagcgacagatggatcaagctggacctgaagaccgagctgcccagagacaccctgctgagcgtggagatcgtgcacgagctgaagggcgagggcaaggcccagagaaagatcagcgccatccacatcctggacgtgctggtgctgaacggcaccgacgtgagagagcagcacttcaaccagagaatccagctggccgagaagttcgtgaaggccgtgagcaagcccagcagacccgacatgaaccccatcagagtgaaggaggtgtacagactggaggagatggagaagatcttcgtgagactggagatgaagatcatcaagggcagcagcggcacccccaagctgagctacaccggcagagacgacagacacttcgtgcccatgggcctgtacatcgtgagaaccgtgaacgagccctggaccatgggcttcagcaagagcttcaagaagaagttcttctacaacaagaagaccaaggacagcaccttcgacctgcccgccgacagcatcgcccccttccacatctgctactacggcagactgttctgggagtggggcgacggcatcagagtgcacgacagccagaagccccaggaccaggacaagctgagcaaggaggacgtgctgagcttcatccagatgcacagagcctag

SEQ ID NO: 184020 - DNA, 2508 bp, Artificial Sequence
  derived and/or modified sequence
atgaagcggagaaccgatccagagtgcaccgcccccattaagaaacagaaaaagagggtggctgagctggcgttatccctgtcctccacttccgatgacgagcctccttcgagcgtttctcacggagcgaaagccagcactacatccctctcaggatcagattctgaaactgagggaaagcagcattcgtcagacagtttcgatgacgcatttaaggctgatagcctggtcgagggcacttcatccagatattcaatgtataattcagtcagccaaaagcttatggccaagatgggatttagagaaggagaaggtctggggaaatactcccagggtaggaaggatatcgtggaggcctcttcacagaaaggtaggcgaggattgggactcaccctcaggggctttgatcaggaactgaatgtggactggcgagatgagccagaaccgtcagcgtgtgaacaggtcagctggttccccgagtgcactacagaaattcccgatacacaggaaatgtccgattggatggtggtaggtaaaaggaagatgattattgaggacgagactgaattttgcggagaggagcttctccattctgtcttacagtgcaaatcagtgttcgacgtgctggacggggaagaaatgcgtagggctcgtactagagctaacccctatgaaatgatccgaggagttttctttcttaatcgggccgcaatgaaaatggcaaacatggacttcgtgttcgacaggatgtttacaaatccgcgtgactcctacggcaaacccttggtaaaggatcgggaggccgaactgctgtacttcgccgacgtttgtgctggacctgggggattttctgaatacgtgctgtggaggaagaagtggcacgccaaagggtttggcatgaccctcaaaggtcctaacgactttaagttagaggatttctatagtgcttctagcgaactgtttgagccctactacggggaaggaggtatcgatggggacggcgacattacacggcccgagaacatctctgcttttcggaacttcgtgctggataatacagaccggaagggagtgcactttctcatggcagacggcgggttttccgtggagggacaagaaaatctgcaagaaatcttgtccaaacagcttctactgtgtcagtttctgatggccctttcaatcgtacggaccggcggtcacttcatctgtaaaacctttgacctcttcacaccgttctccgtgggtcttgtgtacctgctgtattgctgcttcgaaagggtttgcttgtttaaacccatcacatcccgccctgccaatagcgagagatatgtggtgtgcaagggtttaaaggtgggaattgacgacgtgagagattatctgtttgcagtgaatatcaaactgaatcaactgcgcaacactgactcagacgtcaacttagtggtgccactggaggttattaaaggagaccacgagtttactgattatatgataagaagtaatgaaagccactgctcactgcagataaaggcactggccaagatccacgcctttgttcaggacactactttgagcgagccaaggcaggctgaaatccgtaaagaatgccttcgattgtggggaatcccggaccaggcacgcgtcgctccttcctccagcgatccaaaaagcaagtttttcgagcttattcaggggacagaaattgatattttttcctataagcctacacttttgacttctaagacactggagaagatcaggccagtgttcgactatcggtgtatggtgtcagggtccgagcagaagtttctaattgggctaggcaaaagtcaaatctacacttgggacggacgtcagtcagatagatggattaagctggacctgaaaacagagttgcctcgggacactctgttgagtgttgaaatcgtgcacgaattaaagggcgaaggtaaggcccagcggaagatttccgcgatccacattctggatgttctggtgttgaacggcacggatgtcagagagcagcactttaaccagcgtatccagctcgcagagaaattcgttaaagcagtgtctaaaccaagtcgccctgatatgaaccctatccgcgttaaagaggtgtatcggctcgaagagatggagaagattttcgtgagactagagatgaagataataaaggggtcgtctgggacacctaagttgagctacacagggcgagacgacagacatttcgttcccatgggcctatatatagtccgcaccgtgaatgaaccttggactatgggcttctctaaatccttcaaaaaaaagttcttctacaataagaagactaaagactctactttcgacttgccggccgacagcatcgctccctttcatatatgctattatggaagactgttctgggaatggggagacggaattagagtccacgacagccagaagcctcaggatcaagataagttaagtaaggaggatgtgctaagtttcatccaaatgcacagggcgtag

SEQ ID NO: 184021 - DNA, 4033 bp, Artificial Sequence
  derived and/or modified sequence
cgcagtactggacccgagcgcgacggtgcggctggcggacccgggctggcttgtggggaaacgaaactgagggaggaggcggcggctctggcagcggcggcgacagtgtcggcctgaccccccctccgctccccggcagctcgctctctcccctcagcttaacgatgaagaggagaactgacccagaatgcactgcccccatcaagaaacagaaaaaaagagttgcagagcttgccctgagcctcagctccacgtccgatgatgaacctccctcctctgtcagtcatggagcaaaagcatctactacaagccttagtgggtctgatagtgagaccgaggggaaacaacacagctctgactcttttgacgatgcattcaaagcagactctcttgtggaaggaacttcttctcgctattccatgtataatagcgtctcccagaagcttatggccaagatgggcttcagggaaggtgaaggattgggtaaatacagccagggtcggaaggacatcgttgaggcttccagtcagaaaggtcgaagaggcttgggtctgacactccggggctttgaccaggagctgaacgtggactggcgagatgagccagagcccagtgcttgtgagcaggtgtcatggtttccagaatgtaccactgaaattcctgacactcaggaaatgagcgattggatggtggtgggaaagagaaagatgattattgaagatgaaacagagttttgtggggaagagctgcttcacagtgtgttgcagtgtaagagcgtgtttgatgtcttggatggggaagagatgcggcgagctcggactcgggccaatccctatgagatgatccgaggagtcttctttctaaacagggcagcaatgaagatggctaacatggattttgtatttgatcgcatgttcacaaatccgcgggactcttatgggaagccactggtgaaggaccgggaagctgagcttctgtactttgctgatgtctgcgcaggcccaggtggcttctcagagtatgtgctgtggaggaagaagtggcatgcaaagggctttggaatgactttgaagggccctaatgacttcaagctggaggacttctactctgcttccagtgaactcttcgaaccctactatggtgagggtgggattgatggagatggagatatcacccgcccagagaacatctctgcttttcggaattttgtcctggataacacagatcgcaagggtgtccattttctgatggctgatgggggtttctcggtggaggggcaggagaacctgcaggagatcctcagcaagcagctgcttctgtgtcagttcctcatggcgctgtccattgtccggacaggaggccacttcatctgtaaaacctttgacctgttcacaccgtttagtgtggggcttgtctacctgctgtactgctgctttgaacgagtttgtctcttcaagcctattaccagccgtcctgccaactcagagaggtatgtggtgtgcaagggcctgaaggtgggcatagatgatgttcgggattacctcttcgcagtgaatattaaactcaatcagctgcggaacacggattccgacgtcaacttggtggtccccctggaggtgatcaagggagaccatgaatttactgactacatgatacggtccaatgagagccactgtagtctgcagatcaaagctctggcgaaaatccatgcctttgttcaagacacgacactgagtgagcctcgacaggcagagatacggaaggagtgcctccgactctgggggatcccagaccaggctcgtgtggctccttcttcctccgaccctaaatcgaagttctttgagctaatccagggcactgagattgacatcttcagctacaagcccacactgctcacctctaaaaccctggagaagatccgccctgtgtttgactaccgctgcatggtatctggcagtgagcagaagttcctcatcggcctggggaaatcccagatctacacatgggatggccgccagtcagaccgctggatcaagctagacctgaagacagagctgccccgggacactctgctatctgtggaaattgtgcatgagctgaaaggggaggggaaggcccagaggaagatcagtgccatccacatcctcgatgtccttgtgctgaatggcaccgacgttcgggagcagcactttaaccagcgaattcagcttgccgagaaatttgtgaaagccgtttccaagcctagtcggcccgacatgaatcccatcagggtgaaggaggtgtacagactggaagagatggagaagatttttgtcaggttggagatgaagatcatcaagggctccagtggcaccccaaagctcagctacacagggcgtgatgaccggcactttgtacccatgggcctctacatcgtcaggacagtgaatgagccctggactatgggattcagcaaaagcttcaagaagaagttcttctacaacaagaaaaccaaggactctacttttgacctccctgcagactccattgccccatttcacatttgctactatggccggctcttctgggagtggggggatggcattcgtgtgcatgactcccagaagccccaggaccaggacaagctgtccaaggaggacgtcctctccttcatccagatgcacagggcctaagagcctcagaatgtgccacccctgcagaatgccctgtcattcctgagatggggccacctggggcccacagtgctggcttcttccccctcttgaaaagggactggggagcattgcacctggcatgaggagtgggtggcctcctctccatcccctgaagagctcaggcagggccctgcagagaacactcatgttccttctgggacacctgcctgggaactttcccctgccaggactcagcctgaaggaagctgctcctgaggcaggtatgaggtcagtgcctagggcacgtgggactgatggaggacatatcagagtggcagagctgtgggctctgctgttctctcctgcatcctgtagactcacttttctgagttccatgcactgccctgagggtagccatgcccttgctttgcccaactttttattgggccatccctgagtgggtggagacctgctgtcatgagctggccaggagaacctgctataaaaaaatcaaggttttgtttctttgaacttactctgttttgatgccaaattggagaccattttcttgtctccttcccccactcatcctggccttccctggagttcttcctagcccagagctctgacagtccagcagggtgggaaggagggagtttgggcaaactctcatccctgataccacattgagatcctgggagccctcttttcgtactgagtatggagttgtagagccatcctaggtgccatccccttttggtccaaacattgggcagcgctagatggcaggaagcagccttgaagacccgtctttcccccacagcagcaggggccccagcagtaacaaagggtacctccaggggtttgggtagcgctgccctctggcagtcatgcaccgctgtctgccatagccgctctagggtcttggcagaattctgagcttgaagtgcagctcccttactaccctttcccttcctttttcttccctaataggaggtacaatctgcttttgtttgtcgttaagtggtcactcccatttcctttatcttggccgacaacacagagaggagggggagctgggcagtagcttggggtgggggtgggcacctgtggttgtttttaatgggaaatacctctcagagatgttcatgcaggctccctagggccccatcccagtgccaggctggtttccatggagatagggcactgaggctcccgtgaggttggaatcgacttcaccatgggggtccttcagccagcatccagctccccacccccaggctggcagtagcactgctgagatgctgtatttccacccaattctgggtatatcagtgtgtcttgcagaatcttggatcattaaagataaacatattttt

SEQ ID NO: 184022 - DNA, 2508 bp, Artificial Sequence
  derived and/or modified sequence
atgaagagaagaacagatcctgagtgcacagcccccatcaagaagcagaagaagagggtggccgagctggccctgagcctgagcagcaccagtgatgatgagccccccagctctgtgtcccatggagccaaggccagcaccaccagcctgagcggcagtgacagcgagacagagggcaagcagcacagcagtgacagctttgatgatgccttcaaggctgacagcctggtggagggcaccagcagccgctacagcatgtacaacagcgtgtcccagaagctgatggccaagatgggcttccgggagggggagggcctgggcaagtacagccagggcaggaaggacatcgtggaggccagcagccagaagggcagaagaggcctgggcctgaccctgcggggctttgaccaggagctgaatgtggactggagagatgagcctgagcccagcgcctgtgagcaggtgtcctggttccctgagtgcaccacagagatcccagacacccaggagatgtctgactggatggtggtgggcaagaggaagatgatcattgaagatgaaacagagttctgtggggaggagctgctgcacagcgtgctgcagtgcaagtctgtgtttgatgtgctggatggagaggagatgagaagagcccggacccgggccaacccctatgagatgatccggggcgtcttcttcctgaacagagctgccatgaagatggccaacatggactttgtgtttgacaggatgttcaccaacccccgggacagctatggcaagcccctggtgaaggaccgggaggccgagctgctgtactttgctgatgtgtgtgccggccctgggggcttctctgaatatgtgctgtggaggaagaagtggcacgccaagggcttcggcatgaccctgaagggccccaatgacttcaagctggaggacttctacagcgccagcagcgagctgtttgagccctactatggagagggcggcattgatggagatggagacatcaccaggcctgagaacatcagcgccttcaggaactttgtgctggacaacacagacaggaagggcgtgcacttcctgatggctgatggcggcttctctgtggagggccaggagaacctgcaggagatcctgagcaagcagctgctgctgtgccagttcctgatggccctgagcatcgtgaggactggaggccacttcatctgcaagacctttgacctcttcacccccttctctgtgggcctggtgtacctgctgtactgctgctttgagcgggtgtgcctcttcaagcccatcaccagcaggcctgccaacagcgagagatatgtggtgtgcaagggcctgaaggtgggcattgatgatgtgcgggactacctgtttgctgtgaacatcaagctgaaccagctgaggaacacagacagtgatgtgaacctggtggtgcccctggaggtgatcaagggggaccacgagttcacagactacatgatccgcagcaatgaaagccactgcagcctgcagatcaaggccctggccaagatccacgcctttgtgcaggacaccaccctgtctgagccccggcaggccgagatcaggaaggagtgcctgcggctgtggggcatcccagaccaggcccgggtggcccccagcagcagtgaccccaagagcaagttctttgagctgatccagggcacagaaattgacatcttctcctacaagcccaccctgctgaccagcaagaccctggagaagatccggcctgtgtttgactaccgctgcatggtgtctggcagcgagcagaagttcctgattggcctgggcaagagccagatctacacctgggatggccggcagagcgaccgctggatcaagctggacctgaagacagagctgccccgggacaccctgctgtctgtggagatcgtgcatgagctgaagggggagggcaaggcccagaggaagatcagcgccatccacatcctggatgtgctggtgctgaatggaacagatgtgcgggagcagcacttcaaccagaggatccagctggccgagaagtttgtgaaggctgtgtccaagcccagcaggccagacatgaaccccatccgggtgaaggaggtgtaccgcctggaggagatggagaagatctttgtgcggctggagatgaagatcatcaagggcagcagcggcacccccaagctgagctacacaggaagagatgacagacactttgtgcccatgggcctgtacatcgtgaggacagtgaatgagccctggaccatgggcttcagcaagagcttcaagaagaagttcttctacaacaagaagaccaaggacagcacctttgacctgcctgctgacagcatcgcccccttccacatctgctactacggccgcctcttctgggagtggggagatggcatccgggtgcatgacagccagaagccccaggaccaggacaagctgagcaaggaggatgtgctgtccttcatccagatgcaccgggcctag

SEQ ID NO: 184023 - DNA, 2508 bp, Artificial Sequence
  derived and/or modified sequence
atgaagcggcggaccgaccccgagtgcaccgcccccatcaagaagcagaagaaaagagtagccgagctcgccctgtctttgtcatctacatcagatgacgaaccaccctcaagtgtctcacacggagcgaaggcttccactacctcactgagcgggtccgacagtgagactgagggaaagcagcacagttccgactcctttgatgatgcatttaaagccgactcactagtggaaggtacctctagccgatactccatgtacaactctgtgagccaaaaactcatggctaagatgggcttcagggagggcgagggattgggaaaatactcccaaggccgtaaagacatcgttgaagcttcatctcaaaagggccggcgcggccttggcctgaccctacgaggattcgaccaggagttgaatgtcgactggagggacgaacccgaaccttccgcctgcgagcaagtgtcatggtttcccgagtgtaccactgagatccccgatacacaggagatgagcgattggatggtggtgggcaaacgcaagatgatcattgaagacgaaactgagttttgcggcgaggagttgcttcacagtgtgttgcagtgtaaatccgtgttcgacgttctcgacggggaggaaatgcggagggcccgaactcgcgcgaacccctatgagatgatcagaggcgttttctttctgaatcgcgccgcaatgaagatggcaaatatggacttcgtgttcgacaggatgttcactaatcccagagatagctatggaaaaccactcgttaaagatcgggaagcggagctcctgtactttgctgacgtctgcgctggaccagggggtttttccgaatacgttctgtggaggaaaaagtggcatgctaaaggattcggaatgactctgaaggggccaaacgacttcaaactcgaggatttctactcggcctccagcgaactgtttgagccctattatggcgaaggagggatagacggtgacggcgatattacacgaccagagaacatatctgccttccgaaactttgtcctggataacacggacaggaagggcgtacattttctcatggccgacggtggattcagtgtggaggggcaggaaaaccttcaggaaatcctgagcaagcaacttctgctgtgccagttcttgatggcgctgagcatcgtaaggaccggggggcatttcatttgtaaaacctttgatctgttcaccccattttccgtcggcctggtgtacctcctctattgctgttttgagcgagtttgccttttcaaaccaattactagtcggccagctaactccgagcggtacgtcgtgtgcaagggtttgaaggtgggaattgatgatgttcgggattatctctttgctgtgaacataaaacttaaccagctgcgtaacactgattcagacgtgaacctcgtcgtgccattagaagtgataaaaggagaccacgaattcacagactatatgattagatccaatgaaagccactgcagcctccaaattaaggctcttgccaagatacacgcttttgttcaagacacaaccctctcagaacctcgccaggcagaaattcgcaaagagtgcttacggctgtggggcatccccgaccaagccagggttgcccccagctcatctgatcctaaatctaaattctttgaattgatccaagggactgaaatcgatatcttctcgtataagccaaccctgctcacctcaaaaactctggagaaaatcaggcctgtcttcgactacagatgtatggtgagcgggtccgaacaaaaattcctgataggactgggtaaaagccaaatctacacatgggacggaaggcagtcagatcgatggatcaaattagatctcaaaaccgagctgccacgggacaccttactatctgtagagatcgtgcatgaactcaagggggagggtaaggcccagaggaaaataagcgccattcacatcttggatgttttagtactcaacgggaccgatgttagagagcaacatttcaaccagaggattcagctggccgagaagtttgtgaaggccgttagtaaaccgtcccgacccgatatgaacccaatccgagtgaaagaggtttatagactggaggagatggagaagattttcgtgcggctggagatgaagatcattaaagggtcatctggcacaccaaaattaagttacacggggagggatgataggcatttcgtgcccatgggactctacattgtgcgcactgttaacgagccatggacaatgggattttctaagagtttcaaaaagaaattcttctataataagaagacgaaggatagcaccttcgatctacctgccgattcgatcgcgccatttcatatctgttactatggcagattgttctgggagtggggagatgggatacgggttcatgactcccagaaaccccaggatcaagacaagctcagtaaagaggacgtcctcagctttatccaaatgcaccgggcctag

SEQ ID NO: 184024 - DNA, 2508 bp, Artificial Sequence
  derived and/or modified sequence
atgaagcgcagaacagaccctgagtgcaccgcccctatcaaaaaacaaaagaaacgggtcgctgagctcgcacttagcctgtcctccaccagtgatgacgagcctccaagttccgttagccatggtgcaaaggcttccactacctcactgtccggcagtgactccgaaactgagggcaagcagcacagctctgacagctttgacgatgcctttaaggccgacagtctggttgagggtactagtagtagatattcaatgtataattccgtaagccaaaagcttatggctaaaatggggttcagagaaggggagggactgggtaaatactcacaagggcgtaaggacatagttgaagccagcagccagaaagggaggaggggactcggcctcacactgaggggcttcgaccaggaattaaatgtggactggcgggacgagccggagccttctgcctgtgaacaagtgagctggttccccgaatgcaccactgaaatcccagatactcaggaaatgtcagattggatggtcgtgggtaagagaaagatgattattgaagacgagacggaattctgcggggaggaactgctgcactccgtgcttcagtgtaaaagcgtgtttgacgttctggatggcgaggagatgaggcgagccaggactcgggctaacccatacgaaatgattcggggagtcttttttttaaaccgagccgcaatgaaaatggctaatatggacttcgtgtttgataggatgttcacaaacccccgagattcttatggcaaaccgcttgtgaaagaccgcgaggccgagctcctgtattttgccgatgtgtgtgcagggccagggggttttagcgaatatgtcctgtggcggaagaaatggcacgccaaaggatttgggatgacgctgaagggaccgaacgacttcaaacttgaagatttctatagcgcttccagcgagctgtttgagccctactacggggaagggggtatagatggagatggggacatcactaggcctgaaaacattagtgctttcaggaatttcgtccttgataatacagaccgaaagggcgtacattttctgatggccgacggcggtttctccgtggagggtcaagagaacctgcaggaaattctttctaagcagctgctcttatgccaattcctgatggccctgtcgattgtaagaaccggagggcacttcatttgcaagacgtttgatctttttacccccttcagtgttggactcgtttatctgctgtactgttgcttcgagagagtgtgcctgttcaaacctattacatcaagacccgctaacagtgagcgctatgtcgtctgcaaggggttaaaagttggaatcgacgacgtgagggactatctgtttgctgtcaatataaagttgaaccaactccgaaacaccgatagtgatgtcaacctcgttgtgccacttgaagttatcaaaggagatcacgagttcacagactatatgattcgaagtaacgaaagccactgttctttgcagattaaggccctggcgaagatccatgcgtttgttcaagacacgactctcagcgagccacgccaggccgaaattcgaaaagaatgtctacgcctttggggcattccggaccaggcccgagtggccccttcatcttccgaccccaagtccaagtttttcgagttgatccagggcaccgagatcgatatcttcagctataaacccacgcttctgacctctaaaaccctagaaaagattcggcctgtgtttgattaccggtgcatggtgtccgggtctgagcaaaaatttctgatcgggctggggaaaagtcaaatctacacttgggacggacgacagagtgaccgttggattaagctggacctgaagacagagttgccgagagatactttacttagtgtggaaattgtccacgagctaaagggcgaaggcaaggcccaacgtaagatctctgccatacacatcctggatgttctggtgctgaacgggaccgatgtccgggaacagcattttaaccagcgcatacagcttgctgaaaaatttgtaaaagccgtgagcaagccttccagaccagatatgaatccaattcgagtcaaggaggtctaccggctagaagagatggaaaagatctttgtcaggctcgaaatgaagataatcaaagggtcttcaggtactcccaaactctcgtatacaggacgcgacgatagacacttcgttccgatgggattatacatagtcaggacagtcaatgagccttggacaatgggtttcagcaagagcttcaaaaagaagttcttctataacaagaaaacaaaagacagtacctttgaccttccggcagatagtatcgctccattccacatctgctattatggacgcctgttctgggagtggggggatggaattagggtccacgactcacagaagccacaggatcaagacaaactgagtaaggaggatgtgttgtcattcatacaaatgcaccgcgcttag

SEQ ID NO: 184025 - protein, 406 aa, Artificial Sequence
  derived and/or modified sequence
MHPAVFLSLPDLRCSLLLLVTWVFTPVTTEITSLDTENIDEILNNADVALVNFYADWCRFSQMLHPIFEEASDVIKEEFPNENQVVFARVDCDQHSDIAQRYRISKYPTLKLFRNGMMMKREYRGQRSVKALADYIRQQKSDPIQEIRDLAEITTLDRSKRNIIGYFEQKDSDNYRVFERVANILHDDCAFLSAFGDVSKPERYSGDNIIYKPPGHSAPDMVYLGAMTNFDVTYNWIQDKCVPLVREITFENGEELTEEGLPFLILFHMKEDTESLEIFQNEVARQLISEKGTINFLHADCDKFRHPLLHIQKTPADCPVIAIDSFRHMYVFGDFKDVLIPGKLKQFVFDLHSGKLHREFHHGPDPTDTAPGEQAQDVASSPPESSFQKLAPSEYRYTLLRDRDEL

SEQ ID NO: 184026 - DNA, 1221 bp, Artificial Sequence
  derived and/or modified sequence
atgcaccctgccgtgttcctttctttgccagacctgcgctgttccctcttgctattggtgacatgggtgtttacacccgttacgaccgagataacaagtctggacaccgaaaacatcgacgaaatccttaacaacgcagacgtcgccctggtgaacttctatgcggattggtgccgattttcgcagatgttgcacccaatctttgaggaagcttcagacgttatcaaagaagagtttccaaatgaaaaccaggtcgtgttcgcacgggttgactgtgatcagcacagtgatatcgctcagcgttataggattagtaaataccccaccctaaaactgtttcggaatggtatgatgatgaagcgtgaatatagaggccagcgctccgttaaagcactggccgactatatccgccaacagaaaagcgaccctatccaggaaataagggacctggctgagataactactctggacaggtccaagaggaatatcatcggatattttgaacagaaagacagtgacaactatagggtgttcgagagggtcgctaacatactgcatgacgattgcgctttcctctcagccttcggggacgtcagtaagcccgaacggtacagcggagacaatattatctacaagccccccggtcattccgcccctgatatggtctacctaggtgccatgacaaactttgatgttacctataattggatccaagacaaatgtgtcccattggtgagagagataaccttcgaaaatggcgaagaactcaccgaggagggcctcccctttttaattttgttccacatgaaggaagataccgagtcattggagatctttcagaatgaagtggcccggcaactgatctccgagaaaggtaccatcaactttttgcatgctgactgcgataagttccgccatcccctgttgcacattcagaagacccccgccgattgtccagtgattgcaatcgacagttttaggcacatgtatgtctttggtgactttaaggatgtgttaatcccaggaaaactgaaacaatttgtattcgatttgcactccggtaagcttcacagagaattccatcatggacccgaccctaccgacaccgcccctggggagcaagcccaggatgtggcctccagcccacctgagtccagctttcagaagcttgcaccatccgagtacagatatacccttctaagggatcgagatgagctgtag

SEQ ID NO: 184027 - DNA, 1221 bp, Artificial Sequence
  derived and/or modified sequence
atgcaccctgctgtgttcctgagcctgcctgacctgcgctgcagcctgctgctgctggtgacctgggtgttcacccctgtgaccacagagatcaccagcctggacacagaaaatattgatgagatcctgaacaatgctgatgtggccctggtgaacttctatgctgactggtgccgcttcagccagatgctgcaccccatctttgaggaggccagtgatgtgatcaaggaggagttccccaatgaaaaccaggtggtgtttgcccgggtggactgtgaccagcacagcgacatcgcccagcgctaccgcatcagcaagtaccccaccctgaagctgttcagaaatggcatgatgatgaagcgggagtaccggggccagaggtctgtgaaggccctggccgactacatccggcagcagaagagtgaccccatccaggagatccgggacctggccgagatcaccaccctggacaggagcaagaggaacatcatcggctactttgagcagaaggacagcgacaactacagagtgtttgagcgggtggccaacatcctgcatgatgactgtgccttcctgagcgcctttggagatgtgtccaagccagagcgctacagcggggacaacatcatctacaagcccccaggccacagcgccccagacatggtgtacctgggcgccatgaccaactttgatgtgacctacaactggatccaggacaagtgtgtgcccctggtgcgggagatcacctttgaaaatggagaggagctgacagaggagggcctgcccttcctgatcctcttccacatgaaggaggacacagagagcctggagatcttccagaatgaggtggcccggcagctgatcagcgagaagggcaccatcaacttcctgcatgctgactgtgacaagttccgccaccccctgctgcacatccagaagaccccagctgactgccctgtgattgccatcgacagcttccgccacatgtatgtgtttggagacttcaaggatgtgctgatccctgggaagctgaagcagtttgtgtttgacctgcacagcggcaagctgcaccgggagttccaccacggccctgaccccacagacacagcccctggagagcaggcccaggatgtggccagcagccccccagagagcagcttccagaagctggcccccagcgagtaccgctacaccctgctgcgggacagagatgagctgtag

SEQ ID NO: 184028 - DNA, 1221 bp, Artificial Sequence
  derived and/or modified sequence
atgcaccccgccgtgttcctgagcctgcccgacctgcggtgcagcttactgctgctcgtgacatgggtgtttacaccagtaactacagagattacgtctctagataccgaaaacatcgatgaaattctgaacaatgcagacgttgccctggtgaacttttatgccgattggtgtcgattctcacaaatgctgcatcccatcttcgaggaagcctctgatgtaattaaagaggagtttcccaacgaaaatcaggttgtgtttgctcgggtggactgcgatcaacacagcgatatcgcacagagatatcgcattagcaagtaccctaccctcaagctcttcaggaacggcatgatgatgaagagagaatatcggggccagagaagcgtcaaagccctggccgactacataaggcaacagaaaagcgatccgattcaggaaatcagggatttagccgaaataacgacactggatcgttcaaagcgaaatatcataggatatttcgaacaaaaggacagtgacaattatagagtgtttgaacgagtcgccaacatcttgcacgacgactgcgcgtttctgtcagcattcggagatgtatctaaacctgagcggtacagcggggacaatatcatttacaaaccccctggtcacagcgctcccgacatggtatacctgggggccatgacgaacttcgatgtaacttacaattggattcaggacaaatgcgtgccgctggttcgggaaataacatttgaaaatggagaggagctcactgaggagggtctaccctttctgatacttttccatatgaaggaagatacagaatctctggaaatatttcaaaatgaggttgcccgtcaactcatttccgagaaagggaccatcaactttttacacgccgactgtgacaagttccgtcaccctttgttacatattcagaagacccccgcagactgcccagtgatcgcaatagacagcttcaggcacatgtatgtcttcggcgactttaaagacgttctgattcccggcaagctcaaacaattcgtgttcgatctccattcaggaaagctgcacagagagtttcatcacggccctgatcccaccgacaccgctcccggggaacaggcccaggacgtagcctccagtccccctgaatcgtcattccagaaactggctccctctgaatacaggtacaccctgttgagagaccgcgacgaactgtag

SEQ ID NO: 184029 - DNA, 1221 bp, Artificial Sequence
  derived and/or modified sequence
atgcatccagccgtgttcctgtccttgcctgatctgcgttgcagtttgctactactggtgacatgggttttcactcccgtgacaactgagattacttcgcttgacacagagaatatcgatgaaattctgaacaacgccgacgtcgccctggtgaacttctatgctgactggtgtcgattctcgcaaatgctccatccaatcttcgaggaggcttcagacgtaataaaggaagagttccccaacgagaatcaggtagtattcgccagagtggattgcgaccagcattccgacatcgctcagaggtatcgcatcagcaagtatcccaccttgaagctgttccggaacggaatgatgatgaaaagagaatatcgcggacagagatcagtaaaggcactggccgattacataagacagcagaaaagcgacccgatccaagagataagagatctggccgagattacaacactagatcggtctaaaaggaacatcatcgggtacttcgagcagaaagattcggataactatcgcgtttttgagcgggttgccaacatcctccatgatgattgtgcgttcctgtcggccttcggcgacgttagtaagcctgaacgttacagcggtgacaacataatatataagccccctggacactccgcacccgatatggtctatctcggggctatgactaactttgatgtgacttacaactggatccaggacaagtgcgtgccactggtgcgcgagatcactttcgagaacggagaagagctgacagaagaaggcttaccttttttaattttgtttcacatgaaggaggacacggaaagccttgaaatttttcaaaacgaggttgctcgacagctgattagcgagaaggggaccatcaattttttgcacgcagactgtgacaagtttcgtcaccccctgctgcacatccagaaaacacctgccgattgcccggtcattgctattgattcctttcgccatatgtacgtctttggcgattttaaggatgtgctcatccccggtaagcttaaacagtttgtcttcgacctacattctgggaagttgcacagggagttccaccacggacctgacccaacagacactgcccctggcgagcaagcacaggatgtagcctcctctcccccagaaagctctttccagaagcttgcaccgtcagaatatcgatataccctgctgagggatcgtgacgaactctag

SEQ ID NO: 184030 - DNA, 4854 bp, Artificial Sequence
  derived and/or modified sequence
gaagtgagggtgtgagaggcctctctggaagttgtcccgggtgttcgccgctggagcccgggtcgagaggacgaggtgccgctgcctggagaatcctccgctgccgtcggctcccggagcccagccctttcctaacccaacccaacctagcccagtcccagccgccagcgcctgtccctgtcacggaccccagcgttaccatgcatcctgccgtcttcctatccttacccgacctcagatgctcccttctgctcctggtaacttgggtttttactcctgtaacaactgaaataacaagtcttgatacagagaatatagatgaaattttaaacaatgctgatgttgctttagtaaatttttatgctgactggtgtcgtttcagtcagatgttgcatccaatttttgaggaagcttccgatgtcattaaggaagaatttccaaatgaaaatcaagtagtgtttgccagagttgattgtgatcagcactctgacatagcccagagatacaggataagcaaatacccaaccctcaaattgtttcgtaatgggatgatgatgaagagagaatacaggggtcagcgatcagtgaaagcattggcagattacatcaggcaacaaaaaagtgaccccattcaagaaattcgggacttagcagaaatcaccactcttgatcgcagcaaaagaaatatcattggatattttgagcaaaaggactcggacaactatagagtttttgaacgagtagcgaatattttgcatgatgactgtgcctttctttctgcatttggggatgtttcaaaaccggaaagatatagtggcgacaacataatctacaaaccaccagggcattctgctccggatatggtgtacttgggagctatgacaaattttgatgtgacttacaattggattcaagataaatgtgttcctcttgtccgagaaataacatttgaaaatggagaggaattgacagaagaaggactgccttttctcatactctttcacatgaaagaagatacagaaagtttagaaatattccagaatgaagtagctcggcaattaataagtgaaaaaggtacaataaactttttacatgccgattgtgacaaatttagacatcctcttctgcacatacagaaaactccagcagattgtcctgtaatcgctattgacagctttaggcatatgtatgtgtttggagacttcaaagatgtattaattcctggaaaactcaagcaattcgtatttgacttacattctggaaaactgcacagagaattccatcatggacctgacccaactgatacagccccaggagagcaagcccaagatgtagcaagcagtccacctgagagctccttccagaaactagcacccagtgaatataggtatactctattgagggatcgagatgagctttaaaaacttgaaaaacagtttgtaagcctttcaacagcagcatcaacctacgtggtggaaatagtaaacctatattttcataattctatgtgtatttttattttgaataaacagaaagaaattttgggtttttaatttttttctccccgactcaaaatgcattgtcatttaatatagtagcctcttaaaaaaaaaaaacctgctaggatttaaaaataaaaatcagaggcctatctccactttaaatctgtcctgtaaaagttttataaatcaaatgaaaggtgacattgccagaaacttaccattaacttgcactactagggtagggaggacttagggatgtttcctgtgtcgtatgtgcttttctttctttcatatgatcaattctgttggtattttcagtatctcatttctcaaagctaaagagatatacattctggatacttgggaggggaataaattaaagttttcacactgtgtactgtgttttactgattggttggatattgcttatgaaaattccatagtggtatttttttggattcttaatgtgtaacttaaacatactttgaagtggaggagagtcataagacagaacatttggcaggaattgtccttatgaaacaagaaaaagaaaatgaaaagtattattaagcttctgtgtttgtctaaaaatgtggcatatggatggcatttaaaactttgaatgaattatacctaaatctgggacagggaggtgacagtggaacaggctaccaatcagaactagatgacttttaaggctcctcctattatgagacttcaatttccaaagagaagaactagcagagaaattgtatttcagtaattttaagctccttctgtcttgtagagtcttgttatagttgtataaatcaaaaacacagaataaggaacatatttaactttttttcattataaaatggttagaggaccctaccccctctagattccctgatttccccaggcctgcagcatacagtaagatgggtccctgtgccaggcctcaatactgccagggaataaaaccagagggagaggaccctcagtgtcatatcaggaagcccagtgccagaggacagacaggttcaaaactggcttttcctctgggcctgggttggtgctataggccaagggtcattttatacttgggtataaatcaatcccagtttgggaaaagattatttttaagcttaaaaggctgacatgtgccattatatgtagtatgtaatatatgtaacatcttccaattcttttaaaataaaattaatatttataatggatatttaatgattgttatttttaaaaaccagcttataattcctcgttatgcatgatttatccaaagtttccatagttttattcaaaataataaatgttaataaggtgataaggggtatatttaatgtattgtatcaaattgtgaataagaaagtaggatggagctttctagaggttgggccttagttctgttatcctcattgcttttaaccaataagttaaatgaagttagagttatggtcttcaggttagattatggaccagatctgtgagggtcagcatggaaattcacattcaacaaggtagcacacaggaccaagagcagcacatgcaatcaactggaataatatagtaatcctgtaactgggtttgaaaaaataatcaacaaaagatacaattcaagggttaggttgcagagagctggcttgagagtagttattatgaaaaaggcctcaaggagtacgtgttcagtatgctctaagatgataaagtggctgttaaaaagggagttgatttgaggaagtattacttagcattcatgcatattgggcttaggctctagccctgccactatcattgtcttctctggactgtgaagtcactgaggacaaggaaactaaatttaatgtctgtatcactagtgcctagaatttctggacacttagtagtcaccatcaggcgtttatttaatgaatgagaagcaaagtgaccttggttacttttttaccctgaggggctcagcactcattaggacttggtgcctaattttataaaaagtcactaagctcaagtgcttggatgaaaggacagcgtggataaaaaggtttttaaaacatggatgttaaggctgttttgcttggagaagacttgggactgggacagtctttagatattatttgaaatgctggcactgtctatctggatcccagggcttgaactaggatttgaggaagtcacagggaagcagatttcagtctgacatttattcagtgcaagttttttggtgctgtagtatatgatgaaagatgtaaagctgaataaagcattatttctgccctagagttgttcacagcctagtcaggcatatggatatgtaaacaatgactgtaacgtgttatagatgtaaagacaaaataaaggttaaagagggcataaaggagcactcaattgcagagatttgaggacattatttttattttgagctttaaaaagatgaataggtgttctcaggaggtagggatctggctgagagggaataatctgagcaaaggtatgaaacagcctaatgcattagagaaaaaagttcttttagtaaggcatttggggttggggaagctagaaaaagaaatgggagctggtcacacagggccttgtgtgccagactaaggggtttgtagtatatattgtaggcagaagagatccatcaacagattgcaagcaaggaagtatgttcactttaaagtttgagaaagaatagtgtggaagcacgtctcaaatttagacttgttccccctctgaaccgtgaatcagaccatttcaggtagaagtcttccccggtttatctgatctactcggggcctcaggcttctcagctgggaagagaggatgcaagaccagactgaagaacacggttgagtccccagaaccaaaagggggcctttctgcttcttagccagctacctcttcgagtttttcaaattgtgagggggaccataaaaggatggaaacttttagatgacattctacaaattatttttttctttaaattaaaagaacctagccaataagatagagaatgggcatctaaggcatctcagagctctctgatgaagccaggttgtcaaagatcatttgcaaaagaagggaaaactggcatgacaaaagctacagagaggagagtgaaatatagaagtgtttgaaatgttcaagctcacaataagcttaaatttatagaaaatgctaaggttgtcaagaaggcttttttttttttcttttttaaacctgagggcaaaaaggaatggataaagtagtgtaatggattgacaatcaggaagaacagaataactcagttttttttctcctacaaggagatatggctggaccaaaataaaatgacatgaaactgcaaaaatgaaaa

SEQ ID NO: 184031 - DNA, 1221 bp, Artificial Sequence
  derived and/or modified sequence
atgcaccccgccgtgttcctgagcctgcccgacctgagatgcagcctgctgctgctggtgacctgggtgttcacccccgtgaccaccgagatcaccagcctggacaccgagaacatcgacgagatcctgaacaacgccgacgtggccctggtgaacttctacgccgactggtgcagattcagccagatgctgcaccccatcttcgaggaggccagcgacgtgatcaaggaggagttccccaacgagaaccaggtggtgttcgccagagtggactgcgaccagcacagcgacatcgcccagagatacagaatcagcaagtaccccaccctgaagctgttcagaaacggcatgatgatgaagagagagtacagaggccagagaagcgtgaaggccctggccgactacatcagacagcagaagagcgaccccatccaggagatcagagacctggccgagatcaccaccctggacagaagcaagagaaacatcatcggctacttcgagcagaaggacagcgacaactacagagtgttcgagagagtggccaacatcctgcacgacgactgcgccttcctgagcgccttcggcgacgtgagcaagcccgagagatacagcggcgacaacatcatctacaagccccccggccacagcgcccccgacatggtgtacctgggcgccatgaccaacttcgacgtgacctacaactggatccaggacaagtgcgtgcccctggtgagagagatcaccttcgagaacggcgaggagctgaccgaggagggcctgcccttcctgatcctgttccacatgaaggaggacaccgagagcctggagatcttccagaacgaggtggccagacagctgatcagcgagaagggcaccatcaacttcctgcacgccgactgcgacaagttcagacaccccctgctgcacatccagaagacccccgccgactgccccgtgatcgccatcgacagcttcagacacatgtacgtgttcggcgacttcaaggacgtgctgatccccggcaagctgaagcagttcgtgttcgacctgcacagcggcaagctgcacagagagttccaccacggccccgaccccaccgacaccgcccccggcgagcaggcccaggacgtggccagcagcccccccgagagcagcttccagaagctggcccccagcgagtacagatacaccctgctgagagacagagacgagctgtag

SEQ ID NO: 184032 - protein, 1606 aa, Artificial Sequence
  derived and/or modified sequence
MLLHLCSVKNLYQNRFLGLAAMASPSRNSQSRRRCKEPLRYSYNPDQFHNMDLRGGPHDGVTIPRSTSDTDLVTSDSRSTLMVSSSYYSIGHSQDLVIHWDIKEEVDAGDWIGMYLIDEVLSENFLDYKNRGVNGSHRGQIIWKIDASSYFVEPETKICFKYYHGVSGALRATTPSVTVKNSAAPIFKSIGADETVQGQGSRRLISFSLSDFQAMGLKKGMFFNPDPYLKISIQPGKHSIFPALPHHGQERRSKIIGNTVNPIWQAEQFSFVSLPTDVLEIEVKDKFAKSRPIIKRFLGKLSMPVQRLLERHAIGDRVVSYTLGRRLPTDHVSGQLQFRFEITSSIHPDDEEISLSTEPESAQIQDSPMNNLMESGSGEPRSEAPESSESWKPEQLGEGSVPDGPGNQSIELSRPAEEAAVITEAGDQGMVSVGPEGAGELLAQVQKDIQPAPSAEELAEQLDLGEEASALLLEDGEAPASTKEEPLEEEATTQSRAGREEEEKEQEEEGDVSTLEQGEGRLQLRASVKRKSRPCSLPVSELETVIASACGDPETPRTHYIRIHTLLHSMPSAQGGSAAEEEDGAEEESTLKDSSEKDGLSEVDTVAADPSALEEDREEPEGATPGTAHPGHSGGHFPSLANGAAQDGDTHPSTGSESDSSPRQGGDHSCEGCDASCCSPSCYSSSCYSTSCYSSSCYSASCYSPSCYNGNRFASHTRFSSVDSAKISESTVFSSQDDEEEENSAFESVPDSMQSPELDPESTNGAGPWQDELAAPSGHVERSPEGLESPVAGPSNRREGECPILHNSQPVSQLPSLRPEHHHYPTIDEPLPPNWEARIDSHGRVFYVDHVNRTTTWQRPTAAATPDGMRRSGSIQQMEQLNRRYQNIQRTIATERSEEDSGSQSCEQAPAGGGGGGGSDSEAESSQSSLDLRREGSLSPVNSQKITLLLQSPAVKFITNPEFFTVLHANYSAYRVFTSSTCLKHMILKVRRDARNFERYQHNRDLVNFINMFADTRLELPRGWEIKTDQQGKSFFVDHNSRATTFIDPRIPLQNGRLPNHLTHRQHLQRLRSYSAGEASEVSRNRGASLLARPGHSLVAAIRSQHQHESLPLAYNDKIVAFLRQPNIFEMLQERQPSLARNHTLREKIHYIRTEGNHGLEKLSCDADLVILLSLFEEEIMSYVPLQAAFHPGYSFSPRCSPCSSPQNSPGLQRASARAPSPYRRDFEAKLRNFYRKLEAKGFGQGPGKIKLIIRRDHLLEGTFNQVMAYSRKELQRNKLYVTFVGEEGLDYSGPSREFFFLLSQELFNPYYGLFEYSANDTYTVQISPMSAFVENHLEWFRFSGRILGLALIHQYLLDAFFTRPFYKALLRLPCDLSDLEYLDEEFHQSLQWMKDNNITDILDLTFTVNEEVFGQVTERELKSGGANTQVTEKNKKEYIERMVKWRVERGVVQQTEALVRGFYEVVDSRLVSVFDARELELVIAGTAEIDLNDWRNNTEYRGGYHDGHLVIRWFWAAVERFNNEQRLRLLQFVTGTSSVPYEGFAALRGSNGLRRFCIEKWGKITSLPRAHTCFNRLDLPPYPSYSMLYEKLLTAVEETSTFGLE

SEQ ID NO: 184033 - DNA, 4821 bp, Artificial Sequence
  derived and/or modified sequence
atgctgctgcacctgtgcagcgtgaagaacctgtaccagaacagattcctgggcctggccgccatggccagccccagcagaaacagccagagcagaagaagatgcaaggagcccctgagatacagctacaaccccgaccagttccacaacatggacctgagaggcggcccccacgacggcgtgaccatccccagaagcaccagcgacaccgacctggtgaccagcgacagcagaagcaccctgatggtgagcagcagctactacagcatcggccacagccaggacctggtgatccactgggacatcaaggaggaggtggacgccggcgactggatcggcatgtacctgatcgacgaggtgctgagcgagaacttcctggactacaagaacagaggcgtgaacggcagccacagaggccagatcatctggaagatcgacgccagcagctacttcgtggagcccgagaccaagatctgcttcaagtactaccacggcgtgagcggcgccctgagagccaccacccccagcgtgaccgtgaagaacagcgccgcccccatcttcaagagcatcggcgccgacgagaccgtgcagggccagggcagcagaagactgatcagcttcagcctgagcgacttccaggccatgggcctgaagaagggcatgttcttcaaccccgacccctacctgaagatcagcatccagcccggcaagcacagcatcttccccgccctgccccaccacggccaggagagaagaagcaagatcatcggcaacaccgtgaaccccatctggcaggccgagcagttcagcttcgtgagcctgcccaccgacgtgctggagatcgaggtgaaggacaagttcgccaagagcagacccatcatcaagagattcctgggcaagctgagcatgcccgtgcagagactgctggagagacacgccatcggcgacagagtggtgagctacaccctgggcagaagactgcccaccgaccacgtgagcggccagctgcagttcagattcgagatcaccagcagcatccaccccgacgacgaggagatcagcctgagcaccgagcccgagagcgcccagatccaggacagccccatgaacaacctgatggagagcggcagcggcgagcccagaagcgaggcccccgagagcagcgagagctggaagcccgagcagctgggcgagggcagcgtgcccgacggccccggcaaccagagcatcgagctgagcagacccgccgaggaggccgccgtgatcaccgaggccggcgaccagggcatggtgagcgtgggccccgagggcgccggcgagctgctggcccaggtgcagaaggacatccagcccgcccccagcgccgaggagctggccgagcagctggacctgggcgaggaggccagcgccctgctgctggaggacggcgaggcccccgccagcaccaaggaggagcccctggaggaggaggccaccacccagagcagagccggcagagaggaggaggagaaggagcaggaggaggagggcgacgtgagcaccctggagcagggcgagggcagactgcagctgagagccagcgtgaagagaaagagcagaccctgcagcctgcccgtgagcgagctggagaccgtgatcgccagcgcctgcggcgaccccgagacccccagaacccactacatcagaatccacaccctgctgcacagcatgcccagcgcccagggcggcagcgccgccgaggaggaggacggcgccgaggaggagagcaccctgaaggacagcagcgagaaggacggcctgagcgaggtggacaccgtggccgccgaccccagcgccctggaggaggacagagaggagcccgagggcgccacccccggcaccgcccaccccggccacagcggcggccacttccccagcctggccaacggcgccgcccaggacggcgacacccaccccagcaccggcagcgagagcgacagcagccccagacagggcggcgaccacagctgcgagggctgcgacgccagctgctgcagccccagctgctacagcagcagctgctacagcaccagctgctacagcagcagctgctacagcgccagctgctacagccccagctgctacaacggcaacagattcgccagccacaccagattcagcagcgtggacagcgccaagatcagcgagagcaccgtgttcagcagccaggacgacgaggaggaggagaacagcgccttcgagagcgtgcccgacagcatgcagagccccgagctggaccccgagagcaccaacggcgccggcccctggcaggacgagctggccgcccccagcggccacgtggagagaagccccgagggcctggagagccccgtggccggccccagcaacagaagagagggcgagtgccccatcctgcacaacagccagcccgtgagccagctgcccagcctgagacccgagcaccaccactaccccaccatcgacgagcccctgccccccaactgggaggccagaatcgacagccacggcagagtgttctacgtggaccacgtgaacagaaccaccacctggcagagacccaccgccgccgccacccccgacggcatgagaagaagcggcagcatccagcagatggagcagctgaacagaagataccagaacatccagagaaccatcgccaccgagagaagcgaggaggacagcggcagccagagctgcgagcaggcccccgccggcggcggcggcggcggcggcagcgacagcgaggccgagagcagccagagcagcctggacctgagaagagagggcagcctgagccccgtgaacagccagaagatcaccctgctgctgcagagccccgccgtgaagttcatcaccaaccccgagttcttcaccgtgctgcacgccaactacagcgcctacagagtgttcaccagcagcacctgcctgaagcacatgatcctgaaggtgagaagagacgccagaaacttcgagagataccagcacaacagagacctggtgaacttcatcaacatgttcgccgacaccagactggagctgcccagaggctgggagatcaagaccgaccagcagggcaagagcttcttcgtggaccacaacagcagagccaccaccttcatcgaccccagaatccccctgcagaacggcagactgcccaaccacctgacccacagacagcacctgcagagactgagaagctacagcgccggcgaggccagcgaggtgagcagaaacagaggcgccagcctgctggccagacccggccacagcctggtggccgccatcagaagccagcaccagcacgagagcctgcccctggcctacaacgacaagatcgtggccttcctgagacagcccaacatcttcgagatgctgcaggagagacagcccagcctggccagaaaccacaccctgagagagaagatccactacatcagaaccgagggcaaccacggcctggagaagctgagctgcgacgccgacctggtgatcctgctgagcctgttcgaggaggagatcatgagctacgtgcccctgcaggccgccttccaccccggctacagcttcagccccagatgcagcccctgcagcagcccccagaacagccccggcctgcagagagccagcgccagagcccccagcccctacagaagagacttcgaggccaagctgagaaacttctacagaaagctggaggccaagggcttcggccagggccccggcaagatcaagctgatcatcagaagagaccacctgctggagggcaccttcaaccaggtgatggcctacagcagaaaggagctgcagagaaacaagctgtacgtgaccttcgtgggcgaggagggcctggactacagcggccccagcagagagttcttcttcctgctgagccaggagctgttcaacccctactacggcctgttcgagtacagcgccaacgacacctacaccgtgcagatcagccccatgagcgccttcgtggagaaccacctggagtggttcagattcagcggcagaatcctgggcctggccctgatccaccagtacctgctggacgccttcttcaccagacccttctacaaggccctgctgagactgccctgcgacctgagcgacctggagtacctggacgaggagttccaccagagcctgcagtggatgaaggacaacaacatcaccgacatcctggacctgaccttcaccgtgaacgaggaggtgttcggccaggtgaccgagagagagctgaagagcggcggcgccaacacccaggtgaccgagaagaacaagaaggagtacatcgagagaatggtgaagtggagagtggagagaggcgtggtgcagcagaccgaggccctggtgagaggcttctacgaggtggtggacagcagactggtgagcgtgttcgacgccagagagctggagctggtgatcgccggcaccgccgagatcgacctgaacgactggagaaacaacaccgagtacagaggcggctaccacgacggccacctggtgatcagatggttctgggccgccgtggagagattcaacaacgagcagagactgagactgctgcagttcgtgaccggcaccagcagcgtgccctacgagggcttcgccgccctgagaggcagcaacggcctgagaagattctgcatcgagaagtggggcaagatcaccagcctgcccagagcccacacctgcttcaacagactggacctgcccccctaccccagctacagcatgctgtacgagaagctgctgaccgccgtggaggagaccagcaccttcggcctggagtag

SEQ ID NO: 184034 - DNA, 4821 bp, Artificial Sequence
  derived and/or modified sequence
atgttgttgcatctctgctccgttaagaatctgtatcagaataggttcttgggactggccgccatggcgagtccctccagaaactctcagtcacgtcgtcgctgtaaggaaccactacgatattcatacaatccagaccagtttcacaatatggatctacgaggagggcctcatgacggagtcaccattccccgatcaacatctgatacagacttggtgacatctgattcacgcagcacactgatggtttcttcatcctactatagcatcgggcactcccaagacctggttatacactgggatataaaggaagaggtcgatgccggtgattggatcgggatgtatctcatcgatgaggtgttgtcagagaactttctcgactacaaaaatagaggggtcaacggctctcatagagggcaaatcatctggaaaatcgacgcgagctcatacttcgtggaaccagagacaaagatctgcttcaagtactatcacggtgtgtctggcgcactacgggctacgacccccagtgtgaccgttaagaactctgccgcacccatcttcaagtccatcggtgccgacgaaaccgtccagggacagggctcaagacgccttatttcttttagcttatctgacttccaagccatgggattgaagaaaggaatgttcttcaatccggatccttacttaaagataagcatccagccaggcaagcacagcatcttccccgcgctgccacaccacgggcaagagcgccgctccaaaataataggtaacacggtgaatcccatttggcaagctgaacaattttccttcgtctccctgccgaccgatgtcctcgagattgaggtcaaggacaagttcgcgaaatctcgaccgatcattaaacggttcctgggcaaattgtctatgccagtgcaaaggttgctggagcgtcacgcaattggcgatagagtcgtttcatatacactgggccgccgacttccaactgatcacgttagcgggcaacttcagttccgcttcgaaattacgagctcaatacaccctgatgacgaggagatcagcctttcaaccgagccggaaagtgcacagattcaggattcaccaatgaataacttgatggaatcaggttccggagagcctagaagtgaagcgccggaaagcagcgaaagctggaagcccgagcagcttggggagggctctgtcccggacggaccggggaatcagagcatcgagttgagtagacccgctgaggaggccgccgtgattacagaggcgggggatcagggcatggtaagcgtggggccagaaggggctggtgagctgctggcccaagtgcaaaaggacatccaacccgctcccagtgctgaggaactggccgagcagctggacctgggagaagaagcttctgctctcctccttgaggacggggaagctcctgcctccaccaaagaagagccacttgaggaggaagcgactacgcagtccagggccggccgcgaggaagaggaaaaggaacaggaggaggagggggacgtaagcaccctggagcagggggaaggaaggcttcaattacgggcaagcgtgaaacgtaagtccagaccatgtagcctgcctgtctcggaactggagactgtcattgcatctgcctgcggagacccagagaccccaaggacccattacatcaggattcacacgctcctgcactctatgccctcagctcagggcgggtccgctgctgaagaggaggacggcgccgaggaagagagtacactaaaagactcatctgaaaaggacgggctttccgaggtggacaccgtcgcggctgacccttcagcccttgaggaagaccgtgaggagcccgaaggtgccacaccggggactgcgcatccaggccacagcggcggccacttcccttccctggccaatggtgcagctcaagacggggacactcatccatcaacagggtcagagagcgatagcagcccacggcagggtggtgaccattcctgcgagggatgcgacgcctcgtgctgttccccttcttgttattcctcttcctgctattccacttcctgttatagctcatcatgttactctgcatcttgctactctccctcgtgttacaacggtaatagattcgcttcacatacaagattttcaagtgtggacagcgctaagattagcgagtctacagtattctcttcacaagacgacgaggaggaggagaattctgcttttgaatccgtgcctgactccatgcagtccccggagctggacccagagagcacaaatggtgccggaccatggcaggacgaactcgcagccccttctgggcatgtcgagaggtccccggaaggactagaaagcccagtcgcaggcccgtcgaataggcgagaaggggaatgccctattctgcacaactcccagcctgtgtctcaactcccctccctgaggcctgagcatcaccactaccccacgattgacgaacccctcccgcctaactgggaagcacgaatagattcccatggccgagtgttctatgtcgaccacgtgaatcgtacgacgacttggcaaagaccaaccgccgctgctaccccggacggaatgcgcaggtcaggatctatccagcaaatggagcagctgaatcgcaggtaccagaatatccagaggactatcgcaaccgaaaggtcggaggaggatagtgggagtcagagttgtgagcaagctcctgcaggcggcggcggagggggtggctccgatagcgaggccgagagtagccagtcatcacttgacttgaggagggaagggagtctaagccctgtcaattctcaaaagatcactctgttgttgcagagcccggcagttaaattcatcacgaatcccgagttcttcactgttctgcatgccaattacagtgcataccgcgtttttacctcaagcacctgccttaagcatatgatcctcaaagtgcgccgggatgcaaggaattttgagaggtaccagcacaatcgcgacctagtaaattttatcaacatgtttgctgacacccgacttgaactccctcggggttgggaaattaagaccgatcaacagggtaagtcattctttgtggaccacaactctcgcgctacaacgtttattgatcccaggatccctctgcagaacgggagattgccaaatcatctgacacataggcagcacttacagcggttgcgcagctatagcgctggcgaagcatctgaagtctctcgaaatcgcggggctagccttttggctaggccgggacatagcttggtcgcggcaatccggagccagcaccagcatgagtccctccctctggcttataatgacaagatagtggcctttctgaggcaaccaaacattttcgaaatgctacaggagaggcagccctccctggcgcggaaccacacattacgggagaagattcattatattcgaacagagggtaatcacggactggaaaaactgagctgcgatgcggacttggtaattctgttatcactgttcgaggaggagatcatgtcttacgtgccccttcaggcagcattccaccctggctattccttttcccctcgctgtagtccttgctccagccctcaaaatagcccaggcctacaaagagcctctgccagagctccgagtccctatcgacgcgacttcgaggcgaagttgcggaatttttatagaaagctggaggcaaaaggatttggccagggccccggtaagataaagcttattattcgtcgagatcatctgctcgagggtacgttcaaccaggtgatggcctattcacgaaaagaacttcaacgcaacaaactgtatgtgacgttcgttggagaggaaggcttggactatagtggacccagccgtgagttctttttcctgctctctcaggagctcttcaatccctactatgggctattcgaatactctgccaacgatacgtataccgtgcagatctcccctatgtcagctttcgtggagaaccacctcgagtggtttaggttttccggtcgtatcctgggtctagccctcatccatcagtatttgcttgacgcatttttcacccggccgttctacaaagccctgcttcggcttccatgcgacctttcagatctggagtatctagatgaggagttccaccaatcattacagtggatgaaggataataacatcactgatattctagatctaacattcacagtaaatgaggaagtcttcgggcaggtcaccgagcgcgaattaaagagtggtggtgccaatacgcaggtaactgaaaaaaataagaaagagtatattgagaggatggtgaagtggcgggtggagcgtggcgtagtacagcagacagaagcccttgttagggggttttatgaggtggttgactctcggctcgtaagtgtttttgacgcacgtgaattggaactggtgatcgcaggcacagccgaaatcgacctgaacgattggcggaataataccgagtaccgaggcggttaccacgacggacacctcgtcataagatggttttgggctgccgtggaacgctttaacaacgagcagcgtctgcgtctgctccaattcgttaccggcacttccagtgtgccctatgagggtttcgcagccctgcgcggatccaatgggctacgtagattctgcatcgaaaaatggggcaagatcactagtctccctagagcacacacttgctttaatcgactggatctcccaccatacccaagttactccatgctgtacgagaagctcctgacggccgtggaggagacctcgaccttcggcctggaatag

SEQ ID NO: 184035 - DNA, 4821 bp, Artificial Sequence
  derived and/or modified sequence
atgctgctgcacctgtgcagcgtgaagaacctgtaccagaaccgcttcctgggcctggccgccatggccagccccagcaggaacagccagagcagaagacgctgcaaggagcccctgcgctacagctacaacccagaccagttccacaacatggacctgcggggcggcccccatgatggagtgaccatccccaggagcaccagtgacacagacctggtgaccagtgacagccgcagcaccctgatggtgagcagcagctactacagcatcggccacagccaggacctggtgatccactgggacatcaaggaggaggtggatgctggggactggattggcatgtacctgattgatgaggtgctgtctgagaacttcctggactacaagaacagaggagtgaatggcagccaccggggccagatcatctggaagattgatgccagcagctactttgtggagcctgagaccaagatctgcttcaagtactaccacggcgtgtctggggccctgcgggccaccacccccagcgtgacagtgaagaacagcgctgcccccatcttcaagagcatcggggctgatgaaacagtgcagggccagggcagccggcggctcatctccttcagcctgagtgacttccaggccatgggcctgaagaagggcatgttcttcaacccagacccctacctgaagatcagcatccagcccgggaagcacagcatcttccctgccctgccccaccacggccaggagaggaggagcaagatcatcggcaacacagtgaaccccatctggcaggccgagcagttctcctttgtgtccctgcccacagatgtgctggagattgaggtgaaggacaagtttgccaagagccggcccatcatcaagcgcttcctgggcaagctgtccatgcctgtgcagaggctgctggagagacatgccatcggggacagagtggtgtcctacaccctgggccgccgcctgcccacagaccacgtgtctggccagctgcagttccgctttgagatcaccagcagcatccacccagatgatgaggagatcagcctgagcacagagcctgagagcgcccagatccaggacagccccatgaacaacctgatggagagcggcagcggggagcccaggtctgaggcccctgagagcagcgagagctggaagccagagcagctgggggagggctctgtgcctgatggccctggcaaccagagcattgagctgagcaggcctgctgaggaggccgccgtcatcacagaagctggggaccagggcatggtgtctgtgggccctgagggcgctggggagctgctggcccaggtgcagaaggacatccagcctgcccccagcgctgaggagctggccgagcagctggacctgggggaggaggccagcgccctgctgctggaggatggagaggccccagccagcaccaaggaggagcccctggaggaggaggccaccacccagagcagagctggccgggaggaggaggagaaggagcaggaggaggagggagatgtgtccaccctggagcagggcgagggccgcctgcagctgcgggcctctgtgaagaggaagagccggccctgcagcctgcctgtgtctgagctggagaccgtcatcgccagcgcctgtggggaccctgagacccccaggacccactacatccgcatccacaccctgctgcacagcatgcccagcgcccagggcggcagcgctgctgaggaggaggatggagctgaggaggagagcaccctgaaggacagcagcgagaaggatggcctgtctgaggtggacacagtggccgctgaccccagcgccctggaggaggaccgggaggagcctgagggcgccaccccaggcacagcccaccctggccacagcggcggccacttccccagcctggccaacggggccgcccaggatggagacacccaccccagcacaggcagcgagagtgacagcagcccccggcagggcggggaccacagctgtgagggctgtgatgccagctgctgcagccccagctgctacagcagcagctgctacagcaccagctgctacagcagcagctgctacagcgccagctgctacagccccagctgctacaatggaaacagatttgccagccacacccgcttcagctctgtggacagcgccaagatcagcgagagcacagtgttcagcagccaggatgatgaggaggaggagaacagcgcctttgagagcgtgcctgacagcatgcagagccctgagctggaccctgagagcaccaacggggccggcccctggcaggatgagctggccgcccccagcggccacgtggagaggagccctgagggcctggagagccctgtggccggccccagcaacagaagagaaggagaatgtcccatcctgcacaacagccagcctgtgtcccagctgcccagcctgcggcctgagcaccaccactaccccaccattgatgagcccctgccccccaactgggaggccagaattgacagccacggccgggtcttctacgtggaccacgtgaacagaaccaccacctggcagaggcccacagctgctgccaccccagatggcatgaggaggagcggcagcatccagcagatggagcagctgaacagacgctaccagaacatccagaggaccatcgccacagagaggagtgaagaagattctggcagccagagctgtgagcaggccccagctgggggcggcggcggcggcggcagtgacagcgaggccgagagcagccagagcagcctggacctgcggcgggagggcagcctgagccctgtgaacagccagaagatcaccctgctgctgcagagccctgctgtgaagttcatcaccaaccctgagttcttcaccgtgctgcacgccaactacagcgcctacagagtcttcaccagcagcacctgcctgaagcacatgatcctgaaggtgagaagagatgccaggaactttgagcgctaccagcacaacagagacctggtgaacttcatcaacatgtttgctgacacccggctggagctgccccggggctgggagatcaagacagaccagcagggcaagagcttctttgtggaccacaacagccgggccaccaccttcatcgacccccgcatccccctgcagaatggccgcctgcccaaccacctgacccaccggcagcacctgcagaggctgcggagctacagcgctggggaggccagcgaggtgtccaggaacagaggagccagcctgctggcccggcccggccacagcctggtggccgccatccgcagccagcaccagcacgagagcctgcccctggcctacaatgacaagatcgtggccttcctgcggcagcccaacatctttgagatgctgcaggagcggcagcccagcctggccaggaaccacaccctgcgggagaagatccactacatcagaacagagggcaaccacggcctggagaagctgagctgtgatgctgacctggtgatcctgctgagcctgtttgaggaggagatcatgtcctatgtgcccctgcaggccgccttccaccctggctacagcttcagcccccgctgcagcccctgcagcagcccccagaacagccctggcctgcagagggccagcgcccgggcccccagcccctaccgccgggactttgaggccaagctgaggaacttctacaggaagctggaggccaagggcttcggccagggccctgggaagatcaagctgatcatcagaagagaccacctgctggagggcaccttcaaccaggtgatggcctacagcaggaaggagctgcagaggaacaagctgtatgtgacctttgtgggggaggagggcctggactacagcggccccagccgggagttcttcttcctgctgagccaggagctgttcaacccctactacggcctgtttgagtacagcgccaatgacacctacacagtgcagatcagccccatgtctgcctttgtggagaaccacctggagtggttccgcttcagcggccgcatcctgggcctggccctgatccaccagtacctgctggatgccttcttcacccggcccttctacaaggccctgctgcggctgccctgtgacctgagtgacctggagtacctggatgaggagttccaccagagcctgcagtggatgaaggacaacaacatcacagacatcctggacctgaccttcaccgtgaatgaggaggtgtttggccaggtgacagagcgggagctgaagagcggcggggccaacacccaggtgacagagaagaacaagaaggagtacatcgagaggatggtgaagtggagggtggagcggggcgtggtgcagcagacagaggccctggtgcggggcttctatgaggtggtggacagccggctggtgtctgtgtttgatgcccgggagctggagctggtgattgctggaacagctgagattgacctgaatgactggaggaacaacacagagtacagaggaggctaccatgatggccacctggtgatccgctggttctgggccgctgtggagcgcttcaacaatgagcagaggctgcggctgctgcagtttgtgacaggcaccagctctgtgccctatgagggctttgctgccctgcggggcagcaatggcctgcggcgcttctgcatcgagaagtggggcaagatcaccagcctgccccgggcccacacctgcttcaaccggctggacctgcccccctaccccagctacagcatgctgtatgagaagctgctgacagctgtggaggagaccagcaccttcggcctggagtag

SEQ ID NO: 184036 - DNA, 6839 bp, Artificial Sequence
  derived and/or modified sequence
ggggatgcaagcgggaggataaagcgatgaagtgtgctgcgttaccgcgcatcaggcgctgttgttggagccggaacaccgtgcgactctgaccgaaccggccccctcctcgcgcacacactcgccgagccgcgcgcgcccctccgccgtgacagtggccgtggcctccgctctctcggggcacccggcagccagagcgcagcgagagcgggcggtcgccagggtcccctccccagccagtcccaggcgcccggtgcactatgcggggcacgtgcgccccccagctctaatctgcgcgctgacaggagcatgatctgtgcccaggccagggctgccaagatatcaatgctatgttcagcagaaacggatacagcaagagcagcatagttcaaaaattgagggaggcatcttctctcttttcctgggatttaaacgcgatttaggagggcagatgccctacccgaaaaggccaaccgttaaagaccccggcagtgttgtggtccaaggcgtctcaaagcaggtggccagatctgcgtttctcatcagcagactcactccggctgtggctattacggaattgatgcgcgtacacgtggtgggtcattatgctgctgcacctgtgtagtgtgaagaatctgtaccagaacaggtttttaggcctggccgccatggcgtctccttctagaaactcccagagccgacgccggtgcaaggagccgctccgatacagctacaaccccgaccagttccacaacatggacctcaggggcggcccccacgatggcgtcaccattccccgctccaccagcgacactgacctggtcacctcggacagccgctccacgctcatggtcagcagctcctactattccatcgggcactctcaggacctggtcatccactgggacataaaggaggaagtggacgctggggactggattggcatgtacctcattgatgaggtcttgtccgaaaactttctggactataaaaaccgtggagtcaatggttctcatcggggccagatcatctggaagatcgatgccagctcgtactttgtggaacctgaaactaagatctgcttcaaatactaccatggagtgagtggggccctgcgagcaaccacccccagtgtcacggtcaaaaactcggcagctcctatttttaaaagcattggtgctgatgagaccgtccaaggacaaggaagtcggaggctgatcagcttctctctctcagatttccaagccatggggttgaagaaagggatgtttttcaacccagacccttatctgaagatttccattcagcctgggaaacacagcatcttccccgccctccctcaccatggacaggagaggagatccaagatcataggcaacaccgtgaaccccatctggcaggccgagcaattcagttttgtgtccttgcccactgacgtgctggaaattgaggtgaaggacaagtttgccaagagccgccccatcatcaagcgcttcttgggaaagctgtcgatgcccgttcaaagactcctggagagacacgccataggggatagggtggtcagctacacacttggccgcaggcttccaacagatcatgtgagtggacagctgcaattccgatttgagatcacttcctccatccacccagatgatgaggagatttccctgagtaccgagcctgagtcagcccaaattcaggacagccccatgaacaacctgatggaaagcggcagtggggaacctcggtctgaggcaccagagtcctctgagagctggaagccagagcagctgggtgagggcagtgtccccgatggtccagggaaccaaagcatagagctttccagaccagctgaggaagcagcagtcatcacggaggcaggagaccagggcatggtctctgtgggacctgaaggggctggggagctcctggcccaggtgcaaaaggacatccagcctgcccccagtgcagaagagctggccgagcagctggacctgggtgaggaggcatcagcactgctgctggaagacggtgaagccccagccagcaccaaggaggagcccttggaggaggaagcaacgacccagagccgggctggaagggaagaagaggagaaggagcaggaggaggagggagatgtgtctaccctggagcagggagagggcaggctgcagctgcgggcctcggtgaagagaaaaagcaggccctgctccttgcctgtgtccgagctggagacggtgatcgcgtcagcctgcggggaccccgagaccccgcggacacactacatccgcatccacaccctgctgcacagcatgccctccgcccagggcggcagcgcggcagaggaggaggacggcgcggaggaggagtccaccctcaaggactcctcggagaaggatgggctcagcgaggtggacacggtggccgctgacccgtctgccctggaagaggacagagaagagcccgagggggctactccaggcacggcgcaccctggccactccgggggccacttccccagcctggccaatggcgcggcccaggatggcgacacgcaccccagcaccgggagcgagagcgactccagccccaggcaaggcggggaccacagttgcgagggctgtgacgcgtcctgctgcagcccctcgtgctacagctcctcgtgctacagcacgtcctgctacagcagctcgtgctacagcgcctcgtgctacagcccctcctgctacaacggcaacaggttcgccagccacacgcgcttctcctccgtggacagcgccaagatctccgagagcacggtcttctcctcgcaagacgacgaggaggaggagaacagcgcgttcgagtcggtacccgactccatgcagagccctgagctggacccggagtccacgaacggcgctgggccgtggcaagacgagctggccgcccctagcgggcacgtggaaagaagcccggaaggtctggaatcccccgtggcaggtccaagcaatcggagagaaggtgaatgtcctatactccataattcccagccagtaagccagcttccttccctgaggcctgaacatcatcactacccaacaatcgatgagcctcttccaccaaactgggaagctcgaattgacagccacgggcgggtcttttatgtggaccacgtgaaccgcacaaccacctggcagcgtccgacggcagcagccaccccggatggcatgcggagatcggggtccatccagcagatggagcaactcaacaggcggtatcaaaacattcagcgaaccattgcaacagagaggtccgaagaagattctggcagccaaagctgcgagcaagccccagcaggaggaggcggaggtggagggagtgactcagaagccgaatcttcccagtccagcttagatctaaggagagaagggtcactttctccagtgaactcacaaaaaatcaccttgctgctgcagtccccagcggtcaagttcatcaccaaccccgagttcttcactgtgctacatgccaattatagtgcctaccgagtcttcaccagtagcacctgcttaaagcacatgattctgaaagtccgacgggatgctcgcaattttgaacgctaccagcacaaccgggacttggtgaatttcatcaacatgttcgcagacactcggctggaactgccccggggctgggagatcaaaacggaccagcagggaaagtcttttttcgtggaccacaacagtcgagctaccactttcattgacccccgaatccctcttcagaacggtcgtcttcccaatcatctaactcaccgacagcacctccagaggctccgaagttacagcgctggagaggcctcagaagtttctagaaacagaggagcctctttactggccaggccaggacacagcttagtagctgctattcgaagccaacatcaacatgagtcattgccactggcatataatgacaagattgtggcatttcttcgccagccaaacatttttgaaatgctgcaagagcgtcagccaagcttagcaagaaaccacacactcagggagaaaatccattacattcggactgagggtaatcacgggcttgagaagttgtcctgtgatgcggatctggtcattttgctgagtctctttgaagaagagattatgtcctacgtccccctgcaggctgccttccaccctgggtatagcttctctccccgatgttcaccctgttcttcacctcagaactccccaggtttacagagagccagtgcaagagccccttccccctaccgaagagactttgaggccaagctccgcaatttctacagaaaactggaagccaaaggatttggtcagggtccggggaaaattaagctcattattcgccgggatcatttgttggagggaaccttcaatcaggtgatggcctattcgcggaaagagctccagcgaaacaagctctacgtcacctttgttggagaggagggcctggactacagtggcccctcgcgggagttcttcttccttctgtctcaggagctcttcaacccttactatggactctttgagtactcggcaaatgatacttacacggtgcagatcagccccatgtccgcatttgtagaaaaccatcttgagtggttcaggtttagcggtcgcatcctgggtctggctctgatccatcagtaccttcttgacgctttcttcacgaggcccttctacaaggcactcctgagactgccctgtgatttgagtgacctggaatatttggatgaggaattccaccagagtttgcagtggatgaaggacaacaacatcacagacatcttagacctcactttcactgttaatgaagaggtttttggacaggtcacggaaagggagttgaagtctggaggagccaacacacaggtgacggagaaaaacaagaaggagtacatcgagcgcatggtgaagtggcgggtggagcgcggcgtggtacagcagaccgaggcgctggtgcgcggcttctacgaggttgtagactcgaggctggtgtccgtgtttgatgccagggagctggagctggtgatagctggcaccgcggaaatcgacctaaatgactggcggaataacactgagtaccggggaggttaccacgatgggcatcttgtgatccgctggttctgggctgcggtggagcgcttcaataatgagcagaggctgagattactgcagtttgtcacgggaacatccagcgtgccctacgaaggcttcgcagccctccgtgggagcaatgggcttcggcgcttctgcatagagaaatgggggaaaattacttctctccccagggcacacacatgcttcaaccgactggatcttccaccgtatccctcgtactccatgttgtatgaaaagctgttaacagcagtagaggaaaccagcacctttggacttgagtgaggacatggaacctcgcctgacattttcctggccagtgacatcacccttcctgggatgatccccttttccctttcccttaatcaactctcctttgattttggtattccatgatttttattttcaaaccaaatcaggattgacaaaagctgtgcatgaagaactgccttcttctaagatctaaccttcaggcttctctcctctgttttcaatgaactgctagcctgtatgcaatattaaaaaacagctgtctcaaggtctgtgtatatctccacatacctccattactaacaatgaaatatgaatgcaagttaagctacacttgaccaaatggtaataaatgtttacttccatttctatcattgaagggaaaatgtgagcattaagcactccaggctttcatatgcccatgtcttctgagcagagccaccattttttataatttctaataaccaactccagaactaggagctgatcaactctttgttttcctctccatctacttttccctgtgcataatatccatccaaaggacaacagtggcaaagctgaaatttttatacattcaactcatgattcacatgtggcatcagtcccatcagccggaactagcctagacatacggtgcaaatatgacacttctaacgattaacaacagcaagaaaacacctgctgctgatgcaatgcaatgcatcccaatggttgtggggattgtgggctcaactcaagagaagtttaggagggggagcatccctagtgaatactcacaccacaagaaggacaaacttgtgcacatgtccaagaaagaaagcttcttgattgaggtagcatgaaggatgaggcttcagcccccattgtcttatgtagaatgtggcaatgccaactggagaaagggaagaaggacatattaccttggtttgaatccctgagttctgtactgttctgttttgtttagtctagccacagttcttcacaaaggaaaaaaaaatgtgtagatgataccatgacttttgttaaagccatgacttttgtttgcttggcagacaaaccctttttttaaaactttgatatttttttttcacatttttttttccttttcctttcttaatcatggagttcaagttcctttgcattcgattgtccatcgggaccacactaggaagctgcagagagtgatggtgcttgttagggatcaagggcaacatagtacttctccttcacccatagtaatcctcctggggcagaaacataacaccccaaaggcacgttgatttgtatcaaaataaatatccagtttcttttagcattcagtgaaaacatatctcagaaaacttcatgttgtcagaaaaacagctgcaggctccaaagacagcctaacctctcaactacatttgaaataaacccaaccataatggt

SEQ ID NO: 184037 - DNA, 4821 bp, Artificial Sequence
  derived and/or modified sequence
atgctgctgcacctgtgcagcgtgaagaacctgtaccagaaccggtttctgggtctggccgctatggcttctcccagcagaaatagccagtcaagacgccgatgcaaagaacccctcagatactcctacaatcctgaccaattccacaacatggatctgaggggagggccacacgatggggtcacaatccctaggagtacctcggacaccgacctagtcacatcagactccaggagtacgctgatggtcagctcctcatattattctattggtcacagccaggacctcgtgattcattgggacatcaaagaagaggtggatgctggggattggattggtatgtatctgatcgacgaagtgctgtccgagaactttttagattacaaaaaccgcggtgtaaacggatcccatcgcggacagataatctggaagattgacgccagctcttacttcgtcgagcctgagactaaaatttgttttaaatactaccacggtgtatccggagccctgagagccacaacccctagtgttactgtcaagaactcggccgctcccatatttaaatccataggtgctgacgagaccgtacaagggcagggcagccgccgtctcatatccttttccctctcagattttcaggctatgggcctaaagaagggaatgttcttcaatcctgatccatacctcaaaatctcgattcagcctggaaaacacagcattttcccagctcttccacaccatggacaggaaagacgatcaaagattattggcaatactgtcaatcccatctggcaggccgagcaattctccttcgtgtcccttcctacagacgtgttggaaatcgaggtgaaagataagttcgctaaatctaggcccatcatcaaaagatttctaggcaagcttagcatgcctgtgcaacggctgctggaaagacatgccattggggatcgcgtggtaagctacacgctcgggcgcaggctccccaccgaccatgtgtccggccagcttcagtttagattcgagattaccagtagcatccatcccgacgatgaagaaataagcctgtctaccgagccagaatccgctcaaatccaggactccccgatgaataacctgatggaaagtggcagtggcgaacctcgatctgaggctccggagtccagtgaatcttggaagccggaacagctcggggaaggcagcgtgcctgacgggcctggtaaccagagcattgaattgtctaggcctgcagaagaagctgcagttatcactgaggcaggcgatcagggcatggtgagcgtgggacccgagggggcaggagaattgttggcgcaggtgcagaaagacatccagccagcacccagcgctgaggagctggctgagcaactggatctgggagaggaagcttccgcgcttttgctggaggacggcgaggcccccgcctcaacaaaggaagagcctttagaagaagaagccacaactcagtcgcgggcagggcgcgaggaagaggagaaggaacaggaggaggagggggacgtcagtactctggagcagggggaggggagattacaattgcgcgcctctgtgaagcggaagagtaggccatgctcactcccagtcagcgaactcgaaactgtaatcgccagcgcttgtggcgaccccgagaccccacgaactcattacatcagaatccatactctcctgcacagcatgcccagcgcacaaggaggctctgcagcagaggaagaagacggggccgaggaggagagcaccctgaaggactcctcagaaaaggatggactttctgaggtggacacagttgccgccgatccatctgccctggaggaagaccgcgaagagcccgagggtgccactcccgggacagcacaccctggccacagtgggggccattttccatccctggcaaatggcgctgcccaggatggagacacgcacccctcgaccggaagcgaaagcgacagctcacctcgacaaggaggcgaccacagttgcgaaggttgtgatgcaagttgctgttcaccgtcctgctatagcagcagttgttacagcacaagctgttactcgagtagttgctatagtgctagctgttatagcccaagctgctataacgggaatcggttcgcatcccacaccaggtttagctctgtcgatagcgccaagatcagcgaatccacagtgttctccagccaggatgacgaagaagaggagaactctgcgttcgagtcagtgccagatagtatgcaatccccggagctcgatcctgaatccactaacggggccggaccttggcaggatgagctcgccgcgcccagcggccatgtagagaggtcccctgaagggctcgagagtcctgttgccgggccatccaaccgccgggagggagagtgcccaatcctccataactcccagcctgtgtcccagcttccatctctgcgccccgaacaccatcactaccccaccattgatgagccacttcctcctaattgggaagcccggatcgattcacacggacgagttttttatgttgatcatgtaaatcgaacaacgacttggcagcgccccaccgcagcggcaactccggatggcatgcggagatccgggtccatacagcaaatggagcaattgaatcgaagatatcaaaatatccagagaacgatcgctacagaaagaagtgaggaggacagcggcagccagtcatgcgaacaggcacccgcgggaggtggaggcggaggaggatctgacagcgaagccgagagctctcaatcgagtctggatctgcgtcgggaagggtctttgtccccagtgaattctcaaaagatcaccttgctgctacagagcccagcagtaaagttcatcaccaatcccgagtttttcacagtattacacgccaactattccgcctatcgcgttttcacatcttcaacatgcctcaaacacatgatcctgaaagtgagacgcgacgcaagaaacttcgagcggtaccagcataatagggaccttgtcaatttcatcaacatgttcgcagatactaggttggagttgccgagagggtgggagattaagacagatcaacagggcaagtccttctttgttgatcacaactctagagctactactttcatcgaccctcgcattccactgcagaacgggagactgcccaatcatctgactcaccggcagcacctgcagagattacgcagctacagtgcaggcgaggcctcagaagtaagtaggaatagaggtgcttctctccttgctcgtccaggccattccttagtggccgccatccgctcacaacaccagcacgaaagcctccctctggcgtataacgataaaatcgtggcttttttgcgtcagccaaatatcttcgagatgttacaggaaagacaaccttccctggccaggaatcataccttacgagagaagattcattatatccgaactgaaggaaatcacggtctggagaagttatcctgcgacgccgatttggtcatcctgcttagcctgttcgaggaggaaataatgagctatgtgccactccaagcagcctttcaccctggatatagctttagcccaaggtgtagtccttgttcgtccccccaaaattcgcccggactccaacgtgcatcagcacgggcgccttccccctaccgacgcgacttcgaggccaagctccgtaacttctataggaagctagaggcaaaaggatttggccagggccccggcaagattaagctcatcattaggagggatcacctgctggagggcaccttcaaccaagttatggcctattcacgaaaggaacttcagagaaacaagctttatgtaaccttcgttggggaagagggactggactacagcggcccctcccgggaattcttctttctgttgagtcaggaactgttcaacccctattatggactatttgagtactccgccaatgatacttacacggttcaaatttcccccatgagcgctttcgttgagaaccatctcgaatggtttagatttagcggccgtatcctcggcctggcccttattcaccagtatttgctggacgccttcttcaccagacctttctataaagccctgctgagattaccttgcgacctttctgacctggaatacctggatgaggaattccaccagtcactgcagtggatgaaggacaataacatcaccgacatcctcgatttaaccttcacggtcaacgaggaagtcttcgggcaggtcactgaaagggaactaaaatccgggggcgcgaacactcaggtgaccgagaaaaacaaaaaggaatacatagagcggatggtcaagtggagagttgagagaggagtggttcaacagaccgaagccttagttcgtggtttctacgaggtggtcgatagcagactcgtcagcgtcttcgatgctagggaactggagttggtgatcgccggcactgcggagatcgacctcaatgactggcgaaataacactgaatatagaggaggctaccatgatggccatctggtgatcaggtggttttgggccgccgtggaacgatttaataacgagcagaggcttcgcctcttgcagttcgtcactggcacgtcgtcggtgccctacgagggctttgcagccctacgaggcagcaacggtctcaggcgattttgtatagagaaatggggtaagattacaagcctgccgcgtgctcatacctgtttcaatcgtctcgatcttccaccctaccctagttatagtatgctgtacgaaaagctcctgacggcggtcgaggagacaagcaccttcggcctggagtag

SEQ ID NO: 184038 - DNA, 4821 bp, Artificial Sequence
  derived and/or modified sequence
atgctgctgcatctgtgctctgtcaaaaacctgtatcagaatcgcttccttggcttagccgcaatggcatcacccagccgcaattcgcagagtaggcgtcgctgtaaggagcctctgcgctactcatacaaccctgaccaatttcataacatggatttgcgcggtggcccacatgatggagtgaccatcccgcgatccacttcagatacagacctggtgactagcgattctaggtccactttaatggtatcgtcgtcttattacagcatcggccattcacaggacttagtgatccactgggacatcaaagaagaagtcgatgctggcgactggatcggcatgtatttgattgatgaggttctgtccgaaaactttctggactacaaaaatcgcggagtgaacgggtcccaccggggtcagattatttggaaaatcgacgctagctcctatttcgtggaacccgaaacgaagatctgctttaagtactatcatggtgtgtcgggagcccttcgcgctaccacaccaagtgtgacagtcaagaacagcgcggcacctatctttaagtccataggcgctgatgagaccgtccaggggcagggtagccggagattaatcagcttctccctcagcgacttccaggccatgggcttaaagaagggaatgttctttaacccagacccatacctcaagataagcatacaaccgggtaaacactctattttccctgcactgcctcaccacggccaggaacgaaggagcaaaattatcgggaatacagtgaaccccatctggcaggccgagcagttctccttcgtaagcctacctacagacgtccttgaaattgaggtcaaggataaatttgccaagtcaaggcccattataaagcggtttctcggcaaacttagtatgcctgtccagcgtctgcttgagcgacatgccattggagatcgggttgtgtcatatacccttggaaggcggctgcccaccgatcacgtgtccgggcagctgcagtttagattcgagatcacatcatctattcacccggacgatgaagagatctcactgtcaacagaaccagagagcgcgcagatccaggattctccaatgaataacctgatggagtccggcagtggagagccacgaagcgaggctccagagagcagcgagagctggaaacccgaacagctcggcgaaggtagcgtacctgatggtcccggaaatcaatcaatcgagctttccaggccagccgaggaggcagctgtgatcaccgaggccggtgaccaaggtatggtcagcgtaggcccagagggagcaggagagctgctggcccaggtgcagaaggacatccagcctgcaccgagcgccgaagagctggccgaacagctggacctgggggaagaagcatctgccttacttctcgaagatggcgaggccccagcctcaaccaaggaggagcccttagaggaggaggctactacccaaagtcgggctggccgagaagaagaggagaaagagcaggaggaggagggcgatgtgagtactctcgagcaaggtgagggcaggcttcagctccgcgcatcggttaagaggaaatctaggccctgttcactcccagttagtgaattagagaccgtgattgcctcggcctgtggtgatcctgagaccccaagaacgcattatatccgcatccacacacttctccactccatgccatcagctcagggcggaagcgccgctgaggaagaagacggtgctgaggaagagtcaacactgaaggacagttcagagaaggatggtctaagcgaagtagatactgtagcagcagatccatccgcccttgaggaggatcgagaggagcccgaaggagctactccaggaaccgcacaccccggtcatagtggaggtcactttccgagtcttgcaaatggcgctgcgcaggatggcgacactcaccctagtaccggatcagagtccgacagctccccgaggcaggggggtgaccattcctgtgagggctgtgacgcatcttgttgtagtccatcttgttatagttcctcatgctactccacatcttgctactccagcagctgctacagtgccagttgttacagcccctcctgttacaacggcaaccgctttgcatcccacacccgtttctcctccgtggactccgctaagatcagtgagagcacggtctttagtagccaggatgacgaggaagaagagaactccgcttttgaatcagtgcctgacagtatgcagtcgccagagctagaccctgagtcgacgaatggtgctggaccctggcaagatgagcttgccgcaccttccggtcatgtggagagatcacctgagggtttggaaagtcccgtcgctggcccttccaaccgccgagagggcgagtgtcccatacttcataacagccaaccagtgtctcagctaccctccttacgcccagagcatcaccactatcccacgattgacgagcctttgcctcccaactgggaggcgagaatagatagccacggcagggtcttttacgtagaccacgtgaataggacaacaacatggcagaggccaactgccgcagctactcctgacgggatgcggagatcggggtccatccagcaaatggaacagcttaatagacgataccagaatatacagagaaccattgcaacagagcgcagtgaggaagactccggatctcagagttgcgagcaggcccctgcaggcggaggaggcggtgggggaagcgattcagaggccgagagcagccagtcatcccttgacctgcgcagagagggctccttgtccccagtgaacagtcaaaaaattactctactgctccagtcccctgctgtgaagtttattacgaatccagagttctttacggttctccacgccaactattctgcctacagggtctttactagtagtacctgcctcaaacacatgatcttgaaagtgcggagggacgcgagaaactttgagcgttaccagcacaaccgcgatcttgtgaactttatcaacatgttcgcagatactcgccttgaactgcccagagggtgggagatcaagaccgatcagcaggggaagtcctttttcgtggatcacaactcaagagcaacaacctttatcgatcccaggatccccctccagaacggccgtctcccaaatcatctgacgcatcggcagcacctgcaacggcttcgttcgtactcagccggagaagcatcggaggtgagccggaatagaggagcctccctgctggctaggcctgggcactcacttgttgccgcaattcggagtcagcatcagcacgaatcactccctctggcctacaatgacaagatcgtcgccttcctgcgacagccaaatatctttgagatgttacaggagagacagcccagtctggccaggaaccatactctcagagaaaaaatccattacatccgcaccgaaggcaatcacggcctggagaagctgtcctgtgatgcagacctggttatacttctttcactctttgaagaggaaatcatgagttacgtgcccttgcaagcagcttttcacccagggtattccttctcacccagatgctccccatgctcctcaccccagaactcacctggtctccagagggcatccgcccgtgccccttcgccgtatcgccgagatttcgaggctaaactgcgtaacttctatagaaagcttgaggcaaagggatttggccaggggccaggaaaaatcaagctcattatccgtagggatcacctgcttgagggtactttcaatcaggtgatggcctattcccgcaaagagctgcagcgaaataaactctacgtaaccttcgtcggcgaagagggcctcgactactccggaccctctcgtgaattcttctttttgctttcccaggaactgttcaatccctactacggtttgtttgagtactccgccaacgatacttacaccgtgcagatctctcctatgagcgcatttgtcgagaaccacctggaatggtttaggttttctgggaggatcctcggtctggcactcatacatcagtacctattggacgccttcttcactcgacctttttacaaagcactgcttcgactaccctgcgacctcagtgaccttgagtatttggacgaagagttccatcagagcctgcagtggatgaaggacaataacatcacagacatactagacttaacgttcaccgtgaacgaagaagtgttcggccaggtgaccgaacgggagctgaaaagtggcggagctaatacccaagtgaccgaaaagaacaaaaaagagtacatcgaaagaatggtgaagtggcgagtggagcgtggcgtggtccagcagaccgaggccttggtccgtggtttctatgaagtagtggattcccggctcgttagtgtgtttgacgcaagagagctcgaactcgtgatcgctggcacggctgagattgacctgaacgattggaggaacaacaccgagtaccggggtggataccatgacggacacctcgttattaggtggttttgggctgctgtggaacgcttcaacaacgagcagcgactaagactgctccagtttgtcaccggcaccagcagcgtcccctatgagggctttgctgccctcaggggaagcaatgggctgaggcggttctgcatagagaaatggggcaaaattacatccctaccacgcgcacacacatgcttcaatagactggaccttcccccttatccgtcctacagcatgctatacgaaaagttgcttacagcggtcgaggagacatctacattcggccttgagtag

SEQ ID NO: 184039 - DNA, 108 bp, Artificial Sequence
  derived and/or modified sequence
agccccaacaagctgctgttcgacccccgggtgggcggccgggtgtcgcatgtgttctttttattcccccctttcgtgctattacctggaccccccggcctcccatag

SEQ ID NO: 184040 - protein, 585 aa, Artificial Sequence
  derived and/or modified sequence
MGSLKEELLKAIWHAFTALDQDHSGKVSKSQLKVLSHNLCTVLKVPHDPVALEEHFRDDDEGPVSNQGYMPYLNRFILEKVQDNFDKIEFNRMCWTLCVKKNLTKNPLLITEEDAFKIWVIFNFLSEDKYPLIIVSEEIEYLLKKLTEAMGGGWQQEQFEHYKINFDDSKNGLSAWELIELIGNGQFSKGMDRQTVSMAINEVFNELILDVLKQGYMMKKGHRRKNWTERWFVLKPNIISYYVSEDLKDKKGDILLDENCCVESLPDKDGKKCLFLVKCFDKTFEISASDKKKKQEWIQAIHSTIHLLKLGSPPPHKEARQRRKELRKKQLAEQEELERQMKELQAANESKQQELEAVRKKLEEAASRAAEEEKKRLQTQVELQARFSTELEREKLIRQQMEEQVAQKSSELEQYLQRVRELEDMYLKLQEALEDERQARQDEETVRKLQARLLEEESSKRAELEKWHLEQQQAIQTTEAEKQELENQRVLKEQALQEAMEQLEQLELERKQALEQYEEVKKKLEMATNKTKSWKDKVAHHEGLIRLIEPGSKNPHLITNWGPAAFTEAELEEREKNWKEKKTTE

SEQ ID NO: 184041 - DNA, 1758 bp, Artificial Sequence
  derived and/or modified sequence
atgggcagcctgaaggaggagctgctgaaggccatctggcacgccttcaccgccctggaccaggaccacagcggcaaggtgagcaagagccagctgaaggtgctgagccacaacctgtgcaccgtgctgaaggtgccccacgaccccgtggccctggaggagcacttcagagacgacgacgagggccccgtgagcaaccagggctacatgccctacctgaacagattcatcctggagaaggtgcaggacaacttcgacaagatcgagttcaacagaatgtgctggaccctgtgcgtgaagaagaacctgaccaagaaccccctgctgatcaccgaggaggacgccttcaagatctgggtgatcttcaacttcctgagcgaggacaagtaccccctgatcatcgtgagcgaggagatcgagtacctgctgaagaagctgaccgaggccatgggcggcggctggcagcaggagcagttcgagcactacaagatcaacttcgacgacagcaagaacggcctgagcgcctgggagctgatcgagctgatcggcaacggccagttcagcaagggcatggacagacagaccgtgagcatggccatcaacgaggtgttcaacgagctgatcctggacgtgctgaagcagggctacatgatgaagaagggccacagaagaaagaactggaccgagagatggttcgtgctgaagcccaacatcatcagctactacgtgagcgaggacctgaaggacaagaagggcgacatcctgctggacgagaactgctgcgtggagagcctgcccgacaaggacggcaagaagtgcctgttcctggtgaagtgcttcgacaagaccttcgagatcagcgccagcgacaagaagaagaagcaggagtggatccaggccatccacagcaccatccacctgctgaagctgggcagcccccccccccacaaggaggccagacagagaagaaaggagctgagaaagaagcagctggccgagcaggaggagctggagagacagatgaaggagctgcaggccgccaacgagagcaagcagcaggagctggaggccgtgagaaagaagctggaggaggccgccagcagagccgccgaggaggagaagaagagactgcagacccaggtggagctgcaggccagattcagcaccgagctggagagagagaagctgatcagacagcagatggaggagcaggtggcccagaagagcagcgagctggagcagtacctgcagagagtgagagagctggaggacatgtacctgaagctgcaggaggccctggaggacgagagacaggccagacaggacgaggagaccgtgagaaagctgcaggccagactgctggaggaggagagcagcaagagagccgagctggagaagtggcacctggagcagcagcaggccatccagaccaccgaggccgagaagcaggagctggagaaccagagagtgctgaaggagcaggccctgcaggaggccatggagcagctggagcagctggagctggagagaaagcaggccctggagcagtacgaggaggtgaagaagaagctggagatggccaccaacaagaccaagagctggaaggacaaggtggcccaccacgagggcctgatcagactgatcgagcccggcagcaagaacccccacctgatcaccaactggggccccgccgccttcaccgaggccgagctggaggagagagagaagaactggaaggagaagaagaccaccgagtag

SEQ ID NO: 184042 - DNA, 1758 bp, Artificial Sequence
  derived and/or modified sequence
atgggtagtctcaaggaggaactgctgaaagcaatctggcacgcattcactgctctggaccaggaccacagcggaaaggtgagcaaaagtcagctgaaagtgttgtcccacaacctgtgcacagttcttaaagtaccccacgaccccgtcgcactggaagagcacttccgagacgatgacgagggacctgtgagcaatcagggatacatgccctacctgaacagatttattcttgagaaggtgcaggataatttcgacaaaatagagttcaataggatgtgctggacactctgtgtcaagaagaacctgacaaaaaatcctcttctcatcaccgaggaggatgcctttaaaatctgggtcatatttaacttcctatcagaggataagtaccctttaattatcgtttccgaggaaatcgagtatctcctaaagaagttaactgaagcaatgggtggcggctggcagcaggaacaattcgaacactataagataaacttcgatgattctaagaacgggctctccgcctgggagctgatcgaactcatcggcaatggccagttctccaaggggatggatcgccagacagtcagcatggctatcaatgaggtatttaatgagttgatactcgatgtgctgaaacaaggatatatgatgaagaagggtcatcgcaggaagaactggacagagcggtggtttgtgttaaagccgaacatcatctcttactacgtgtcagaggatctcaaggataagaaaggagacatcctgctagacgagaattgctgtgtcgagagtcttccagacaaggacggaaaaaaatgtctgtttctggtgaaatgttttgacaagacctttgagatatccgcctccgacaagaagaaaaaacaagagtggattcaagccatccatagtacaatacatctccttaaactaggttctcctccgccccataaagaggcacgccagcggcggaaagagctgcgcaaaaagcagttggctgagcaagaggaactggaacgccaaatgaaggagttacaagccgcgaatgaatctaagcaacaggagctcgaggctgtgcgtaagaaacttgaggaggccgcttcccgggcagccgaggaggagaagaaaaggctgcaaactcaggtcgaactgcaggcccgttttagcacagaactggaacgcgaaaagctgataagacagcagatggaagaacaggtcgctcaaaagtctagtgagctggagcagtatctgcagcgagtaagagagcttgaggatatgtacttgaagcttcaggaggcattggaggacgagaggcaggcaagacaggacgaggaaactgtgcgaaaactgcaggcgcgcctacttgaggaggagtcctccaagagagccgaattagaaaaatggcacttggagcaacagcaggctatccagacaaccgaggccgaaaaacaagagctcgagaaccagagagtgctaaaggaacaggctctgcaggaagccatggagcagctggaacagctcgagctcgaaagaaaacaagcactcgagcagtatgaagaagtgaagaaaaaattggagatggcgacaaataaaacaaagagctggaaggataaggtggcacatcacgaaggtctgattcgcttgatcgaaccaggaagcaagaatccacatttaattaccaattggggccccgccgcctttacggaggctgaactcgaggagcgggaaaaaaactggaaagaaaaaaaaacaacagaatag

SEQ ID NO: 184043 - DNA, 1758 bp, Artificial Sequence
  derived and/or modified sequence
atgggcagcctgaaggaggagctgctgaaggccatctggcacgccttcaccgccctggaccaggaccacagcggcaaggtgtccaagagccagctgaaggtgctgagccacaacctgtgcaccgtgctgaaggtgccccatgaccctgtggccctggaggagcacttcagagatgatgatgagggccctgtgagcaaccagggctacatgccctacctgaaccgcttcatcctggagaaggtgcaggacaactttgacaagattgagttcaacaggatgtgctggaccctgtgtgtgaagaagaacctgaccaagaaccccctgctgatcacagaagaagatgccttcaagatctgggtgatcttcaacttcctgtctgaggacaagtaccccctcatcatcgtgtctgaggagattgagtacctgctgaagaagctgacagaggccatgggcggcggctggcagcaggagcagtttgagcactacaagatcaactttgatgacagcaagaatggcctgagcgcctgggagctgattgagctgattggaaatggccagttcagcaagggcatggaccggcagacagtgtccatggccatcaatgaggtgttcaatgaactcatcctggatgtgctgaagcagggctacatgatgaagaagggccacaggaggaagaactggacagagcgctggtttgtgctgaagcccaacatcatctcctactacgtgtctgaggacctgaaggacaagaagggggacatcctgctggatgagaactgctgcgtggagagcctgcctgacaaggatggcaagaagtgcctcttcctggtgaagtgctttgacaagacctttgagatcagcgccagtgacaagaagaagaagcaggagtggatccaggccatccacagcaccatccacctgctgaagctgggcagccccccaccccacaaggaggcccggcagaggaggaaggagctgaggaagaagcagctggccgagcaggaggagctggagcggcagatgaaggagctgcaggccgccaatgaaagcaagcagcaggagctggaggccgtgaggaagaagctggaggaggccgccagcagagctgctgaggaggagaagaagaggctgcagacccaggtggagctgcaggcccgcttcagcacagagctggagcgggagaagctgatccggcagcagatggaggagcaggtggcccagaagagcagcgagctggagcagtacctgcagagggtgcgggagctggaggacatgtacctgaagctgcaggaggccctggaggatgagcggcaggcccggcaggatgaggagaccgtgaggaagctgcaggcccggctgctggaggaggagagcagcaagagagctgagctggagaagtggcacctggagcagcagcaggccatccagaccacagaggccgagaagcaggagctggagaaccagagggtgctgaaggagcaggccctgcaggaggccatggagcagctggagcagctggagctggagaggaagcaggccctggagcagtatgaggaggtgaagaagaagctggagatggccaccaacaagaccaagtcctggaaggacaaggtggcccaccacgagggcctcatccgcctcatcgagcccggcagcaagaacccccacctgatcaccaactggggccctgctgccttcacagaagctgagctggaggagcgggagaagaactggaaggagaagaagaccacagaatag

SEQ ID NO: 184044 - DNA, 1758 bp, Artificial Sequence
  derived and/or modified sequence
atgggcagcctgaaggaggagctgctgaaggccatctggcacgcctttaccgcactggaccaggatcattccggaaaggtgtccaagagccagcttaaagtcctgtcacataacctgtgtacagttttgaaggtaccccacgaccctgttgccctggaggaacacttccgagacgatgacgaagggccggtgagcaatcaggggtatatgccctatttgaatcgatttattttggagaaagtgcaggataactttgacaaaattgaattcaataggatgtgctggactttgtgcgttaagaaaaacttaacgaagaacccattactcataaccgaggaggatgcattcaagatttgggtgatttttaactttctgtcagaggacaagtaccctcttatcatcgtgtcggaagagatcgagtacctcctgaagaagctgacagaggcgatgggcggaggctggcagcaggaacagtttgagcattacaaaattaattttgacgatagtaagaatgggctttcagcttgggaacttatagagctgattggtaacgggcagttcagtaagggaatggatcgccaaactgtgtccatggcgattaacgaagtgttcaatgagctgatcttagatgtacttaagcagggctatatgatgaaaaaagggcatcgaagaaagaactggaccgaaaggtggtttgttctaaagcctaacatcatttcctactatgtgagcgaggacctgaaagacaagaagggtgacatactactagatgagaattgctgcgtggaatctttgccagacaaggatggtaagaaatgtctgtttctggtgaagtgctttgacaagacattcgagatttctgcttccgataaaaagaagaaacaggaatggatccaggctatccattcaaccattcatctgctgaagctcggatctcccccaccacacaaggaggcccgacagaggcgcaaagagcttcggaagaaacagctggccgagcaggaggaactggaacggcagatgaaggaactccaggccgcaaacgaatcaaaacagcaggagctggaggccgtgcgaaagaaactcgaggaggccgctagcagggcggccgaagaggaaaagaagcggcttcagactcaggtggaactccaagcaaggttctccacggaattggagcgggagaaacttattcggcagcagatggaggagcaagttgcccagaaatcatccgagttggagcagtatctgcagcgggtccgggaactggaagatatgtacctcaagcttcaggaagcgctggaagatgaacggcaagcacgccaggacgaagagacggtccgcaagctccaggcgcgactgctggaggaagaaagcagcaagcgtgctgagctggagaagtggcatctcgaacaacagcaggccattcagaccacagaggcagaaaagcaggagctggagaatcagcgagtgctgaaagagcaagcgctccaagaagccatggagcaacttgaacagctggaattggagaggaagcaggcccttgagcagtacgaggaggtcaaaaaaaaactcgaaatggctacgaacaagactaagagttggaaagacaaggtggcccaccatgagggtctgatcagactgattgaaccagggtcaaagaaccctcacctgattactaactggggcccagcagcttttacggaagcagagcttgaggagcgcgagaaaaactggaaggaaaaaaagacaacggagtag

SEQ ID NO: 184045 - DNA, 1758 bp, Artificial Sequence
  derived and/or modified sequence
atggggagtctcaaagaggagcttctgaaagccatttggcacgcgttcacagcgctagaccaggatcatagcggcaaggtatcaaagtcccaactgaaggtgctgagtcataacctgtgtaccgtcttaaaagtaccacacgaccctgttgccctagaagaacatttcagagacgatgacgagggcccagtgtctaatcagggctacatgccctatttgaatcgcttcatcctggaaaaagttcaagataacttcgacaagatcgaatttaatcgcatgtgttggacgctgtgcgtgaaaaagaatctcacaaaaaatccattacttattacagaggaggatgcatttaagatctgggtcatcttcaactttctttctgaggataaataccctctcatcatcgtctctgaagagattgagtaccttctaaagaaattgacggaggccatgggcggaggctggcagcaagaacagtttgagcactacaaaataaacttcgacgattcgaagaacgggctcagcgcgtgggagctgatagagctcatcgggaacggacaattcagtaagggcatggatcgccagaccgtatcgatggctatcaacgaggtgtttaacgaactcattctcgacgtcctgaagcagggctacatgatgaagaagggacaccgacgaaaaaattggactgagagatggttcgtactgaaacccaatattatatcctactatgtatctgaagacctcaaggataaaaaaggggatatcctcctggatgaaaattgttgtgttgagagcctccccgataaggatggcaagaagtgtctcttcctggtgaaatgttttgataagaccttcgagatatccgcgagtgataagaagaagaagcaagagtggatccaggccatacactccactatacaccttttaaaactgggctcaccaccaccacacaaggaagcacggcagcggcgtaaggagcttagaaaaaagcagctcgccgagcaggaggagctggagcggcagatgaaggagttacaagcagcgaacgaatccaaacagcaggagctggaagccgtaaggaagaaattagaagaagcggctagccgcgcagccgaggaagaaaagaaacggttacagacccaggtggaactgcaggcgagattcagcactgaactcgagcgggagaaactgatcaggcaacagatggaggaacaggtcgcccagaaatcatccgagctggagcagtaccttcagagggtgcgtgaattggaggacatgtacctaaagctgcaggaggcactggaggatgaacgccaagctcggcaggacgaggaaactgtgcgcaaattacaagccagactgctcgaggaggagagctccaagcgagcagagttagaaaaatggcatctcgaacagcagcaagcgatacaaactacagaagccgagaaacaagagctcgagaaccagcgagtgctcaaggagcaggccctacaagaggctatggagcagctggagcaattagagctggagcggaagcaagcgctggagcagtatgaagaagtaaagaagaaactcgaaatggctaccaacaagacaaagtcatggaaggacaaggttgcccatcacgaagggctgattcgcttgatcgaacccggttccaagaaccctcatctcattacaaattggggtcctgcagctttcaccgaggctgaactcgaggaaagggagaagaactggaaggagaagaaaaccacggagtag

SEQ ID NO: 184046 - DNA, 4882 bp, Artificial Sequence
  derived and/or modified sequence
aggtgactgcgcggcgggctgtggctgcggaggttgaggggcgtccgaggcgcggaggggctggctgggcaggaggggttggcggggcagcagggccgcggccatggggagcttgaaggaggagctgctcaaagccatctggcacgccttcaccgcactcgaccaggaccacagcggcaaggtctccaagtcccagctcaaggtcctttcccataacctgtgcacggtgctgaaggttcctcatgacccagttgcccttgaagagcacttcagggatgatgatgagggtccagtgtccaaccagggctacatgccttatttaaacaggttcattttggaaaaggtccaagacaactttgacaagattgaattcaataggatgtgttggaccctctgtgtcaaaaaaaacctcacaaagaatcccctgctcattacagaagaagatgcatttaaaatatgggttattttcaactttttatctgaggacaagtatccattaattattgtgtcagaagagattgaatacctgcttaagaagcttacagaagctatgggaggaggttggcagcaagaacaatttgaacattataaaatcaactttgatgacagtaaaaatggcctttctgcatgggaacttattgagcttattggaaatggacagtttagcaaaggcatggaccggcagactgtgtctatggcaattaatgaagtctttaatgaacttatattagatgtgttaaagcagggttacatgatgaaaaagggccacagacggaaaaactggactgaaagatggtttgtactaaaacccaacataatttcttactatgtgagtgaggatctgaaggataagaaaggagacattctcttggatgaaaattgctgtgtagagtccttgcctgacaaagatggaaagaaatgcctttttctcgtaaaatgttttgataagacttttgaaatcagtgcttcagataagaagaagaaacaggagtggattcaagccattcattctactattcatctgttgaagctgggcagccctccaccacacaaagaagcccgccagcgtcggaaagaactccggaagaagcagctggctgaacaagaggaactggagcgacaaatgaaggaactccaggccgccaacgaaagcaagcagcaggagctggaggccgtgcggaagaaactggaggaagcagcatctcgtgcagcagaagaggaaaagaaacgccttcagactcaagtggaacttcaggccaggttcagcacagagctggaaagagagaagcttatcagacagcagatggaagaacaggttgctcaaaagtcctctgaactggaacagtatttacagcgagtacgggagctggaagacatgtacctaaagctgcaggaggctcttgaagatgagagacaggcccggcaagatgaagagacagtgcggaagcttcaggccaggttgttggaggaagagtcttccaagagggctgaactagaaaagtggcacttggagcagcagcaggccattcagacaaccgaggcggagaagcaggagttggagaatcagcgtgtcctgaaggaacaggccctgcaggaggccatggagcagctggagcagcttgagttagaacggaagcaagcacttgagcagtacgaggaagttaaaaagaagctggagatggcaactaataagaccaagagctggaaggacaaagtggcccatcatgaaggattaattcgactgatagaaccaggttcaaagaaccctcacctgatcactaactggggacctgcagctttcactgaggcagaacttgaagagagagagaagaactggaaagagaaaaagaccacggagtgactgagcttgctggcagtcacgtcagttatgtagatactgcatggcaggagagctttacgctaaagacaaaagaaacagctttgggggccgggcgtggtggctcacgcctgtaatcccagcactttgggaggccgaggcgggtggatcacctgaggtcaggagttcaagagcagcctggccaacctggtgaaaccctgtctctactaaaaatacaaaaaaaattagctgagcgtggtggcgggcgcctgtaatcccagctacttgggaggctgaggcaggagaatcacttgaacgtgggaggcggaggttgcagcgagctgagatcatgccgttgtactccagcttgggcaacagagtgagactccatctcaaaacaaaacaaaacaaaacaaaacaaaaaaacccggctttgctgcttttaactcttcttccttctgtgcctctctaagtgggtcagtatcctaaggaagccttcttatttatcttcctgcaaacaagggttacctgaaaagaaaaaaaaagtcaacattgtcaagctgtttgtttactctttctttgaaaacatcaccttctgaaatttgtcttttagctctctcagattcttccccaaatgaggcagggtgcagacagcacagtcagctctgcagagtttggaggggctcactgccactgggtactcagaacctctgtggactggatgtcagctctttcctttggcagcgtgtttccttttccgagtatgtgctgttaaactagattggccggttcgctttccatttcctgacacttgacatggaatgcctttgaccattggtgctctgacagagaagtcatggagtcattgccatttcctggttgcccttttggaatgtgatcctgttagtagaggttttctagcttctactaagatatttctttccctaaccatcatacacttggcatgtttcattcccatctcctttcccctcaccttaaaggagactacccctttgccccatattgtcaacctaattttctctcgtactctctctagtgaatgatgtgctaccaagtatatgccaggctgtgagaggattatactgagtagtagaaagaagctaatttgaaataaaaattatttgtataattaagaaagcagattagatgcacatggtcaacaggaagttgactgtatgtctgctagttagattcaaaacatcataaagatgatagcatgtcaatatattagcctagccattatgttagcctttgttaggtgggcagcttttctgctttttcccttcctctgtggtgacaacggaggaaatatccaacagaaatacgtctaacagggaaattgggatcatagtttatatgcatctgatttgaaaggagtattgaggaaggttttcatatatgatctatctttggattaaaaagaacatttatgaaatcaagccttctaacactagttataattgagaagcaacagtaactccgtggacagcaatcaagcttaaaattgtaaataaatatggggataattcagttgttgcaaaaaaagggcagaattcagtagaataaagtccttttctcttacaggtattaaatgaggacagagaacctcaggtgttcttatgctagtgcttgctgagtgcatactaagaaagcaattccaaatagatgtatacatctagagagagtggtattagagattcagtgtatgtatttatttacatgagaggaaactggaatataatcccataaattatcaccttttatgactggaaaatatttgccaatgaagaaatggtctgtaggtatttgtcttaagatttttggctgtttaataaaaatgtaactttaacggtttcttatagttgcctttataaagtgtattgtctaaaatatttttgtatcatgtgcctttgaaatttgacagctgatttgggtgttggatttctgcccagccatttatcagtattatcattttattcagtagctggcaggtgtattagaccaacgagacttaggtaaggaatggaacctttcctgtggtttgactgcacattacaccagaagactccagtatccctcattccagaatgaggaaaaagtattctacaaagaacctaatcacctctgtgaaatctatgggatggaaacagtgtggccttaggagtcaaatagtctctgcatggtggggaggatcatgatggaatatgtgaatttctacttctagaagttgtgaaataggtcctgcacttttgcagaatgtccttctttaaacctggcttattccacagctgtagctgataacatgacctggggcttagctgctctagccctgggttcttggagacctcacactgcctggcccctggccatccacctaaggactgcctgctttctggtcacatgtggaccttgatacgactaagcggttacatatgtggttgtgcaaaagctttctgtttaatgcatagtgttaccgatttacatcttggttttcagtggcactatgtctaggaggcaatatccttttaaacagtgctttggctaagatagatacttgtgaatcaaagatagcacagaaatgaactaagtatatcccatttggaattatattttgatactatttaaaatggtttcacctgttaaagggccaacagaactcttggttttacttttgtaattactgtacagaaaatttcaagagtgtttgagtgcttgtcatcaggtgttttccttaataagtagggatatgatcatttacaggaattatatatgaaaaaagtttttgaaatgtatttttgtgatgtgctatgttgaggggaaaccaaatatttatgattttaaaacattcgtatgaaaacattgtacaatgtaatatgctcaactttctcaattttttgctaatttttctaagatacattaaaaatgttttatatttttttttaagtaaaatggacccagtaagaaaattaaaaataccagaacatacactttaaactgtctgatttaataaaacagtggggggta

SEQ ID NO: 184047 - protein, 758 aa, Artificial Sequence
  derived and/or modified sequence
MAPAMQPAEIQFAQRLASSEKGIRDRAVKKLRQYISVKTQRETGGFSQEELLKIWKGLFYCMWVQDEPLLQEELANTIAQLVHAVNNSAAQHLFIQTFWQTMNREWKGIDRLRLDKYYMLIRLVLRQSFEVLKRNGWEESRIKVFLDVLMKEVLCPESQSPNGVRFHFIDIYLDELSKVGGKELLADQNLKFIDPFCKIAAKTKDHTLVQTIARGVFEAIVDQSPFVPEETMEEQKTKVGDGDLSAEEIPENEVSLRRAVSKKKTALGKNHSRKDGLSDERGRDDCGTFEDTGPLLQFDYKAVADRLLEMTSRKNTPHFNRKRLSKLIKKFQDLSEGSSISQLSFAEDISADEDDQILSQGKHKKKGNKLLEKTNLEKEKGSRVFCVEEEDSESSLQKRRRKKKKKHHLQPENPGPGGAAPSLEQNRGREPEASGLKALKARVAEPGAEATSSTGEESGSEHPPAVPMHNKRKRPRKKSPRAHREMLESAVLPPEDMSQSGPSGSHPQGPRGSPTGGAQLLKRKRKLGVVPVNGSGLSTPAWPPLQQEGPPTGPAEGANSHTTLPQRRRLQKKKAGPGSLELCGLPSQKTASLKKRKKMRVMSNLVEHNGVLESEAGQPQALGSSGTCSSLKKQKLRAESDFVKFDTPFLPKPLFFRRAKSSTATHPPGPAVQLNKTPSSSKKVTFGLNRNMTAEFKKTDKSILVSPTGPSRVAFDPEQKPLHGVLKTPTSSPASSPLVAKKPLTTTPRRRPRAMDFF

SEQ ID NO: 184048 - DNA, 2277 bp, Artificial Sequence
  derived and/or modified sequence
atggcacccgccatgcagcccgctgaaattcaatttgctcagagactggcctcatccgagaaggggattcgcgacagggctgtcaagaaactgagacaatatatctccgtgaaaacacagagggaaacaggcggcttttcgcaggaagaactactcaagatctggaaagggctgttttactgtatgtgggtgcaagatgaacccctcctgcaagaggaacttgctaatactatagcacagctggttcatgcagttaataattctgcagcacagcatttgttcattcagaccttctggcaaactatgaacagggaatggaaggggattgacaggctgagactcgacaagtattatatgttaatccgcctggttctccggcagagcttcgaggtgctgaagaggaacggatgggaggaaagtcgaattaaggtgtttcttgatgttctaatgaaggaagtcctgtgtcctgagtctcagtctcctaatggcgtacgattccatttcatcgatatctatctagatgaactgtcaaaagttgggggtaaggaactcctcgccgatcagaacctcaaatttatcgaccctttctgtaaaatagcagctaagactaaagaccatacactcgtccaaaccatcgcgagaggcgtgtttgaggcaatcgtggaccagagccccttcgttccagaggaaacaatggaagagcagaagactaaagttggggacggcgacctatctgccgaagaaattcctgagaacgaggtttctctgcgtcgggctgtgtcaaagaagaaaacggctcttggaaagaatcactcacgcaaggacgggctttcagatgaacgcggcagagatgattgcgggacttttgaggacaccggtccccttttgcaatttgattataaggcggtggcagatagactgctcgagatgacatccaggaagaataccccgcacttcaatagaaaaaggttatctaaactgattaaaaagttccaggacctctcggaggggagctcaatatcgcaactttcctttgcagaggacatttctgccgatgaagacgaccagatcctctcccaggggaagcataaaaaaaaaggcaataagctgctggaaaagacaaatctcgagaaagagaaaggctccagagtgttctgtgtagaggaggaggattccgagtcctcactacagaagcggagacggaagaagaaaaaaaagcatcaccttcagcccgagaatcccggtccaggtggcgcagcaccatccctcgaacaaaatcggggccgcgagcccgaggcaagcggtctcaaagccctgaaggctagggttgcggaaccaggagcagaggcaacttccagcaccggagaagagagcggcagcgaacatccccccgctgttcccatgcataataagcggaaacgccccaggaagaagtccccaagagctcacagggaaatgttggaatcagcagtgttgcccccagaggacatgagtcagtcaggcccttcaggttctcacccccaggggcctcgaggatccccaactgggggggcccagctgctcaagcgcaagaggaaattgggcgtggtccctgtaaacggctctggactctccaccccggcctggccccccctgcagcaagagggcccccctacaggccctgccgagggcgccaactctcacacaaccctgccgcagcgacggcgcctgcagaagaagaaggctggtcctggatctctcgagttgtgcggcctgccttctcaaaaaactgctagcctgaaaaagcgcaaaaaaatgcgcgtgatgagtaaccttgttgaacataatggtgtgttagagtccgaagccgggcagccccaggccttagggtcatctgggacatgttcttccttgaaaaagcagaaactgcgcgcagagagcgactttgttaagttcgataccccattcttacccaaaccactctttttccgacgagccaagagttcaaccgccacccatccaccgggacccgcggtccagttgaacaagacaccatctagctccaaaaaagtcaccttcgggctgaaccgaaacatgacagcggaattcaagaaaacagataagtccatccttgtgtcccccaccggaccttccagggtcgcctttgatccagaacagaagcccctgcacggagttctgaagacgcccacatctagtccggcgagtagccctttggttgccaaaaaaccattgactacaacccctcggcgccgtcccagagctatggacttcttctag

SEQ ID NO: 184049 - DNA, 2277 bp, Artificial Sequence
  derived and/or modified sequence
atggccccagccatgcagcctgctgagatccagtttgcccagaggctggccagcagcgagaagggcatccgggacagagctgtgaagaagctgcggcagtacatctctgtgaagacccagcgggagactggaggcttcagccaggaggagctgctgaagatctggaagggcctcttctactgcatgtgggtgcaggatgagcccctgctgcaggaggagctggccaacaccatcgcccagctggtgcatgctgtgaacaacagcgctgcccagcacctgttcatccagaccttctggcagaccatgaaccgggagtggaagggcatcgaccggctgcggctggacaagtactacatgctgatccggctggtgctgcggcagagctttgaggtgctgaagagaaatggctgggaggagagccgcatcaaggtgttcctggatgtgctgatgaaggaggtgctgtgcccagagagccagagccccaacggggtgcgcttccacttcatcgacatctacctggatgagctgagcaaggtgggcggcaaggagctgctggccgaccagaacctgaagttcatcgaccccttctgcaagattgctgccaagaccaaggaccacaccctggtgcagaccatcgcccggggcgtgtttgaggccatcgtggaccagagcccctttgtgcctgaggagaccatggaggagcagaagaccaaggtgggagatggagacctgtctgctgaggagatcccagaaaatgaggtgtccctgcggcgggctgtgtccaagaagaagacagccctgggcaagaaccacagcaggaaggatggcctgagtgatgagcggggcagagatgactgtggcacctttgaggacaccggccccctgctgcagtttgactacaaggctgtggccgaccggctgctggagatgaccagcaggaagaacaccccccacttcaacaggaagaggctgagcaagctgatcaagaagttccaggacctgtctgagggcagcagcatcagccagctgagctttgctgaggacatctctgcagatgaagatgaccagatcctgagccagggcaagcacaagaagaagggcaacaagctgctggagaagaccaacctggagaaggagaagggcagcagggtcttctgtgtggaggaggaggacagcgagagcagcctgcagaagagaagaaggaagaagaagaagaagcaccacctgcagcctgagaaccctggccctgggggcgccgcccccagcctggagcagaacagaggccgggagcctgaggccagcggcctgaaggccctgaaggcccgggtggccgagcccggggctgaggccaccagcagcactggagaggagagcggcagcgagcaccccccagctgtgcccatgcacaacaagaggaagaggcccaggaagaagagcccccgggcccaccgggagatgctggagagcgctgtgctgcccccagaggacatgagccagagcggccccagcggcagccacccccagggcccccggggcagccccactggaggagcccagctgctgaagaggaagaggaagctgggcgtggtgcctgtgaatggaagtggcctgagcaccccagcctggccacccctgcagcaggagggcccccccaccggccctgctgagggcgccaacagccacaccaccctgccccagaggcggcggctgcagaagaagaaggccggccctggcagcctggagctgtgtggcctgcccagccagaagacagccagcctgaagaagaggaagaagatgagggtgatgagcaacctggtggagcacaatggagtgctggagagcgaggccggccagccccaggccctgggcagcagcggcacctgcagcagcctgaagaagcagaagctgcgggcagagagtgactttgtgaagtttgacacccccttcctgcccaagcccctcttcttcagaagagccaagagcagcacagccacccaccccccaggccctgctgtgcagctgaacaagacccccagcagcagcaagaaggtgaccttcggcctgaacagaaacatgacagctgagttcaagaagacagacaagagcatcctggtgagccccaccggccccagccgggtggcctttgatcctgagcagaagcccctgcatggagtgctgaagacccccaccagcagccctgccagcagccccctggtggccaagaagcccctgaccaccaccccaagaagaagaccccgggccatggacttcttctag

SEQ ID NO: 184050 - DNA, 2277 bp, Artificial Sequence
  derived and/or modified sequence
atggcccccgccatgcagcccgccgagatccagttcgcccagcggctggccagctcagagaagggcatacgagaccgagcggttaagaagctgcgacagtacatcagcgtgaagacacaacgcgagactggaggcttctcccaggaagaactcctgaagatctggaagggtctgttctactgtatgtgggtacaagacgaacccctgctccaagaagaactggccaatacgatcgcccaactggtgcatgccgtgaacaattctgcagctcagcacctgttcatacagaccttttggcagaccatgaatcgtgagtggaagggcatcgaccggctgcgcttggataaatactatatgctgatcaggctggtgcttagacagtcatttgaggtgctgaaacgcaatggctgggaggaaagccgtatcaaggtctttctggacgttctgatgaaggaggtgctctgccccgaatcgcagagccccaatggggttcggttccactttattgacatataccttgatgagttgtcaaaggttggcggtaaggaactgctggccgaccagaacttaaaatttattgatccattttgtaagatagctgccaaaacaaaagaccacactcttgtacagacgattgcccgcggtgtgttcgaggccatcgtggatcagtcccccttcgtgcccgaggagactatggaagagcagaagaccaaggtgggcgatggtgatctgtctgcagaggaaattccagagaatgaggtgagccttcgaagggcggtctccaagaaaaaaacagctttaggcaagaatcactcgcgtaaagacggtctgagcgatgaacgggggagagacgactgcggtacattcgaggatactgggcctctactgcagtttgattacaaggctgtggccgaccggctgctcgagatgacttcaagaaagaacaccccgcacttcaatcgcaagcggctgagcaaactgatcaagaagttccaagacctgtctgagggatcctccatttctcagcttagcttcgcagaagacatttccgcggatgaagatgaccagatcctttcccaaggtaaacacaagaagaaggggaacaagcttctcgaaaagacgaatttagaaaaggagaaggggagccgcgtcttttgtgtggaagaggaagattcagagtcaagcctgcagaaacgacggaggaagaagaaaaagaaacatcaccttcaaccggaaaaccctggaccaggaggcgccgctccgtctttggaacagaaccggggaagagagccagaggcctccggactcaaggccttaaaggcccgtgttgcagaacccggcgccgaagcgacctcctccaccggggaggagtccggatctgaacatccccccgcggtacctatgcacaataaacggaagagacctaggaaaaagagtccacgcgcacaccgggaaatgctggagtccgctgtcctgccaccggaagatatgagtcaatccggtccttccggttcacaccctcagggtcctaggggaagtcccactgggggcgcgcagctgctgaagcgcaaaaggaagctcggggtagtgcctgtgaacggatcaggccttagcacccctgcatggcctcctcttcagcaggaaggcccccctacaggaccagctgaaggggcgaattcccacacaacactcccccaaagacggcggctgcagaaaaaaaaagctgggcctggaagcctggagctgtgcggcctgccttcccagaagacagctagtttgaagaagagaaagaagatgcgggttatgagcaacctagtggaacacaatggcgtgctagagagcgaggccggtcaaccccaggccctgggcagttccggtacgtgcagcagcttaaagaagcagaagctgcgagccgagtccgattttgtcaaatttgacactccattccttcccaagcccctgttctttcgacgcgccaaatcaagcaccgctacacatcccccaggtcctgcagtgcagctgaataagaccccaagctcgagcaagaaggtcacgttcggactcaatagaaatatgaccgccgagttcaaaaaaacggacaaatccatcttggtttccccgacgggaccatcaagggtggcattcgacccagagcagaagcccctgcatggggttctcaagacacccacttcatcccccgcctcgtcgccccttgttgccaaaaaacctctcacaacaactccaaggcgccggcccagggccatggactttttttag

SEQ ID NO: 184051 - DNA, 2277 bp, Artificial Sequence
  derived and/or modified sequence
atggccccagccatgcagccggctgaaatccagttcgctcagcgtctggcatcctccgagaagggtatcagggacagggcagtcaaaaaacttaggcagtatataagtgtgaagacacagcgcgagaccgggggattctcacaggaagagctgcttaagatctggaaaggcttgttttattgtatgtgggtccaagacgagcctctcctgcaggaggaactggccaatactatagcacaactggtgcatgcagtcaataattctgcagcccagcacctcttcatccaaacgttctggcaaacgatgaatcgcgagtggaaaggtatcgataggctgcgactggacaaatattatatgctcattcgcctggttcttcgccagagcttcgaggtcctgaagcgaaacggatgggaagaatcgagaataaaagtcttcctcgatgttctgatgaaagaggttctgtgtcccgagtcccagtccccaaacggagtacgattccattttatagatatctatctggacgagttgtcaaaggttggcggtaaggaactgctagcagatcagaatctgaagtttatagatccattctgcaagatcgctgctaagacaaaggatcacaccctagtccaaaccatcgcgaggggagttttcgaggcaattgtggaccagtcaccttttgtacccgaggaaactatggaagagcaaaaaactaaagtgggagatggtgacttaagcgctgaggagattccggaaaacgaggtgagccttaggagggccgttagcaagaaaaagaccgcccttggcaagaatcatagccgcaaagatggattgtccgacgagcgcggacgggacgactgcggcactttcgaagatacaggacctcttctgcaatttgactacaaggcagtggctgatcgtctattggagatgacttcccggaaaaataccccccactttaacagaaaaagactatcaaaactgattaaaaaatttcaggatctgtcagagggatcttcaatatcacagctttcgtttgctgaagacatctcagccgacgaggacgaccagatcctttcacaggggaagcataagaagaaaggtaacaaactattggagaagaccaacctcgaaaaggaaaagggcagtagagttttttgcgttgaagaagaagatagcgagagctctttgcaaaaacggaggcgcaaaaaaaaaaaaaaacaccatcttcaacccgaaaaccccggacccggtggagcagctccaagtctcgaacagaacagagggagagagccagaggcctctggcctcaaggccctgaaagcccgagtcgcagagcctggggctgaagccacaagttccacaggcgaagagtccgggtctgaacaccccccagccgttccaatgcataacaagagaaaaagaccgagaaaaaagagtcctagagcacatagagagatgttggagtccgctgtcctgccacccgaggatatgtcccagtccggcccttccggaagccacccgcaaggcccacggggttccccaaccggcggagcacagctgctgaaaaggaagaggaagttgggcgtggtcccggttaacgggtcaggactttccaccccagcttggcccccactacagcaggagggcccacccactggaccggctgagggagctaacagccacactactctgcctcagcgtcgccgattgcagaaaaagaaagcgggacccggaagcctcgaattgtgcgggctcccatcacagaaaaccgcatcactgaaaaagcgaaaaaagatgagagtgatgtccaaccttgtagagcacaacggggtcctggaatcagaagccggacaacctcaagctctgggatctagtggaacctgctcttcattgaaaaaacagaagctgcgtgccgaaagcgatttcgttaagtttgacactccctttctgccaaaacctctctttttcaggagagccaagtcttcaacagctactcacccgcctggaccagcagtacagctaaacaaaacccccagtagctctaagaaagtgacctttggattaaatcggaacatgacggcggaatttaagaaaacagataaaagcattcttgtcagcccgactggaccaagtagggtggcttttgatccagaacagaaaccactgcacggagtgctgaaaactccaacctccagcccagcttccagccctttggttgccaagaaacccctgactacgactcctagacgtaggcctcgggctatggactttttttag

SEQ ID NO: 184052 - DNA, 5088 bp, Artificial Sequence
  derived and/or modified sequence
cgccgccgccttctgtgcagtcgcggcccgggcggacggtggctggctgctccgcagcgctcggctggctgcagcggcaccgcgggttgcgcggccggggatgctccagcgggcgcgatggcccccgccatgcagccggccgagatccaatttgcccagcggctggcgtccagcgagaagggcatccgggaccgagcggtgaagaagctgcgccagtacatcagcgtgaagacgcagagggagacaggaggtttcagtcaggaagaacttctgaaaatctggaaggggctcttctactgcatgtgggtgcaggatgaaccccttctacaggaagagctcgccaacaccattgcacagctagtccatgctgttaacaactcagcggctcaacacctgttcattcagaccttttggcaaaccatgaatcgagaatggaaaggaatagacaggctacgcctggacaaatactatatgctgattcgtctggtcctgaggcagtcctttgaagtcttgaagcgaaatggctgggaagaaagccgaatcaaggttttcttggatgtcctgatgaaggaggtcctgtgtcctgagagtcagtctcctaatggagtgagattccacttcattgatatttacctggatgaactctccaaagtcggggggaaggagcttttagcagatcagaatctcaagtttatcgatccattctgcaaaattgctgcgaagacgaaggaccacaccctggtacagaccatagctcggggtgtcttcgaagctatcgtagatcagtctccttttgtgcctgaagagacgatggaggaacagaagacaaaagtgggtgatggtgacctctctgctgaggagatacctgaaaatgaggtatccttgagaagagctgtcagtaaaaagaagacagcactgggcaaaaaccattccagaaaagatggactcagtgatgaaagaggaagagatgactgtggaacctttgaggacacagggccccttctccagtttgactataaggctgttgctgatcgactcctggaaatgaccagcaggaagaacacgccccacttcaacaggaagcgcctctccaaactcatcaagaaattccaagacctttctgaaggaagcagtatatctcaactcagttttgcggaggacatttctgctgatgaagatgaccaaatcctcagtcaaggaaagcataagaagaaaggaaataaacttttagagaaaactaacttggaaaaggagaaaggaagcagagtcttttgtgtagaggaagaggacagtgaaagcagtcttcaaaagagaagaaggaagaagaagaagaagcaccacctgcagcctgaaaatccaggcccagggggtgcagccccatccctggaacagaaccggggcagggagcccgaggcctctgggctgaaagccctgaaggcacgtgtggccgagccaggtgcagaggccacgtccagcactggggaggagagtggctccgagcatcctccagccgtccccatgcacaataaaaggaaacggccacggaagaagagcccgagggcccacagggaaatgttggaatcagcagtgttgcccccagaggacatgtctcagagtggcccgagtggcagtcatcctcagggacctagagggtccccgacaggtggagcccaactcctaaaaaggaagcggaaacttggagttgtgcccgtcaatggcagtggcctgtccacgccggcctggcctccattgcagcaggaaggccctcccacaggccccgcagagggggcgaacagccacaccacgctgccccagcgcaggaggctgcagaaaaagaaggcagggcccggcagcctggagctctgtggcctgcccagccagaaaacagcaagtttgaaaaagaggaagaaaatgagagtgatgtcaaacttggtggagcacaacggggtgctggagtccgaagctgggcaaccccaggctctgggaagcagtgggacttgcagttccctgaagaagcagaagctgagggcagagagcgactttgtgaagtttgacacccccttcttaccaaagcccctgttcttcagaagagccaagagcagcactgccacccaccctccaggccctgccgtccagctaaacaagacaccatccagctccaagaaagtcacctttgggctgaacagaaacatgactgccgaattcaagaagacagacaagagtatcttggtcagtcccacgggcccttctcgagtggccttcgaccctgaacagaagcccctccacggggtgctgaagacccccaccagctcacctgccagctcacccctggtggccaagaagcccctgaccaccacaccaaggagaaggcccagggctatggatttcttctgaggagcagcagagtcccttgtaaaagactgcttttgtacagaatgcgctataaattatacctttaagaatgtggggccttttttatgattttgtaagttcccataagttgtgtgcacgaggttctgagagtgcccgcaggctgctgcgtcctggcccctctgtagtggctgcgggcgtcttggttgaatcttttgctacaaaccatgtttgcgtttgagctctccaggattttacatttttgggtaacctcagtgattcccattggtgtaggaaatgagaccctctctgaagctgaggagagcacgttgatctgaactttaaatcaatcagtgctgctggcacaatgaaaggtggaactgcacttctgttgagctctcagttctgcggaatttggtactcattaccgtattcgccgtactaagttggtttctgttagtcttaacagtctgttttcttttaaaagcatgtagggcttcattgccatgttctgtgggtgtttggcaggttaccgatggggaagattcttgtcacagaatcagcaataccatagtttttctacatgtgctcagctgggggtgtggacaggtaggggtggggaaagaagaggctctgcgttctgggggctttttcttctcctccccctacccggtttccctccctgttttcctacctctacggcaagcccaaagtgtcttcccgggagcccagcgcagcccccggctcttacccaggaccccgccccgtgctgagccttctgctgaggtccttgcgtggagcacactcattcctccaagcccttgcgctcccgtttctctctctctccgtccacgttccagccgagtcactgcctgaccggctccatggcagctccccatcttccctagaggctgcctgcgcatctggagcctgcgctccggctcagcgacctttcctctcaaatgcggaagcgtgcacttacagttcagaccgttctcctgtaagttcattacaaacacgggcggaaggcactcaggctttcgttggagaaacagaaataaggccttcttttgagcagcgattgctggatcattgatctgtttgaggaagtgtctgacctgggcctgagagctggagaaggtgcagattcaaagtgagcggctcctgaggagagccgccaaggctgctcgccttctccgtggcttccgcagctaccgtctgcacggtgagagggcacgggcacacggttcgggctggcgtgcagctctcccagccagccacgctctgctcaggcctggaagtgaaagccgcctccttcccgttatgccccccatacaggagcctcggtttttcagcaaaacgcggccagtccccttctccactgctgcctcccagcagagggccccaggatctccaaggtcccagctatggctttggacaacgtggcttcggcccctggggttgcagagcttgcattgggtttacctcggtctcattcattcatggagccaagggtggggtttcacctgcgaacatcagactgacttgctggcgtcaagagcagttgactcactgatgaaggccctggtgaggagaaagcactctgttcttcgcctactctgtaatcgttttgtcataatgagccatgaaaaaagtaatgaacttgtgctgttaatcgtcactgtaatgagaagtcttacgtacaacatagctgtggtggcttaatggctgcattagataggatcctcacatcccattcagaaccaaaactgatacagtgaaacaattaaggtgagcaaatagttttaacttttcttttttttttttaagtttcattcttcctagaatatttttctaacaatttttatttcagctttaaagatgggtcatatagccaaacgggccatataatccaacattgttgagatgtcttaggacatctaaggcaaaactggcacatttgttctgcagactattgcaggaatgttttttcctagcatttctatattatctgtccattctgaggaaccagtgaatgtcctataaatgcacctcctgtcaaaaccatgcctgagaggtcccggctgggagtgacagggtgcttcttagattctattggtccttctctcattctccgaacttactcctttttatgggtaagtcaactaggtttacagtcccttatttttaatgcctaagttttgacagcaggaagaaaacaattttttaaaaattctcattacatagacgcacaagaatatgtcacataaagaaaatgtgtttagaatactggttttctatttacgcatgatattttcctaagtaaaattgccaagtggacttggaagtccagaaaggaaaataatttaaattaatgctggtgatcttaacaatattttgtaaaatgatgcttcccccttctccatggtctagtcaattttgtacaattaggtatctgactttacaagtttgttatcctttctaatttttactgaactgaaagcacaaagaagactacacagaaaatctggaaacagttgcaggtgttgggaggaagatgaaatcgagctgtcttttaacttttgtatgtgttttatcagaatttgctggactatgctggcaaggactttgtttacgatcaaattgtactagtgtctgcagggtttgtcagtactcgtcaaagccaagtccaattaaaaaaaaaagtctttgccctcc

SEQ ID NO: 184053 - DNA, 2277 bp, Artificial Sequence
  derived and/or modified sequence
atggcccccgccatgcagcccgccgagatccagttcgcccagagactggccagcagcgagaagggcatcagagacagagccgtgaagaagctgagacagtacatcagcgtgaagacccagagagagaccggcggcttcagccaggaggagctgctgaagatctggaagggcctgttctactgcatgtgggtgcaggacgagcccctgctgcaggaggagctggccaacaccatcgcccagctggtgcacgccgtgaacaacagcgccgcccagcacctgttcatccagaccttctggcagaccatgaacagagagtggaagggcatcgacagactgagactggacaagtactacatgctgatcagactggtgctgagacagagcttcgaggtgctgaagagaaacggctgggaggagagcagaatcaaggtgttcctggacgtgctgatgaaggaggtgctgtgccccgagagccagagccccaacggcgtgagattccacttcatcgacatctacctggacgagctgagcaaggtgggcggcaaggagctgctggccgaccagaacctgaagttcatcgaccccttctgcaagatcgccgccaagaccaaggaccacaccctggtgcagaccatcgccagaggcgtgttcgaggccatcgtggaccagagccccttcgtgcccgaggagaccatggaggagcagaagaccaaggtgggcgacggcgacctgagcgccgaggagatccccgagaacgaggtgagcctgagaagagccgtgagcaagaagaagaccgccctgggcaagaaccacagcagaaaggacggcctgagcgacgagagaggcagagacgactgcggcaccttcgaggacaccggccccctgctgcagttcgactacaaggccgtggccgacagactgctggagatgaccagcagaaagaacaccccccacttcaacagaaagagactgagcaagctgatcaagaagttccaggacctgagcgagggcagcagcatcagccagctgagcttcgccgaggacatcagcgccgacgaggacgaccagatcctgagccagggcaagcacaagaagaagggcaacaagctgctggagaagaccaacctggagaaggagaagggcagcagagtgttctgcgtggaggaggaggacagcgagagcagcctgcagaagagaagaagaaagaagaagaagaagcaccacctgcagcccgagaaccccggccccggcggcgccgcccccagcctggagcagaacagaggcagagagcccgaggccagcggcctgaaggccctgaaggccagagtggccgagcccggcgccgaggccaccagcagcaccggcgaggagagcggcagcgagcacccccccgccgtgcccatgcacaacaagagaaagagacccagaaagaagagccccagagcccacagagagatgctggagagcgccgtgctgccccccgaggacatgagccagagcggccccagcggcagccacccccagggccccagaggcagccccaccggcggcgcccagctgctgaagagaaagagaaagctgggcgtggtgcccgtgaacggcagcggcctgagcacccccgcctggccccccctgcagcaggagggcccccccaccggccccgccgagggcgccaacagccacaccaccctgccccagagaagaagactgcagaagaagaaggccggccccggcagcctggagctgtgcggcctgcccagccagaagaccgccagcctgaagaagagaaagaagatgagagtgatgagcaacctggtggagcacaacggcgtgctggagagcgaggccggccagccccaggccctgggcagcagcggcacctgcagcagcctgaagaagcagaagctgagagccgagagcgacttcgtgaagttcgacacccccttcctgcccaagcccctgttcttcagaagagccaagagcagcaccgccacccacccccccggccccgccgtgcagctgaacaagacccccagcagcagcaagaaggtgaccttcggcctgaacagaaacatgaccgccgagttcaagaagaccgacaagagcatcctggtgagccccaccggccccagcagagtggccttcgaccccgagcagaagcccctgcacggcgtgctgaagacccccaccagcagccccgccagcagccccctggtggccaagaagcccctgaccaccacccccagaagaagacccagagccatggacttcttctag

SEQ ID NO: 184054 - protein, 4640 aa, Artificial Sequence
  derived and/or modified sequence
MPVPDGSVAAAGLGLGLPAADSRGHYQLLLSGRALADRYRRIYTAALNDRDQGGGSAGHPASRNKKILNKKKLKRKQKSKSKVKTRSKSENLENTVIIPDIKLHSNPSAFNIYCNVRHCVLEWQKKEISLAAASKNSVQSGESDSDEEEESKEPPIKLPKIIEVGLCEVFELIKETRFSHPSLCLRSLQALLNVLQGQQPEGLQSEPPEVLESLFQLLLEITVRSTGMNDSTGQSLTALSCACLFSLVASWGETGRTLQAISAILTNNGSHACQTIQVPTILNSLQRSVQAVLVGKIQIQDWFSNGIKKAALMHKWPLKEISVDEDDQCLLQNDGFFLYLLCKDGLYKIGSGYSGTVRGHIYNSTSRIRNRKEKKSWLGYAQGYLLYRDVNNHSMTAIRISPETLEQDGTVMLPDCHTEGQNILFTDGEYINQIAASRDDGFVVRIFATSTEPVLQQELQLKLARKCLHACGISLFDLEKDLHIISTGFDEESAILGAGREFALMKTANGKIYYTGKYQSLGIKQGGPSAGKWVELPITKSPKIVHFSVGHDGSHALLVAEDGSIFFTGSASKGEDGESTKSRRQSKPYKPKKIIKMEGKIVVYTACNNGSSSVISKDGELYMFGKDAIYSDSSSLVTDLKGHFVTQVAMGKAHTCVLMKNGEVWTFGVNNKGQCGRDTGAMNQGGKGFGVENMATAMDEDLEEELDEKDEKSMMCPPGMHKWKLEQCMVCTVCGDCTGYGASCVSSGRPDRVPGGICGCGSGESGCAVCGCCKACARELDGQEARQRGILDAVKEMIPLDLLLAVPVPGVNIEEHLQLRQEEKRQRVIRRHRLEEGRGPLVFAGPIFMNHREQALARLRSHPAQLKHKRDKHKDGSGERGEKDASKITTYPPGSVRFDCELRAVQVSCGFHHSVVLMENGDVYTFGYGQHGQLGHGDVNSRGCPTLVQALPGPSTQVTAGSNHTAVLLMDGQVFTFGSFSKGQLGRPILDVPYWNAKPAPMPNIGSKYGRKATWIGASGDQTFLRIDEALINSHVLATSEIFASKHIIGLVPASISEPPPFKCLLINKVDGSCKTFNDSEQEDLQGFGVCLDPVYDVIWRFRPNTRELWCYNAVVADARLPSAADMQSRCSILSPELALPTGSRALTTRSHAALHILGCLDTLAAMQDLKMGVASTEEETQAVMKVYSKEDYSVVNRFESHGGGWGYSAHSVEAIRFSADTDILLGGLGLFGGRGEYTAKIKLFELGPDGGDHETDGDLLAETDVLAYDCAAREKYAMMFDEPVLLQAGWWYVAWARVSGPSSDCGSHGQASITTDDGVVFQFKSSKKSNNGTDVNAGQIPQLLYRLPTSDGSASKGKQQTSEPVHILKRSFARTVSVECFESLLSILHWSWTTLVLGVEELRGLKGFQFTATLLDLERLRFVGTCCLRLLRVYTCEIYPVSATGKAVVEETSKLAECIGKTRTLLRKILSEGVDHCMVKLDNDPQGYLSQPLSLLEAVLQECHNTFTACFHSFYPTPALQWACLCDLLNCLDQDIQEANFKTSSSRLLAAVMSALCHTSVKLTSIFPIAYDGEVLLRSIVKQVSTENDSTLVHRFPLLVAHMEKLSQSEENISGMTSFREVLEKMLVIVVLPVRNSLRRENELFSSHLVSNTCGLLASIVSELTASALGSEVDGLNSLHSVKASANRFTKTSQGRSWNTGNGSPDAICFSVDKPGIVVVGFSVYGGGGIHEYELEVLVDDSEHAGDSTHSHRWTSLELVKGTYTTDDSPSDIAEIRLDKVVPLKENVKYAVRLRNYGSRTANGDGGMTTVQCPDGVTFTFSTCSLSSNGTNQTRGQIPQILYYRSEFDGDLQSQLLSKANEEDKNCSRALSVVSTVVRASKDLLHRALAVDADDIPELLSSSSLFSMLLPLIIAYIGPVAAAIPKVAVEVFGLVQQLLPSVAILNQKYAPPAFNPNQSTDSTTGNQPEQGLSACTTSSHYAVIESEHPYKPACVMHYKVTFPECVRWMTIEFDPQCGTAQSEDVLRLLIPVRTVQNSGYGPKLTSVHENLNSWIELKKFSGSSGWPTMVLVLPGNEALFSLETASDYVKDDKASFYGFKCFAIGYEFSPGPDEGVIQLEKELANLGGVCAAALMKKDLALPIGNELEEDLEILEEAALQVCKTHSGILGKGLALSHSPTILEALEGNLPLQIQSNEQSFLDDFIACVPGSSGGRLARWLQPDSYADPQKTSLILNKDDIRCGWPTTITVQTKDQYGDVVHVPNMKVEVKAVPVSQKKMSLQQDQAKKPQRIPGSPAVTAASSNTDMTYGGLASPKLDVSYEPMIVKEARYIAITMMKVYENYSFEELRFASPTPKRPSENMLIRVNNDGTYCANWTPGAIGLYTLHVTIDGIEIDAGLEVKVKDPPKGMIPPGTQLVKPKSEPQPNKVRKFVAKDSAGLRIRSHPSLQSEQIGIVKVNGTITFIDEIHNDDGVWLRLNDETIKKYVPNMNGYTEAWCLSFNQHLGKSLLVPVDESKTNTDDFFKDINSCCPQEATMQEQDMPFLRGGPGMYKVVKTGPSGHNIRSCPNLRGIPIGMLVLGNKVKAVGEVTNSEGTWVQLDQNSMVEFCESDEGEAWSLARDRGGNQYLRHEDEQALLDQNSQTPPPSPFSVQAFNKGASCSAQGFDYGLGNSKGDRGNISTSSKPASTSGKSELSSKHSRSLKPDGRMSRTTADQKKPRGTESLSASESLILKSDAAKLRSDSHSRSLSPNHNTLQTLKSDGRMPSSSRAESPGPGSRLSSPKPKTLPANRSSPSGASSPRSSSPHDKNLPQKSTAPVKTKLDPPRERSKSDSYTLDPDTLRKKKMPLTEPLRGRSTSPKPKSVPKDSTDSPGSENRAPSPHVVQENLHSEVVEVCTSSTLKTNSLTDSTCDDSSEFKSVDEGSNKVHFSIGKAPLKDEQEMRASPKISRKCANRHTRPKKEKSSFLFKGDGSKPLEPAKQAMSPSVAECARAVFASFLWHEGIVHDAMACSSFLKFHPELSKEHAPIRSSLNSQQPTEEKETKLKNRHSLEISSALNMFNIAPHGPDISKMGSINKNKVLSMLKEPPLHEKCEDGKTETTFEMSMHNTMKSKSPLPLTLQHLVAFWEDISLATIKAASQNMIFPSPGSCAVLKKKECEKENKKSKKEKKKKEKAEVRPRGNLFGEMAQLAVGGPEKDTICELCGESHPYPVTYHMRQAHPGCGRYAGGQGYNSIGHFCGGWAGNCGDGGIGGSTWYLVCDRCREKYLREKQAAAREKVKQSRRKPMQVKTPRALPTMEAHQVIKANALFLLSLSSAAEPSILCYHPAKPFQSQLPSVKEGISEDLPVKMPCLYLQTLARHHHENFVGYQDDNLFQDEMRYLRSTSVPAPYISVTPDASPNVFEEPESNMKSMPPSLETSPITDTDLAKRTVFQRSYSVVASEYDKQHSILPARVKAIPRRRVNSGDTEVGSSLLRHPSPELSRLISAHSSLSKGERNFQWPVLAFVIQHHDLEGLEIAMKQALRKSACRVFAMEAFNWLLCNVIQTTSLHDILWHFVASLTPAPVEPEEEEDEENKTSKENSEQEKDTRVCEHPLSDIVIAGEAAHPLPHTFHRLLQTISDLMMSLPSGSSLQQMALRCWSLKFKQSDHQFLHQSNVFHHINNILSKSDDGDSEESFSISIQSGFEAMSQELCIVMCLKDLTSIVDIKTSSRPAMIGSLTDGSTETFWESGDEDKNKTKNITINCVKGINARYVSVHVDNSRDLGNKVTSMTFLTGKAVEDLCRIKQVDLDSRHIGWVTSELPGGDNHIIKIELKGPENTLRVRQVKVLGWKDGESTKIAGQISASVAQQRNCEAETLRVFRLITSQVFGKLISGDAEPTPEQEEKALLSSPEGEEKVYNATSDADLKEHMVGIIFSRSKLTNLQKQVCAHIVQAIRMEATRVREEWEHAISSKENANSQPNDEDASSDAYCFELLSMVLALSGSNVGRQYLAQQLTLLQDLFSLLHTASPRVQRQVTSLLRRVLPEVTPSRLASIIGVKSLPPADISDIIHSTEKGDWNKLGILDMFLGCIAKALTVQLKAKGTTITGTAGTTVGKGVTTVTLPMIFNSSYLRRGESHWWMKGSTPTQISEIIIKLIKDMAAGHLSEAWSRVTKNAIAETIIALTKMEEEFRSPVRCIATTRLWLALASLCVLDQDHVDRLSSGRWMGKDGQQKQMPMCDNHDDGETAAIILCNVCGNLCTDCDRFLHLHRRTKTHQRQVFKEEEEAIKVDLHEGCGRTKLFWLMALADSKTMKAMVEFREHTGKPTTSSSEACRFCGSRSGTELSAVGSVCSDADCQEYAKIACSKTHPCGHPCGGVKNEEHCLPCLHGCDKSATSLKQDADDMCMICFTEALSAAPAIQLDCSHIFHLQCCRRVLENRWLGPRITFGFISCPICKNKINHIVLKDLLDPIKELYEDVRRKALMRLEYEGLHKSEAITTPGVRFYNDPAGYAMNRYAYYVCYKCRKAYFGGEARCDAEAGRGDDYDPRELICGACSDVSRAQMCPKHGTDFLEYKCRYCCSVAVFFCFGTTHFCNACHDDFQRMTSIPKEELPHCPAGPKGKQLEGTECPLHVVHPPTGEEFALGCGVCRNAHTF

SEQ ID NO: 184055 - protein, 4678 aa, Artificial Sequence
  derived and/or modified sequence
MMMCAATASPAAASSGLGGDGFYPAATFSSSPAPGALFMPVPDGSVAAAGLGLGLPAADSRGHYQLLLSGRALADRYRRIYTAALNDRDQGGGSAGHPASRNKKILNKKKLKRKQKSKSKVKTRSKSENLENTVIIPDIKLHSNPSAFNIYCNVRHCVLEWQKKEISLAAASKNSVQSGESDSDEEEESKEPPIKLPKIIEVGLCEVFELIKETRFSHPSLCLRSLQALLNVLQGQQPEGLQSEPPEVLESLFQLLLEITVRSTGMNDSTGQSLTALSCACLFSLVASWGETGRTLQAISAILTNNGSHACQTIQVPTILNSLQRSVQAVLVGKIQIQDWFSNGIKKAALMHKWPLKEISVDEDDQCLLQNDGFFLYLLCKDGLYKIGSGYSGTVRGHIYNSTSRIRNRKEKKSWLGYAQGYLLYRDVNNHSMTAIRISPETLEQDGTVMLPDCHTEGQNILFTDGEYINQIAASRDDGFVVRIFATSTEPVLQQELQLKLARKCLHACGISLFDLEKDLHIISTGFDEESAILGAGREFALMKTANGKIYYTGKYQSLGIKQGGPSAGKWVELPITKSPKIVHFSVGHDGSHALLVAEDGSIFFTGSASKGEDGESTKSRRQSKPYKPKKIIKMEGKIVVYTACNNGSSSVISKDGELYMFGKDAIYSDSSSLVTDLKGHFVTQVAMGKAHTCVLMKNGEVWTFGVNNKGQCGRDTGAMNQGGKGFGVENMATAMDEDLEEELDEKDEKSMMCPPGMHKWKLEQCMVCTVCGDCTGYGASCVSSGRPDRVPGGICGCGSGESGCAVCGCCKACARELDGQEARQRGILDAVKEMIPLDLLLAVPVPGVNIEEHLQLRQEEKRQRVIRRHRLEEGRGPLVFAGPIFMNHREQALARLRSHPAQLKHKRDKHKDGSGERGEKDASKITTYPPGSVRFDCELRAVQVSCGFHHSVVLMENGDVYTFGYGQHGQLGHGDVNSRGCPTLVQALPGPSTQVTAGSNHTAVLLMDGQVFTFGSFSKGQLGRPILDVPYWNAKPAPMPNIGSKYGRKATWIGASGDQTFLRIDEALINSHVLATSEIFASKHIIGLVPASISEPPPFKCLLINKVDGSCKTFNDSEQEDLQGFGVCLDPVYDVIWRFRPNTRELWCYNAVVADARLPSAADMQSRCSILSPELALPTGSRALTTRSHAALHILGCLDTLAAMQDLKMGVASTEEETQAVMKVYSKEDYSVVNRFESHGGGWGYSAHSVEAIRFSADTDILLGGLGLFGGRGEYTAKIKLFELGPDGGDHETDGDLLAETDVLAYDCAAREKYAMMFDEPVLLQAGWWYVAWARVSGPSSDCGSHGQASITTDDGVVFQFKSSKKSNNGTDVNAGQIPQLLYRLPTSDGSASKGKQQTSEPVHILKRSFARTVSVECFESLLSILHWSWTTLVLGVEELRGLKGFQFTATLLDLERLRFVGTCCLRLLRVYTCEIYPVSATGKAVVEETSKLAECIGKTRTLLRKILSEGVDHCMVKLDNDPQGYLSQPLSLLEAVLQECHNTFTACFHSFYPTPALQWACLCDLLNCLDQDIQEANFKTSSSRLLAAVMSALCHTSVKLTSIFPIAYDGEVLLRSIVKQVSTENDSTLVHRFPLLVAHMEKLSQSEENISGMTSFREVLEKMLVIVVLPVRNSLRRENELFSSHLVSNTCGLLASIVSELTASALGSEVDGLNSLHSVKASANRFTKTSQGRSWNTGNGSPDAICFSVDKPGIVVVGFSVYGGGGIHEYELEVLVDDSEHAGDSTHSHRWTSLELVKGTYTTDDSPSDIAEIRLDKVVPLKENVKYAVRLRNYGSRTANGDGGMTTVQCPDGVTFTFSTCSLSSNGTNQTRGQIPQILYYRSEFDGDLQSQLLSKANEEDKNCSRALSVVSTVVRASKDLLHRALAVDADDIPELLSSSSLFSMLLPLIIAYIGPVAAAIPKVAVEVFGLVQQLLPSVAILNQKYAPPAFNPNQSTDSTTGNQPEQGLSACTTSSHYAVIESEHPYKPACVMHYKVTFPECVRWMTIEFDPQCGTAQSEDVLRLLIPVRTVQNSGYGPKLTSVHENLNSWIELKKFSGSSGWPTMVLVLPGNEALFSLETASDYVKDDKASFYGFKCFAIGYEFSPGPDEGVIQLEKELANLGGVCAAALMKKDLALPIGNELEEDLEILEEAALQVCKTHSGILGKGLALSHSPTILEALEGNLPLQIQSNEQSFLDDFIACVPGSSGGRLARWLQPDSYADPQKTSLILNKDDIRCGWPTTITVQTKDQYGDVVHVPNMKVEVKAVPVSQKKMSLQQDQAKKPQRIPGSPAVTAASSNTDMTYGGLASPKLDVSYEPMIVKEARYIAITMMKVYENYSFEELRFASPTPKRPSENMLIRVNNDGTYCANWTPGAIGLYTLHVTIDGIEIDAGLEVKVKDPPKGMIPPGTQLVKPKSEPQPNKVRKFVAKDSAGLRIRSHPSLQSEQIGIVKVNGTITFIDEIHNDDGVWLRLNDETIKKYVPNMNGYTEAWCLSFNQHLGKSLLVPVDESKTNTDDFFKDINSCCPQEATMQEQDMPFLRGGPGMYKVVKTGPSGHNIRSCPNLRGIPIGMLVLGNKVKAVGEVTNSEGTWVQLDQNSMVEFCESDEGEAWSLARDRGGNQYLRHEDEQALLDQNSQTPPPSPFSVQAFNKGASCSAQGFDYGLGNSKGDRGNISTSSKPASTSGKSELSSKHSRSLKPDGRMSRTTADQKKPRGTESLSASESLILKSDAAKLRSDSHSRSLSPNHNTLQTLKSDGRMPSSSRAESPGPGSRLSSPKPKTLPANRSSPSGASSPRSSSPHDKNLPQKSTAPVKTKLDPPRERSKSDSYTLDPDTLRKKKMPLTEPLRGRSTSPKPKSVPKDSTDSPGSENRAPSPHVVQENLHSEVVEVCTSSTLKTNSLTDSTCDDSSEFKSVDEGSNKVHFSIGKAPLKDEQEMRASPKISRKCANRHTRPKKEKSSFLFKGDGSKPLEPAKQAMSPSVAECARAVFASFLWHEGIVHDAMACSSFLKFHPELSKEHAPIRSSLNSQQPTEEKETKLKNRHSLEISSALNMFNIAPHGPDISKMGSINKNKVLSMLKEPPLHEKCEDGKTETTFEMSMHNTMKSKSPLPLTLQHLVAFWEDISLATIKAASQNMIFPSPGSCAVLKKKECEKENKKSKKEKKKKEKAEVRPRGNLFGEMAQLAVGGPEKDTICELCGESHPYPVTYHMRQAHPGCGRYAGGQGYNSIGHFCGGWAGNCGDGGIGGSTWYLVCDRCREKYLREKQAAAREKVKQSRRKPMQVKTPRALPTMEAHQVIKANALFLLSLSSAAEPSILCYHPAKPFQSQLPSVKEGISEDLPVKMPCLYLQTLARHHHENFVGYQDDNLFQDEMRYLRSTSVPAPYISVTPDASPNVFEEPESNMKSMPPSLETSPITDTDLAKRTVFQRSYSVVASEYDKQHSILPARVKAIPRRRVNSGDTEVGSSLLRHPSPELSRLISAHSSLSKGERNFQWPVLAFVIQHHDLEGLEIAMKQALRKSACRVFAMEAFNWLLCNVIQTTSLHDILWHFVASLTPAPVEPEEEEDEENKTSKENSEQEKDTRVCEHPLSDIVIAGEAAHPLPHTFHRLLQTISDLMMSLPSGSSLQQMALRCWSLKFKQSDHQFLHQSNVFHHINNILSKSDDGDSEESFSISIQSGFEAMSQELCIVMCLKDLTSIVDIKTSSRPAMIGSLTDGSTETFWESGDEDKNKTKNITINCVKGINARYVSVHVDNSRDLGNKVTSMTFLTGKAVEDLCRIKQVDLDSRHIGWVTSELPGGDNHIIKIELKGPENTLRVRQVKVLGWKDGESTKIAGQISASVAQQRNCEAETLRVFRLITSQVFGKLISGDAEPTPEQEEKALLSSPEGEEKVYNATSDADLKEHMVGIIFSRSKLTNLQKQVCAHIVQAIRMEATRVREEWEHAISSKENANSQPNDEDASSDAYCFELLSMVLALSGSNVGRQYLAQQLTLLQDLFSLLHTASPRVQRQVTSLLRRVLPEVTPSRLASIIGVKSLPPADISDIIHSTEKGDWNKLGILDMFLGCIAKALTVQLKAKGTTITGTAGTTVGKGVTTVTLPMIFNSSYLRRGESHWWMKGSTPTQISEIIIKLIKDMAAGHLSEAWSRVTKNAIAETIIALTKMEEEFRSPVRCIATTRLWLALASLCVLDQDHVDRLSSGRWMGKDGQQKQMPMCDNHDDGETAAIILCNVCGNLCTDCDRFLHLHRRTKTHQRQVFKEEEEAIKVDLHEGCGRTKLFWLMALADSKTMKAMVEFREHTGKPTTSSSEACRFCGSRSGTELSAVGSVCSDADCQEYAKIACSKTHPCGHPCGGVKNEEHCLPCLHGCDKSATSLKQDADDMCMICFTEALSAAPAIQLDCSHIFHLQCCRRVLENRWLGPRITFGFISCPICKNKINHIVLKDLLDPIKELYEDVRRKALMRLEYEGLHKSEAITTPGVRFYNDPAGYAMNRYAYYVCYKCRKAYFGGEARCDAEAGRGDDYDPRELICGACSDVSRAQMCPKHGTDFLEYKCRYCCSVAVFFCFGTTHFCNACHDDFQRMTSIPKEELPHCPAGPKGKQLEGTECPLHVVHPPTGEEFALGCGVCRNAHTF

SEQ ID NO: 184056 - DNA, 13923 bp, Artificial Sequence
  derived and/or modified sequence
atgcccgtgcccgacggcagcgtggccgccgccggcctgggcctgggcctgcccgccgccgacagcagaggccactaccagctgctgctgagcggcagagccctggccgacagatacagaagaatctacaccgccgccctgaacgacagagaccagggcggcggcagcgccggccaccccgccagcagaaacaagaagatcctgaacaagaagaagctgaagagaaagcagaagagcaagagcaaggtgaagaccagaagcaagagcgagaacctggagaacaccgtgatcatccccgacatcaagctgcacagcaaccccagcgccttcaacatctactgcaacgtgagacactgcgtgctggagtggcagaagaaggagatcagcctggccgccgccagcaagaacagcgtgcagagcggcgagagcgacagcgacgaggaggaggagagcaaggagccccccatcaagctgcccaagatcatcgaggtgggcctgtgcgaggtgttcgagctgatcaaggagaccagattcagccaccccagcctgtgcctgagaagcctgcaggccctgctgaacgtgctgcagggccagcagcccgagggcctgcagagcgagccccccgaggtgctggagagcctgttccagctgctgctggagatcaccgtgagaagcaccggcatgaacgacagcaccggccagagcctgaccgccctgagctgcgcctgcctgttcagcctggtggccagctggggcgagaccggcagaaccctgcaggccatcagcgccatcctgaccaacaacggcagccacgcctgccagaccatccaggtgcccaccatcctgaacagcctgcagagaagcgtgcaggccgtgctggtgggcaagatccagatccaggactggttcagcaacggcatcaagaaggccgccctgatgcacaagtggcccctgaaggagatcagcgtggacgaggacgaccagtgcctgctgcagaacgacggcttcttcctgtacctgctgtgcaaggacggcctgtacaagatcggcagcggctacagcggcaccgtgagaggccacatctacaacagcaccagcagaatcagaaacagaaaggagaagaagagctggctgggctacgcccagggctacctgctgtacagagacgtgaacaaccacagcatgaccgccatcagaatcagccccgagaccctggagcaggacggcaccgtgatgctgcccgactgccacaccgagggccagaacatcctgttcaccgacggcgagtacatcaaccagatcgccgccagcagagacgacggcttcgtggtgagaatcttcgccaccagcaccgagcccgtgctgcagcaggagctgcagctgaagctggccagaaagtgcctgcacgcctgcggcatcagcctgttcgacctggagaaggacctgcacatcatcagcaccggcttcgacgaggagagcgccatcctgggcgccggcagagagttcgccctgatgaagaccgccaacggcaagatctactacaccggcaagtaccagagcctgggcatcaagcagggcggccccagcgccggcaagtgggtggagctgcccatcaccaagagccccaagatcgtgcacttcagcgtgggccacgacggcagccacgccctgctggtggccgaggacggcagcatcttcttcaccggcagcgccagcaagggcgaggacggcgagagcaccaagagcagaagacagagcaagccctacaagcccaagaagatcatcaagatggagggcaagatcgtggtgtacaccgcctgcaacaacggcagcagcagcgtgatcagcaaggacggcgagctgtacatgttcggcaaggacgccatctacagcgacagcagcagcctggtgaccgacctgaagggccacttcgtgacccaggtggccatgggcaaggcccacacctgcgtgctgatgaagaacggcgaggtgtggaccttcggcgtgaacaacaagggccagtgcggcagagacaccggcgccatgaaccagggcggcaagggcttcggcgtggagaacatggccaccgccatggacgaggacctggaggaggagctggacgagaaggacgagaagagcatgatgtgcccccccggcatgcacaagtggaagctggagcagtgcatggtgtgcaccgtgtgcggcgactgcaccggctacggcgccagctgcgtgagcagcggcagacccgacagagtgcccggcggcatctgcggctgcggcagcggcgagagcggctgcgccgtgtgcggctgctgcaaggcctgcgccagagagctggacggccaggaggccagacagagaggcatcctggacgccgtgaaggagatgatccccctggacctgctgctggccgtgcccgtgcccggcgtgaacatcgaggagcacctgcagctgagacaggaggagaagagacagagagtgatcagaagacacagactggaggagggcagaggccccctggtgttcgccggccccatcttcatgaaccacagagagcaggccctggccagactgagaagccaccccgcccagctgaagcacaagagagacaagcacaaggacggcagcggcgagagaggcgagaaggacgccagcaagatcaccacctacccccccggcagcgtgagattcgactgcgagctgagagccgtgcaggtgagctgcggcttccaccacagcgtggtgctgatggagaacggcgacgtgtacaccttcggctacggccagcacggccagctgggccacggcgacgtgaacagcagaggctgccccaccctggtgcaggccctgcccggccccagcacccaggtgaccgccggcagcaaccacaccgccgtgctgctgatggacggccaggtgttcaccttcggcagcttcagcaagggccagctgggcagacccatcctggacgtgccctactggaacgccaagcccgcccccatgcccaacatcggcagcaagtacggcagaaaggccacctggatcggcgccagcggcgaccagaccttcctgagaatcgacgaggccctgatcaacagccacgtgctggccaccagcgagatcttcgccagcaagcacatcatcggcctggtgcccgccagcatcagcgagcccccccccttcaagtgcctgctgatcaacaaggtggacggcagctgcaagaccttcaacgacagcgagcaggaggacctgcagggcttcggcgtgtgcctggaccccgtgtacgacgtgatctggagattcagacccaacaccagagagctgtggtgctacaacgccgtggtggccgacgccagactgcccagcgccgccgacatgcagagcagatgcagcatcctgagccccgagctggccctgcccaccggcagcagagccctgaccaccagaagccacgccgccctgcacatcctgggctgcctggacaccctggccgccatgcaggacctgaagatgggcgtggccagcaccgaggaggagacccaggccgtgatgaaggtgtacagcaaggaggactacagcgtggtgaacagattcgagagccacggcggcggctggggctacagcgcccacagcgtggaggccatcagattcagcgccgacaccgacatcctgctgggcggcctgggcctgttcggcggcagaggcgagtacaccgccaagatcaagctgttcgagctgggccccgacggcggcgaccacgagaccgacggcgacctgctggccgagaccgacgtgctggcctacgactgcgccgccagagagaagtacgccatgatgttcgacgagcccgtgctgctgcaggccggctggtggtacgtggcctgggccagagtgagcggccccagcagcgactgcggcagccacggccaggccagcatcaccaccgacgacggcgtggtgttccagttcaagagcagcaagaagagcaacaacggcaccgacgtgaacgccggccagatcccccagctgctgtacagactgcccaccagcgacggcagcgccagcaagggcaagcagcagaccagcgagcccgtgcacatcctgaagagaagcttcgccagaaccgtgagcgtggagtgcttcgagagcctgctgagcatcctgcactggagctggaccaccctggtgctgggcgtggaggagctgagaggcctgaagggcttccagttcaccgccaccctgctggacctggagagactgagattcgtgggcacctgctgcctgagactgctgagagtgtacacctgcgagatctaccccgtgagcgccaccggcaaggccgtggtggaggagaccagcaagctggccgagtgcatcggcaagaccagaaccctgctgagaaagatcctgagcgagggcgtggaccactgcatggtgaagctggacaacgacccccagggctacctgagccagcccctgagcctgctggaggccgtgctgcaggagtgccacaacaccttcaccgcctgcttccacagcttctaccccacccccgccctgcagtgggcctgcctgtgcgacctgctgaactgcctggaccaggacatccaggaggccaacttcaagaccagcagcagcagactgctggccgccgtgatgagcgccctgtgccacaccagcgtgaagctgaccagcatcttccccatcgcctacgacggcgaggtgctgctgagaagcatcgtgaagcaggtgagcaccgagaacgacagcaccctggtgcacagattccccctgctggtggcccacatggagaagctgagccagagcgaggagaacatcagcggcatgaccagcttcagagaggtgctggagaagatgctggtgatcgtggtgctgcccgtgagaaacagcctgagaagagagaacgagctgttcagcagccacctggtgagcaacacctgcggcctgctggccagcatcgtgagcgagctgaccgccagcgccctgggcagcgaggtggacggcctgaacagcctgcacagcgtgaaggccagcgccaacagattcaccaagaccagccagggcagaagctggaacaccggcaacggcagccccgacgccatctgcttcagcgtggacaagcccggcatcgtggtggtgggcttcagcgtgtacggcggcggcggcatccacgagtacgagctggaggtgctggtggacgacagcgagcacgccggcgacagcacccacagccacagatggaccagcctggagctggtgaagggcacctacaccaccgacgacagccccagcgacatcgccgagatcagactggacaaggtggtgcccctgaaggagaacgtgaagtacgccgtgagactgagaaactacggcagcagaaccgccaacggcgacggcggcatgaccaccgtgcagtgccccgacggcgtgaccttcaccttcagcacctgcagcctgagcagcaacggcaccaaccagaccagaggccagatcccccagatcctgtactacagaagcgagttcgacggcgacctgcagagccagctgctgagcaaggccaacgaggaggacaagaactgcagcagagccctgagcgtggtgagcaccgtggtgagagccagcaaggacctgctgcacagagccctggccgtggacgccgacgacatccccgagctgctgagcagcagcagcctgttcagcatgctgctgcccctgatcatcgcctacatcggccccgtggccgccgccatccccaaggtggccgtggaggtgttcggcctggtgcagcagctgctgcccagcgtggccatcctgaaccagaagtacgccccccccgccttcaaccccaaccagagcaccgacagcaccaccggcaaccagcccgagcagggcctgagcgcctgcaccaccagcagccactacgccgtgatcgagagcgagcacccctacaagcccgcctgcgtgatgcactacaaggtgaccttccccgagtgcgtgagatggatgaccatcgagttcgacccccagtgcggcaccgcccagagcgaggacgtgctgagactgctgatccccgtgagaaccgtgcagaacagcggctacggccccaagctgaccagcgtgcacgagaacctgaacagctggatcgagctgaagaagttcagcggcagcagcggctggcccaccatggtgctggtgctgcccggcaacgaggccctgttcagcctggagaccgccagcgactacgtgaaggacgacaaggccagcttctacggcttcaagtgcttcgccatcggctacgagttcagccccggccccgacgagggcgtgatccagctggagaaggagctggccaacctgggcggcgtgtgcgccgccgccctgatgaagaaggacctggccctgcccatcggcaacgagctggaggaggacctggagatcctggaggaggccgccctgcaggtgtgcaagacccacagcggcatcctgggcaagggcctggccctgagccacagccccaccatcctggaggccctggagggcaacctgcccctgcagatccagagcaacgagcagagcttcctggacgacttcatcgcctgcgtgcccggcagcagcggcggcagactggccagatggctgcagcccgacagctacgccgacccccagaagaccagcctgatcctgaacaaggacgacatcagatgcggctggcccaccaccatcaccgtgcagaccaaggaccagtacggcgacgtggtgcacgtgcccaacatgaaggtggaggtgaaggccgtgcccgtgagccagaagaagatgagcctgcagcaggaccaggccaagaagccccagagaatccccggcagccccgccgtgaccgccgccagcagcaacaccgacatgacctacggcggcctggccagccccaagctggacgtgagctacgagcccatgatcgtgaaggaggccagatacatcgccatcaccatgatgaaggtgtacgagaactacagcttcgaggagctgagattcgccagccccacccccaagagacccagcgagaacatgctgatcagagtgaacaacgacggcacctactgcgccaactggacccccggcgccatcggcctgtacaccctgcacgtgaccatcgacggcatcgagatcgacgccggcctggaggtgaaggtgaaggacccccccaagggcatgatcccccccggcacccagctggtgaagcccaagagcgagccccagcccaacaaggtgagaaagttcgtggccaaggacagcgccggcctgagaatcagaagccaccccagcctgcagagcgagcagatcggcatcgtgaaggtgaacggcaccatcaccttcatcgacgagatccacaacgacgacggcgtgtggctgagactgaacgacgagaccatcaagaagtacgtgcccaacatgaacggctacaccgaggcctggtgcctgagcttcaaccagcacctgggcaagagcctgctggtgcccgtggacgagagcaagaccaacaccgacgacttcttcaaggacatcaacagctgctgcccccaggaggccaccatgcaggagcaggacatgcccttcctgagaggcggccccggcatgtacaaggtggtgaagaccggccccagcggccacaacatcagaagctgccccaacctgagaggcatccccatcggcatgctggtgctgggcaacaaggtgaaggccgtgggcgaggtgaccaacagcgagggcacctgggtgcagctggaccagaacagcatggtggagttctgcgagagcgacgagggcgaggcctggagcctggccagagacagaggcggcaaccagtacctgagacacgaggacgagcaggccctgctggaccagaacagccagacccccccccccagccccttcagcgtgcaggccttcaacaagggcgccagctgcagcgcccagggcttcgactacggcctgggcaacagcaagggcgacagaggcaacatcagcaccagcagcaagcccgccagcaccagcggcaagagcgagctgagcagcaagcacagcagaagcctgaagcccgacggcagaatgagcagaaccaccgccgaccagaagaagcccagaggcaccgagagcctgagcgccagcgagagcctgatcctgaagagcgacgccgccaagctgagaagcgacagccacagcagaagcctgagccccaaccacaacaccctgcagaccctgaagagcgacggcagaatgcccagcagcagcagagccgagagccccggccccggcagcagactgagcagccccaagcccaagaccctgcccgccaacagaagcagccccagcggcgccagcagccccagaagcagcagcccccacgacaagaacctgccccagaagagcaccgcccccgtgaagaccaagctggacccccccagagagagaagcaagagcgacagctacaccctggaccccgacaccctgagaaagaagaagatgcccctgaccgagcccctgagaggcagaagcaccagccccaagcccaagagcgtgcccaaggacagcaccgacagccccggcagcgagaacagagcccccagcccccacgtggtgcaggagaacctgcacagcgaggtggtggaggtgtgcaccagcagcaccctgaagaccaacagcctgaccgacagcacctgcgacgacagcagcgagttcaagagcgtggacgagggcagcaacaaggtgcacttcagcatcggcaaggcccccctgaaggacgagcaggagatgagagccagccccaagatcagcagaaagtgcgccaacagacacaccagacccaagaaggagaagagcagcttcctgttcaagggcgacggcagcaagcccctggagcccgccaagcaggccatgagccccagcgtggccgagtgcgccagagccgtgttcgccagcttcctgtggcacgagggcatcgtgcacgacgccatggcctgcagcagcttcctgaagttccaccccgagctgagcaaggagcacgcccccatcagaagcagcctgaacagccagcagcccaccgaggagaaggagaccaagctgaagaacagacacagcctggagatcagcagcgccctgaacatgttcaacatcgccccccacggccccgacatcagcaagatgggcagcatcaacaagaacaaggtgctgagcatgctgaaggagccccccctgcacgagaagtgcgaggacggcaagaccgagaccaccttcgagatgagcatgcacaacaccatgaagagcaagagccccctgcccctgaccctgcagcacctggtggccttctgggaggacatcagcctggccaccatcaaggccgccagccagaacatgatcttccccagccccggcagctgcgccgtgctgaagaagaaggagtgcgagaaggagaacaagaagagcaagaaggagaagaagaagaaggagaaggccgaggtgagacccagaggcaacctgttcggcgagatggcccagctggccgtgggcggccccgagaaggacaccatctgcgagctgtgcggcgagagccacccctaccccgtgacctaccacatgagacaggcccaccccggctgcggcagatacgccggcggccagggctacaacagcatcggccacttctgcggcggctgggccggcaactgcggcgacggcggcatcggcggcagcacctggtacctggtgtgcgacagatgcagagagaagtacctgagagagaagcaggccgccgccagagagaaggtgaagcagagcagaagaaagcccatgcaggtgaagacccccagagccctgcccaccatggaggcccaccaggtgatcaaggccaacgccctgttcctgctgagcctgagcagcgccgccgagcccagcatcctgtgctaccaccccgccaagcccttccagagccagctgcccagcgtgaaggagggcatcagcgaggacctgcccgtgaagatgccctgcctgtacctgcagaccctggccagacaccaccacgagaacttcgtgggctaccaggacgacaacctgttccaggacgagatgagatacctgagaagcaccagcgtgcccgccccctacatcagcgtgacccccgacgccagccccaacgtgttcgaggagcccgagagcaacatgaagagcatgccccccagcctggagaccagccccatcaccgacaccgacctggccaagagaaccgtgttccagagaagctacagcgtggtggccagcgagtacgacaagcagcacagcatcctgcccgccagagtgaaggccatccccagaagaagagtgaacagcggcgacaccgaggtgggcagcagcctgctgagacaccccagccccgagctgagcagactgatcagcgcccacagcagcctgagcaagggcgagagaaacttccagtggcccgtgctggccttcgtgatccagcaccacgacctggagggcctggagatcgccatgaagcaggccctgagaaagagcgcctgcagagtgttcgccatggaggccttcaactggctgctgtgcaacgtgatccagaccaccagcctgcacgacatcctgtggcacttcgtggccagcctgacccccgcccccgtggagcccgaggaggaggaggacgaggagaacaagaccagcaaggagaacagcgagcaggagaaggacaccagagtgtgcgagcaccccctgagcgacatcgtgatcgccggcgaggccgcccaccccctgccccacaccttccacagactgctgcagaccatcagcgacctgatgatgagcctgcccagcggcagcagcctgcagcagatggccctgagatgctggagcctgaagttcaagcagagcgaccaccagttcctgcaccagagcaacgtgttccaccacatcaacaacatcctgagcaagagcgacgacggcgacagcgaggagagcttcagcatcagcatccagagcggcttcgaggccatgagccaggagctgtgcatcgtgatgtgcctgaaggacctgaccagcatcgtggacatcaagaccagcagcagacccgccatgatcggcagcctgaccgacggcagcaccgagaccttctgggagagcggcgacgaggacaagaacaagaccaagaacatcaccatcaactgcgtgaagggcatcaacgccagatacgtgagcgtgcacgtggacaacagcagagacctgggcaacaaggtgaccagcatgaccttcctgaccggcaaggccgtggaggacctgtgcagaatcaagcaggtggacctggacagcagacacatcggctgggtgaccagcgagctgcccggcggcgacaaccacatcatcaagatcgagctgaagggccccgagaacaccctgagagtgagacaggtgaaggtgctgggctggaaggacggcgagagcaccaagatcgccggccagatcagcgccagcgtggcccagcagagaaactgcgaggccgagaccctgagagtgttcagactgatcaccagccaggtgttcggcaagctgatcagcggcgacgccgagcccacccccgagcaggaggagaaggccctgctgagcagccccgagggcgaggagaaggtgtacaacgccaccagcgacgccgacctgaaggagcacatggtgggcatcatcttcagcagaagcaagctgaccaacctgcagaagcaggtgtgcgcccacatcgtgcaggccatcagaatggaggccaccagagtgagagaggagtgggagcacgccatcagcagcaaggagaacgccaacagccagcccaacgacgaggacgccagcagcgacgcctactgcttcgagctgctgagcatggtgctggccctgagcggcagcaacgtgggcagacagtacctggcccagcagctgaccctgctgcaggacctgttcagcctgctgcacaccgccagccccagagtgcagagacaggtgaccagcctgctgagaagagtgctgcccgaggtgacccccagcagactggccagcatcatcggcgtgaagagcctgccccccgccgacatcagcgacatcatccacagcaccgagaagggcgactggaacaagctgggcatcctggacatgttcctgggctgcatcgccaaggccctgaccgtgcagctgaaggccaagggcaccaccatcaccggcaccgccggcaccaccgtgggcaagggcgtgaccaccgtgaccctgcccatgatcttcaacagcagctacctgagaagaggcgagagccactggtggatgaagggcagcacccccacccagatcagcgagatcatcatcaagctgatcaaggacatggccgccggccacctgagcgaggcctggagcagagtgaccaagaacgccatcgccgagaccatcatcgccctgaccaagatggaggaggagttcagaagccccgtgagatgcatcgccaccaccagactgtggctggccctggccagcctgtgcgtgctggaccaggaccacgtggacagactgagcagcggcagatggatgggcaaggacggccagcagaagcagatgcccatgtgcgacaaccacgacgacggcgagaccgccgccatcatcctgtgcaacgtgtgcggcaacctgtgcaccgactgcgacagattcctgcacctgcacagaagaaccaagacccaccagagacaggtgttcaaggaggaggaggaggccatcaaggtggacctgcacgagggctgcggcagaaccaagctgttctggctgatggccctggccgacagcaagaccatgaaggccatggtggagttcagagagcacaccggcaagcccaccaccagcagcagcgaggcctgcagattctgcggcagcagaagcggcaccgagctgagcgccgtgggcagcgtgtgcagcgacgccgactgccaggagtacgccaagatcgcctgcagcaagacccacccctgcggccacccctgcggcggcgtgaagaacgaggagcactgcctgccctgcctgcacggctgcgacaagagcgccaccagcctgaagcaggacgccgacgacatgtgcatgatctgcttcaccgaggccctgagcgccgcccccgccatccagctggactgcagccacatcttccacctgcagtgctgcagaagagtgctggagaacagatggctgggccccagaatcaccttcggcttcatcagctgccccatctgcaagaacaagatcaaccacatcgtgctgaaggacctgctggaccccatcaaggagctgtacgaggacgtgagaagaaaggccctgatgagactggagtacgagggcctgcacaagagcgaggccatcaccacccccggcgtgagattctacaacgaccccgccggctacgccatgaacagatacgcctactacgtgtgctacaagtgcagaaaggcctacttcggcggcgaggccagatgcgacgccgaggccggcagaggcgacgactacgaccccagagagctgatctgcggcgcctgcagcgacgtgagcagagcccagatgtgccccaagcacggcaccgacttcctggagtacaagtgcagatactgctgcagcgtggccgtgttcttctgcttcggcaccacccacttctgcaacgcctgccacgacgacttccagagaatgaccagcatccccaaggaggagctgccccactgccccgccggccccaagggcaagcagctggagggcaccgagtgccccctgcacgtggtgcacccccccaccggcgaggagttcgccctgggctgcggcgtgtgcagaaacgcccacaccttctag

SEQ ID NO: 184057 - DNA, 14037 bp, Artificial Sequence
  derived and/or modified sequence
atgatgatgtgcgccgccaccgccagccccgccgccgccagcagcggcctgggcggcgacggcttctaccccgccgccaccttcagcagcagccccgcccccggcgccctgttcatgcccgtgcccgacggcagcgtggccgccgccggcctgggcctgggcctgcccgccgccgacagcagaggccactaccagctgctgctgagcggcagagccctggccgacagatacagaagaatctacaccgccgccctgaacgacagagaccagggcggcggcagcgccggccaccccgccagcagaaacaagaagatcctgaacaagaagaagctgaagagaaagcagaagagcaagagcaaggtgaagaccagaagcaagagcgagaacctggagaacaccgtgatcatccccgacatcaagctgcacagcaaccccagcgccttcaacatctactgcaacgtgagacactgcgtgctggagtggcagaagaaggagatcagcctggccgccgccagcaagaacagcgtgcagagcggcgagagcgacagcgacgaggaggaggagagcaaggagccccccatcaagctgcccaagatcatcgaggtgggcctgtgcgaggtgttcgagctgatcaaggagaccagattcagccaccccagcctgtgcctgagaagcctgcaggccctgctgaacgtgctgcagggccagcagcccgagggcctgcagagcgagccccccgaggtgctggagagcctgttccagctgctgctggagatcaccgtgagaagcaccggcatgaacgacagcaccggccagagcctgaccgccctgagctgcgcctgcctgttcagcctggtggccagctggggcgagaccggcagaaccctgcaggccatcagcgccatcctgaccaacaacggcagccacgcctgccagaccatccaggtgcccaccatcctgaacagcctgcagagaagcgtgcaggccgtgctggtgggcaagatccagatccaggactggttcagcaacggcatcaagaaggccgccctgatgcacaagtggcccctgaaggagatcagcgtggacgaggacgaccagtgcctgctgcagaacgacggcttcttcctgtacctgctgtgcaaggacggcctgtacaagatcggcagcggctacagcggcaccgtgagaggccacatctacaacagcaccagcagaatcagaaacagaaaggagaagaagagctggctgggctacgcccagggctacctgctgtacagagacgtgaacaaccacagcatgaccgccatcagaatcagccccgagaccctggagcaggacggcaccgtgatgctgcccgactgccacaccgagggccagaacatcctgttcaccgacggcgagtacatcaaccagatcgccgccagcagagacgacggcttcgtggtgagaatcttcgccaccagcaccgagcccgtgctgcagcaggagctgcagctgaagctggccagaaagtgcctgcacgcctgcggcatcagcctgttcgacctggagaaggacctgcacatcatcagcaccggcttcgacgaggagagcgccatcctgggcgccggcagagagttcgccctgatgaagaccgccaacggcaagatctactacaccggcaagtaccagagcctgggcatcaagcagggcggccccagcgccggcaagtgggtggagctgcccatcaccaagagccccaagatcgtgcacttcagcgtgggccacgacggcagccacgccctgctggtggccgaggacggcagcatcttcttcaccggcagcgccagcaagggcgaggacggcgagagcaccaagagcagaagacagagcaagccctacaagcccaagaagatcatcaagatggagggcaagatcgtggtgtacaccgcctgcaacaacggcagcagcagcgtgatcagcaaggacggcgagctgtacatgttcggcaaggacgccatctacagcgacagcagcagcctggtgaccgacctgaagggccacttcgtgacccaggtggccatgggcaaggcccacacctgcgtgctgatgaagaacggcgaggtgtggaccttcggcgtgaacaacaagggccagtgcggcagagacaccggcgccatgaaccagggcggcaagggcttcggcgtggagaacatggccaccgccatggacgaggacctggaggaggagctggacgagaaggacgagaagagcatgatgtgcccccccggcatgcacaagtggaagctggagcagtgcatggtgtgcaccgtgtgcggcgactgcaccggctacggcgccagctgcgtgagcagcggcagacccgacagagtgcccggcggcatctgcggctgcggcagcggcgagagcggctgcgccgtgtgcggctgctgcaaggcctgcgccagagagctggacggccaggaggccagacagagaggcatcctggacgccgtgaaggagatgatccccctggacctgctgctggccgtgcccgtgcccggcgtgaacatcgaggagcacctgcagctgagacaggaggagaagagacagagagtgatcagaagacacagactggaggagggcagaggccccctggtgttcgccggccccatcttcatgaaccacagagagcaggccctggccagactgagaagccaccccgcccagctgaagcacaagagagacaagcacaaggacggcagcggcgagagaggcgagaaggacgccagcaagatcaccacctacccccccggcagcgtgagattcgactgcgagctgagagccgtgcaggtgagctgcggcttccaccacagcgtggtgctgatggagaacggcgacgtgtacaccttcggctacggccagcacggccagctgggccacggcgacgtgaacagcagaggctgccccaccctggtgcaggccctgcccggccccagcacccaggtgaccgccggcagcaaccacaccgccgtgctgctgatggacggccaggtgttcaccttcggcagcttcagcaagggccagctgggcagacccatcctggacgtgccctactggaacgccaagcccgcccccatgcccaacatcggcagcaagtacggcagaaaggccacctggatcggcgccagcggcgaccagaccttcctgagaatcgacgaggccctgatcaacagccacgtgctggccaccagcgagatcttcgccagcaagcacatcatcggcctggtgcccgccagcatcagcgagcccccccccttcaagtgcctgctgatcaacaaggtggacggcagctgcaagaccttcaacgacagcgagcaggaggacctgcagggcttcggcgtgtgcctggaccccgtgtacgacgtgatctggagattcagacccaacaccagagagctgtggtgctacaacgccgtggtggccgacgccagactgcccagcgccgccgacatgcagagcagatgcagcatcctgagccccgagctggccctgcccaccggcagcagagccctgaccaccagaagccacgccgccctgcacatcctgggctgcctggacaccctggccgccatgcaggacctgaagatgggcgtggccagcaccgaggaggagacccaggccgtgatgaaggtgtacagcaaggaggactacagcgtggtgaacagattcgagagccacggcggcggctggggctacagcgcccacagcgtggaggccatcagattcagcgccgacaccgacatcctgctgggcggcctgggcctgttcggcggcagaggcgagtacaccgccaagatcaagctgttcgagctgggccccgacggcggcgaccacgagaccgacggcgacctgctggccgagaccgacgtgctggcctacgactgcgccgccagagagaagtacgccatgatgttcgacgagcccgtgctgctgcaggccggctggtggtacgtggcctgggccagagtgagcggccccagcagcgactgcggcagccacggccaggccagcatcaccaccgacgacggcgtggtgttccagttcaagagcagcaagaagagcaacaacggcaccgacgtgaacgccggccagatcccccagctgctgtacagactgcccaccagcgacggcagcgccagcaagggcaagcagcagaccagcgagcccgtgcacatcctgaagagaagcttcgccagaaccgtgagcgtggagtgcttcgagagcctgctgagcatcctgcactggagctggaccaccctggtgctgggcgtggaggagctgagaggcctgaagggcttccagttcaccgccaccctgctggacctggagagactgagattcgtgggcacctgctgcctgagactgctgagagtgtacacctgcgagatctaccccgtgagcgccaccggcaaggccgtggtggaggagaccagcaagctggccgagtgcatcggcaagaccagaaccctgctgagaaagatcctgagcgagggcgtggaccactgcatggtgaagctggacaacgacccccagggctacctgagccagcccctgagcctgctggaggccgtgctgcaggagtgccacaacaccttcaccgcctgcttccacagcttctaccccacccccgccctgcagtgggcctgcctgtgcgacctgctgaactgcctggaccaggacatccaggaggccaacttcaagaccagcagcagcagactgctggccgccgtgatgagcgccctgtgccacaccagcgtgaagctgaccagcatcttccccatcgcctacgacggcgaggtgctgctgagaagcatcgtgaagcaggtgagcaccgagaacgacagcaccctggtgcacagattccccctgctggtggcccacatggagaagctgagccagagcgaggagaacatcagcggcatgaccagcttcagagaggtgctggagaagatgctggtgatcgtggtgctgcccgtgagaaacagcctgagaagagagaacgagctgttcagcagccacctggtgagcaacacctgcggcctgctggccagcatcgtgagcgagctgaccgccagcgccctgggcagcgaggtggacggcctgaacagcctgcacagcgtgaaggccagcgccaacagattcaccaagaccagccagggcagaagctggaacaccggcaacggcagccccgacgccatctgcttcagcgtggacaagcccggcatcgtggtggtgggcttcagcgtgtacggcggcggcggcatccacgagtacgagctggaggtgctggtggacgacagcgagcacgccggcgacagcacccacagccacagatggaccagcctggagctggtgaagggcacctacaccaccgacgacagccccagcgacatcgccgagatcagactggacaaggtggtgcccctgaaggagaacgtgaagtacgccgtgagactgagaaactacggcagcagaaccgccaacggcgacggcggcatgaccaccgtgcagtgccccgacggcgtgaccttcaccttcagcacctgcagcctgagcagcaacggcaccaaccagaccagaggccagatcccccagatcctgtactacagaagcgagttcgacggcgacctgcagagccagctgctgagcaaggccaacgaggaggacaagaactgcagcagagccctgagcgtggtgagcaccgtggtgagagccagcaaggacctgctgcacagagccctggccgtggacgccgacgacatccccgagctgctgagcagcagcagcctgttcagcatgctgctgcccctgatcatcgcctacatcggccccgtggccgccgccatccccaaggtggccgtggaggtgttcggcctggtgcagcagctgctgcccagcgtggccatcctgaaccagaagtacgccccccccgccttcaaccccaaccagagcaccgacagcaccaccggcaaccagcccgagcagggcctgagcgcctgcaccaccagcagccactacgccgtgatcgagagcgagcacccctacaagcccgcctgcgtgatgcactacaaggtgaccttccccgagtgcgtgagatggatgaccatcgagttcgacccccagtgcggcaccgcccagagcgaggacgtgctgagactgctgatccccgtgagaaccgtgcagaacagcggctacggccccaagctgaccagcgtgcacgagaacctgaacagctggatcgagctgaagaagttcagcggcagcagcggctggcccaccatggtgctggtgctgcccggcaacgaggccctgttcagcctggagaccgccagcgactacgtgaaggacgacaaggccagcttctacggcttcaagtgcttcgccatcggctacgagttcagccccggccccgacgagggcgtgatccagctggagaaggagctggccaacctgggcggcgtgtgcgccgccgccctgatgaagaaggacctggccctgcccatcggcaacgagctggaggaggacctggagatcctggaggaggccgccctgcaggtgtgcaagacccacagcggcatcctgggcaagggcctggccctgagccacagccccaccatcctggaggccctggagggcaacctgcccctgcagatccagagcaacgagcagagcttcctggacgacttcatcgcctgcgtgcccggcagcagcggcggcagactggccagatggctgcagcccgacagctacgccgacccccagaagaccagcctgatcctgaacaaggacgacatcagatgcggctggcccaccaccatcaccgtgcagaccaaggaccagtacggcgacgtggtgcacgtgcccaacatgaaggtggaggtgaaggccgtgcccgtgagccagaagaagatgagcctgcagcaggaccaggccaagaagccccagagaatccccggcagccccgccgtgaccgccgccagcagcaacaccgacatgacctacggcggcctggccagccccaagctggacgtgagctacgagcccatgatcgtgaaggaggccagatacatcgccatcaccatgatgaaggtgtacgagaactacagcttcgaggagctgagattcgccagccccacccccaagagacccagcgagaacatgctgatcagagtgaacaacgacggcacctactgcgccaactggacccccggcgccatcggcctgtacaccctgcacgtgaccatcgacggcatcgagatcgacgccggcctggaggtgaaggtgaaggacccccccaagggcatgatcccccccggcacccagctggtgaagcccaagagcgagccccagcccaacaaggtgagaaagttcgtggccaaggacagcgccggcctgagaatcagaagccaccccagcctgcagagcgagcagatcggcatcgtgaaggtgaacggcaccatcaccttcatcgacgagatccacaacgacgacggcgtgtggctgagactgaacgacgagaccatcaagaagtacgtgcccaacatgaacggctacaccgaggcctggtgcctgagcttcaaccagcacctgggcaagagcctgctggtgcccgtggacgagagcaagaccaacaccgacgacttcttcaaggacatcaacagctgctgcccccaggaggccaccatgcaggagcaggacatgcccttcctgagaggcggccccggcatgtacaaggtggtgaagaccggccccagcggccacaacatcagaagctgccccaacctgagaggcatccccatcggcatgctggtgctgggcaacaaggtgaaggccgtgggcgaggtgaccaacagcgagggcacctgggtgcagctggaccagaacagcatggtggagttctgcgagagcgacgagggcgaggcctggagcctggccagagacagaggcggcaaccagtacctgagacacgaggacgagcaggccctgctggaccagaacagccagacccccccccccagccccttcagcgtgcaggccttcaacaagggcgccagctgcagcgcccagggcttcgactacggcctgggcaacagcaagggcgacagaggcaacatcagcaccagcagcaagcccgccagcaccagcggcaagagcgagctgagcagcaagcacagcagaagcctgaagcccgacggcagaatgagcagaaccaccgccgaccagaagaagcccagaggcaccgagagcctgagcgccagcgagagcctgatcctgaagagcgacgccgccaagctgagaagcgacagccacagcagaagcctgagccccaaccacaacaccctgcagaccctgaagagcgacggcagaatgcccagcagcagcagagccgagagccccggccccggcagcagactgagcagccccaagcccaagaccctgcccgccaacagaagcagccccagcggcgccagcagccccagaagcagcagcccccacgacaagaacctgccccagaagagcaccgcccccgtgaagaccaagctggacccccccagagagagaagcaagagcgacagctacaccctggaccccgacaccctgagaaagaagaagatgcccctgaccgagcccctgagaggcagaagcaccagccccaagcccaagagcgtgcccaaggacagcaccgacagccccggcagcgagaacagagcccccagcccccacgtggtgcaggagaacctgcacagcgaggtggtggaggtgtgcaccagcagcaccctgaagaccaacagcctgaccgacagcacctgcgacgacagcagcgagttcaagagcgtggacgagggcagcaacaaggtgcacttcagcatcggcaaggcccccctgaaggacgagcaggagatgagagccagccccaagatcagcagaaagtgcgccaacagacacaccagacccaagaaggagaagagcagcttcctgttcaagggcgacggcagcaagcccctggagcccgccaagcaggccatgagccccagcgtggccgagtgcgccagagccgtgttcgccagcttcctgtggcacgagggcatcgtgcacgacgccatggcctgcagcagcttcctgaagttccaccccgagctgagcaaggagcacgcccccatcagaagcagcctgaacagccagcagcccaccgaggagaaggagaccaagctgaagaacagacacagcctggagatcagcagcgccctgaacatgttcaacatcgccccccacggccccgacatcagcaagatgggcagcatcaacaagaacaaggtgctgagcatgctgaaggagccccccctgcacgagaagtgcgaggacggcaagaccgagaccaccttcgagatgagcatgcacaacaccatgaagagcaagagccccctgcccctgaccctgcagcacctggtggccttctgggaggacatcagcctggccaccatcaaggccgccagccagaacatgatcttccccagccccggcagctgcgccgtgctgaagaagaaggagtgcgagaaggagaacaagaagagcaagaaggagaagaagaagaaggagaaggccgaggtgagacccagaggcaacctgttcggcgagatggcccagctggccgtgggcggccccgagaaggacaccatctgcgagctgtgcggcgagagccacccctaccccgtgacctaccacatgagacaggcccaccccggctgcggcagatacgccggcggccagggctacaacagcatcggccacttctgcggcggctgggccggcaactgcggcgacggcggcatcggcggcagcacctggtacctggtgtgcgacagatgcagagagaagtacctgagagagaagcaggccgccgccagagagaaggtgaagcagagcagaagaaagcccatgcaggtgaagacccccagagccctgcccaccatggaggcccaccaggtgatcaaggccaacgccctgttcctgctgagcctgagcagcgccgccgagcccagcatcctgtgctaccaccccgccaagcccttccagagccagctgcccagcgtgaaggagggcatcagcgaggacctgcccgtgaagatgccctgcctgtacctgcagaccctggccagacaccaccacgagaacttcgtgggctaccaggacgacaacctgttccaggacgagatgagatacctgagaagcaccagcgtgcccgccccctacatcagcgtgacccccgacgccagccccaacgtgttcgaggagcccgagagcaacatgaagagcatgccccccagcctggagaccagccccatcaccgacaccgacctggccaagagaaccgtgttccagagaagctacagcgtggtggccagcgagtacgacaagcagcacagcatcctgcccgccagagtgaaggccatccccagaagaagagtgaacagcggcgacaccgaggtgggcagcagcctgctgagacaccccagccccgagctgagcagactgatcagcgcccacagcagcctgagcaagggcgagagaaacttccagtggcccgtgctggccttcgtgatccagcaccacgacctggagggcctggagatcgccatgaagcaggccctgagaaagagcgcctgcagagtgttcgccatggaggccttcaactggctgctgtgcaacgtgatccagaccaccagcctgcacgacatcctgtggcacttcgtggccagcctgacccccgcccccgtggagcccgaggaggaggaggacgaggagaacaagaccagcaaggagaacagcgagcaggagaaggacaccagagtgtgcgagcaccccctgagcgacatcgtgatcgccggcgaggccgcccaccccctgccccacaccttccacagactgctgcagaccatcagcgacctgatgatgagcctgcccagcggcagcagcctgcagcagatggccctgagatgctggagcctgaagttcaagcagagcgaccaccagttcctgcaccagagcaacgtgttccaccacatcaacaacatcctgagcaagagcgacgacggcgacagcgaggagagcttcagcatcagcatccagagcggcttcgaggccatgagccaggagctgtgcatcgtgatgtgcctgaaggacctgaccagcatcgtggacatcaagaccagcagcagacccgccatgatcggcagcctgaccgacggcagcaccgagaccttctgggagagcggcgacgaggacaagaacaagaccaagaacatcaccatcaactgcgtgaagggcatcaacgccagatacgtgagcgtgcacgtggacaacagcagagacctgggcaacaaggtgaccagcatgaccttcctgaccggcaaggccgtggaggacctgtgcagaatcaagcaggtggacctggacagcagacacatcggctgggtgaccagcgagctgcccggcggcgacaaccacatcatcaagatcgagctgaagggccccgagaacaccctgagagtgagacaggtgaaggtgctgggctggaaggacggcgagagcaccaagatcgccggccagatcagcgccagcgtggcccagcagagaaactgcgaggccgagaccctgagagtgttcagactgatcaccagccaggtgttcggcaagctgatcagcggcgacgccgagcccacccccgagcaggaggagaaggccctgctgagcagccccgagggcgaggagaaggtgtacaacgccaccagcgacgccgacctgaaggagcacatggtgggcatcatcttcagcagaagcaagctgaccaacctgcagaagcaggtgtgcgcccacatcgtgcaggccatcagaatggaggccaccagagtgagagaggagtgggagcacgccatcagcagcaaggagaacgccaacagccagcccaacgacgaggacgccagcagcgacgcctactgcttcgagctgctgagcatggtgctggccctgagcggcagcaacgtgggcagacagtacctggcccagcagctgaccctgctgcaggacctgttcagcctgctgcacaccgccagccccagagtgcagagacaggtgaccagcctgctgagaagagtgctgcccgaggtgacccccagcagactggccagcatcatcggcgtgaagagcctgccccccgccgacatcagcgacatcatccacagcaccgagaagggcgactggaacaagctgggcatcctggacatgttcctgggctgcatcgccaaggccctgaccgtgcagctgaaggccaagggcaccaccatcaccggcaccgccggcaccaccgtgggcaagggcgtgaccaccgtgaccctgcccatgatcttcaacagcagctacctgagaagaggcgagagccactggtggatgaagggcagcacccccacccagatcagcgagatcatcatcaagctgatcaaggacatggccgccggccacctgagcgaggcctggagcagagtgaccaagaacgccatcgccgagaccatcatcgccctgaccaagatggaggaggagttcagaagccccgtgagatgcatcgccaccaccagactgtggctggccctggccagcctgtgcgtgctggaccaggaccacgtggacagactgagcagcggcagatggatgggcaaggacggccagcagaagcagatgcccatgtgcgacaaccacgacgacggcgagaccgccgccatcatcctgtgcaacgtgtgcggcaacctgtgcaccgactgcgacagattcctgcacctgcacagaagaaccaagacccaccagagacaggtgttcaaggaggaggaggaggccatcaaggtggacctgcacgagggctgcggcagaaccaagctgttctggctgatggccctggccgacagcaagaccatgaaggccatggtggagttcagagagcacaccggcaagcccaccaccagcagcagcgaggcctgcagattctgcggcagcagaagcggcaccgagctgagcgccgtgggcagcgtgtgcagcgacgccgactgccaggagtacgccaagatcgcctgcagcaagacccacccctgcggccacccctgcggcggcgtgaagaacgaggagcactgcctgccctgcctgcacggctgcgacaagagcgccaccagcctgaagcaggacgccgacgacatgtgcatgatctgcttcaccgaggccctgagcgccgcccccgccatccagctggactgcagccacatcttccacctgcagtgctgcagaagagtgctggagaacagatggctgggccccagaatcaccttcggcttcatcagctgccccatctgcaagaacaagatcaaccacatcgtgctgaaggacctgctggaccccatcaaggagctgtacgaggacgtgagaagaaaggccctgatgagactggagtacgagggcctgcacaagagcgaggccatcaccacccccggcgtgagattctacaacgaccccgccggctacgccatgaacagatacgcctactacgtgtgctacaagtgcagaaaggcctacttcggcggcgaggccagatgcgacgccgaggccggcagaggcgacgactacgaccccagagagctgatctgcggcgcctgcagcgacgtgagcagagcccagatgtgccccaagcacggcaccgacttcctggagtacaagtgcagatactgctgcagcgtggccgtgttcttctgcttcggcaccacccacttctgcaacgcctgccacgacgacttccagagaatgaccagcatccccaaggaggagctgccccactgccccgccggccccaagggcaagcagctggagggcaccgagtgccccctgcacgtggtgcacccccccaccggcgaggagttcgccctgggctgcggcgtgtgcagaaacgcccacaccttctag

SEQ ID NO: 184058 - DNA, 13923 bp, Artificial Sequence
  derived and/or modified sequence
atgcccgtgcctgacggcagcgtggccgccgcaggtctcggtcttggcctgccagccgccgattcgcgaggacattaccagctcctgctttccggacgggctctggcggataggtacaggcgaatctacactgcagcccttaacgacagggaccagggcggagggtctgcagggcaccctgcctcccgcaataaaaaaatcctgaacaaaaaaaaactcaaacgcaaacaaaagagtaaaagtaaggtgaagacacgcagtaaaagcgagaatcttgaaaacaccgtgattattcctgacatcaagctgcactcaaatcccagcgcattcaatatctattgcaacgttcgccactgcgttcttgagtggcagaagaaggaaatatcacttgctgccgcaagtaaaaatagcgtccagtctggagagtctgattctgatgaggaagaagagtccaaggagccgcctatcaaacttccaaagatcatagaagttggcctttgcgaggtgttcgagctcattaaggagacccgtttcagtcatccctcattatgtctgcgcagcttacaagcccttctgaacgtcctccaggggcaacagcccgaaggcctccagagcgaacctcctgaagtgctggaatccctgtttcagcttctgttggaaattaccgttcgatccactggaatgaatgacagcacgggacaaagtctgaccgctctctcatgcgcttgtctgtttagcctggtcgcctcctggggcgaaaccggaaggaccctgcaggccatttcagcaatcctcacaaacaacggctcccatgcttgtcagaccatccaggtgcctacaatactcaatagcctacaacgttcagtgcaagcagtgctggtcggaaagatccaaattcaggattggttcagtaacggcattaagaaggccgctttgatgcacaagtggcccttaaaggaaataagcgtggacgaagatgatcaatgtctactccaaaacgacgggtttttcttgtatctgctttgcaaagacggactttacaagataggaagcggctattccgggaccgtgaggggccacatctacaactctaccagccgcatccgtaataggaaagaaaaaaaatcatggctcgggtacgctcaagggtacttgctgtacagagacgttaacaaccatagcatgacagccattaggatctctcccgaaacgttggaacaggacggaactgtcatgctccccgattgtcacacggagggtcagaatattctgtttacggacggtgaatacatcaaccaaatagccgccagccgggatgacggctttgtggtgaggatctttgctacaagcactgagccggtcctgcagcaggaactgcagttgaagctggcgcggaaatgtctgcatgcatgcggcatcagcttgtttgacttggagaaagacctccacattatctctaccgggttcgatgaggaaagcgctattcttggcgccggaagggagttcgccctgatgaagactgccaacggcaagatctattatactgggaagtaccagagcctcggaattaagcaggggggcccaagcgcagggaaatgggtggagctgcccatcaccaaatcacctaaaattgtacatttcagcgtgggccacgacggcagtcacgcccttttagtagcagaagacggtagcatctttttcacgggttccgcttccaagggtgaagacggcgaaagcaccaaatcaaggcgccaatcaaagccttataaacctaaaaagatcatcaagatggaagggaaaatagtggtgtatacagcttgtaacaacggctcatcgtcagtcatctcaaaagacggcgagctgtatatgttcggaaaggatgctatttacagcgacagctcatcccttgttactgaccttaaaggccactttgtgacgcaggtggctatgggcaaggcccacacttgcgtgctgatgaaaaatggggaggtctggacctttggggtgaataacaagggtcagtgcgggcgcgacacgggagctatgaatcagggtggtaaaggatttggtgtcgaaaatatggccaccgcaatggacgaggaccttgaggaagaacttgacgaaaaagacgaaaaatctatgatgtgtcccccagggatgcataagtggaagctcgaacaatgcatggtttgcaccgtgtgtggcgactgtaccggctacggcgctagctgcgtgtccagcggccgacctgatagagtgccaggaggcatctgtggatgcggctctggtgagtcaggctgcgcagtctgtgggtgctgtaaggcctgtgctagggaactggacggtcaggaggcccgtcagaggggtattctcgatgctgtgaaggagatgatccctctggacctcctgctggcggtgccagtgcccggggtgaacatagaggagcacctacagcttagacaggaggaaaaaagacagagggtgatcagaagacacagattggaggagggtcgcggacctctcgtatttgcaggccccatttttatgaatcacagagagcaggccctggcccgtctgagatctcacccagcgcagcttaaacacaagcgggacaagcacaaagatggttcaggcgagcgaggagagaaggacgcatccaagatcaccacctaccccccaggatctgtgcggtttgactgtgaattgagagccgtgcaggtgagttgtgggttccatcactctgtggtactcatggagaatggggatgtgtatacttttggttatggacagcatgggcagctgggacatggcgacgtcaatagtcggggctgccccaccctggtccaggcactgccgggcccatcgacccaggtcaccgcaggatccaatcacacagcggtgctgctgatggacggacaagtcttcacattcggttcttttagcaaggggcagctgggcagacccatcttagatgtgccgtattggaatgccaaacctgctccaatgcccaacattgggagcaagtatggccgcaaggctacctggattggcgcatccggggatcagactttcttgcggattgacgaggcgttgatcaactctcatgtgctggctactagcgagatctttgcgagtaaacacattatcggcttagtacctgcgagcatctctgagccaccacccttcaagtgtttacttattaacaaagtggacggtagctgcaagaccttcaatgactctgaacaagaagacctccaaggatttggagtgtgcctagatccggtctacgatgtcatctggaggttccggcctaatacaagggagctgtggtgttacaacgctgttgtggccgacgccagactgcctagtgctgccgatatgcaatcacgatgctcaatactgagtccggaattggcactccccaccggatctcgcgccttgaccacgagaagccacgccgctctccacattttggggtgcctggatactttggctgccatgcaagatctcaaaatgggcgtggcctctacagaggaagaaacacaggcagtaatgaaagtctatagcaaagaagactatagtgttgtcaatcgatttgagagccatggtggaggttggggatactcagcccactctgtggaggccatacgcttcagcgctgacacagacatactgttaggcggattgggtctattcggcggtcggggtgagtacacagctaagatcaaactgtttgagctggggcccgatggaggggaccacgagaccgacggggacctgcttgccgaaacagatgtgttggcatacgactgcgccgcccgcgagaagtacgcaatgatgttcgatgaacccgtcctgctgcaggccggttggtggtacgtcgcctgggcaagggtgtccggtccaagttccgactgtgggagtcacggacaggcttccattaccaccgacgatggcgtggtgtttcaatttaaaagcagcaagaaatctaataatggcacagacgtcaacgccggacaaatccctcagctcctataccgcctccctacctctgacggttcagctagtaaaggaaagcagcagacttctgaacccgtccacatcttaaaaaggtcttttgcccgcaccgtttcagtcgaatgttttgaaagcctcttgtctatcctacactggtcatggactaccttggtgttgggggttgaggagttacggggcctgaaagggtttcagttcacagcaactctgcttgatttagagcgtctgcggttcgtcggtacctgctgcctgcggctccttcgagtgtatacatgtgagatctacccagtcagcgctaccgggaaggccgttgtggaagagacctccaagctggccgaatgcataggcaagactagaacgctcttacgcaaaatcctttccgagggagttgatcactgtatggtcaagctggacaatgacccccagggctacctctcccagccactgtccctgttggaggcagtgctccaggagtgtcataacacgttcacagcatgcttccattccttctaccctactccagcattgcagtgggcctgtttgtgtgatttattaaactgcctggaccaggatatccaggaagctaattttaaaacatcttctagccgcttactcgctgccgtgatgagcgccctctgtcataccagcgtaaagctgacaagtatcttccccatcgcctacgatggggaagttctattgcggagcattgtcaaacaggtgtcaacagaaaatgattccactctggttcaccgctttcctctattagttgcccacatggaaaaactgtcacagagcgaggaaaacatatccgggatgactagtttcagagaggtgcttgaaaagatgctggttatagtggtgttgcccgtacggaattctctccgccgggagaacgaattgttctccagccacctcgtgtcgaacacttgtggtttattggcctccatcgtgtccgagttgaccgcaagcgccctaggatcagaggtagacggtctgaacagcctccatagtgtaaaggcatcagcaaatagatttacaaaaaccagccaggggaggtcttggaacacgggtaacgggtctcctgatgccatctgtttctctgttgacaagccgggtatcgtcgtcgttggcttctccgtgtatggtggggggggcatacacgagtacgaactagaggtccttgtcgatgattctgagcacgccggcgattccactcattctcaccggtggacatccctggagcttgtgaaagggacctataccacggacgattcaccgagcgacatcgctgagatacgcctcgacaaagtcgtgcctctgaaggagaatgtcaagtatgccgtgaggctgcgcaattacggatctcgcaccgccaacggagacggtggcatgactactgtgcagtgtcccgatggcgtgaccttcacattttccacttgtagcctatcctcaaacggcacaaaccagacccgtggccagattccacagattttatactatcggtccgaattcgatggggacctgcagtcacagctgttgagtaaagccaatgaagaggataaaaattgctctcgcgcccttagcgtcgtgagtacagttgtgagggcatctaaagacctgttgcaccgtgccctcgccgtagatgccgatgacattcccgagttgttgtcttctagcagtctgtttagcatgctattaccacttatcatcgcatacatcggcccggtggctgcagcaatccccaaggtggctgttgaggtgttcggccttgtccagcagctgctgccgagtgttgccatcctcaatcagaaatacgctcccccagcattcaacccaaatcagagtactgattccaccactgggaatcaacctgagcaaggtctgagtgcttgtacaacaagctcccactacgccgtcatagagtcagagcacccgtataaaccggcttgtgtaatgcactacaaagtgacctttcccgaatgtgtgcggtggatgacaatcgaattcgacccccagtgcggcaccgctcaatccgaggacgtgctgagactgctgattccggttcgcacagtgcagaattcgggctacggtcccaagctgacatccgtccatgagaacctgaactcttggatcgagttgaagaagtttagcggatcatcaggttggcctactatggtgctagtcctgcctggaaacgaggctttgttttccctcgagactgccagcgactacgttaaggatgacaaggcgagcttttacggctttaagtgttttgctattgggtatgagtttagtcccggtcctgatgagggcgtgatccaactcgaaaaggaattggcgaatttagggggggtgtgtgctgcagcactgatgaaaaaagatctggcccttcccatcggtaatgaattagaagaggatctggaaattctagaggaggccgctttacaagtgtgcaaaactcattccgggatattaggaaagggattagccctttcacactcccccacgatcctggaagctctggaaggcaacctgccgctccaaatccagagcaacgagcagagttttctcgatgacttcattgcctgcgtgcctgggtcatccggcgggagactcgcacggtggctacagcctgactcctacgctgacccacagaaaaccagcctcatactgaataaggacgacataagatgtggctggccgacgaccattaccgtgcagaccaaggatcagtatggagatgtggttcacgtccccaacatgaaggtcgaagtgaaagcagttcccgtgagtcagaagaagatgtccctgcagcaagaccaggcaaaaaagccacagcgcatccccggcagcccggcggtgactgctgcaagcagcaataccgacatgacatacggtggcctggcctccccgaagttggacgttagctacgaaccgatgatcgtgaaagaggctcggtatatcgcaatcaccatgatgaaagtgtatgagaactacagtttcgaggagttaaggttcgcctcccccacgcctaaacggccaagtgaaaatatgttaatcagagtgaacaatgatggaacatactgcgcgaattggacgcccggggccattgggctgtacacgctgcatgtgactattgacggcatcgagattgatgcgggccttgaagttaaggtgaaagaccctccaaagggaatgatccctcctggtacccagctagtgaaacccaagtccgagccgcagccaaacaaggtgcggaaattcgtggcaaaagattccgccggtttgcggatccgaagtcatcccagcctccagtccgagcagattgggatcgttaaggtcaatggcacgatcacatttattgatgaaatccataatgatgacggggtctggcttagactgaatgatgagacaattaagaagtatgttcccaacatgaatggctatacagaagcgtggtgtctctccttcaatcagcatttgggcaagagtctgctcgtccctgtagacgagtccaagaccaacaccgatgacttctttaaggacataaactcttgttgccctcaagaggcaacaatgcaggaacaagacatgccatttctccgcggcggccccggcatgtacaaggtcgttaaaaccggcccatccggtcacaatatcagaagttgtccaaacctgagaggaatacctatcgggatgctcgttctgggaaacaaggtgaaggccgttggagaagtgactaatagtgaaggaacttgggtgcagcttgaccaaaactctatggtggaattctgcgagtccgatgagggggaggcatggagtctcgctcgcgaccgcggtggaaatcagtacctgaggcatgaggacgagcaggccctgttggatcaaaacagtcaaaccccacccccctcccctttttctgtgcaggccttcaataagggcgcatcatgctctgcacagggctttgattatggtctgggcaattccaaaggcgatcgaggcaatatcagtacgagttccaagcccgcttcaacttcagggaagtccgaactgtcctctaagcatagcagatctttaaagccagatgggcgcatgagtcggacaaccgccgaccagaagaagcccagggggaccgaatcactctctgcatcggagtcacttatcctgaagtctgacgccgcgaaacttcggagcgattctcactccagatcactttccccaaaccacaatacactccagacactcaaaagtgacggccgcatgccaagcagctctagggcagaaagccctggaccaggctcacgactgtcttcaccaaaacctaagaccctcccggccaaccgaagctctccatcgggcgcatccagtcctagaagttcaagtcctcacgacaaaaatttaccacagaagtcaacagctccagtgaagaccaaactcgatcccccccgtgaaagatctaagagtgattcatacactctggaccccgatacactgcgtaagaaaaagatgcctttaaccgagccattgcgcggtcgaagtaccagccccaagcctaaaagtgtgcctaaggacagtaccgacagcccaggctctgagaaccgcgccccgagcccacatgtcgtccaggaaaatttgcactcagaggtggtcgaggtttgcacttcctcaaccttgaaaactaatagcctgaccgatagcacttgtgacgactccagtgagtttaagtctgtagatgaaggatctaataaggtgcatttttctatcgggaaagctcctctgaaagacgagcaggagatgcgggcctcacctaaaatatccagaaagtgcgccaatcgccacacaagacccaagaaggagaagtctagctttttgtttaagggcgatggttcgaagccgttggagcctgcaaagcaggccatgtctccaagcgtggccgagtgcgctagggccgtgttcgcttcctttttatggcacgaggggatcgtgcacgatgcgatggcctgttcttcctttttaaagtttcaccctgaactgtctaaggaacatgctcctatccgcagcagcctgaattcacagcaaccaactgaagagaaggagacaaagctcaagaacaggcacagcctggagatctcaagtgcattgaacatgtttaatattgctccccatggacccgatatcagcaagatgggctccatcaacaagaacaaggtcctgagcatgcttaaggagcccccacttcatgagaaatgtgaggatgggaagaccgagactacgttcgagatgagcatgcacaacactatgaaatctaagtctccattgcctctgactctgcaacatctggtcgcattctgggaagacatctccttggctaccattaaagccgcttcccagaatatgattttccccagccccggatcatgtgccgtgctgaaaaaaaaagagtgcgagaaagaaaataagaaaagcaaaaaggagaagaaaaaaaaagagaaggccgaagtgagaccaagaggcaacctctttggcgagatggctcagttggcggtcggcgggcctgagaaggataccatttgtgagttgtgtggggaaagccatccttatcctgtgacttaccacatgcgccaggctcacccaggatgtggcagatacgccgggggacagggctacaatagcatcggccacttctgtggtgggtgggccggcaattgtggcgatggaggaattggcggcagcacttggtatcttgtgtgtgatcggtgcagagaaaagtacctgcgagagaagcaggcagctgcacgagaaaaagtgaagcagtcgcgtaggaaaccgatgcaagtgaagacgccaagagccctgcccacaatggaagctcaccaggtcattaaggccaacgcattgttcttgctttccctctcctcagctgccgaaccatccatcctctgttatcatcccgctaaacccttccagagtcagctacctagcgtcaaggaaggcatttcagaagacctgccagtcaagatgccgtgcctgtatctgcaaacgctcgctcgtcaccaccacgagaatttcgtcggctaccaagatgataatctgttccaggatgaaatgagatatctccgatctacatccgttcccgcaccctacattagcgttacacccgacgccagtcctaatgtgttcgaggagccagaatccaatatgaagagcatgccaccttcactcgaaacgtcaccaatcacagatacggatctggccaaaaggacagtgtttcagagaagctactcagtggtggcgagcgagtacgataagcaacatagtatcttgccggctcgggtgaaggcaatccctcggaggcgggtgaatagtggcgatactgaagtggggtccagcctcctccggcatccttcccccgaactgtctcggctgattagcgcacactcctccctgagtaagggagagagaaactttcagtggcccgtcctagcgtttgtaatccagcaccacgatctcgagggtctcgaaatcgccatgaagcaagccctccgcaaatcagcctgccgggtcttcgccatggaggccttcaattggctattgtgtaacgtcattcaaaccacatctctccacgacatcctgtggcatttcgtcgcctcacttacccctgcacccgtagaacccgaggaagaggaggacgaagaaaacaagacttcaaaagaaaattccgagcaggaaaaggacacccgagtgtgcgagcatccactgtctgacatcgtcattgccggggaggcagctcatcctctccctcacacgttccatcgtttgctccaaacaatctccgacctgatgatgtctctgccaagcggatcctctctgcagcagatggccctgaggtgttggtccctgaagttcaagcagagtgaccatcagtttttgcaccagtccaacgtgtttcatcacatcaataacattctttcaaaatctgatgacggggacagcgaggaaagcttttctatctcaatccagagtggattcgaggccatgtcccaggaactgtgtattgttatgtgcttgaaagatctcacaagtatcgtcgatataaagacatctagccgcccagccatgatcggatcgctgacggatggaagcacggaaactttctgggagagcggcgatgaagacaagaacaaaaccaaaaacatcacaattaactgcgtcaagggtatcaatgcccggtacgtgagtgtacatgtcgataatagtagggatctcggaaataaggtgacaagcatgacctttttgaccggtaaggccgtggaggatctgtgccgcatcaagcaggtggatctcgatagccgtcacatagggtgggtgacgtcagagttacccgggggcgataaccacattattaagattgagctgaagggacccgaaaacacccttcgggtgcgccaagtgaaagtcctcggatggaaggatggagagtcaaccaaaatcgccgggcagataagtgccagcgtggctcagcagcgcaactgcgaagcagagacattgcgcgtgtttaggctgataacctcccaagttttcggcaagctaatttctggagatgccgaacccacccctgagcaggaagagaaggcccttctgagctctccagaaggagaagagaaggtgtataacgctacgtccgacgccgacctcaaggagcacatggtaggaatcatatttagccgctctaagcttaccaacctacagaagcaggtgtgtgctcacatagtgcaggctatcagaatggaggccacaagagtccgcgaggaatgggagcacgcgataagcagtaaggagaacgcaaacagtcagcccaatgacgaggatgcttcgtcagatgcctactgcttcgaactactgagtatggtgttggcactaagcggaagtaatgtcggcagacagtatttggctcagcagctgacattgctacaagacctcttttcactcctgcacacagcctcccctcgggtacaacgccaggtgacctcacttttgagacgggttctacccgaggtgacaccatcccgcctggcctcaattatcggggtaaagtcccttcctcctgcggatatcagcgatataatccatagtacagagaagggcgattggaacaagctagggatacttgacatgttcctcgggtgtattgctaaagccttgactgtccagctgaaggcaaagggcacaactattaccgggactgccggcacaacggtggggaagggtgtcactactgttaccctccccatgatattcaattcatcttatttgcggaggggggaaagtcattggtggatgaagggttcgaccccaactcagatatccgaaataattatcaaattgatcaaagacatggcagctggacacttaagcgaagcctggagccgcgtcacaaagaacgcaatcgcagagacaatcattgcactcacgaaaatggaagaggagttcagatcccctgtgagatgtattgccacgacccgcctctggctggcattggccagcctgtgtgtgttggaccaggatcacgtcgaccggctgtcttccgggcgctggatgggcaaagatggtcaacaaaagcagatgcccatgtgtgacaaccatgacgacggagagactgcagctataatcctgtgcaatgtgtgtgggaacttatgtaccgactgcgaccgctttctgcacttgcatagaagaaccaagactcatcagcggcaggtgttcaaagaagaggaagaggccatcaaggtggatttgcacgaaggctgtgggagaaccaagctcttttggctcatggctctggccgactcgaaaacaatgaaggccatggtagagtttagagagcacacaggcaaacctaccacgtcttcgagcgaagcctgcagattttgcgggtcaaggtctgggaccgaattgtcagcagtcgggtctgtttgtagcgatgccgactgccaggaatacgctaaaatagcatgtagtaaaacccacccttgtggccacccatgcgggggtgttaagaatgaggagcattgcctgccttgcctgcacgggtgtgataagagcgctacatctctgaagcaggacgccgacgatatgtgtatgatatgctttactgaagcgctgtctgccgcccccgccattcaactcgactgctcacatatctttcacctgcaatgttgtcggagagttctggagaatcggtggctagggccacgaatcacattcggctttatctcctgccccatctgtaagaacaaaattaatcacattgtgctcaaggacctcctagatccaatcaaggaactctatgaggatgtacgccgcaaagctctgatgcgactggaatatgagggcctgcacaaaagtgaggcaatcaccacccccggtgtccgcttctataacgatccagctgggtatgccatgaatcggtatgcctactatgtttgttataaatgtaggaaggcctattttggaggggaagcccggtgtgatgcggaagctggcagaggggacgactatgatccccgcgagttgatttgcggcgcttgttctgatgtgagcagggcccaaatgtgtcccaaacacgggactgatttcctggagtacaaatgtaggtattgttgctctgtcgccgtcttcttctgcttcggcaccactcatttctgtaacgcctgccatgacgattttcaacgcatgaccagtattcccaaggaagagctcccacactgccctgccggccctaaggggaagcagttggaagggacggagtgccctctccatgtggtgcatccccccaccggagaagaattcgccctgggatgcggtgtctgcaggaacgctcacacattttag

SEQ ID NO: 184059 - DNA, 14037 bp, Artificial Sequence
  derived and/or modified sequence
atgatgatgtgcgccgctacagcaagtcctgctgccgctagctcaggactgggaggcgacgggttttatcctgccgccactttcagcagcagtccagctccaggggccctgttcatgcccgtccccgacggaagcgtcgccgccgctggtttaggactaggtttgcctgcggcggattctcgcggacactatcagctgcttctttcaggcagggcactcgccgataggtacagacgcatctataccgcagcccttaatgaccgcgaccagggaggaggctccgccggtcatcccgcctcgcggaataagaaaattctaaacaaaaagaagctgaagcgtaagcaaaagtctaaaagtaaggtaaaaactcgcagcaagtcagagaatctggaaaatactgtgatcataccagatatcaaactccactcaaacccttccgcatttaatatttattgtaatgtacgtcattgcgtgctggaatggcagaaaaaagagatctcccttgccgctgcctccaagaactctgtccaaagcggcgagtccgattctgacgaggaggaggagtcgaaagagccaccgatcaagctgcctaaaattattgaggtgggcttatgtgaggtcttcgagcttattaaggaaactcgcttttcccacccttccctgtgccttcggtcccttcaggcccttttgaatgtccttcaaggccaacagcctgaagggctgcaatctgagccccctgaagtgttggaatccttgttccaacttctgttagagattacggtgcggagcaccggcatgaatgacagtaccgggcaatcgttgaccgcattatcatgcgcctgcctgttttctcttgtagccagctggggagagaccggccgcacccttcaggcgataagtgcaattctcacaaacaacggatcccacgcatgtcagaccatacaagtccctaccattctaaactctcttcaacgttctgtgcaagccgttttggtgggtaagatccagatacaggactggttctctaacggaatcaaaaaagccgcgttaatgcacaagtggcccctgaaagaaatcagcgtcgacgaagatgaccaatgcctactacaaaatgacggattctttctctatctcctgtgtaaggatggactgtataaaatcggctctggctattccggtaccgtcagaggccacatctataacagcactagcagaatccgcaaccgcaaagagaaaaaatcgtggctgggctatgcccagggctatctcctctatcgcgatgtgaataaccacagcatgaccgccatcaggatctcccccgagaccttggaacaggatggaacagtgatgctgccagactgccataccgagggccagaatatcctgttcaccgacggcgagtacataaatcaaatcgcggcgtcgcgagatgacgggtttgtggtgcggatcttcgctactagtacagagccagtgctgcagcaagagctgcagctgaagctggcccgaaaatgtctacatgcatgtggtatcagcctgttcgacttagaaaaagacttacacatcatctcaaccggcttcgacgaggagagcgctatcttaggggccggacgcgagtttgccttgatgaagacagctaacggcaaaatttattacaccggcaaataccagagccttggcatcaaacagggcgggccatctgccggtaaatgggtggaactccctataaccaaatcccccaaaatagttcacttcagcgttgggcacgacggttctcatgccttgcttgtcgcggaggatggatccattttctttaccggaagtgcatctaagggagaagacggcgaatccacaaagtccagacgacagagcaagccatacaagcccaagaagattatcaagatggaaggtaagatcgtcgtgtatacagcatgtaacaatgggtctagttccgtgatcagcaaagatggcgaactgtacatgtttggtaaagacgccatttactctgattcgtcaagccttgtcacagaccttaaaggccatttcgtgacacaggttgcaatgggcaaagctcacacctgcgtcctcatgaaaaacggtgaggtctggacattcggggtgaacaacaaaggtcagtgtggtagagacacgggagccatgaatcaggggggaaagggatttggcgtggagaacatggccaccgcaatggacgaggacctcgaagaggagctcgatgaaaaggacgagaagagcatgatgtgtcctcccggcatgcacaagtggaagcttgagcagtgcatggtgtgtaccgtatgtggcgattgtaccggttacggcgcatcatgcgtcagctctggacggcccgaccgggtaccggggggcatctgcggatgtggctccggcgagtctggatgtgccgtgtgtgggtgttgtaaggcctgtgcccgcgagctggacggacaggaggctcggcaacgcggcattctagatgctgttaaagaaatgattcccctagacctgcttctggctgtcccagtgcccggggttaatatcgaagaacacctccagctgcgacaggaagaaaaacgtcagagggtgattagacgacataggctggaagagggcaggggacccctggtttttgccgggcctatcttcatgaatcatagagaacaggccctggccaggctacgctcccatcctgcccaactgaaacacaaacgggacaaacacaaagatggaagcggcgagcgaggggagaaggacgcttccaaaatcaccacctacccgcctggcagcgtccggttcgattgtgaactgagagctgtccaggttagttgtgggttccatcactcagtagtcctgatggaaaatggggacgtgtatacttttggatacggccagcacggccagctgggacatggggatgtgaactcccgagggtgtcctactcttgtccaggctctgccagggccgagtacccaggtgactgcaggttccaatcacactgcagtactccttatggacgggcaggttttcacttttggcagtttctccaaaggccagctgggtaggccaattctcgatgtgccctactggaacgcaaagcctgctccaatgcccaacatcgggagcaaatacggtcggaaggctacctggattggcgcatcaggcgaccagactttcctgcggattgacgaagctttaattaactcacacgtcctggccacgtccgagatcttcgccagtaaacacatcatcggcctggtgccggcgtctatttcagagcctccgcccttcaaatgtcttcttatcaacaaagtcgacggcagctgcaaaaccttcaacgacagtgaacaggaggatctccagggcttcggagtatgcctggacccagtgtacgatgttatctggaggttccgacctaatacacgagaattgtggtgttacaacgcggttgtcgcagacgccagactcccatcggccgctgacatgcagtcaagatgctccatcctatcacccgagctggctcttcctaccggctcacgcgcattaaccacccgaagtcacgccgcactgcacatcctgggctgcctggataccctggctgccatgcaggatctgaagatgggtgtagccagcaccgaagaggagactcaagctgtgatgaaagtttactcaaaagaggattattccgtggttaacaggtttgaatctcacggcggcggttgggggtattctgcccactccgtcgaggccattagattctcagcagatacagatattctgctcggcggcctgggactcttcgggggaaggggcgagtacaccgcaaagatcaagctgtttgagcttggccctgatggtggggatcatgagaccgacggggacctgctggctgagaccgacgtgctggcctacgactgtgccgctcgtgagaagtacgccatgatgttcgacgagcccgtcctcctgcaggcaggctggtggtacgtagcctgggcacgagtttccggacctagcagcgactgtggttctcacggacaggctagcattacgactgatgatggggtggtgtttcagtttaagagctctaaaaaaagcaacaatggcactgatgtgaatgcagggcagataccccagctgctgtataggctgcctacctctgacggcagcgcgagtaaggggaaacagcagactagtgaaccggtccatatcctgaagagatcgttcgcgcgcacagtgtctgttgaatgtttcgagagcctactgagcattctgcattggagctggaccactctggttttaggggtggaggagctccgtggtctaaaagggttccagtttaccgccactctactggacttagagaggttaaggttcgttgggacctgttgccttaggttacttcgggtgtacacctgtgaaatctacccagtgtccgccactggaaaggctgtcgtggaggaaaccagtaagcttgccgaatgcattggcaaaacgaggacgctgctccggaagatactcagtgagggtgtcgaccactgcatggtcaagcttgataacgacccccagggctacctgagtcagccactctcactgctggaagcagtgttgcaagaatgtcataacaccttcaccgcttgcttccactccttctaccctacacctgccctacagtgggcgtgtttgtgtgatctgcttaattgccttgatcaggacatccaggaagccaattttaaaacaagctccagcagattgttagccgctgttatgtccgcgctctgtcatacttccgttaagcttacatctatctttcccatagcctacgacggcgaggtgctcctgaggtccattgtgaagcaggtgagtaccgaaaatgattcaaccctcgttcatcgtttcccgcttctcgttgcacacatggagaaattgagtcagtcagaagagaatatctcaggcatgactagttttcgggaggtccttgaaaagatgctagttatagtagttctgcctgtgaggaattccctccggcgggagaacgagctcttttcttctcacctcgtctctaacacttgcgggctcttggcatccattgtatcagagcttacagcatcagccctggggtcagaagtggacggcctcaactcgctgcatagtgtgaaagccagcgctaaccggttcaccaaaacatcacaaggcaggtcctggaatacgggcaatggatcccctgacgcgatttgtttctccgtcgataagccaggcatagtcgtggtcggctttagtgtatacggaggtggcgggattcacgagtatgagctggaggtgctcgtggatgattccgaacatgccggagactctacacactcacaccgatggacttcactggagctggtcaagggcacttacactacagatgactcaccttccgacattgcggagatcagattggataaggtagtgccgttgaaggagaatgtgaaatacgcagtgcgcttgcggaactatggcagtagaactgctaatggcgatgggggcatgacaacggtccagtgccccgatggcgtaactttcactttctcgacttgctccttgagctcaaatggtaccaaccagacacgaggccaaatcccacagatcctctactataggagcgaatttgatggagatcttcaaagtcaactcctgagcaaggcgaatgaggaagataaaaactgcagtcgggccctttcagtagtgtcaacagttgtccgcgcatctaaggacctcctgcaccgagccttggctgtggatgcagacgacatcccggagctgttgagttcttcatctctgttttctatgcttctccccctgatcatcgcttatatcggaccagtcgccgctgctatacctaaagtggccgtagaggtgtttggactggtccaacagctgctgccaagcgtggcaatacttaatcagaaatatgcacctccggcgttcaaccctaatcaaagtacagattccacgacagggaaccaacctgaacaggggttgagcgcctgcaccaccagttcacactacgctgtcattgagtcagagcacccatacaagcccgcatgcgtgatgcactacaaagtgacgttcccagaatgtgtgcgctggatgaccatcgagtttgaccctcagtgtggaactgcacaatccgaggatgtcctcaggcttttaattccggtccgcaccgtccaaaattcagggtatgggcctaagctcacctctgtgcatgagaatctgaacagttggatcgagttgaaaaagtttagcgggtctagtggctggcccacaatggtactggtattgcctggaaatgaggctctgttttccctggaaacggcctccgattatgtgaaggatgacaaggcatccttctatggatttaagtgtttcgcgatcggctatgaattctcccctggtcctgacgaaggcgtgattcagctcgagaaggaactcgccaatctgggcggcgtttgcgccgccgccttgatgaaaaaggatctggcactaccaataggtaatgaattagaggaggatctggaaattttagaggaagctgccctccaagtttgcaaaacacattctggaattctcgggaaagggttggccctcagtcactctcctaccatcctggaggcgttggagggcaatctccccctccagattcaaagcaacgagcagtcctttctcgatgactttattgcatgtgtccccggctcctccggagggcgactggcacgctggctgcagccagatagctacgctgatccccagaagacctccctcatattgaacaaggacgacataaggtgtgggtggcccaccaccatcaccgtgcagaccaaagaccagtatggggatgtcgtacatgtcccgaatatgaaagtggaagtgaaggccgtgcctgtaagccaaaagaagatgagcttacaacaggaccaagctaagaaaccccagcggatccctggtagtcctgccgtgaccgcggcttcaagcaatacagacatgacctatgggggtctcgctagtcccaagctggacgtctcgtacgagcctatgatagtaaaggaagcacgatatatcgccatcacgatgatgaaggtgtatgagaattattcttttgaagagctgaggttcgcttcccctactcctaagcggccaagcgaaaacatgctcataagagttaataatgacgggacttattgtgctaactggacacctggagccatcgggctctatactctgcacgttactatcgacggtatcgagattgacgccggcctggaggtcaaagtgaaggatcccccaaaggggatgattcctccaggcacccaattggtgaagcctaaaagcgagccgcagccaaacaaagtccgaaagttcgtggcaaaagattccgctggcctgcgaatccgatcgcatccttctctgcagtccgagcagattggcattgttaaggtgaatggcaccattacgtttatcgatgaaatccataacgatgatggagtgtggctcagactgaacgacgaaaccatcaaaaagtatgtgcctaacatgaacggttataccgaggcctggtgtttaagctttaaccagcacttgggcaaatccctgctggttccagtagatgagagcaagacaaatactgacgactttttcaaggacattaattcatgttgcccacaggaggcgaccatgcaggaacaagacatgcctttccttcgcggcggacctggtatgtataaggtcgttaaaaccggcccatctgggcacaacatccgctcttgtccaaaccttcgcggtattcccatcggcatgctggttttaggcaataaagtcaaagctgtgggagaggtgaccaactccgaagggacatgggttcagctcgaccagaattccatggtggagttctgtgagagcgacgaaggggaagcgtggtccctggcacgggatagaggtgggaaccagtacctgcgccatgaagatgagcaggctttgctggaccaaaactcccagacccccccaccctcccctttcagtgtccaagcctttaataaaggcgctagttgcagtgcacaagggttcgactacggtctcgggaactcaaaaggcgatagaggcaacatttcaacgagctctaagcctgctagcacgagcggaaaatctgaacttagctctaaacactctcgctcactcaagcctgacggacggatgagccgcactaccgccgatcagaaaaaaccgcgcggtacagagtctctctcagctagtgagagcctgattttgaagtcggacgcagcgaaactgcggtccgatagtcacagccgctctctgagtcccaaccacaatacactacagactctcaagtcagatgggcgaatgccttctagctcacgtgcggaaagccccggcccgggctctaggctgagctcccctaaacctaaaacacttcccgctaatcgctcttcccccagtggggcctcctcaccacgcagttcttccccacatgataagaatctgcctcaaaaaagtaccgcgccggtaaaaacaaaactggatcccccacgtgaacgaagtaaaagtgattcctacacgctggacccggatactctcaggaagaagaagatgccgctgacagagccgctgcggggaaggagcacctctccgaaacccaagtctgtgccaaaagatagtactgatagcccggggagcgagaaccgcgccccgtctcctcatgtagtgcaagaaaatctgcattctgaggtggtggaggtctgtacttcatcaaccttgaaaacgaacagcctcaccgactctacctgtgacgacagctctgagtttaagtccgtcgatgaggggagcaacaaagtccatttctccatcgggaaggctcccctaaaagacgagcaggaaatgagagcttctccaaaaatctcccgaaagtgtgctaataggcatacgaggcccaagaaggaaaaaagtagttttctatttaaaggagatggcagcaaaccattagagcctgccaagcaagccatgagcccctctgtcgccgagtgcgcaagggccgtgtttgcttcttttttatggcatgaggggattgtgcatgatgcgatggcttgttcatcattcctgaaattccacccagagctgtctaaagaacacgcacctattcggagttctctgaactcacagcagcctaccgaggaaaaggagacaaaacttaagaaccggcactcgctagagatcagcagtgccctgaatatgttcaacattgctccgcacgggccagatatctccaagatgggctccattaacaagaataaagttctgagtatgctcaaggagccccccctgcacgaaaaatgcgaggacggcaaaaccgagaccacattcgaaatgagcatgcacaatactatgaagtccaaatcacccctacctctgacactccagcatctagtcgcattctgggaggatattagcctcgctactatcaaagctgcctcgcagaatatgatctttccatctccaggctcctgcgccgtgcttaaaaaaaaggagtgcgaaaaggagaacaagaagtccaaaaaggagaagaagaaaaaagagaaggcagaagtgcgcccccgcggaaatttattcggcgagatggcgcagctggccgtgggcggcccagagaaggacacaatttgcgagctctgcggtgaatctcatccttatccagttacctaccacatgcggcaggcacaccccgggtgcggccgctatgccgggggccagggctataactcaatcgggcacttctgtggcggctgggctgggaattgtggagatggtgggattggaggctcaacttggtatctcgtttgtgatcggtgccgagaaaaatacctcagagagaaacaggcagccgcccgagagaaagtgaaacaaagtcgccgaaagcccatgcaggtgaagacacccagagcactgcccactatggaggctcaccaggtgatcaaagctaatgccttgtttttgttatccctaagttccgccgcagagccttctatactctgttatcaccctgctaaaccgttccagagccaactgccaagtgtcaaggaagggatttccgaggacctccctgtcaaaatgccatgcttgtaccttcagaccctcgctcggcatcatcatgaaaactttgtgggctatcaggatgacaatctgttccaggatgagatgcgctacctaaggtcaacaagcgtgcctgctccttacataagcgtcacgccggacgcctcaccaaacgttttcgaggaacctgagagcaacatgaagtctatgcccccctcgcttgaaactagccccataaccgataccgacctggccaagcgtaccgtgtttcagcgctcatattccgtggtcgcatccgaatatgataaacagcattccattctgccggcacgcgtgaaagctatccctcggcggcgggtgaattcaggcgacactgaggtgggaagttccctgctgcgacatcctagtccagagttgtcccgtttgatcagcgctcatagcagcctgagtaagggagagaggaattttcagtggcctgttctggctttcgtaatccaacaccacgatctcgagggactggagatcgccatgaaacaggcactgcgcaaaagtgcttgtcgcgtcttcgcaatggaagcattcaactggttgctctgtaacgttattcagactacatccctgcatgatatcctctggcacttcgtcgcctccctgacgcctgcccccgttgagccagaagaggaggaggacgaggaaaataagactagtaaagagaattcggaacaggagaaggacacgcgtgtctgtgaacacccactatccgacatcgtcattgcaggcgaagctgcacatccactgccacatacgtttcacagactcctgcagacaattagcgacctgatgatgagcttaccaagtgggtccagcttgcaacaaatggcgctgaggtgctggagtctgaaattcaaacagagcgatcaccagtttcttcaccaatcaaacgtattccaccacatcaataacatccttagcaaatccgacgacggggactctgaggagagttttagtatctcgattcagagcggcttcgaggctatgagccaggagctgtgcatcgtgatgtgcctcaaagacctgacaagcattgtcgatatcaagacgagtagccgtcccgccatgattggaagcctaacagatggttcaacagagaccttttgggaaagtggcgacgaggacaagaacaagacgaagaacatcaccatcaactgcgtgaagggtattaatgctcggtatgtgtctgttcacgtcgacaatagtcgggacctaggcaataaagttaccagtatgacgttccttacgggcaaggctgtcgaggatctgtgccgaattaaacaggtggacttggactctagacacattggctgggttacatctgagctgcccggtggagacaatcatatcataaaaattgagctaaaaggccccgaaaacaccctacgcgtacgccaggtgaaggttctggggtggaaggatggcgaatctacaaaaatcgcgggccagatatccgccagcgtggcccagcagcgcaactgtgaggccgagacgctgcgcgtcttcagactaattacgtcccaggtgttcggaaagctcatcagtggcgatgctgagccaactcccgagcaggaagaaaaggcgttactgagcagcccagagggggaagagaaagtgtacaatgccaccagcgacgctgaccttaaggaacacatggttggcatcatattctcaagatcgaagctgacaaatctgcagaagcaagtgtgcgcacacatcgtccaggccattcgaatggaagcaacgcgggtgcgggaggaatgggaacatgctatctcatctaaggagaatgctaactcccagcccaacgacgaggacgccagcagcgatgcgtactgcttcgagctcttatcaatggtgcttgcactttccggctctaatgttgggcgtcaatacctcgctcagcagctgaccttgctgcaggacctgttttccctgctgcacaccgctagccccagagttcagcgccaggtcactagtctgctgcggagggtccttccagaggttactccctctagactggctagcatcatcggggtgaagtccctgcctcccgccgatatctccgacatcatacattctacagagaaaggagattggaacaagctggggatcttggatatgttcctgggctgtattgccaaggccctcacagtgcagctgaaggctaaagggacaacaattacaggtacagccgggacaactgtcgggaaaggagttacaacggttacgttaccaatgatctttaattcttcgtatttgaggagaggcgagtctcactggtggatgaaaggttctacccctactcagatctctgagattattatcaaattaattaaggacatggccgctggacacctgagtgaggcttggtcacgagtgaccaagaatgcgatcgcagagacaataatcgcactgactaagatggaagaggagtttaggtccccagttagatgtattgctacgactcgactgtggctggctctcgccagcctgtgtgttctggatcaggatcatgtagatagattaagttctgggaggtggatgggcaaggacggccagcagaaacaaatgcccatgtgcgacaatcacgatgacggtgagaccgccgcgattattctgtgtaatgtatgcggcaatctgtgtaccgactgtgatcgtttcctccatctgcaccgcaggaccaaaacccaccaacgacaggttttcaaggaagaggaagaggccatcaaagtggatctgcacgaagggtgcggacggactaagctgttttggctcatggccttggcagatagcaagaccatgaaggcaatggtggagttcagagagcacactgggaaacccacgacaagttcatccgaagcttgtcgcttctgcggttctcgatccgggacagagctgtctgccgtcggctcagtctgctccgatgctgactgccaggagtacgccaagattgcatgttctaagacacacccatgtggacacccgtgcggcggagtgaagaatgaggaacattgcctgccatgtctgcacggttgtgataaatctgctacctctttgaagcaggatgccgacgatatgtgtatgatctgtttcaccgaggccctcagtgccgccccagcgattcagctggactgttcccacatcttccacctgcagtgttgccggcgggtgctcgaaaatcggtggttgggacccagaatcacctttggttttatttcctgccctatttgtaaaaacaaaatcaaccacatcgtactcaaagatttgctggaccccattaaggagctatacgaggatgtaagacgcaaggctctgatgagactggagtacgaaggcctccacaagtccgaggcaatcacaacacccggagtgcgcttctacaacgacccggccggctacgcaatgaatcgttatgcatactacgtatgttataagtgcagaaaggcttacttcggaggggaagcacgttgcgacgccgaagccggacgaggagatgactacgatcccagagaactcatttgtggtgcatgctctgatgtttctagagcccagatgtgtcctaagcacgggaccgactttctagagtacaaatgcagatactgttgtagcgttgctgtgttcttttgtttcggaactacccatttttgcaatgcatgccacgatgactttcagaggatgacttccatccccaaagaggagttgcctcattgccccgccggacctaaagggaagcaattggagggaactgagtgccccctgcatgtggtccatcctcccactggcgaggaattcgccttggggtgcggtgtgtgcaggaacgcccacaccttctag

SEQ ID NO: 184060 - DNA, 13923 bp, Artificial Sequence
  derived and/or modified sequence
atgccagtgccagatggcagcgtggccgctgcaggcctgggactggggttgccggccgcagattctagaggacactatcagctactgttgtctgggcgcgcgctagccgatcgatacagaagaatatacaccgccgcactcaatgatcgagatcagggaggcggcagcgcagggcacccggctagcagaaacaaaaagatcctgaacaagaaaaagctcaagcgcaaacaaaagtcgaaatctaaggtaaagacccggagcaaaagcgagaacttggagaatactgtgattatacccgacatcaaactgcactccaatcctagcgcatttaatatttattgcaatgttcgccactgcgtcctagaatggcagaaaaaagaaatcagcctggctgcagcttctaagaactctgtacaaagcggcgaatcagactcagatgaggaggaggagtcaaaggaaccacctattaaactgcccaaaatcattgaagtggggctgtgcgaggttttcgagctgataaaagagactagattttcgcaccctagcctgtgcctccggagtcttcaggccctcctgaatgtcctgcaaggtcaacagcctgagggcctgcaaagcgagccccccgaggtcctggagtccctgttccagcttttgctcgagataactgtgagaagcaccggcatgaatgactccaccggtcagtcactaacagcgctgtcctgcgcttgcctgttcagccttgttgcttcgtggggtgaaactggccgcaccctgcaggccatttcagccattctcaccaacaatgggagccacgcttgtcagacaattcaggtgcccaccatccttaatagtttgcagcggagtgttcaggccgtgttggttgggaagatacagatccaggattggttctccaatggaattaaaaaggcagcactgatgcataagtggcccctgaaagagattagcgtggacgaggatgaccaatgccttctgcaaaacgacggattttttctttacctgttatgtaaggacgggctctataagatcggatcaggttacagcgggacagtcaggggacatatttataatagtacctcaagaatccgcaaccgaaaggagaaaaaatcatggctgggatacgctcaaggttacctcctgtaccgtgatgttaacaaccattccatgacagctataagaataagccccgaaactcttgaacaggacggtacagtaatgctgcccgattgccacacagaggggcagaacatcctatttaccgacggtgagtatattaaccaaatcgccgcttctcgggatgatggtttcgtggtgcggatcttcgccactagcacagagcctgtgctgcaacaggaactgcagctcaagctggctcggaaatgtctgcacgcctgcggcatctccttattcgaccttgagaaagacctgcacattatctctaccggatttgacgaggaaagtgccatactgggcgccggacgggaattcgccctgatgaagacggctaatggtaaaatctactataccgggaagtatcagtccctgggcataaagcagggtggacctagtgccggcaaatgggtcgaactgccaataaccaagagtcctaaaattgtccatttctccgtgggtcacgacggcagccacgctctccttgtggctgaggacggctccatctttttcactgggtctgcttctaagggggaagatggggagagcaccaagtccagaaggcagtcgaagccttataaaccaaagaaaatcataaaaatggaaggaaagattgtggtgtatacagcctgtaacaatggcagtagctctgtgatatcaaaggacggggagctatatatgttcgggaaggacgctatatatagtgactcaagcagcttggttactgacctaaaaggccactttgtgactcaggtggccatgggtaaggcacatacctgcgtgttgatgaagaacggagaggtctggacctttggtgtcaacaataaggggcagtgcgggcgggataccggtgcaatgaatcagggcggcaaaggatttggagtggagaatatggccacggccatggacgaagatttggaagaggaacttgacgaaaaggatgagaagagtatgatgtgcccgccgggaatgcataaatggaagctggagcagtgtatggtatgtacagtctgtggtgattgcaccggctatggggcctcatgtgtgtcgagcggaagaccagatcgtgtacctggggggatctgtggatgcggaagcggggagtctggatgtgccgtatgcgggtgctgtaaggcatgcgcacgcgagctggatggccaggaagcccggcagagggggattttggacgcagtgaaggaaatgatccctctggacctgctgttggccgtgcccgtgcccggagtgaatatcgaagagcatctgcaactccggcaggaggaaaagcgccaacgtgttatcaggcgccatcggctggaggaaggccgcggccctctagtcttcgccggcccaatctttatgaaccaccgggagcaggccctggcacgcctgcggtcacatcctgctcaactgaagcataagcgagacaagcacaaagacggtagtggagagagaggcgagaaggacgcgagtaagataacaacctatccgcctgggtccgtgcgttttgattgcgagctccgcgccgtgcaggtctcatgcggtttccaccatagcgtggtcctgatggaaaatggcgacgtgtataccttcggctatgggcagcacggccagttggggcatggagatgtgaattcccgaggctgccccacactcgttcaggctctcccaggcccctcaacacaggttacggccggatcgaaccatacagccgtactgcttatggacggtcaagtgttcactttcgggagcttttctaagggccaattgggccggcccatcctggacgtgccctactggaatgctaagcctgctccaatgcccaatataggatccaaatatggccggaaagcgacttggatcggcgctagcggcgaccagacctttcttagaattgatgaagccttgattaactcccacgtactcgcgactagtgagatcttcgccagcaagcacatcatcggattagtccctgcctcaattagcgaaccccctccttttaagtgtcttctgatcaataaggtggatgggagctgtaagacttttaacgactctgaacaggaggatctccagggattcggcgtgtgcctggacccagtgtatgatgtgatctggagatttcgccctaatacccgagaactttggtgttataatgcagttgtggctgacgctcggctaccaagcgcagctgacatgcagtctcgttgcagcatcctgagtcctgagttagcacttccgaccggcagtcgagccctaacaacaagatctcacgcagctctccacatccttggctgtttggacacactggctgctatgcaggatcttaaaatgggtgttgctagcacggaagaggagactcaagccgtcatgaaagtatacagcaaagaagactattctgtcgtgaacaggttcgagtcacacggtgggggttggggctactccgcacattccgtggaggcaatccggttcagcgccgatacagacattctcttggggggactgggtctgttcggtggcagaggagagtataccgctaagataaaactcttcgagcttggacctgatggcggtgaccacgaaacagatggcgacctgctcgcggaaacagatgtccttgcatacgactgcgccgcacgggagaaatatgcaatgatgttcgatgaacccgtgttgctgcaggcagggtggtggtatgtggcatgggcgagggtcagtggtccgtcctctgattgcggttcccacggtcaggcaagcatcacaaccgacgacggagtcgtcttccagtttaagagcagtaaaaagagtaataacgggaccgacgtcaacgcaggccagatcccccaactcctgtaccgtctgccaacaagtgacgggagtgcctcaaagggcaagcaacagacttcggaacctgtgcatattttaaagaggagttttgctcggactgtgtctgtggagtgttttgaaagcctcttatctatcctgcactggtcctggacaaccctagtgctgggtgtggaggaattgagaggactgaaaggcttccagttcacggccacgcttcttgatctggagcgcctgcgcttcgtgggcacgtgttgcttacgcctgctcagggtctatacctgcgaaatctaccccgtttctgctacaggcaaggctgtggttgaggagaccagcaaattggccgagtgcatcgggaaaaccagaactctcctgaggaaaatcttgagcgaaggagtggatcactgcatggtgaagctggacaatgatccgcaggggtatctgagtcagccacttagcctgctggaagccgtgctgcaggaatgccataacactttcactgcttgtttccatagcttttaccccactccagcgcttcaatgggcttgtctgtgtgacctgctaaactgtcttgaccaggacattcaggaggctaacttcaaaacatccagctctagactgttggctgctgtgatgtccgccctctgtcatacatccgtaaagctgacatccattttcccaatcgcttacgacggcgaggttttgctgaggtccattgtgaagcaggtgtcaactgaaaacgatagcactttggtgcatcgcttccccctgctggtcgcccacatggaaaaactgtctcagtcagaagagaatatcagtggcatgacctcattcagagaagtgctggagaaaatgctggtgatcgtcgttctgcctgtgaggaatagtctgagaagagaaaatgaactttttagcagccaccttgtgagcaacacatgtgggttgctggcatcgattgtgagtgaactcacagcaagcgcgctggggagcgaagtggatggtcttaatagccttcacagtgttaaagcatccgccaatcgattcactaagacatcccagggacgaagttggaataccggcaatgggtcaccagacgcgatttgcttctccgtggacaaaccagggatagtcgttgtcgggttctccgtctacggaggtgggggcatacacgagtacgaactcgaggtgctcgtcgatgattcggagcacgccggcgattccacacattcccacaggtggacgtcacttgaactggtcaagggtacttacactaccgacgactcaccatctgatattgctgaaataagactcgacaaagtggttccccttaaggaaaatgtcaagtacgccgttcgcttgagaaactacggcagcaggactgcgaatggagacggcggcatgaccacggttcagtgccccgatggggttacgttcactttttccacatgcagcctttccagcaacggaaccaaccagactcgtggacaaataccacagattctatactaccgttcagagttcgatggagacctccagagccaactgttatccaaggcgaatgaagaagataaaaactgctctagggcactgagcgtcgtgagcactgttgtgagggcatcaaaagatctgctacatagggctttagctgtcgatgcagatgatataccagaacttctgtctagttcgtctctcttctcgatgcttctaccgctcataattgcatatatcggcccagtcgccgcagctattccgaaagtggccgtggaggtgtttgggttggttcagcagctgctcccaagtgtcgcaatcctcaatcagaaatatgctcctcctgccttcaacccaaaccagtcaactgacagtaccaccggaaaccagccagaacaggggctctctgcgtgcactacctcctcccattatgcagtgatcgagtccgagcacccttataagccagcgtgcgttatgcattacaaagtgaccttccctgaatgtgtacggtggatgacaattgagttcgacccccaatgcggtactgctcagtccgaggatgtcttgagattgctgatccccgtgcgtaccgtacagaactccggctacggaccaaaattaacttccgtacatgagaacctgaatagctggatagaactgaagaaatttagcggaagcagcggctggccaaccatggtgctggtcctgccgggaaacgaggctctgtttagtctggagacagccagcgattatgtcaaggatgacaaagcctctttctacgggtttaaatgcttcgccattggttacgagtttagccctgggcctgatgagggcgtgattcagttggagaaagagctggccaatcttggaggggtctgcgccgccgcgctgatgaagaaagatctggcgcttcccattgggaacgaactcgaggaagatctcgagattctggaagaagcagccctccaggtctgcaaaacacattcaggtatccttggaaagggcctcgcccttagccacagccccactattctggaggcgctcgagggcaacttacccctccagatccagtccaatgagcagtcatttctggacgatttcatcgcatgtgttcccggcagttcgggcggccgactcgcccggtggctccagccagactcctacgcggatccccaaaagacctccctgattctgaataaggatgatatacgatgcggctggcccactaccatcactgtgcagactaaggatcagtatggagatgtcgtgcacgtccccaatatgaaagtggaggtcaaagccgtgcctgtaagtcagaagaaaatgtctttgcagcaagaccaagccaagaaaccacaacgcatccctggctcacccgcagtgacagccgcaagttctaatactgatatgacatacggcggcctggcctcccctaagctagatgtgagctacgagccaatgatagtcaaagaggctaggtatatcgccatcaccatgatgaaggtctacgagaactactccttcgaagaactgcgcttcgcaagcccaacacccaagcgaccctccgagaacatgttaattcgagtaaacaacgacggcacttattgcgccaactggactcccggcgccattgggttatatacccttcacgtaaccattgatggaattgaaatcgatgcggggctcgaagttaaagtgaaagatcctcctaaggggatgattccacctggaacacagctggtgaaaccgaaatctgagccgcagcccaataaagtacgcaaatttgtggctaaggactccgccggactgagaattaggagccatccaagcctgcaatcagaacagattggaatcgtgaaggttaacggcaccatcacatttatcgatgagattcacaacgacgacggggtgtggttaaggctcaacgacgagacaattaaaaagtacgttccgaatatgaatggatatacagaggcctggtgtctttctttcaaccagcatctcggcaagtccctccttgttcctgtggacgagtccaagactaacacggacgacttcttcaaggacattaactcctgctgcccacaggaggctactatgcaggagcaggacatgcctttcctgcgagggggacctgggatgtataaagtggtcaagacgggtccttccggccacaacattcggagctgccccaatctccgggggatccccatcgggatgctcgtgctgggtaacaaggttaaggcagtgggcgaggttacaaattctgaggggacctgggtccagctggaccaaaacagtatggttgaattctgcgagagtgacgaaggggaagcctggagcctcgcgcgcgataggggtggtaaccaataccttcgccacgaggatgagcaggctctcttagatcagaactctcagactcctcccccctcccccttctccgtgcaggccttcaataaaggcgcctcctgctctgcccagggatttgactacgggttagggaacagcaagggcgaccgcgggaacatctccacctcttctaaacctgcttcaacctcgggtaaatctgaattaagcagcaagcactctaggtcactcaaacctgacgggaggatgtcaagaacgaccgccgaccagaaaaaacctagaggcacagagagcctgagcgcatccgaatcgctcattctaaagtctgacgcagctaagcttcgtagcgactctcattctcggagcctgagccctaatcataatacactgcagaccctgaaatccgacggccgcatgccttcctcctcccgcgctgaatcccccggaccaggtagccggctgtccagccccaagcccaaaaccctcccggccaaccgttcctccccgtccggcgccagcagcccaaggtcatcttccccccacgacaaaaatctgcctcagaagtcgaccgctcccgttaagacgaagctggatccaccccgcgaacgctccaagtcagattcctacacccttgaccccgataccctacggaaaaaaaagatgccgctgacagaacccctgcgcgggcgaagcacctctccaaagcctaagtccgttcctaaagattctaccgactcgcccgggtccgagaaccgagcgccctcaccacatgtggtgcaggagaacctccatagtgaagtggttgaagtttgtacctcttccaccctgaagacaaatagcttaaccgatagcacatgcgacgattcttcagagtttaagtctgtcgacgaaggctccaacaaagtgcacttctcaatcgggaaagctcctctcaaggacgaacaagagatgcgggctagtcctaaaatctcaagaaagtgtgctaacaggcatactaggcctaaaaaggaaaagtcaagtttcctgtttaaaggcgatggctctaaacccctcgaaccggctaagcaggccatgtccccaagcgtggccgagtgcgccagagcagtgttcgcgtcatttctgtggcacgaagggatcgtgcacgacgcaatggcttgctccagctttcttaagttccacccagagctgtccaaagagcatgcgcctattcggtccagtttgaattcccagcaaccaacagaggagaaagagaccaaactcaagaatagacattcgttagaaatttcatctgctttgaacatgtttaacattgcgccccatggcccggatatttctaaaatggggtccatcaataaaaataaagtcttgagcatgctgaaagaacccccactacacgaaaaatgtgaggatgggaagacggagacaacctttgaaatgagtatgcataacaccatgaagtccaagtccccactcccattaacactgcaacacctcgtggccttctgggaagacataagtcttgctacgataaaagccgcaagccaaaatatgatcttcccatcacctggttcatgcgcagtactgaagaagaaggagtgcgaaaaggagaataaaaaatcaaaaaaggagaaaaagaagaaagaaaaggcagaagtgcgccccagagggaatctcttcggcgaaatggcccagctagcggttggaggccccgagaaagacaccatctgtgaactatgcggcgagtcccacccatacccagtgacctatcatatgaggcaagcgcaccctggatgcgggaggtacgcgggtggacagggctataactccatcggtcatttttgtggcggctgggcaggcaattgcggcgacggaggaattggcggttcaacgtggtacctcgtttgcgatcgatgtagggaaaaatacctcagagaaaaacaggccgctgctagagagaaggtgaaacaatcccgccggaaaccaatgcaggttaaaactcctcgcgctctgcccacaatggaggcccatcaggttataaaggccaacgctctctttttgttgagtctgagcagcgcagcagaaccttcaatcctgtgctaccaccccgccaagccgtttcaaagccagctgcctagtgtcaaggagggaatttctgaggacctgccagttaagatgccttgtctgtatctccagaccctggcgcgccaccaccatgaaaactttgtgggctatcaagacgacaacctgttccaggatgagatgcgttaccttcgtagtaccagtgtccccgctccttatatcagtgtcacccccgatgcgagcccaaatgtgttcgaggaaccagagtcgaatatgaagagtatgcctccctctcttgagacctctccaatcacagacaccgatctcgccaagagaacagtttttcagagaagctattctgtggtcgcctctgagtacgacaagcagcactccatcctccccgctcgcgtgaaggcaatcccacggaggcgcgtaaactctggtgacactgaagtgggttcatccctgctccggcacccctccccggagttaagcaggctcatcagcgcccactcttcactctccaagggcgaacgcaacttccaatggcccgtattagcgttcgtcatacagcaccatgatcttgaaggcttagagattgccatgaaacaggcactaaggaagtcagcctgcagagtgttcgccatggaagcgtttaattggctgctgtgcaatgtcatacaaacaaccagcctgcatgatatcctgtggcattttgtggcttctctaacacctgcgcccgttgaaccagaggaggaagaggatgaggagaacaagacctcaaaggaaaatagtgaacaggaaaaggatacaagggtgtgcgagcaccccctttctgatattgtcatcgctggagaagcggctcaccccctcccacatacattccatcggctgttacagaccatctccgacctgatgatgagtttaccttctggcagcagcctccagcagatggctctgagatgttggtcactcaagttcaagcagtccgatcaccaatttctgcatcaatctaatgtctttcaccatatcaacaatatactcagcaaatctgatgacggagactcagaagagtccttctctattagtatccagagtggatttgaagcaatgagccaggaactatgtatcgtcatgtgtttaaaggatttgacgtcgattgtagatataaaaaccagttccagacccgcaatgatcggatctctcactgacgggagtaccgaaacgttctgggagtcaggcgatgaggataaaaataaaaccaagaatatcaccatcaactgcgtcaaaggcatcaatgccagatatgttagcgtccacgtagataattctagggacttaggcaacaaggtcacatcgatgaccttcttgactggcaaagccgtggaagacctgtgtcgtattaagcaagtggatcttgatagtcgacacatcggatgggtcaccagcgaactgcctggtggggacaaccacatcattaagatcgagctgaaaggccccgagaatactctccgagtacgccaagtgaaggtgctgggctggaaggatggagaatctaccaagatcgccggtcagatatccgcatctgttgcccagcagcgcaactgtgaggctgaaaccctgagagtgtttagacttattacatcccaggtttttggtaagcttatatccggtgacgctgagcctacaccggagcaggaggagaaggcgctcttgtcctcgccagagggcgaggaaaaagtgtacaatgccacttcagacgccgatctcaaagaacacatggtcggaatcattttcagtcgttcgaaactgaccaacttgcagaagcaggtgtgtgcccacatagttcaggctattagaatggaagccacaagggtgcgcgaggagtgggaacacgccataagttctaaggaaaatgcgaatagccagccgaacgacgaggatgctagtagtgatgcctactgcttcgaactgctttcaatggtcctggctctgtcaggtagcaacgttggaaggcagtatctggcccagcaactgaccttgctgcaagatctgtttagcctcctgcacaccgcctcccccagggtccaacgccaggttacctcacttctgagaagagttctaccggaggtgacacctagccgactagcctccattataggcgtcaaatcactgccccccgccgatatcagcgacatcattcattcaactgagaaaggggattggaacaagctggggattctcgatatgtttttagggtgtattgctaaggcccttacagtgcaacttaaagcaaagggcaccactatcactggcactgccgggacaacagtcgggaaaggtgtcacgacagttacactgcccatgatattcaacagcagctatctgagacgcggcgaatctcactggtggatgaaagggagcacacctactcaaattagcgaaatcatcatcaagctgatcaaggacatggcggccggccacctttccgaggcttggtcacgcgtgacaaaaaatgccatcgctgagactatcatcgcccttacaaaaatggaggaggagttccggagccctgtccgttgtatcgccacaactagactgtggctggccctcgctagcctctgtgtgttagaccaggaccatgtggaccggctttcctctggacgttggatgggcaaggacggacagcaaaaacagatgcctatgtgtgacaaccatgacgacggcgagacagcagcaatcattttatgtaacgtgtgtggcaatttatgtaccgattgtgatagattcctgcatctccacaggcggaccaagacccaccagagacaggtcttcaaagaggaagaagaagctattaaggttgacctgcacgagggttgcggccgaaccaagctgttctggctgatggctttggccgactcaaagaccatgaaagcaatggtcgaattccgggagcatactgggaagcctaccacttccagcagcgaagcatgccgattttgcggaagcagatcaggcacagaactctcagccgtggggagtgtgtgctcggatgctgactgtcaggaatacgccaagatcgcctgtagcaaaacgcacccttgtggacatccctgtggaggggtgaagaacgaggaacactgtttgccctgcctccatgggtgtgacaaatccgcgacatcacttaagcaggacgcggatgatatgtgtatgatttgctttactgaggccctgtccgcagctcctgccattcagctggactgctcccacatattccacttgcagtgttgccggcgcgtgctcgagaacaggtggctcggtccccgcattacttttgggtttatcagttgccctatttgcaagaacaagatcaaccacatcgtactgaaggacctcctcgatcccatcaaggaactgtatgaggatgtacgccgcaaagcccttatgcgacttgagtatgagggcctgcataagagcgaagcaattacgacacccggggtcagattttataatgacccagctggctatgcaatgaatcggtatgcttactacgtgtgctacaaatgcagaaaagcctacttcggaggcgaggcccgttgtgatgcagaggcgggccgcggggatgattatgatccccgagaattgatctgcggcgcctgtagtgacgtcagccgcgctcagatgtgtcccaagcacggaacggacttcctggaatacaaatgccgctactgctgcagtgttgcagtgtttttctgttttggcaccactcacttttgcaacgcttgtcacgatgacttccagagaatgacctctatacccaaggaggaactgccccactgtcctgccggaccaaaaggcaagcaactcgaggggacagagtgtcccttacacgttgtccacccgccaacaggggaagagttcgcacttgggtgcggggtctgtcggaatgctcataccttttag

SEQ ID NO: 184061 - DNA, 13923 bp, Artificial Sequence
  derived and/or modified sequence
atgcctgtgcctgatggctctgtggccgctgctggcctgggcctgggcctgcctgctgctgacagccggggccactaccagctgctgctgagcggccgggccctggccgaccgctaccgccgcatctacacagctgccctgaatgaccgggaccagggcggcggcagcgctggccacccagccagcaggaacaagaagatcctgaacaagaagaagctgaagaggaagcagaagagcaagagcaaggtgaagaccaggagcaagtctgagaacctggagaacacagtcatcatcccagacatcaagctgcacagcaaccccagcgccttcaacatctactgcaatgtgcgccactgtgtgctggagtggcagaagaaggagatcagcctggccgccgccagcaagaacagcgtgcagagcggggagagtgacagtgatgaggaggaggagagcaaggagccccccatcaagctgcccaagatcatcgaggtgggcctgtgtgaggtgtttgagctgatcaaggagacccgcttcagccaccccagcctgtgcctgcggagcctgcaggccctgctgaatgtgctgcagggccagcagcctgagggcctgcagagcgagcccccagaggtgctggagagcctcttccagctgctgctggagatcaccgtgcgcagcacaggcatgaatgacagcacaggccagagcctgacagccctgagctgtgcctgcctcttcagcctggtggcctcctggggcgagaccggccgcaccctgcaggccatcagcgccatcctgaccaacaacggcagccacgcctgccagaccatccaggtgcccaccatcctgaacagcctgcagaggtctgtgcaggccgtgctggtgggcaagatccagatccaggactggttcagcaatggcatcaagaaggccgccctgatgcacaagtggcccctgaaggagatctctgtggatgaagatgaccagtgcctgctgcagaatgatggcttcttcctgtacctgctgtgcaaggatggcctgtacaagattggcagcggctacagcggcaccgtgcggggccacatctacaacagcaccagccgcatccggaacaggaaggagaagaagtcctggctgggctacgcccagggctacctgctgtacagagatgtgaacaaccacagcatgacagccatccgcatcagccctgagaccctggagcaggacggcaccgtgatgctgcctgactgccacacagagggccagaacatcctcttcacagatggagagtacatcaaccagattgctgccagcagagatgatggctttgtggtgcgcatctttgccaccagcacagagcctgtgctgcagcaggagctgcagctgaagctggccaggaagtgcctgcacgcctgtggcatcagcctgtttgacctggagaaggacctgcacatcatcagcactggatttgatgaggagagcgccatcctgggcgccggccgggagtttgccctgatgaagacagccaacgggaagatctactacacaggcaagtaccagagcctgggcatcaagcagggcggccccagcgctgggaagtgggtggagctgcccatcaccaagagccccaagatcgtgcacttctctgtgggccatgatggcagccacgccctgctggtggctgaagatggcagcatcttcttcaccggcagcgccagcaaaggagaagatggagagagcaccaagagccggcggcagagcaagccctacaagcccaagaagatcatcaagatggagggcaagatcgtggtgtacacagcctgcaacaacggcagcagcagcgtcatcagcaaggatggagagctgtacatgtttgggaaggatgccatctacagcgacagcagcagcctggtgacagacctgaagggccactttgtgacccaggtggccatgggcaaggcccacacctgtgtgctgatgaagaatggagaggtgtggacctttggagtgaacaacaagggccagtgtggccgggacacaggagccatgaaccagggcggcaaaggatttggagtggagaacatggccacagccatggatgaggacctggaggaggagctggatgagaaggatgagaagtccatgatgtgccccccaggcatgcacaagtggaagctggagcagtgcatggtgtgcaccgtgtgtggggactgcaccggctacggggccagctgtgtgagcagcggccgcccagacagagtgcctgggggcatctgtggctgcggcagcggggagagcggctgtgctgtgtgtggctgctgcaaggcctgtgcccgggagctggatggccaggaggcccggcagaggggcatcctggatgctgtgaaggagatgatccccctggacctgctgctggccgtgcctgtgcctggggtgaacatcgaggagcacctgcagctgcggcaggaggagaagaggcagagggtcatccgccgccaccggctggaggagggccggggccccctggtgtttgctggccccatcttcatgaaccaccgggagcaggccctggcccggctgcggagccacccagcccagctgaagcacaagagggacaagcacaaggatggcagcggggagcggggggagaaggatgccagcaagatcaccacctacccacctggctctgtgcgctttgactgtgagctgcgggctgtgcaggtgtcctgtggcttccaccacagcgtggtgctgatggagaatggagatgtgtacaccttcggctacggccagcacggccagctgggccatggagatgtgaacagccggggctgccccaccctggtgcaggccctgcccggccccagcacccaggtgacagctggcagcaaccacacagctgtgctgctgatggatggccaggtgttcaccttcggcagcttcagcaagggccagctgggccggcccatcctggatgtgccctactggaatgccaagccagcccccatgcccaacatcggcagcaaatatggcaggaaggccacctggattggagccagcggggaccagaccttcctgagaattgatgaggccctgatcaacagccacgtgctggccaccagcgagatctttgccagcaagcacatcatcggcctggtgcctgccagcatcagcgagcccccacccttcaagtgcctgctgatcaacaaggtggatggcagctgcaagaccttcaatgacagcgagcaggaggacctgcagggcttcggcgtgtgcctggaccctgtgtatgatgtgatctggaggttccggcccaacacccgggagctgtggtgctacaatgctgtggtggctgatgcccggctgcccagcgctgctgacatgcagagccgctgcagcatcctgagccctgagctggccctgcccaccggcagccgggccctgaccaccaggagccatgctgccctgcacatcctgggctgcctggacaccctggccgccatgcaggacctgaagatgggcgtggccagcacagaggaggagacccaggccgtgatgaaggtgtacagcaaagaagactacagcgtggtgaacagatttgagagccacggcggcggctggggctacagcgcccacagcgtggaggccatccgcttctctgctgacacagacatcctgctgggcggcctgggcctgtttggaggccgcggggagtacacagccaagatcaagctgtttgagctgggcccagatggaggagaccacgagacagatggagacctgctggccgagacagatgtgctggcctatgactgtgccgcccgggagaagtatgccatgatgtttgatgagcctgtgctgctgcaggccggctggtggtacgtggcctgggcccgggtgtctggccccagcagtgactgtggcagccacggccaggccagcatcaccacagatgatggagtggtgttccagttcaagagcagcaagaagagcaacaacggcacagatgtgaatgccggccagatcccccagctgctgtaccgcctgcccaccagtgatggcagcgccagcaagggcaagcagcagaccagcgagcctgtgcacatcctgaagaggagctttgccaggacagtgtctgtggagtgctttgagagcctgctgagcatcctgcactggagctggaccaccctggtgctgggcgtggaggagctgcggggcctgaagggcttccagttcaccgccaccctgctggacctggagcggctgcgctttgtgggcacctgctgcctgcggctgctgcgggtgtacacctgtgagatctaccctgtgtctgccaccgggaaggctgtggtggaggagaccagcaagctggccgagtgcatcggcaagaccaggaccctgctgaggaagatcctgtctgagggcgtggaccactgcatggtgaagctggacaatgacccccagggctacctgagccagcccctgagcctgctggaggccgtgctgcaggagtgccacaacaccttcaccgcctgcttccacagcttctaccccaccccagccctgcagtgggcctgcctgtgtgacctgctgaactgcctggaccaggacatccaggaggccaacttcaagaccagcagcagccggctgctggccgctgtgatgtctgccctgtgccacacctctgtgaagctgaccagcatcttccccatcgcctatgatggagaggtgctgctgcggagcatcgtgaagcaggtgtccacagaaaatgacagcaccctggtgcaccgcttccccctgctggtggcccacatggagaagctgagccagagcgaggagaacatcagcggcatgaccagcttccgggaggtgctggagaagatgctggtgattgtggtgctgcctgtgaggaacagcctgcggcgggagaatgaactcttcagcagccacctggtgagcaacacctgtggcctgctggccagcatcgtgtctgagctgacagccagcgccctgggcagcgaggtggatggcctgaacagcctgcacagcgtgaaggccagcgccaaccgcttcaccaagaccagccagggccgctcctggaacacaggaaatggcagcccagatgccatctgcttctctgtggacaagccaggcatcgtggtggtgggcttctctgtgtatggaggcggcggcatccacgagtatgagctggaggtgctggtggatgattctgaacatgctggggacagcacccacagccaccgctggaccagcctggagctggtgaagggcacctacaccacagatgacagccccagcgacattgctgagatccggctggacaaggtggtgcccctgaaggaaaatgtgaagtatgctgtgcggctgaggaactacggcagcaggacagccaatggagatggcggcatgaccaccgtgcagtgcccagatggagtgaccttcaccttcagcacctgcagcctgagcagcaatggcaccaaccagacccggggccagatcccccagatcctgtactacagaagtgaatttgatggagacctgcagagccagctgctgagcaaggccaatgaggaggacaagaactgcagccgggccctgtctgtggtgtccacagtggtgcgggccagcaaggacctgctgcaccgggccctggccgtggatgctgatgacatccctgagctgctgagcagcagcagcctcttctccatgctgctgcccctcatcatcgcctacatcggccctgtggccgccgccatccccaaggtggccgtggaggtgtttggcctggtgcagcagctgctgcccagcgtggccatcctgaaccagaagtatgcccccccagccttcaaccccaaccagagcacagacagcaccactggaaaccagcctgagcagggcctgagcgcctgcaccaccagcagccactatgctgtgattgaaagtgagcacccctacaagccagcctgtgtgatgcactacaaggtgaccttcccagaatgtgtgcgctggatgaccatcgagtttgacccccagtgtggcacagcccagagtgaagatgtgctgcggctgctgatccctgtgaggacagtgcagaacagcggctacggccccaagctgacctctgtgcatgagaacctgaacagctggattgagctgaagaagttcagcggcagcagcggctggcccaccatggtgctggtgctgcctggaaatgaggccctcttcagcctggagacagccagtgactatgtgaaggatgacaaggccagcttctacggcttcaagtgctttgccatcggctatgagttcagccctggcccagatgagggcgtcatccagctggagaaggagctggccaacctgggcggcgtgtgtgccgccgccctgatgaagaaggacctggccctgcccatcggaaatgagctggaggaggacctggagatcctggaggaggccgccctgcaggtgtgcaagacccacagcggcatcctgggcaagggcctggccctgagccacagccccaccatcctggaggccctggagggcaacctgcccctgcagatccagagcaatgagcagagcttcctggatgacttcatcgcctgtgtgcccggcagcagcggcggccgcctggcccgctggctgcagcctgacagctatgctgacccccagaagaccagcctcatcctgaacaaggatgacatccgctgtggctggcccaccaccatcaccgtgcagaccaaggaccagtatggagatgtggtgcacgtgcccaacatgaaggtggaggtgaaggctgtgcctgtgtcccagaagaagatgagcctgcagcaggaccaggccaagaagccccagagaattcctggcagccctgctgtgacagctgccagcagcaacacagacatgacctacggcggcctggccagccccaagctggatgtgtcctatgagcccatgattgtgaaggaggcccgctacatcgccatcaccatgatgaaggtgtatgagaactacagctttgaggagctgcgctttgccagccccacccccaagaggcccagcgagaacatgctgatccgggtgaacaatgatggcacctactgtgccaactggacccctggggccatcggcctgtacaccctgcacgtgaccattgatggcatcgagattgatgctggcctggaggtgaaggtgaaggacccccccaagggcatgatccccccaggcacccagctggtgaagcccaagtctgagccccagcccaacaaggtgaggaagtttgtggccaaggacagcgctggcctgcgcatccgcagccaccccagcctgcagagcgagcagatcggcatcgtgaaggtgaatggcaccatcaccttcattgatgagatccacaatgatgatggagtgtggctgcggctgaatgatgagaccatcaagaagtatgtgcccaacatgaatggctacacagaggcctggtgcctgtccttcaaccagcacctgggcaagagcctgctggtgcctgtggatgagagcaagaccaacacagatgacttcttcaaggacatcaacagctgctgcccccaggaggccaccatgcaggagcaggacatgcccttcctgcggggcggccctggcatgtacaaggtggtgaagacaggccccagcggccacaacatccgcagctgccccaacctgcggggcatccccatcggcatgctggtgctgggcaacaaggtgaaggctgtgggggaggtgaccaacagcgagggcacctgggtgcagctggaccagaacagcatggtggagttctgtgagagtgatgaaggagaggcctggagcctggcccgggacagaggaggcaaccagtacctgcggcatgaagatgagcaggccctgctggaccagaacagccagaccccaccacccagccccttctctgtgcaggccttcaacaagggggccagctgcagcgcccagggctttgattatggcctgggcaacagcaaaggagaccggggcaacatcagcaccagcagcaagccagccagcaccagcggcaagtctgagctgagcagcaagcacagccgcagcctgaagccagatggccgcatgagcaggaccacagctgaccagaagaagccccggggcacagagagcctgagcgccagcgagagcctcatcctgaagagtgatgctgccaagctgcggagtgacagccacagccgcagcctgagccccaaccacaacaccctgcagaccctgaagagtgatggccgcatgcccagcagcagcagagctgagagccctggccctggcagccggctgagcagccccaagcccaagaccctgcctgccaacagaagcagccccagcggggccagcagccccaggagcagcagcccccatgacaagaacctgccccagaagagcacagcccctgtgaagaccaagctggaccccccccgggagaggagcaagagtgacagctacaccctggaccctgacaccctgaggaagaagaagatgcccctgacagagcccctgcggggccgcagcaccagccccaagcccaagtctgtgcccaaggacagcacagacagccctggctctgaaaatagagcccccagcccccacgtggtgcaggagaacctgcacagcgaggtggtggaggtgtgcaccagcagcaccctgaagaccaacagcctgacagacagcacctgtgatgacagcagcgagttcaagtctgtggatgagggcagcaacaaggtgcacttcagcatcggcaaggcccccctgaaggatgagcaggagatgagggccagccccaagatcagcaggaaatgtgccaacagacacacccggcccaagaaggagaagagcagcttcctgttcaagggagatggcagcaagcccctggagcccgccaagcaggccatgagccccagcgtggctgaatgtgcccgggctgtgtttgccagcttcctgtggcatgagggcatcgtgcatgatgccatggcctgcagcagcttcctgaagttccaccctgagctgagcaaggagcacgcccccatccgcagcagcctgaacagccagcagcccacagaggagaaggagaccaagctgaagaacagacacagcctggagatcagcagcgccctgaacatgttcaacatcgcccctcatggccctgacatcagcaagatgggcagcatcaacaagaacaaggtgctgtccatgctgaaggagccccccctgcacgagaagtgtgaagatggcaagacagagaccacctttgagatgtccatgcacaacaccatgaagagcaagagccccctgcccctgaccctgcagcacctggtggccttctgggaggacatcagcctggccaccatcaaggccgccagccagaacatgatcttccccagccctggcagctgtgctgtgctgaagaagaaggaatgtgagaaggagaacaagaagagcaagaaggagaagaagaagaaggagaaggccgaggtgcggccccggggcaacctgtttggagagatggcccagctggccgtgggcggccctgagaaggacaccatctgtgagctgtgtggggagagccacccctaccctgtgacctaccacatgaggcaggcccaccctggctgcggccgctatgccggcggccagggctacaacagcatcggccacttctgtggcggctgggccggcaactgtggagatggcggcattggaggcagcacctggtacctggtgtgtgaccgctgccgggagaagtacctgcgggagaagcaggccgccgcccgggagaaggtgaagcagagcaggaggaagcccatgcaggtgaagaccccccgggccctgcccaccatggaggcccaccaggtgatcaaggccaatgccctcttcctgctgagcctgagcagcgctgctgagcccagcatcctgtgctaccacccagccaagcccttccagagccagctgcccagcgtgaaggagggcatcagcgaggacctgcctgtgaagatgccctgcctgtacctgcagaccctggcccggcaccaccacgagaactttgtgggctaccaggatgacaacctcttccaggatgagatgagatacctgcggagcacctctgtgcctgccccctacatctctgtgaccccagatgccagccccaacgtgtttgaggagcctgagagcaacatgaagtccatgccacccagcctggagaccagccccatcacagacacagacctggccaagaggacagtgttccagaggagctacagcgtggtggcctctgaatatgacaagcagcacagcatcctgcctgcccgggtgaaggccatccccaggagaagagtgaacagcggggacacagaggtgggcagcagcctgctgcggcaccccagccctgagctgagccgcctcatcagcgcccacagcagcctgagcaagggggagaggaacttccagtggcctgtgctggccttcgtcatccagcaccacgacctggagggcctggagatcgccatgaagcaggccctgaggaagagcgcctgccgggtgtttgccatggaggccttcaactggctgctgtgcaacgtcatccagaccaccagcctgcatgacatcctgtggcactttgtggccagcctgaccccagcccctgtggagcctgaggaggaggaggatgaggagaacaagaccagcaaagaaaattctgagcaggagaaggacaccagggtgtgtgagcaccccctgagtgacatcgtgattgctggggaggccgcccaccccctgccccacaccttccaccggctgctgcagaccatcagtgacctgatgatgagcctgcccagcggcagcagcctgcagcagatggccctgcgctgctggagcctgaagttcaagcagagcgaccaccagttcctgcaccagagcaatgtgttccaccacatcaacaacatcctgagcaagagtgatgatggagacagcgaggagagcttcagcatcagcatccagagcggctttgaggccatgagccaggagctgtgcatcgtgatgtgcctgaaggacctgaccagcatcgtggacatcaagaccagcagcaggcctgccatgattggcagcctgacagatggcagcacagagaccttctgggagagcggagatgaggacaagaacaagaccaagaacatcaccatcaactgtgtgaagggcatcaatgcccgctacgtgtctgtgcacgtggacaacagccgggacctgggcaacaaggtgacctccatgaccttcctgaccgggaaggctgtggaggacctgtgccgcatcaagcaggtggacctggacagccgccacatcggctgggtgaccagcgagctgcccggcggggacaaccacatcatcaagattgagctgaagggccctgagaacaccctgcgggtgcggcaggtgaaggtgctgggctggaaggatggagagagcaccaagattgctggccagatcagcgcctctgtggcccagcagaggaactgtgaggccgagaccctgcgggtcttccgcctcatcaccagccaggtgtttgggaagctgatctctggagatgctgagcccaccccagagcaggaggagaaggccctgctgagcagccctgagggggaggagaaggtgtacaatgccaccagtgatgctgacctgaaggagcacatggtgggcatcatcttcagccgcagcaagctgaccaacctgcagaagcaggtgtgtgcccacatcgtgcaggccatccgcatggaggccaccagggtgcgggaggagtgggagcacgccatcagcagcaaagaaaatgccaacagccagcccaatgatgaagatgccagcagtgatgcctactgctttgagctgctgtccatggtgctggccctgagcggcagcaatgtgggccggcagtacctggcccagcagctgaccctgctgcaggacctcttcagcctgctgcacacagccagcccccgggtgcagaggcaggtgaccagcctgctgcggcgggtgctgcctgaggtgacccccagccggctggccagcatcatcggcgtgaagagcctgcccccagctgacatcagtgacatcatccacagcacagagaagggggactggaacaagctgggcatcctggacatgttcctgggctgcatcgccaaggccctgactgtgcagctgaaggccaagggcaccaccatcactggaacagctggcaccaccgtgggcaagggcgtgaccaccgtgaccctgcccatgatcttcaacagcagctacctgcggcggggggagagccactggtggatgaagggcagcacccccacccagatcagcgagatcatcatcaagctgatcaaggacatggccgccggccacctgtctgaggcctggagccgggtgaccaagaatgccatcgccgagaccatcatcgccctgaccaagatggaggaggagttccgcagccctgtgcgctgcatcgccaccacccggctgtggctggccctggccagcctgtgtgtgctggaccaggaccacgtggaccggctgagcagcggccgctggatgggcaaggatggccagcagaagcagatgcccatgtgtgacaaccatgatgatggagaaacagctgccatcatcctgtgcaatgtgtgtggcaacctgtgcacagactgtgaccgcttcctgcacctgcacaggaggaccaagacccaccagaggcaggtgttcaaggaggaggaggaggccatcaaggtggacctgcacgagggctgcggccgcaccaagctgttctggctgatggccctggccgacagcaagaccatgaaggccatggtggagttccgggagcacacaggcaagcccaccaccagcagcagcgaggcctgccgcttctgtggcagccgctctggaacagagctgtctgctgtgggctctgtgtgcagtgatgctgactgccaggagtatgccaagatcgcctgcagcaagacccacccctgtggccacccctgtggcggcgtgaagaatgaggagcactgcctgccctgcctgcacggctgtgacaagagcgccaccagcctgaagcaggatgctgatgacatgtgcatgatctgcttcacagaggccctgtctgctgccccagccatccagctggactgcagccacatcttccacctgcagtgctgccggcgggtgctggagaaccgctggctgggcccccgcatcaccttcggcttcatcagctgccccatctgcaagaacaagatcaaccacatcgtgctgaaggacctgctggaccccatcaaggagctgtatgaagatgtgcggaggaaggccctgatgaggctggagtatgagggcctgcacaagtctgaggccatcaccaccccaggagtgcgcttctacaatgaccctgctggctacgccatgaacagatatgcctactacgtgtgctacaagtgcaggaaggcctactttggaggagaggcccgctgtgatgctgaggccggcagaggagatgattatgacccccgggagctgatctgtggggcctgcagtgatgtgtcccgggcccagatgtgccccaagcacggcacagacttcctggagtacaagtgccgctactgctgcagcgtggccgtgttcttctgcttcggcaccacccacttctgcaatgcctgccatgatgacttccagaggatgaccagcatccccaaggaggagctgccccactgcccagctggccccaagggcaagcagctggagggcacagaatgtcccctgcacgtggtgcaccccccaactggagaggagtttgccctgggctgcggcgtgtgcagaaatgcccacaccttctag

SEQ ID NO: 184062 - DNA, 14037 bp, Artificial Sequence
  derived and/or modified sequence
atgatgatgtgtgccgccacagccagccctgctgctgccagcagcggcctgggcggagatggcttctacccagctgccaccttcagcagcagccctgcccctggggccctcttcatgcctgtgcctgatggctctgtggccgctgctggcctgggcctgggcctgcctgctgctgacagccggggccactaccagctgctgctgagcggccgggccctggccgaccgctaccgccgcatctacacagctgccctgaatgaccgggaccagggcggcggcagcgctggccacccagccagcaggaacaagaagatcctgaacaagaagaagctgaagaggaagcagaagagcaagagcaaggtgaagaccaggagcaagtctgagaacctggagaacacagtcatcatcccagacatcaagctgcacagcaaccccagcgccttcaacatctactgcaatgtgcgccactgtgtgctggagtggcagaagaaggagatcagcctggccgccgccagcaagaacagcgtgcagagcggggagagtgacagtgatgaggaggaggagagcaaggagccccccatcaagctgcccaagatcatcgaggtgggcctgtgtgaggtgtttgagctgatcaaggagacccgcttcagccaccccagcctgtgcctgcggagcctgcaggccctgctgaatgtgctgcagggccagcagcctgagggcctgcagagcgagcccccagaggtgctggagagcctcttccagctgctgctggagatcaccgtgcgcagcacaggcatgaatgacagcacaggccagagcctgacagccctgagctgtgcctgcctcttcagcctggtggcctcctggggcgagaccggccgcaccctgcaggccatcagcgccatcctgaccaacaacggcagccacgcctgccagaccatccaggtgcccaccatcctgaacagcctgcagaggtctgtgcaggccgtgctggtgggcaagatccagatccaggactggttcagcaatggcatcaagaaggccgccctgatgcacaagtggcccctgaaggagatctctgtggatgaagatgaccagtgcctgctgcagaatgatggcttcttcctgtacctgctgtgcaaggatggcctgtacaagattggcagcggctacagcggcaccgtgcggggccacatctacaacagcaccagccgcatccggaacaggaaggagaagaagtcctggctgggctacgcccagggctacctgctgtacagagatgtgaacaaccacagcatgacagccatccgcatcagccctgagaccctggagcaggacggcaccgtgatgctgcctgactgccacacagagggccagaacatcctcttcacagatggagagtacatcaaccagattgctgccagcagagatgatggctttgtggtgcgcatctttgccaccagcacagagcctgtgctgcagcaggagctgcagctgaagctggccaggaagtgcctgcacgcctgtggcatcagcctgtttgacctggagaaggacctgcacatcatcagcactggatttgatgaggagagcgccatcctgggcgccggccgggagtttgccctgatgaagacagccaacgggaagatctactacacaggcaagtaccagagcctgggcatcaagcagggcggccccagcgctgggaagtgggtggagctgcccatcaccaagagccccaagatcgtgcacttctctgtgggccatgatggcagccacgccctgctggtggctgaagatggcagcatcttcttcaccggcagcgccagcaaaggagaagatggagagagcaccaagagccggcggcagagcaagccctacaagcccaagaagatcatcaagatggagggcaagatcgtggtgtacacagcctgcaacaacggcagcagcagcgtcatcagcaaggatggagagctgtacatgtttgggaaggatgccatctacagcgacagcagcagcctggtgacagacctgaagggccactttgtgacccaggtggccatgggcaaggcccacacctgtgtgctgatgaagaatggagaggtgtggacctttggagtgaacaacaagggccagtgtggccgggacacaggagccatgaaccagggcggcaaaggatttggagtggagaacatggccacagccatggatgaggacctggaggaggagctggatgagaaggatgagaagtccatgatgtgccccccaggcatgcacaagtggaagctggagcagtgcatggtgtgcaccgtgtgtggggactgcaccggctacggggccagctgtgtgagcagcggccgcccagacagagtgcctgggggcatctgtggctgcggcagcggggagagcggctgtgctgtgtgtggctgctgcaaggcctgtgcccgggagctggatggccaggaggcccggcagaggggcatcctggatgctgtgaaggagatgatccccctggacctgctgctggccgtgcctgtgcctggggtgaacatcgaggagcacctgcagctgcggcaggaggagaagaggcagagggtcatccgccgccaccggctggaggagggccggggccccctggtgtttgctggccccatcttcatgaaccaccgggagcaggccctggcccggctgcggagccacccagcccagctgaagcacaagagggacaagcacaaggatggcagcggggagcggggggagaaggatgccagcaagatcaccacctacccacctggctctgtgcgctttgactgtgagctgcgggctgtgcaggtgtcctgtggcttccaccacagcgtggtgctgatggagaatggagatgtgtacaccttcggctacggccagcacggccagctgggccatggagatgtgaacagccggggctgccccaccctggtgcaggccctgcccggccccagcacccaggtgacagctggcagcaaccacacagctgtgctgctgatggatggccaggtgttcaccttcggcagcttcagcaagggccagctgggccggcccatcctggatgtgccctactggaatgccaagccagcccccatgcccaacatcggcagcaaatatggcaggaaggccacctggattggagccagcggggaccagaccttcctgagaattgatgaggccctgatcaacagccacgtgctggccaccagcgagatctttgccagcaagcacatcatcggcctggtgcctgccagcatcagcgagcccccacccttcaagtgcctgctgatcaacaaggtggatggcagctgcaagaccttcaatgacagcgagcaggaggacctgcagggcttcggcgtgtgcctggaccctgtgtatgatgtgatctggaggttccggcccaacacccgggagctgtggtgctacaatgctgtggtggctgatgcccggctgcccagcgctgctgacatgcagagccgctgcagcatcctgagccctgagctggccctgcccaccggcagccgggccctgaccaccaggagccatgctgccctgcacatcctgggctgcctggacaccctggccgccatgcaggacctgaagatgggcgtggccagcacagaggaggagacccaggccgtgatgaaggtgtacagcaaagaagactacagcgtggtgaacagatttgagagccacggcggcggctggggctacagcgcccacagcgtggaggccatccgcttctctgctgacacagacatcctgctgggcggcctgggcctgtttggaggccgcggggagtacacagccaagatcaagctgtttgagctgggcccagatggaggagaccacgagacagatggagacctgctggccgagacagatgtgctggcctatgactgtgccgcccgggagaagtatgccatgatgtttgatgagcctgtgctgctgcaggccggctggtggtacgtggcctgggcccgggtgtctggccccagcagtgactgtggcagccacggccaggccagcatcaccacagatgatggagtggtgttccagttcaagagcagcaagaagagcaacaacggcacagatgtgaatgccggccagatcccccagctgctgtaccgcctgcccaccagtgatggcagcgccagcaagggcaagcagcagaccagcgagcctgtgcacatcctgaagaggagctttgccaggacagtgtctgtggagtgctttgagagcctgctgagcatcctgcactggagctggaccaccctggtgctgggcgtggaggagctgcggggcctgaagggcttccagttcaccgccaccctgctggacctggagcggctgcgctttgtgggcacctgctgcctgcggctgctgcgggtgtacacctgtgagatctaccctgtgtctgccaccgggaaggctgtggtggaggagaccagcaagctggccgagtgcatcggcaagaccaggaccctgctgaggaagatcctgtctgagggcgtggaccactgcatggtgaagctggacaatgacccccagggctacctgagccagcccctgagcctgctggaggccgtgctgcaggagtgccacaacaccttcaccgcctgcttccacagcttctaccccaccccagccctgcagtgggcctgcctgtgtgacctgctgaactgcctggaccaggacatccaggaggccaacttcaagaccagcagcagccggctgctggccgctgtgatgtctgccctgtgccacacctctgtgaagctgaccagcatcttccccatcgcctatgatggagaggtgctgctgcggagcatcgtgaagcaggtgtccacagaaaatgacagcaccctggtgcaccgcttccccctgctggtggcccacatggagaagctgagccagagcgaggagaacatcagcggcatgaccagcttccgggaggtgctggagaagatgctggtgattgtggtgctgcctgtgaggaacagcctgcggcgggagaatgaactcttcagcagccacctggtgagcaacacctgtggcctgctggccagcatcgtgtctgagctgacagccagcgccctgggcagcgaggtggatggcctgaacagcctgcacagcgtgaaggccagcgccaaccgcttcaccaagaccagccagggccgctcctggaacacaggaaatggcagcccagatgccatctgcttctctgtggacaagccaggcatcgtggtggtgggcttctctgtgtatggaggcggcggcatccacgagtatgagctggaggtgctggtggatgattctgaacatgctggggacagcacccacagccaccgctggaccagcctggagctggtgaagggcacctacaccacagatgacagccccagcgacattgctgagatccggctggacaaggtggtgcccctgaaggaaaatgtgaagtatgctgtgcggctgaggaactacggcagcaggacagccaatggagatggcggcatgaccaccgtgcagtgcccagatggagtgaccttcaccttcagcacctgcagcctgagcagcaatggcaccaaccagacccggggccagatcccccagatcctgtactacagaagtgaatttgatggagacctgcagagccagctgctgagcaaggccaatgaggaggacaagaactgcagccgggccctgtctgtggtgtccacagtggtgcgggccagcaaggacctgctgcaccgggccctggccgtggatgctgatgacatccctgagctgctgagcagcagcagcctcttctccatgctgctgcccctcatcatcgcctacatcggccctgtggccgccgccatccccaaggtggccgtggaggtgtttggcctggtgcagcagctgctgcccagcgtggccatcctgaaccagaagtatgcccccccagccttcaaccccaaccagagcacagacagcaccactggaaaccagcctgagcagggcctgagcgcctgcaccaccagcagccactatgctgtgattgaaagtgagcacccctacaagccagcctgtgtgatgcactacaaggtgaccttcccagaatgtgtgcgctggatgaccatcgagtttgacccccagtgtggcacagcccagagtgaagatgtgctgcggctgctgatccctgtgaggacagtgcagaacagcggctacggccccaagctgacctctgtgcatgagaacctgaacagctggattgagctgaagaagttcagcggcagcagcggctggcccaccatggtgctggtgctgcctggaaatgaggccctcttcagcctggagacagccagtgactatgtgaaggatgacaaggccagcttctacggcttcaagtgctttgccatcggctatgagttcagccctggcccagatgagggcgtcatccagctggagaaggagctggccaacctgggcggcgtgtgtgccgccgccctgatgaagaaggacctggccctgcccatcggaaatgagctggaggaggacctggagatcctggaggaggccgccctgcaggtgtgcaagacccacagcggcatcctgggcaagggcctggccctgagccacagccccaccatcctggaggccctggagggcaacctgcccctgcagatccagagcaatgagcagagcttcctggatgacttcatcgcctgtgtgcccggcagcagcggcggccgcctggcccgctggctgcagcctgacagctatgctgacccccagaagaccagcctcatcctgaacaaggatgacatccgctgtggctggcccaccaccatcaccgtgcagaccaaggaccagtatggagatgtggtgcacgtgcccaacatgaaggtggaggtgaaggctgtgcctgtgtcccagaagaagatgagcctgcagcaggaccaggccaagaagccccagagaattcctggcagccctgctgtgacagctgccagcagcaacacagacatgacctacggcggcctggccagccccaagctggatgtgtcctatgagcccatgattgtgaaggaggcccgctacatcgccatcaccatgatgaaggtgtatgagaactacagctttgaggagctgcgctttgccagccccacccccaagaggcccagcgagaacatgctgatccgggtgaacaatgatggcacctactgtgccaactggacccctggggccatcggcctgtacaccctgcacgtgaccattgatggcatcgagattgatgctggcctggaggtgaaggtgaaggacccccccaagggcatgatccccccaggcacccagctggtgaagcccaagtctgagccccagcccaacaaggtgaggaagtttgtggccaaggacagcgctggcctgcgcatccgcagccaccccagcctgcagagcgagcagatcggcatcgtgaaggtgaatggcaccatcaccttcattgatgagatccacaatgatgatggagtgtggctgcggctgaatgatgagaccatcaagaagtatgtgcccaacatgaatggctacacagaggcctggtgcctgtccttcaaccagcacctgggcaagagcctgctggtgcctgtggatgagagcaagaccaacacagatgacttcttcaaggacatcaacagctgctgcccccaggaggccaccatgcaggagcaggacatgcccttcctgcggggcggccctggcatgtacaaggtggtgaagacaggccccagcggccacaacatccgcagctgccccaacctgcggggcatccccatcggcatgctggtgctgggcaacaaggtgaaggctgtgggggaggtgaccaacagcgagggcacctgggtgcagctggaccagaacagcatggtggagttctgtgagagtgatgaaggagaggcctggagcctggcccgggacagaggaggcaaccagtacctgcggcatgaagatgagcaggccctgctggaccagaacagccagaccccaccacccagccccttctctgtgcaggccttcaacaagggggccagctgcagcgcccagggctttgattatggcctgggcaacagcaaaggagaccggggcaacatcagcaccagcagcaagccagccagcaccagcggcaagtctgagctgagcagcaagcacagccgcagcctgaagccagatggccgcatgagcaggaccacagctgaccagaagaagccccggggcacagagagcctgagcgccagcgagagcctcatcctgaagagtgatgctgccaagctgcggagtgacagccacagccgcagcctgagccccaaccacaacaccctgcagaccctgaagagtgatggccgcatgcccagcagcagcagagctgagagccctggccctggcagccggctgagcagccccaagcccaagaccctgcctgccaacagaagcagccccagcggggccagcagccccaggagcagcagcccccatgacaagaacctgccccagaagagcacagcccctgtgaagaccaagctggaccccccccgggagaggagcaagagtgacagctacaccctggaccctgacaccctgaggaagaagaagatgcccctgacagagcccctgcggggccgcagcaccagccccaagcccaagtctgtgcccaaggacagcacagacagccctggctctgaaaatagagcccccagcccccacgtggtgcaggagaacctgcacagcgaggtggtggaggtgtgcaccagcagcaccctgaagaccaacagcctgacagacagcacctgtgatgacagcagcgagttcaagtctgtggatgagggcagcaacaaggtgcacttcagcatcggcaaggcccccctgaaggatgagcaggagatgagggccagccccaagatcagcaggaaatgtgccaacagacacacccggcccaagaaggagaagagcagcttcctgttcaagggagatggcagcaagcccctggagcccgccaagcaggccatgagccccagcgtggctgaatgtgcccgggctgtgtttgccagcttcctgtggcatgagggcatcgtgcatgatgccatggcctgcagcagcttcctgaagttccaccctgagctgagcaaggagcacgcccccatccgcagcagcctgaacagccagcagcccacagaggagaaggagaccaagctgaagaacagacacagcctggagatcagcagcgccctgaacatgttcaacatcgcccctcatggccctgacatcagcaagatgggcagcatcaacaagaacaaggtgctgtccatgctgaaggagccccccctgcacgagaagtgtgaagatggcaagacagagaccacctttgagatgtccatgcacaacaccatgaagagcaagagccccctgcccctgaccctgcagcacctggtggccttctgggaggacatcagcctggccaccatcaaggccgccagccagaacatgatcttccccagccctggcagctgtgctgtgctgaagaagaaggaatgtgagaaggagaacaagaagagcaagaaggagaagaagaagaaggagaaggccgaggtgcggccccggggcaacctgtttggagagatggcccagctggccgtgggcggccctgagaaggacaccatctgtgagctgtgtggggagagccacccctaccctgtgacctaccacatgaggcaggcccaccctggctgcggccgctatgccggcggccagggctacaacagcatcggccacttctgtggcggctgggccggcaactgtggagatggcggcattggaggcagcacctggtacctggtgtgtgaccgctgccgggagaagtacctgcgggagaagcaggccgccgcccgggagaaggtgaagcagagcaggaggaagcccatgcaggtgaagaccccccgggccctgcccaccatggaggcccaccaggtgatcaaggccaatgccctcttcctgctgagcctgagcagcgctgctgagcccagcatcctgtgctaccacccagccaagcccttccagagccagctgcccagcgtgaaggagggcatcagcgaggacctgcctgtgaagatgccctgcctgtacctgcagaccctggcccggcaccaccacgagaactttgtgggctaccaggatgacaacctcttccaggatgagatgagatacctgcggagcacctctgtgcctgccccctacatctctgtgaccccagatgccagccccaacgtgtttgaggagcctgagagcaacatgaagtccatgccacccagcctggagaccagccccatcacagacacagacctggccaagaggacagtgttccagaggagctacagcgtggtggcctctgaatatgacaagcagcacagcatcctgcctgcccgggtgaaggccatccccaggagaagagtgaacagcggggacacagaggtgggcagcagcctgctgcggcaccccagccctgagctgagccgcctcatcagcgcccacagcagcctgagcaagggggagaggaacttccagtggcctgtgctggccttcgtcatccagcaccacgacctggagggcctggagatcgccatgaagcaggccctgaggaagagcgcctgccgggtgtttgccatggaggccttcaactggctgctgtgcaacgtcatccagaccaccagcctgcatgacatcctgtggcactttgtggccagcctgaccccagcccctgtggagcctgaggaggaggaggatgaggagaacaagaccagcaaagaaaattctgagcaggagaaggacaccagggtgtgtgagcaccccctgagtgacatcgtgattgctggggaggccgcccaccccctgccccacaccttccaccggctgctgcagaccatcagtgacctgatgatgagcctgcccagcggcagcagcctgcagcagatggccctgcgctgctggagcctgaagttcaagcagagcgaccaccagttcctgcaccagagcaatgtgttccaccacatcaacaacatcctgagcaagagtgatgatggagacagcgaggagagcttcagcatcagcatccagagcggctttgaggccatgagccaggagctgtgcatcgtgatgtgcctgaaggacctgaccagcatcgtggacatcaagaccagcagcaggcctgccatgattggcagcctgacagatggcagcacagagaccttctgggagagcggagatgaggacaagaacaagaccaagaacatcaccatcaactgtgtgaagggcatcaatgcccgctacgtgtctgtgcacgtggacaacagccgggacctgggcaacaaggtgacctccatgaccttcctgaccgggaaggctgtggaggacctgtgccgcatcaagcaggtggacctggacagccgccacatcggctgggtgaccagcgagctgcccggcggggacaaccacatcatcaagattgagctgaagggccctgagaacaccctgcgggtgcggcaggtgaaggtgctgggctggaaggatggagagagcaccaagattgctggccagatcagcgcctctgtggcccagcagaggaactgtgaggccgagaccctgcgggtcttccgcctcatcaccagccaggtgtttgggaagctgatctctggagatgctgagcccaccccagagcaggaggagaaggccctgctgagcagccctgagggggaggagaaggtgtacaatgccaccagtgatgctgacctgaaggagcacatggtgggcatcatcttcagccgcagcaagctgaccaacctgcagaagcaggtgtgtgcccacatcgtgcaggccatccgcatggaggccaccagggtgcgggaggagtgggagcacgccatcagcagcaaagaaaatgccaacagccagcccaatgatgaagatgccagcagtgatgcctactgctttgagctgctgtccatggtgctggccctgagcggcagcaatgtgggccggcagtacctggcccagcagctgaccctgctgcaggacctcttcagcctgctgcacacagccagcccccgggtgcagaggcaggtgaccagcctgctgcggcgggtgctgcctgaggtgacccccagccggctggccagcatcatcggcgtgaagagcctgcccccagctgacatcagtgacatcatccacagcacagagaagggggactggaacaagctgggcatcctggacatgttcctgggctgcatcgccaaggccctgactgtgcagctgaaggccaagggcaccaccatcactggaacagctggcaccaccgtgggcaagggcgtgaccaccgtgaccctgcccatgatcttcaacagcagctacctgcggcggggggagagccactggtggatgaagggcagcacccccacccagatcagcgagatcatcatcaagctgatcaaggacatggccgccggccacctgtctgaggcctggagccgggtgaccaagaatgccatcgccgagaccatcatcgccctgaccaagatggaggaggagttccgcagccctgtgcgctgcatcgccaccacccggctgtggctggccctggccagcctgtgtgtgctggaccaggaccacgtggaccggctgagcagcggccgctggatgggcaaggatggccagcagaagcagatgcccatgtgtgacaaccatgatgatggagaaacagctgccatcatcctgtgcaatgtgtgtggcaacctgtgcacagactgtgaccgcttcctgcacctgcacaggaggaccaagacccaccagaggcaggtgttcaaggaggaggaggaggccatcaaggtggacctgcacgagggctgcggccgcaccaagctgttctggctgatggccctggccgacagcaagaccatgaaggccatggtggagttccgggagcacacaggcaagcccaccaccagcagcagcgaggcctgccgcttctgtggcagccgctctggaacagagctgtctgctgtgggctctgtgtgcagtgatgctgactgccaggagtatgccaagatcgcctgcagcaagacccacccctgtggccacccctgtggcggcgtgaagaatgaggagcactgcctgccctgcctgcacggctgtgacaagagcgccaccagcctgaagcaggatgctgatgacatgtgcatgatctgcttcacagaggccctgtctgctgccccagccatccagctggactgcagccacatcttccacctgcagtgctgccggcgggtgctggagaaccgctggctgggcccccgcatcaccttcggcttcatcagctgccccatctgcaagaacaagatcaaccacatcgtgctgaaggacctgctggaccccatcaaggagctgtatgaagatgtgcggaggaaggccctgatgaggctggagtatgagggcctgcacaagtctgaggccatcaccaccccaggagtgcgcttctacaatgaccctgctggctacgccatgaacagatatgcctactacgtgtgctacaagtgcaggaaggcctactttggaggagaggcccgctgtgatgctgaggccggcagaggagatgattatgacccccgggagctgatctgtggggcctgcagtgatgtgtcccgggcccagatgtgccccaagcacggcacagacttcctggagtacaagtgccgctactgctgcagcgtggccgtgttcttctgcttcggcaccacccacttctgcaatgcctgccatgatgacttccagaggatgaccagcatccccaaggaggagctgccccactgcccagctggccccaagggcaagcagctggagggcacagaatgtcccctgcacgtggtgcaccccccaactggagaggagtttgccctgggctgcggcgtgtgcagaaatgcccacaccttctag

SEQ ID NO: 184063 - DNA, 13923 bp, Artificial Sequence
  derived and/or modified sequence
atgcccgtgcccgacggcagcgtggccgccgccggcctgggcctggggttgcctgcagccgacagccggggacactatcaactgctcctttccggacgcgcgctggcagatcggtaccggcgtatatatacagctgccctgaatgacagggaccagggcggtggctcagcggggcatcccgccagccgcaacaaaaaaatcctgaataaaaagaagttgaagagaaaacagaagtcaaaaagtaaggtgaagacacggtcgaagagtgagaatcttgagaacacagtaataatccctgacatcaagttacactcaaacccatctgccttcaatatttactgtaatgtaagacattgcgtccttgagtggcagaagaaggaaatcagcctggcggccgcatctaagaactcagtgcaaagcggcgagtccgacagtgacgaagaagaggaatccaaagaacccccaattaagctccctaaaatcattgaagttggcctgtgcgaggtatttgagctcattaaggagacacgcttctcccatccatcgttgtgccttagatccttacaagcgctgttgaatgttctacagggccaacagcccgagggactgcaaagcgagccaccggaggtgttagaatcattattccagttactattggaaattactgtgaggtccacaggcatgaacgactcgaccggacagagccttacagcccttagctgcgcctgtttattctccttagtggcgtcctggggagagaccggtcggaccctgcaggccataagcgccattctgaccaacaatggcagccacgcttgccaaaccatccaggtccccacaattctgaactcacttcagaggagcgtccaggccgtcctggttggcaaaatccagatccaagattggttctcaaacggtattaaaaaggctgcacttatgcataaatggccgctcaaagagatcagtgtagacgaagatgaccagtgtctcctgcagaatgacggcttttttttgtacctgctgtgcaaggatggcctttacaaaataggatccggctactcagggacagttcggggtcatatctacaacagtacctcacggattcgtaatcgcaaggaaaagaaatcctggctcggttacgcacaaggttatttgctgtaccgtgatgtgaacaatcactcaatgaccgctattcggatctccccggagacgctagagcaggacggtactgtaatgctacctgattgccataccgaaggacagaacatactgttcaccgacggggagtacattaaccagattgccgcttctcgcgacgacggctttgtcgttcggatcttcgccacttctaccgaacctgtgctccagcaggagttgcagctcaaactggcaagaaaatgcctccacgcttgtggcatttcactctttgacctggagaaagatctgcacattatcagtactggattcgacgaggagagcgcaatactcggcgctgggagggagtttgctctgatgaagacagccaacggtaagatttattacacaggcaaatatcagagcctgggcatcaaacagggtggcccctcagctggaaagtgggtagagctgccaataaccaaatcccctaagatcgtccacttcagcgtcggtcacgatggcagccatgccttgctggtcgctgaagacggcagtattttctttaccggtagtgcatctaagggagaggacggcgagtccactaaatcgcgccgtcagtctaaaccctacaaacccaaaaagattattaagatggagggcaaaattgtggtgtataccgcctgtaacaacggcagttcatccgttatatctaaggacggcgaactttacatgtttggtaaggacgcgatttacagtgacagttcatctctagtcactgacctcaagggtcactttgtaactcaggtggcaatggggaaagcccacacctgcgtccttatgaagaacggagaggtatggaccttcggggttaataataagggccagtgcgggcgagatactggagccatgaaccagggcgggaaggggtttggagtagaaaatatggcgaccgccatggatgaggatcttgaggaagaattggatgagaaggacgagaagtcaatgatgtgtcctcctggaatgcacaagtggaagctggaacagtgtatggtatgcacagtttgtggggattgtaccgggtatggggcttcatgcgtgtcctcaggcaggcccgacagagtccctggagggatctgtggctgtgggagtggtgaatcaggctgcgccgtgtgtggatgctgcaaggcctgcgcccgcgagttggatggccaagaggcacgacagagaggcatcctcgacgcagttaaggagatgattcccttggatctgcttctggccgttccagtgcctggcgtgaacatagaggagcatctccagctccggcaagaggagaaacggcagcgtgtgataaggcgccaccggttggaggaagggagaggccctttagtattcgctggacccatctttatgaaccatcgagagcaggcgctagcccgcttgcggagccaccccgcccaactcaaacataagcgggataagcacaaagacggatccggtgaacgtggggagaaggacgcttccaaaatcacgacttatcccccagggtcagtgcggttcgactgcgagctgcgtgcagtgcaggtaagttgtggctttcaccactctgtagtgctaatggaaaacggggatgtatatacatttggctatggtcagcatggtcagcttggccacggcgacgtgaacagcagaggttgtccaacgttggtgcaagccctccctggaccctctacacaggtcacggcaggatctaatcacaccgccgtgctgctgatggacggccaggtgtttacttttgggtcattctctaaaggacaattgggccggccaatactcgatgtcccctattggaatgctaagcccgcccccatgcccaacataggcagtaaatatggcagaaaagctacctggattggcgcgtcgggcgaccagaccttcctgaggattgacgaggcgcttattaattcccacgtgctcgccaccagcgaaatcttcgcgtcaaagcatatcattgggctggtgccggcttccatttctgagcccccaccattcaaatgtttgctcattaataaggtggacggctcctgtaagaccttcaacgatagcgagcaggaggacctccaaggctttggcgtctgcttggaccccgtctatgatgtcatctggagatttcgacctaacaccagggaattatggtgctacaatgctgtggtcgcggacgcacgtttgcccagcgcagctgacatgcagtctcgatgtagtatcctgtcaccggagctggcactgcccaccgggtcaagagcactgaccacgcgcagccacgccgccctgcatattctcgggtgcctcgatacattagcggcgatgcaggacctcaagatgggagtggcctctaccgaggaggagacacaggccgtgatgaaagtgtactctaaggaggactactccgtggtgaatcgattcgagagccatggcggtggatggggatattcagcacatagtgtcgaggctattcggttttccgccgacacggacatcctgttgggtggacttggcctgttcggtggccgcggggaatacaccgcgaaaattaaactgtttgaattgggtccagacggcggagaccacgaaacagacggagatctcctggccgaaacagacgtgcttgcatatgactgtgctgccagggagaaatacgcaatgatgtttgatgaacccgtgctgctgcaggcgggctggtggtatgtcgcttgggctcgcgtgtcggggccctcgtctgattgcgggtctcatggccaagcctcaattactactgatgacggggtcgtctttcagttcaagagttcaaaaaaatccaacaacggcactgatgtcaatgcgggtcagattcctcagttgctctatcggctcccaacatctgatggatccgcatctaaaggcaaacagcaaacctccgagccagtgcacattctgaaaagatcctttgctagaaccgtcagcgtggagtgctttgagagccttctgagtattcttcactggagttggaccaccctagtcctaggcgtagaagagctccggggcctgaaggggtttcagtttaccgcaaccctcctggacctggagcgcctgagatttgtaggtacgtgttgtcttcgcctgcttcgagtctatacgtgcgaaatttatcccgtgtccgcaactggaaaggctgtcgtggaagaaacctctaagctggctgagtgtattggcaagacacggacactgctgcgcaaaatattgtccgagggggtcgaccactgtatggtcaagttagacaacgatcctcagggctatctttcgcagccactgtccctgcttgaggctgtgttgcaggaatgtcataacacctttactgcttgcttccactccttttaccctactccagcgttacagtgggcctgcctctgcgatctcttgaattgccttgatcaggatatccaggaagccaacttcaagaccagttcctcccggctgttagcagctgtgatgtcagccctctgtcataccagtgtgaagctgaccagcattttccctattgcatatgatggggaggtgttactgcggtccattgttaagcaggtgtccaccgaaaatgactctaccctggtgcacaggttccctttgctggtggctcacatggagaaattatctcaaagtgaagagaatatttcgggaatgacatcctttcgagaagtcctggagaaaatgctcgttatcgtggtgctccccgtgcggaacagtctgcgacgagaaaacgagctgttttcttcgcatctcgtgagtaacacttgtggattgttagcttctatagtctctgagctcacagcgtctgcgctggggagtgaggtcgacggactgaacagcttacattcggtgaaagccagtgccaacagattcacaaagacctctcaggggcggtcttggaacactggtaatgggagtccagacgccatttgcttctcagttgacaaacccgggattgtggtcgtcgggttttctgtgtatggcggcggtggcatccacgagtacgagcttgaagtgcttgttgatgactccgaacatgcaggagatagcacccactcacatcgatggacgtcattggagttagttaagggtacttatactactgatgatagtcctagcgacatcgctgaaattcggctggataaagtcgtgccactgaaagagaatgtaaaatatgcagtgaggctccggaactacggttcccgcaccgctaatggagacggcggaatgacaactgttcagtgcccggatggggtgacatttacatttagcacctgttcactgtcttctaacggaacaaatcagacccgaggacaaatcccccagattctatactatcggagcgaatttgacggcgacctacagtcccagttgctctctaaggctaatgaagaagacaagaattgtagcagagcattgagcgtcgtgtccactgtggtgcgtgcctcaaaggacttactgcatcgtgcccttgctgtagatgccgatgacatccctgaactgctgagtagctcctccctgttcagcatgctgctccctctaatcattgcatacattggacccgttgccgcagcaattccaaaggtcgccgtggaggtgttcgggctcgtccagcagctactgccctctgtcgctattttaaatcagaagtacgcacccccagcttttaaccccaaccagtctaccgatagcactaccggcaatcagcctgagcagggtctaagcgcctgcacaacaagttctcactatgcggtaatcgaaagtgagcatccatataaacctgcctgcgtgatgcattataaggtgaccttccccgagtgtgttcgctggatgacaatagaattcgacccacaatgtggcaccgcacagagtgaagatgtgctcaggttgttgatccctgtcaggacagtccagaatagtgggtatggccctaagctcactagcgtccacgagaatttgaatagttggatagagctaaagaagttttctggctctagcggctggccaaccatggtcctcgtgctccccggtaatgaggccttattttcacttgaaacagcaagtgactacgttaaggacgataaggctagcttctatggctttaagtgttttgctattggctatgaattttcacctggtccggacgagggggtcatccagctcgagaaagaactcgctaacctaggaggagtgtgcgctgctgcactgatgaagaaagatcttgcacttcccattggcaatgaattagaggaagacctcgagattctagaagaagcagctttacaggtgtgtaagactcactcgggaatattgggcaaggggctagccctctctcacagccctacaattctcgaagccctggaggggaatctacctttgcagatacagtcaaatgaacagagcttcctggatgatttcattgcttgcgttcctggcagctctggcggacgactggcgcgctggctccagcccgactcctatgcagacccacagaagaccagtttaattctgaataaggacgacattcgatgtggctggcccacaactattaccgtgcaaacgaaagatcagtatggcgatgtggtgcatgttcctaatatgaaggtggaggtgaaggccgttcctgtgtcccagaagaagatgtctttacagcaggatcaagccaagaagccgcagcggattcctgggtccccagcagttacagcggctagttcgaacacagatatgacgtacggtgggctcgctagccctaaacttgacgtttcctacgaacctatgatagtcaaagaagccagatacattgccatcacaatgatgaaagtctacgaaaattatagctttgaagagctgcggtttgcgtcgcctacccccaaacgaccatctgagaatatgctgatcagagtgaataatgacgggacctattgtgctaactggacaccaggagcaatcggcctgtatactctgcacgtaacaattgacggcatcgagatcgatgccggacttgaggtaaaggtgaaggatccacccaaaggcatgatacctcctggaacacagcttgtgaaaccaaagtccgaacctcagccaaataaggtgcggaagtttgttgcaaaagattccgccggtcttaggatccgatctcaccctagtctgcagtcagagcagattggtatcgtgaaggtgaatggaaccatcacatttatcgatgagattcacaacgacgatggtgtatggttgcgattgaacgatgagaccattaaaaaatacgtccccaacatgaatggctacaccgaagcgtggtgtttaagttttaaccagcacctgggaaagtcactacttgtacctgtggacgagtccaagacaaataccgacgacttctttaaggacatcaacagttgctgcccccaggaagccaccatgcaggagcaggacatgccattcttacgaggcggacccggtatgtataaagtcgtcaaaaccggaccctctggacacaacattcgatcatgccctaatctgaggggcataccaattggcatgcttgtgttgggcaataaagtgaaggccgttggcgaggtgactaacagcgagggcacttgggtccaactagaccagaacagtatggttgaattctgtgagtcagatgaaggcgaggcctggtctctggcacgggataggggaggcaaccaatacctacgccatgaagacgagcaggctctgctcgaccagaactcccaaacaccaccaccttctccgttctcggtgcaagctttcaacaaaggggcttcttgtagcgcacagggttttgattatgggttgggtaactccaaaggggatagaggaaacataagtacctcaagcaaaccagctagcacctccggaaaatccgagctgtctagtaagcacagtaggtctctgaaaccggacggcaggatgagccggaccacagctgatcaaaagaagcctaggggaactgagagcctgtcagcgtctgagtctcttatcctcaagagcgacgccgctaagctgagaagcgacagccatagccggtcccttagcccaaatcacaatacccttcaaacactgaaaagcgatggtaggatgccatccagcagccgcgccgagtcccccggtcccggctctaggctttcctcaccaaaacctaaaactttgccagccaatcgatcgtccccgtccggggccagcagtccaagaagttcctcgccacatgacaagaatttacctcaaaaaagcaccgcccctgtgaagacaaaactggatccgcctcgcgaacgtagtaaatccgattcttatacacttgaccccgatactcttcggaaaaagaaaatgcccctgacggagcccctcagaggacgaagcacatctccaaagccaaagtctgtccctaaagatagtacagactcccctggcagtgagaatagggcccctagtccccacgtagtgcaggagaacctgcactcggaggttgtggaggtttgtacatcctctactttgaaaacgaattcgctgaccgacagcacgtgtgatgatagttcagagtttaagtcagtagatgaggggagcaacaaagtgcacttctcaatcggaaaagctccccttaaggacgaacaggaaatgagagcatctcccaaaatatcccgtaaatgtgccaataggcacacgagaccaaaaaaggaaaagtctagcttcctatttaaaggtgacggtagtaagcctcttgagcccgccaagcaggccatgagccccagcgtggcggagtgtgctcgtgcagtgttcgcgtcctttctgtggcacgaaggcattgtgcacgacgccatggcctgctcatcttttttaaagtttcaccccgagctctccaaagaacacgcaccaatccgatctagcctgaattcacagcaacccaccgaagagaaagaaaccaagcttaagaaccgccattctctggagataagctctgccctgaacatgttcaacatcgccccccatggcccagatattagcaagatgggctccattaataagaacaaagtcctgtccatgttaaaagaacctcccctgcatgaaaagtgcgaggacggtaaaacagagactacatttgagatgtcaatgcataacaccatgaaatctaagtctcccttaccacttaccctgcagcacctagtggccttctgggaggacatcagcctggccaccattaaggcagcttcacagaacatgattttcccatctcccggctcttgcgcagttctgaagaaaaaggagtgcgagaaagagaacaagaagagtaaaaaggaaaagaaaaagaaagagaaggcagaagttcgtccccgagggaacttatttggggaaatggcccagctggctgtcggcggtcctgagaaggataccatttgtgagctgtgcggtgagagccacccgtatccagtcacctatcacatgcggcaggcccaccccggttgtggaaggtatgctggcggccaaggctacaatagcatcggccatttctgcggaggctgggccggtaactgcggggacggcggtattggcggaagcacctggtacctggtttgtgatcgctgccgggagaagtacctgcgagagaaacaggccgctgcacgtgaaaaagtgaagcaatctcgtcggaagcccatgcaggtgaaaactccgcgcgcccttccaacaatggaagctcaccaggtcattaaggctaacgcactgtttctgcttagcctgagctccgccgctgaaccaagcatcctttgctatcacccagccaagccattccagtcccagttgccatctgtaaaggaaggcatctctgaagatctgcctgtaaagatgccctgtttgtatttgcagacgttggctcgtcatcaccatgagaactttgttggataccaagatgataatctgttccaggacgagatgaggtacttgcggagcacaagtgtacccgcgccctacatttcagtcactccggacgcctctcccaacgtatttgaggaacccgaaagcaacatgaagagcatgcccccgtcactggaaacctcacccatcaccgatactgatcttgcaaagcggacagtattccaaagatcctattccgtggtagcgtcggaatacgacaaacagcactccattctcccagcaagagtaaaagcaatacctcggcggcgcgtgaattccggtgacacagaagtcggaagttccttattgagacaccctagtccagagctgtctagattaatttcagcacatagctcactctctaaaggtgagagaaacttccagtggcccgtactagcatttgtgattcagcatcacgaccttgaaggtctggagattgccatgaagcaggcgctgcgcaaatcggcgtgcagagtctttgctatggaagcatttaattggcttctctgtaatgtaattcaaaccacatctttacacgatattctatggcactttgtcgctagcctgacgccagctccagtggagcctgaggaagaggaagatgaggaaaataagacaagtaaggagaacagcgaacaggagaaggatacacgggtatgtgagcatcccttatcagatattgtcattgcaggtgaggccgcgcaccctttaccacatacattccaccggctgctacaaaccattagtgacctgatgatgtccctcccttccggatcctctttacagcagatggcacttcggtgctggagcctgaagtttaagcagtcagatcaccaattcctgcaccagagcaatgttttccatcacataaacaacatactaagcaaatcggatgatggagattcagaagagtcatttagtatcagtatccagagcggctttgaggcgatgtcccaggagttatgcatagtaatgtgtctgaaagacctcacctccattgtggacatcaagaccagcagtaggcccgcaatgatcgggtccttgacagatggatctacggagacattttgggagtccggggacgaagataaaaataagacaaagaacattactatcaactgcgtgaagggaatcaacgcgaggtacgtgtcagtccacgtggataattctcgggatctgggtaacaaagtgacaagcatgaccttcctgaccgggaaagcagtggaggatctgtgtagaataaagcaagtggacttggactctcgccatatcggatgggtgacatctgaactcccaggtggagacaaccacatcatcaagattgagctgaaggggcctgaaaatacattacgtgtgaggcaggtgaaagtgctgggatggaaagacggtgaaagtacaaaaatcgcagggcaaatttcagcctctgtagctcaacagcgcaactgtgaggcagaaacactcagagtgtttcgattaatcacaagccaagtgtttggtaaactcatttctggagacgccgagcccactcccgagcaagaggaaaaagccttgttgtctagtcccgaaggcgaggagaaggtttataacgctacgtcggacgcggacctgaaggagcatatggtcgggatcatttttagtcgctcaaaactgaccaatctccaaaaacaggtgtgcgcccatatcgtgcaggcaattagaatggaggccactcgggtgcgcgaagaatgggagcacgcaatctcatcgaaagagaacgctaactcacagccaaatgatgaggatgcgagtagcgatgcttattgcttcgaactgctgtcaatggtattggctctttcaggtagtaacgtcgggagacagtacctcgcccagcaactcacactgctgcaggatctgttctcgctgctgcacaccgcctccccaagagttcagcgacaggttacctccctgttgagacgggtgctcccagaagtaaccccatcgcgcctggcttctataatcggggtcaaatccctgccacctgcagacatttccgacatcatccatagcacggagaagggagattggaacaaactgggaattctagacatgttcttgggctgcattgcgaaagccctcacagtgcagctgaaagcaaagggcacgaccataactgggactgctggcacgacggtcggaaaaggggtcactaccgtcacgctgccaatgatctttaactcatcatatctgagacgtggcgagtcacattggtggatgaagggatcaactcccacccagatcagtgagattatcattaagctgattaaagatatggctgctggccacttgtcagaagcctggtcccgtgtcactaaaaatgcgattgccgagactatcattgcactcacaaagatggaggaagaatttcggagcccagtgagatgcatcgccactaccagactatggttagctctggccagcctgtgcgtattggaccaggaccacgtggaccgactgagttcgggtcggtggatgggtaaggacggacagcagaagcagatgccaatgtgtgacaaccacgatgatggagagaccgctgccattattctctgcaacgtatgtggcaatctctgtaccgattgcgatcggttcctccatcttcacagaaggacaaagacacatcagaggcaggtgtttaaagaggaggaagaggcgatcaaagtggatttgcatgagggatgcggtaggacaaaactcttctggttgatggcattggccgattccaagactatgaaagctatggttgaatttcgcgaacacactggaaagcctacaaccagttctagcgaagcttgccgattctgcggatcccgcagcggtaccgaattgtcagccgtcggctctgtgtgtagtgatgccgactgtcaggaatacgctaaaatagcctgtagtaagacccacccctgtggccatccctgcgggggcgtcaagaatgaagagcactgcttaccttgtctgcacgggtgtgataagtctgccacaagcctgaaacaagacgccgatgacatgtgcatgatctgcttcaccgaggccctgtcagcagcccccgcgatccagcttgattgctcacatatttttcatttacagtgttgcagacgcgttttggagaatagatggctgggccccagaataactttcggttttatttcctgcccgatttgcaagaacaagattaaccacatcgtgttgaaggatcttctcgatccaattaaggagctgtatgaagatgtaagaagaaaagccttgatgcgactcgagtacgagggccttcataaaagtgaggctatcacaaccccaggggtgcgcttctacaacgatcccgctggctacgccatgaatcgttatgcttattacgtgtgctataagtgtagaaaagcatacttcgggggagaggctagatgcgacgccgaggcaggccgtggagacgactatgacccgagggagctcatctgtggcgcatgcagcgatgtgagcagggcacagatgtgtccaaaacacgggacggatttcttggaatacaagtgtcgttactgttgttccgttgcagtcttcttttgctttgggacaacccacttttgcaacgcgtgccatgacgactttcagaggatgacatcaatccctaaagaggaactgccccactgtcctgcgggccccaaaggcaagcagctcgaagggacagaatgcccattacacgtggtgcacccaccaaccggggaggaatttgcactcggctgtggtgtttgccgcaacgcccacactttttag

SEQ ID NO: 184064 - DNA, 14037 bp, Artificial Sequence
  derived and/or modified sequence
atgatgatgtgcgccgccaccgccagccccgccgccgccagcagcgggcttgggggcgatggcttctacccagccgctacattttccagtagtcctgcacctggcgccttgtttatgcccgtgccagatggcagcgttgccgcagctggtctcggacttggtttgccagccgcagactcaagggggcactatcagctgctgttgtcgggacgcgccctggcagacaggtataggcggatttatactgcagctctcaatgatcgcgaccagggagggggttcagccggccaccccgcgagccggaacaagaagattttaaataagaaaaagttaaaacggaaacagaagagtaagtcaaaggtgaaaacacgatcaaagagcgagaatctggaaaatacagtgataatccctgatatcaaactgcacagcaacccttccgcattcaacatttactgcaacgtgagacactgtgtattagagtggcagaagaaggaaatttccctggctgccgccagcaaaaatagtgtgcagagcggagaatcagacagtgatgaagaggaagagtcaaaagagccaccgattaagttacccaaaatcatagaagtgggactctgcgaagtcttcgagcttatcaaggagactagattctcacatccttctctgtgcctaaggagtcttcaagcactcctcaatgtgctccagggtcaacagcctgagggcctccagagtgagcctcctgaagtcctcgagtctctgtttcagctgctgctcgagataacagtcaggagtacggggatgaatgattccactggccaatctctgactgcgctttcctgcgcttgcctgttctccctcgtcgcttcatggggcgaaacaggacgaacacttcaggcaataagtgccatcctgactaacaatggctcacatgcatgtcagaccatacaggtgcctactatattgaattccttgcagaggtccgtgcaggcggttcttgtgggcaaaatccaaatccaagattggttttcaaacggcatcaagaaggctgccctgatgcacaagtggccattaaaagaaatctccgttgacgaagacgatcagtgcctgctccagaatgatggcttttttctttatttgctgtgtaaagacgggctctacaagatcggctctggctatagtgggactgtaagaggccacatctataatagtacaagcagaatcaggaaccggaaggaaaaaaaatcatggctcgggtatgcccaagggtatctgctttatcgagacgtcaacaatcattctatgacagccatccggatatcaccagagactcttgagcaagatggcacggtcatgttgccagactgtcacaccgaagggcagaacatcttgttcacagacggggagtacattaatcagatcgcggcaagccgggatgatggattcgtggtccgtatattcgcaacctccactgaacccgtgctgcagcaggagcttcagttgaagctggcgaggaaatgtttgcatgcctgcgggatttctctgtttgaccttgaaaaggacctacatattatctccactggattcgatgaggagtccgccatcctgggcgccgggagggaattcgccttgatgaagaccgctaacggtaagatttattatacagggaaataccagtccctaggaatcaaacaggggggtccgtccgctggcaagtgggtggaattacctattaccaagagccctaaaatcgttcacttttctgttggtcatgacgggagccatgcacttctcgtggctgaggacggaagcatttttttcacaggctctgcctctaagggtgaagatggggaatcaactaagagccgccgacagagtaagccctataaacccaagaagatcattaagatggagggcaaaattgtggtatacacggcctgtaacaatggatcatcctccgtaatttccaaggacggcgagctttatatgttcggtaaagacgctatttacagtgactcctcctctttggtgaccgatctcaagggtcactttgtgacccaagtcgcaatgggcaaggctcatacatgcgtattaatgaagaacggcgaagtatggacttttggcgttaacaacaaaggacagtgcggacgggacaccggggctatgaaccagggtggaaaaggcttcggagtagagaatatggccaccgcaatggacgaagacctggaggaggagttagacgaaaaagacgagaagtcaatgatgtgtcctccaggaatgcacaagtggaaattggaacagtgtatggtttgtaccgtgtgtggggactgtacaggttacggcgcttcatgcgtaagcagcggcaggccagatcgtgtaccgggtggcatttgcggatgcggctccggggagtccgggtgtgcggtttgcgggtgctgtaaggcttgcgcccgggagcttgacggtcaggaagctaggcagcgcgggatcctggacgcagtaaaggagatgatccctctggacctcttgcttgctgtgccggtacctggtgtcaatatcgaagagcatctgcaactgcggcaggaggaaaagcggcaacgagttatccgaaggcacaggttagaggagggcagaggcccactcgtctttgccggtcctatttttatgaaccaccgtgaacaggccttagcccgccttaggtcccaccctgcacaactgaagcacaaacgcgataagcacaaggatgggagcggtgagcggggggaaaaggatgcttccaagattacgacctatcctcctggctcagtgagattcgattgcgaactcagggccgtccaggttagctgtgggtttcaccattccgtggtgttgatggaaaacggggacgtctacacattcgggtacggacagcacggccagttgggccatggcgacgtcaactccagaggctgccccacgctggtgcaggctttgccaggaccgtccacacaggttactgctggcagcaaccataccgccgtgcttttgatggacggacaggtcttcacattcggctccttctctaaagggcagcttggccgacccatcctggacgtaccatactggaacgccaagcccgctccgatgcccaacattggatcaaagtacggcaggaaggcaacctggataggagcctccggggaccaaacatttctgaggatagatgaagcactcataaactctcacgtgcttgctacaagcgaaatattcgcaagcaagcatatcattggcctggttcccgcctccatatcagagccaccgcccttcaaatgtctgctgattaataaggtggatggaagctgcaaaaccttcaatgactcagaacaggaggacttgcagggctttggcgtctgcctagacccagtttacgatgttatatggaggttccgtcccaatactcgggaactctggtgttacaatgctgtagtggccgacgcacggcttccatccgctgcggatatgcagagtagatgtagtatcctaagccctgagctggcactgcctactggaagtcgcgccctgaccactcggtcacatgcagccctacacattctaggatgcctcgatacattggcggcaatgcaggacctgaaaatgggggtggcctcaactgaggaagaaacgcaggccgtaatgaaggtgtacagcaaggaagactacagtgtggttaaccgattcgagtcacatggcggcggatggggctattccgcccactccgtggaggcaattcggttcagtgcagatacagacattttgctggggggactcggtctgtttgggggcagaggggaatacactgcaaagattaagctgttcgagctgggcccggatggtggggaccacgagaccgacggagatctcctcgcggagacagacgtcctggcttacgattgcgctgcccgggagaagtatgcaatgatgtttgacgagcccgtcctactgcaggcaggctggtggtatgtagcctgggctcgggtcagtggacctagcagcgattgtggaagtcacggtcaggcgtctatcaccacagacgatggcgtcgtatttcagtttaagtcatctaagaagtctaacaatggcaccgatgtaaacgccggccagatcccacagctactctacagactgcctacaagcgacggatcagcttccaaggggaagcagcagactagcgaacccgtccacattttaaagagatcgtttgcccggactgtgagcgtcgagtgttttgagagcctcctttccattttacactggtcatggaccaccctcgtgctcggagtggaagagttacgggggctcaagggatttcagttcacagctaccttgctggatttagagaggttgcgattcgtgggcacgtgctgcctgcggctgttgcgagtctacacttgtgaaatctacccggttagcgcaaccggtaaggctgtggtagaagaaacctccaagctggcggagtgtatcgggaaaaccagaaccctgctgagaaagattctgagtgagggagtggaccactgtatggttaagctcgacaatgacccccaggggtacctaagtcagccgctctctttgttagaggccgtgctgcaggagtgccacaacaccttcactgcatgttttcactccttctatccaactcctgctctgcaatgggcatgcctgtgcgatttgctgaattgcctggaccaggacatccaggaagccaactttaaaacatcgtcatcaaggctacttgcggcagtaatgtctgctctgtgtcacacgtccgtcaagctgacgtcaatttttcccattgcttatgacggtgaagttctgctgcgtagtattgtgaaacaagtcagcactgaaaatgacagtacactggtgcatcggttcccgctcctggtcgcacatatggaaaaactaagccaatccgaggagaacataagcggtatgacttcattcagggaagtgctggaaaaaatgctggtgattgtggttctcccagtgagaaatagtctgcgccgggagaatgagcttttcagctcacacctcgttagcaacacatgcggattgcttgcaagcatagtatctgaactgacagcgtcagccttaggatcagaggtggatggccttaatagtttacattccgttaaggcgtcagccaaccggttcaccaaaacctcgcaagggaggtcatggaacacagggaacggatccccagatgcaatttgcttttcagtggataaacctggtatcgtcgtggtaggttttagtgtctacggcggaggtggaattcacgaatacgagctggaagttcttgtcgacgacagcgaacacgccggggattccactcattctcaccgctggacaagcctggaactcgtgaaaggtacatacacaactgatgacagcccttccgatattgcagaaatccggttagataaggttgttcctttgaaggaaaatgtgaagtatgcggtgcgattgcggaattacggttcccgcacagcaaatggagacggcggcatgactacagtccaatgcccagatggagtaacctttacttttagcacatgttccctgtcctcgaatggcaccaatcagacgagaggacaaatcccacagatactgtactaccgctctgaattcgatggggatcttcagtcgcagctgctgtccaaagccaacgaagaggataagaattgttctcgggccctgtctgttgtcagcaccgtggtccgtgcttctaaagacctcttgcaccgggcccttgctgtggacgcggacgatatccctgagctactgagctcttcctcactcttctcgatgctgctgcctctcataattgcttatattgggccagtagctgctgcaatccccaaggtggccgtggaggtgtttggtctcgtgcagcaactcttaccttctgttgccattcttaaccagaagtatgcccctccagctttcaatcccaaccaaagcaccgattccacaacaggcaatcagcctgaacagggattgtctgcgtgcaccacttccagccattacgccgtgatcgaaagcgagcacccgtacaaacctgcctgtgtgatgcattataaggttacattcccagaatgcgtcaggtggatgacaatcgagttcgacccccagtgcggcactgcccaatcagaagacgtgctacggctgctgattcctgtcaggaccgtccagaactccgggtacggccccaaactcacatccgttcacgaaaatctgaatagttggatcgaactgaagaagttttcaggttcttctggatggccaaccatggtgttagttctgcctggcaatgaggctcttttttccttggagacagcctctgattatgtaaaggacgataaggcatccttttacggattcaagtgtttcgccatcggctatgagtttagtcccgggccggacgagggagtgattcaattggaaaaagagcttgccaacctgggaggggtttgcgctgctgctctcatgaaaaaagatctagcgctgcccatcggaaatgaactcgaggaggatctggagatcttggaggaagcagcactccaggtctgcaagacgcattctggaatcctgggaaaaggcctggcactatcacattccccaactattctggaagccctcgaaggtaatctgccactgcaaatacagagcaacgagcagtctttcctggatgattttatcgcatgtgttcctgggtcctccggtggtaggcttgctaggtggctgcagcctgactcatatgcagatccccagaaaacaagcctgatccttaataaggatgacatcaggtgtggttggcctacaacgattacagtccagactaaggatcaatacggtgatgtggtccacgtgcccaatatgaaagtcgaggtgaaggccgtgcctgtgagtcaaaagaagatgtcactacagcaggatcaggccaagaaacctcagcggattccagggagccccgcggttactgctgcttcctctaatactgatatgacatacggaggactggcttcgcctaaactggatgtgagttatgaacccatgatagttaaagaggccaggtacatcgccatcaccatgatgaaagtctatgaaaattacagttttgaggagctcagatttgccagccctactccaaaaaggccatcagagaacatgctgatcagagttaataacgatggcacgtattgtgctaattggacccccggagcaattgggctgtacacacttcatgtgacaatcgacgggatagagatcgacgccgggctggaggtcaaggttaaggacccaccaaaaggaatgatcccaccggggacacagctcgtcaagcctaaaagcgaacctcagcctaacaaagtccggaagttcgtggcaaaggattctgcaggacttcggatcagatcccacccctctctacagtccgagcagatcgggatagtcaaggtgaacggcacaattactttcatcgatgagatccataacgatgacggcgtttggctgagacttaacgacgaaactatcaagaagtacgtgcctaatatgaacggttatacagaggcctggtgtctcagtttcaaccaacatctggggaaatccctcttagttccagtggacgaatctaagacaaatacagatgatttttttaaggacattaacagctgctgtccgcaggaagcaacaatgcaagagcaggacatgcccttcctgcgaggtgggcccggaatgtacaaggtggtgaaaacgggcccctcagggcacaatatccgttcctgccccaacctgagaggtatccctattggcatgctggtcctgggaaacaaagtgaaagccgttggcgaagtgaccaatagcgaagggacttgggtacagctggaccaaaattcgatggtcgagttctgtgaaagtgacgagggggaggcatggtctttggcccgcgatcgaggtggtaaccagtaccttaggcacgaagatgaacaggccctgttggatcagaattcacagacgccccccccctcacctttttctgtgcaggctttcaacaagggcgcttcctgctccgcccaggggtttgactacggactgggaaattcaaagggagaccggggaaatattagcacaagcagcaaaccggcctcaactagcgggaaatcagaattaagctccaagcattcacggtcacttaaacccgacggccggatgtctcggaccactgccgaccaaaaaaaaccccgtggcactgagtcactttcagcttcagaaagcttaatcttgaaaagcgacgctgcgaagctgcggagtgatagccacagccgaagcctttctcccaatcataatactctgcagacactgaagtcagacggcagaatgccatcatccagccgcgcagagtctcctggccccgggtcccgcctctcatctcccaagcccaagacattgcctgccaacagatcatccccctcgggcgcgtcttctcctcgctcctccagcccccacgataagaacctgcctcagaaatcgacagccccagtgaagaccaagctggatccccctcgcgagagaagcaagtccgatagctatactctcgatcccgacactctgcgcaagaaaaaaatgcctctcaccgaacctttacgcggccgtagtaccagcccaaaacctaaatccgtgcccaaagattctactgacagcccaggtagcgagaacagggcaccctctccacatgttgttcaggaaaatctacattccgaagttgtcgaggtgtgcactagctcaactctgaagaccaacagcctcacagactccacttgcgatgatagctctgaattcaagtccgtagatgaagggtcaaacaaggttcacttctcgattggaaaagctcctctgaaagatgagcaggagatgagagccagcccgaaaatctctaggaaatgtgccaatagacacacccgcccaaaaaaggagaagtcatcttttttgtttaagggtgatggatctaaaccccttgagcctgccaagcaggctatgagtccttctgttgccgaatgtgcacgagcagtttttgccagcttcctctggcacgaaggaattgtgcatgatgcaatggcctgcagctcattcctgaaatttcacccagagttgagcaaggagcacgcccccattcgctccagtctcaactctcagcagcctaccgaagagaaggaaacaaagttgaagaacaggcatagcttagaaatttcatcagccctgaacatgttcaacattgccccgcacggccccgatatcagcaaaatgggatcaattaataagaacaaggtactttctatgctaaaggaacccccactgcatgagaagtgcgaggatggaaaaacagaaactacgttcgagatgagcatgcacaacaccatgaaaagcaagtctccgctgcctctgaccctgcagcatctcgtcgccttctgggaggatatctccctggctactatcaaggccgctagccaaaatatgattttcccctctcctggctcttgcgccgtgctaaaaaagaaagagtgcgagaaagagaataaaaagtccaaaaaggaaaagaaaaagaaggagaaagccgaggttaggccacgcggaaatctcttcggtgaaatggcacagctcgctgtcggaggccccgagaaagataccatctgcgaactttgtggagagtctcatccatacccagtgacctatcacatgcgccaggctcatcctggatgcgggcgatatgcaggggggcagggatataattccatagggcacttttgcgggggctgggccgggaattgcggggatggcggcattggcggctcaacctggtacctggtgtgtgatcgatgcagagagaaatatttacgcgaaaagcaggcggcggcgcgcgagaaggtcaagcagtcgcgcaggaaacctatgcaggtgaagacaccacgtgcactcccaaccatggaagctcatcaagttataaaggctaatgccctctttctgctgtctctaagtagtgcagccgagcccagcatattgtgctatcaccccgctaaaccttttcagtctcagttgccgtccgtcaaggaagggatttctgaggaccttccggttaagatgccttgcctgtacctccagaccctggcccgccatcatcatgagaatttcgtgggatatcaggacgataacctgtttcaggatgagatgcggtacctcaggtcaaccagcgtgccagcaccttacatatccgtgaccccagacgcttctcccaatgtgttcgaggaacccgaaagcaacatgaagtcaatgccgccctccttagaaacaagtccaatcaccgatactgatttggctaagaggacagtcttccagagatcgtacagcgtagtggcctcagaatacgataaacagcattctatcctgcctgccagagtaaaggcaatcccacgccgccgagtgaacagcggggacacggaagtggggagttcattgctgcgacacccatctcctgaacttagtagactgatttcagcccatagtagtttgtctaaaggagagcgcaatttccagtggcccgtattggcttttgtgatccagcaccacgacttggaagggctggagatcgcgatgaaacaggccctccggaagagtgcttgtagagtattcgccatggaagcattcaactggctgttgtgcaatgtgatacagacaacttctctccacgacatcctgtggcactttgtggcgtcacttactccggctccagtcgagcccgaagaagaagaagatgaggagaataagacatctaaggaaaactccgagcaggaaaaggacacgcgagtgtgtgagcatccgctcagtgacatcgtaatcgcaggggaagctgctcacccccttccacatacctttcacagactgctccagactatcagcgaccttatgatgtccctgcctagtggaagctctctccagcagatggctctgcgatgctggtcactgaaatttaaacagtcggatcaccagttcctgcatcaaagtaacgtgttccatcacatcaacaatatccttagtaaatctgatgatggcgactctgaggaaagtttttcaatctctatccagtctggatttgaagcaatgtcacaggagctgtgcatagtgatgtgcctgaaggatctgacctccatagtggacatcaagaccagcagccggcctgctatgatcggaagtctaacagacggtagcactgagacattctgggagtccggagacgaggacaaaaacaaaacaaagaatattactataaactgtgtaaaggggattaacgctaggtatgtgtctgttcacgtcgacaatagcagggatcttggcaataaggtgaccagcatgactttcctgacaggaaaggccgtggaggacctatgtaggatcaaacaggtggacttggattcgcggcatattggatgggtaacgtctgaactaccggggggagacaaccacattattaaaatagaactgaaggggccagagaatacactgcgcgtgcgacaggtgaaagtcctgggttggaaagacggcgagagtaccaaaatcgctggccagatcagtgcctcagtcgcacaacagaggaactgcgaagcagaaactctgcgggtcttccgtttaattacctcccaggtgtttggaaaattgatttctggggatgcggaaccgacccctgagcaggaggagaaagcccttttgtcttctccagagggcgaggaaaaagtatataatgcaacctccgacgctgacttaaaggaacacatggtgggtatcatcttttcccgatctaagctgacgaacctgcagaagcaggtgtgtgcacatatagtgcaagctatccgcatggaagccacgcgggttagagaagaatgggaacatgccatctcatccaaagagaatgcgaactcacagcccaatgatgaagatgcctcatcagacgcgtattgctttgagctcctatcgatggtgttagctttgtctggaagcaatgtgggccgacagtacctagcccagcaactgactctgctgcaagatctgtttagcttattgcacacagcttctccacgtgtgcagagacaggtgacttcactcctgcgccgcgtgctgcctgaagtcactccgtctaggttagcatctatcatcggtgtaaagtcactgccgcctgctgacatcagcgacatcatccatagcactgaaaagggggattggaataagctaggtattctcgacatgtttctaggctgtatcgccaaagccctcactgtccaactcaaggctaaggggacaactataaccggcactgcaggcaccacggtgggcaagggggtcacgacagtgactttacccatgatcttcaattccagctacttacgccgtggcgagtctcactggtggatgaaggggagtactcctacccaaatcagcgagatcattattaaacttatcaaagatatggccgctggccacttaagtgaggcctggtccagagtaaccaaaaatgcgatcgcggagaccatcatcgccctgacaaagatggaagaagaatttagaagccccgttcgctgcatagccactactagactgtggttggcactggcttccctgtgtgtactggaccaggaccatgtggataggctgagcagcggaagatggatgggcaaagatggacagcaaaagcagatgcctatgtgcgacaatcatgatgatggcgagacagccgccatcatcctgtgtaacgtgtgcggtaatctttgtactgactgtgaccgcttcctgcatttacatcggcgtaccaagactcaccagcggcaggttttcaaggaagaagaagaggccatcaaggtcgatctgcatgagggctgtggccggaccaaactcttctggctaatggccctggccgacagcaagaccatgaaagcaatggttgaatttcgcgagcataccggaaagccaacaacgtctagtagcgaggcttgcaggttttgcggcagtcggagtggcacagagctatcggccgtgggttccgtttgttccgacgctgactgtcaagagtacgcaaaaatcgcttgtagcaagacacacccctgcggccacccttgtggaggggtgaagaacgaagaacactgtctgccttgtctgcatggttgcgataagagtgcgacctctctcaagcaagacgccgatgacatgtgcatgatttgtttcacggaagccctgagtgctgctccagctatacagttggattgctcacatatcttccacctccagtgctgcaggcgggtactggaaaaccgctggctgggtccacgcataacattcggcttcatatcttgccccatatgtaagaacaagatcaaccacatcgtgctgaaagacctgctcgatccgatcaaggagttgtacgaggatgtacgacgtaaggccctgatgaggctggaatatgaaggattgcataagagcgaggcgatcactacccccggggtccggttttataatgaccctgcagggtacgccatgaatcgctatgcctattacgtgtgttataaatgtagaaaggcatacttcggcggggaggccagatgcgacgcagaagccggccgtggagacgattatgacccccgggagctcatctgcggggcttgttctgatgttagcagagcacaaatgtgcccgaagcacggcaccgactttctggagtataaatgccgatactgttgtagtgtggcggtctttttctgcttcggcacgacacacttctgtaatgcttgccacgacgatttccaacgaatgacatcgattcccaaggaagaattgccacactgtcccgccggaccaaagggcaagcaacttgagggcactgaatgcccattgcatgtagtgcatcccccaaccggagaggagtttgcccttgggtgcggagtctgtagaaacgcacacaccttttag

SEQ ID NO: 184065 - DNA, 13923 bp, Artificial Sequence
  derived and/or modified sequence
atgcccgtgcccgacggcagcgtggccgccgccggcctgggcctgggcctcccagctgctgacagtagaggacattatcagctgttgctcagcggccgtgctctcgccgacagatataggcgtatttacactgcagcattgaatgatagagatcaaggtgggggctccgcagggcacccggcctcccgcaacaaaaagatcttaaataagaagaagttgaaaaggaagcagaagtccaagagcaaggtcaaaaccagatccaagtcggagaatctggagaataccgtaatcatcccggatataaagctgcattctaatcccagcgcgtttaacatttattgtaatgtgcgacattgcgtgcttgagtggcagaagaaggaaatctcactggccgccgcgagcaagaacagcgttcaaagtggtgaaagtgacagcgacgaggaggaggaatctaaggagcctccgatcaaattaccgaagatcatcgaggttggactgtgcgaggtgttcgagctcatcaaggaaacacggttttctcacccaagcctttgcttacgcagcctgcaggcattactgaatgtccttcagggccagcagccggaagggctgcagagcgagccccccgaggtgcttgagagcctgtttcagctcctgctggaaatcactgtccggtcgacgggcatgaatgattcaactggtcaatcccttacagctcttagttgcgcctgcctcttttccctcgtggccagttggggcgagacggggcgtaccctgcaggcaatcagcgctatcttgaccaacaatggctcccacgcgtgtcagacaatccaggttccaacaattctcaacagtttacagagatccgttcaagctgtcctagtgggaaagatccaaattcaggattggttctccaacgggattaagaaagccgcacttatgcacaagtggcctctgaaggagatcagtgtggacgaagatgaccaatgcctccttcagaacgacgggttttttctgtatttactgtgtaaggatggactctataaaatagggagcggttattccgggacggtccggggtcatatctataatagcacatctagaattcgaaacagaaaggagaagaaatcctggctgggctacgctcaaggctatctcctgtaccgggacgtaaacaatcacagcatgactgccatccggatcagccctgaaaccttagaacaggacggtactgtgatgttgcctgattgccacaccgaaggacagaacattctgttcacagatggggaatatattaatcagatcgccgcgtcccgtgacgacggattcgtagtgcgcatatttgccacatctacggaacccgtgcttcaacaggagctccagctgaagctcgcaagaaagtgcctccacgcctgtggtatatcactatttgacctagagaaggaccttcatatcatcagcactgggtttgatgaagaatccgcgatacttggggctggccgggaatttgccctcatgaaaacagccaacggaaagatctactacactggcaagtatcaatcccttggcatcaaacagggaggcccttctgccgggaaatgggtggagctgcccattactaagtccccaaagatagtacacttctctgtaggacacgacggcagtcacgcacttctggtggccgaagatggcagcatttttttcaccggttctgccagcaaaggcgaggatggtgagtccaccaaaagccggaggcagtccaagccctacaaacctaaaaagattataaaaatggaggggaagatcgtggtatacactgcgtgtaataacggcagctcaagtgtaattagcaaagacggagaactgtatatgttcggtaaagacgccatttactcagacagctcttctctggttaccgatctgaagggacactttgtaacccaggtggccatgggcaaagcgcacacctgtgtgctgatgaagaatggcgaagtttggactttcggcgtcaataataaaggacaatgcggtagggatactggcgccatgaaccaggggggcaaggggtttggagtggagaacatggcaaccgccatggatgaagaccttgaagaagaactggatgaaaaagatgagaagtctatgatgtgccctcccggtatgcataagtggaaacttgagcagtgcatggtgtgtactgtttgtggagattgtaccggctacggcgcatcctgtgtttctagcggcaggcctgaccgtgtgcccggtggcatttgcggatgtggatccggtgaatctggatgtgccgtttgcgggtgctgcaaggcctgtgcacgcgaactggacgggcaagaggcccggcaacgggggatcctggacgccgtgaaagagatgatccccctggatctgctcctggccgtgccagtacccggagtaaatatcgaagaacatttgcagctgagacaggaggagaagaggcagcgggtaattaggaggcatcgccttgaggaaggaagagggcctctagtcttcgccggtcctattttcatgaatcatagagagcaagccttagccagactgaggtcccatccagctcagctgaaacataaacgggataagcacaaagacgggtcaggcgagagaggcgaaaaggacgcctccaagatcaccacataccccccaggctccgtccgatttgattgtgagctgcgggcagtccaagtctcgtgcggatttcatcactctgtggtgcttatggaaaacggcgacgtgtacacctttggttacggacagcacggccaactgggccacggcgatgttaactccagagggtgccccactcttgtacaagctttacccggcccatcaacacaggtaactgctggatccaatcacaccgctgttctactgatggatggtcaagtattcacctttggatctttctccaagggccagctgggccgtccaatactggacgtcccttactggaatgccaaacccgcccctatgcctaacattgggagcaaatatggcagaaaagccacctggatcggggcatcaggcgatcaaacattcctccgaattgatgaagccctaattaactcacacgtgctggccactagtgagattttcgcctcaaaacatattattggcctggttccagcatccatctccgagcctcctccttttaagtgtttgctcattaataaggtggatgggagctgtaagacattcaatgattcagaacaggaagacctgcagggattcggtgtgtgcctggaccccgtctacgacgtgatctggcgctttcgcccaaatacacgcgagctctggtgttacaatgcggttgtcgcggacgcccggctcccatctgccgcggacatgcaaagtcgatgctctattttgtctcccgagctagccctgcccacaggctctcgcgccctcacaacacgttctcatgcagcccttcacatactggggtgcctagacaccctggctgctatgcaggatttgaaaatgggagtggccagtaccgaggaagagacacaagccgttatgaaggtatattccaaggaagactactcggtggtcaacagatttgagtcccatggaggcggctggggttattccgcacactctgttgaagccattcggtttagcgccgataccgatattctcttgggagggttgggtctgtttggtgggcggggagaatatacagccaagattaagctatttgagctgggacccgacggcggcgaccacgagactgacggggatctattggccgagaccgatgtgttggcctacgattgcgctgctcgcgagaagtatgcgatgatgttcgacgaacctgtgctcctccaagctggttggtggtatgttgcttgggcacgcgtgagcggaccgagcagtgactgcgggtcacacggacaagcttcgatcaccactgacgacggagtcgtcttccagtttaaatctagtaaaaaaagtaacaatgggactgacgttaacgctggccagatcccccagctcctctaccggctccctacgtccgacggcagcgcttcaaaaggcaaacagcagacctccgaaccagtccatattctgaagcgcagtttcgccagaactgtaagcgtcgagtgctttgagagtctgctttccattctgcactggtcttggactacgctggtgttgggcgtcgaggagttaagggggctgaaggggtttcagtttacagccactttgctagacctcgaacggctgcgattcgtcggaacttgctgtctgagactactgagagtgtacacttgcgaaatttaccccgtgtcagcaaccggaaaggctgtcgtggaggagacaagcaaactagccgagtgcattggcaaaacacggaccctactgcggaagattctgtcagagggagtagatcactgtatggtcaaactggacaatgaccctcaaggatatctgtctcaaccgctgagcctattggaggccgtcctgcaggaatgtcacaataccttcacggcctgtttccactctttttatccaacgccggccctgcagtgggcctgcctttgtgatctcctgaattgcctcgaccaggacatccaggaggcaaacttcaaaacctcatcgtcccgtttgctcgccgcagtgatgtccgcactctgtcacacgagcgtgaagctgacctcgatcttccccatagcatacgacggagaagtattgctgaggtcaatcgtgaaacaggtctcaacagagaatgactctacattggtgcaccgctttcccctcttggtggcacacatggaaaagctcagtcagtcggaggagaatatatccggcatgacatctttcagggaagtgcttgaaaaaatgctcgtcatcgtcgttctacctgtgcgcaacagtctgcggagggagaatgagctattcagttctcatttggtcagcaacacctgcggtctgctggcgagcatcgtttctgagctgacagcgtccgccttaggatctgaagtggatggactgaactctttacatagcgtcaaggcaagtgcaaaccggttcaccaaaacctctcaggggcgatcatggaatactggcaacggttcaccggatgccatttgtttttccgtggacaagccaggtatcgtggtggtgggattctcagtgtacggcggtggcggcatccatgagtatgagctggaagtattggttgacgacagcgaacatgcaggagattctacccactctcaccggtggacctcactagaactcgtgaagggcacgtacactacagacgacagccccagcgatatcgcagaaatcagactggacaaagtggtacctctgaaggaaaacgttaagtacgcagtgcgcctgagaaactatggtagcagaacagccaacggcgatggaggaatgacaactgttcaatgtccggatggcgtgactttcaccttctctacatgctcactgagctccaatggaactaatcagacgagagggcaaatcccgcaaatactttactaccgctctgagttcgacggcgacctccaatcacagctcctgagcaaggcaaatgaggaggataagaactgtagccgcgccctatcagtcgtgtcaaccgtggtcagggcttccaaagatctcctgcacagagccttggccgttgacgctgacgacatccccgaacttctgagttcatcatccctgttctccatgttattaccactcatcattgcttacatcggacccgtcgccgccgcaatccctaaagtggccgtggaggtgttcggactggtccagcaacttttgccctccgtcgccatcctgaaccaaaaatatgcccccccagccttcaatccaaatcagtctaccgactcaaccacgggcaatcaacccgaacaggggctatccgcctgcacaacctcgtcacactacgctgtcatcgaatctgaacatccctataaaccagcctgtgttatgcattacaaagtgacctttccagagtgcgtcaggtggatgacaatcgagtttgatccgcagtgcggcactgctcagtcagaagacgtgttacgcttgcttattcctgtgcggacagttcaaaactcgggttacggtcctaaactaacaagcgtgcacgagaatctaaacagttggatagagcttaaaaagttcagcggttcttctgggtggccaaccatggtgctggtcctcccaggaaatgaggctctcttttcactcgaaaccgcaagcgactatgtaaaggatgacaaggccagcttttacggctttaagtgcttcgctatcggctatgagttttccccaggacctgatgaaggcgtgatacaattagaaaaagaattggcaaacctggggggcgtgtgcgctgctgctttaatgaaaaaagatctcgccctccctataggaaacgagctcgaagaagacctggagatcttagaggaagcagctctgcaggtatgtaagacccatagtggtatcctgggtaaggggttggcactctctcacagtccaacaatccttgaggccctggaagggaaccttccgcttcagatccagtctaatgagcagtcctttcttgacgactttatagcatgcgtgcccgggagctctggagggagactggcaagatggttacagccagattcgtacgccgacccacaaaaaacctctctaatcctgaacaaagatgacatccggtgtggctggcctaccaccataaccgttcagacaaaagatcagtacggggatgtcgttcatgtgccgaatatgaaggtggaagtgaaggccgtcccggtttctcagaaaaagatgagcttgcagcaagatcaggccaaaaaaccccagaggattccaggttctccagcagtgactgcagcgagctctaacacagacatgacctatggaggattggcatcccccaagttagacgtttcctacgagcctatgattgttaaagaggcccgctatatagccatcaccatgatgaaggtatatgaaaactacagttttgaggaactgaggtttgcctctccaactcctaaaagaccttcagaaaatatgttgatcagagtgaacaacgacggaacatattgtgccaactggaccccaggagcaatcggcctttacaccctgcacgtaacaattgatggcatcgagatcgatgctggcctggaggtgaaagttaaggatccgcctaaggggatgatccccccaggcacccagttggtcaagcccaaatccgagccgcagcccaataaggtgcggaaattcgtggcgaaggactcagccgggctgaggatccgcagtcatcccagcttgcaaagcgagcaaataggcatagtgaaggtcaacggcaccatcaccttcatagacgagattcacaatgacgatggcgtgtggttgaggcttaatgacgagactattaaaaaatacgtccctaacatgaatggctacaccgaagcttggtgcctcagttttaatcagcaccttggaaagtccctcctcgtccccgtagatgagtccaaaaccaacaccgatgatttttttaaagacattaattcctgctgtccacaggaggcaactatgcaagagcaagacatgcccttcttgcgcggcgggccgggcatgtacaaagtggtgaagaccggcccatccggccacaacattaggtcctgccctaacttgagagggataccaatcgggatgttggtgctcggcaacaaggtaaaagcagtgggcgaggtaaccaacagcgagggaacatgggtccagttagaccagaactctatggtggagttctgtgaatctgacgaaggagaggcctggagtttggcccgcgataggggagggaatcaataccttcggcacgaggatgagcaggccttactggatcagaattcacagaccccaccaccttcaccgttctctgtccaagcgtttaataagggcgcatcctgtagcgcacaggggttcgactatggacttggcaactctaagggggatagaggcaatatatctacgtctagcaagcctgcgtccaccagcggtaaaagtgagctcagcagcaaacacagcagaagtctgaagccagacggccgaatgagcaggactacagcagatcagaagaagccgcgggggacggagagtctcagcgccagcgagtctctgatacttaaatctgacgccgcaaaacttaggtctgactcgcattcccgaagcttatctccaaaccacaataccttgcaaaccctaaaatcagacggccggatgccctccagttcacgtgcagaatcacctgggccaggttcacgtttgtccagcccaaaaccaaaaaccctcccagctaaccggtcctccccatccggtgctagtagcccacgttcctcaagcccccacgacaagaatttgccccaaaagtctacggcaccggtgaagaccaagttggatccgccgagagagagatccaagagtgattcttatactttggaccctgacactttaaggaagaagaagatgcctctgaccgaacccctgcggggacggtccaccagtcctaaacccaaaagcgtcccaaaggactcaactgacagcccgggcagcgagaaccgagcaccaagtcctcatgtggtccaggagaacctccatagtgaggtggtggaagtttgtacctcctctacactgaagaccaactcactcacagatagtacctgtgatgacagctctgagtttaaatcggtagatgaaggctctaacaaagtccattttagtatcggaaaggcacctttgaaggacgaacaagagatgagggcaagtcctaaaatttcccgcaagtgtgctaaccgtcacacaagacccaagaaggagaagagcagcttcctcttcaaaggggacggaagcaagccactggagcccgcgaaacaggccatgtctcccagcgtcgcggaatgcgcccgcgctgttttcgccagctttctgtggcacgaaggaatagtccatgatgccatggcgtgttccagctttctcaaatttcatcccgagttgtcaaaggaacacgcgcccattagatcgtcgctaaattcccagcagcccaccgaggagaaagaaactaagctgaagaatagacattcgctggaaatcagctctgccctgaatatgtttaacatagctccccacgggcccgatatctctaagatggggtccatcaataagaacaaagtcctgagcatgctcaaagagccacccctgcatgaaaagtgcgaagacggcaaaactgagacaactttcgaaatgagtatgcacaatactatgaaatctaagtccccattgccgcttacactacaacacctggtagctttttgggaggatatttccctggccacgattaaagctgccagccagaatatgatcttcccctccccaggcagctgtgccgtgctcaaaaaaaaggagtgcgagaaggaaaataaaaaatcgaaaaaggaaaaaaaaaagaaagagaaggctgaagtgaggcctaggggaaacctcttcggagaaatggcgcagctggccgtcgggggcccagagaaggatacgatttgtgaactatgtggggaatctcacccatacccagtaacttaccacatgcggcaagcccacccaggctgtggaaggtacgctggaggccaggggtacaatagcattggccatttttgtggaggatgggcaggcaattgcggggacgggggtattggcggttccacctggtatctagtgtgcgaccggtgtcgggagaaatatctaagagagaagcaagcggccgctcgcgagaaggtaaagcagagccggagaaaacctatgcaagtgaagacccctagagcgttaccgacgatggaggctcatcaggtcattaaagctaacgcactgtttcttcttagtttgagctccgctgctgagccctccattttatgttaccatcctgctaagccgtttcagtcacagctccctagtgtgaaggaaggcatttctgaggatctcccggtcaagatgccctgcctgtaccttcagacactggcccgtcaccaccatgagaacttcgtggggtatcaggacgataatctgttccaggatgagatgcgatacttgagatcaacctccgtgcccgccccttatatctctgtcacacctgatgcttcccctaatgtgtttgaagagcctgaatccaatatgaagtccatgcctccatcgcttgaaactagccctatcactgatactgatctggctaaaagaacagtatttcagagatcttacagcgtggtggcatctgaatatgataagcagcattccatactgccagcaagggtgaaagcgattcccagacgcagagtcaactccggagacacagaagtcggttcctcacttctccgccaccctagccctgaactgagtcgtctgataagcgcacatagttcattgtctaagggagaacgtaatttccagtggcccgtgttggcttttgtgatccagcaccatgacctggaagggttggagatcgccatgaaacaagccctgagaaagtctgcatgtcgtgtgtttgccatggaagcttttaattggctcctttgtaacgtcatacaaacaacatcccttcatgacattttatggcattttgtagctagcctcacgccagcacctgtcgagcccgaagaagaggaagatgaagagaacaaaacatcaaaggaaaattctgagcaggagaaagatacacgagtgtgtgaacatccactgagtgacattgtgatcgccggcgaggccgcacacccattgccccatacctttcatcggctcttgcagaccatctccgacttaatgatgtccctccccagcggttctagcctgcaacagatggctcttcggtgctggagcctgaagtttaagcagagcgatcaccagtttctgcatcagtcaaacgtgttccaccatataaacaacattttatccaagagcgacgatggggattccgaggagagttttagcatttcgatccagtcaggttttgaagcaatgtcccaggagctttgcattgttatgtgcttaaaggatctaacctcaatcgtggacataaagacatcaagcagacccgcaatgatcgggtctttgactgatgggtcaactgaaaccttctgggagtcaggcgacgaagataagaataagaccaagaacatcacgatcaattgtgtgaagggcatcaacgcacggtacgtgagcgtacacgtggataattctcgcgacctgggaaataaagtgacatctatgacgttccttacgggaaaggccgtggaggacctttgcaggatcaaacaggtggatctcgatagtaggcatatcggatgggtgacaagtgaacttcctggaggggacaaccacattatcaaaattgaactgaagggcccagaaaacacattgcgggtgcgacaggtgaaagttcttggatggaaggacggagagtcaaccaagattgcagggcagatcagcgcatccgtagcacagcaaaggaactgtgaggctgagaccctgcgggttttcagactgattactagtcaggtctttggtaaactgatcagcggcgacgccgaacccacgccagagcaggaagagaaggctcttctgtcgtctcccgaaggcgaggagaaggtttacaatgctacatccgacgccgatcttaaggagcacatggtgggaattattttctcaagaagcaaattgactaacctgcagaaacaagtttgcgctcatattgtacaggcaatcagaatggaggcgaccagggtccgggaggaatgggagcacgcgattagcagcaaagagaacgctaattcccagccgaacgacgaggacgcatcatcagatgcgtactgttttgaactactgtccatggtgctggcgctgtctgggagcaatgtcggaaggcagtacctcgcccagcagttgactcttttgcaggacctttttagcctcctgcatacggccagcccacgcgtccagaggcaggtcacttccctgctaaggcgggtgttacccgaggtgaccccgtcgagactggcttcaatcatcggagtgaaaagcctgcccccagccgatatttcagacatcattcattccaccgaaaaaggagactggaataagcttggaatactggatatgttcttgggctgtattgctaaggccctgaccgtccagctaaaagctaaaggaacgacaatcaccggcacagccgggacgactgtggggaaaggagtcaccaccgtcacacttcctatgatctttaacagttcatacctccggcggggcgaaagtcattggtggatgaaaggatctactcctacgcaaatcagtgagatcataattaaactgattaaggatatggcagccggccatctcagcgaagcctggagccgagtgacgaagaacgcaattgccgaaactataatcgcattaacaaaaatggaggaggagttcaggagtcctgtcagatgtattgccaccaccaggctgtggcttgccctcgcgtcgctgtgtgtgctggatcaagatcacgtggaccggctgtcaagcggccgttggatgggtaaggacggacagcagaaacaaatgccaatgtgtgacaaccacgatgacggggagaccgctgccatcatcctgtgcaatgtgtgtggcaacctctgtactgactgtgaccgtttcttacacctccatagaaggactaaaacccaccaaaggcaggtattcaaggaggaggaagaagccatcaaggttgatctgcacgagggctgtgggaggactaaactcttttggttaatggcgctagcagactctaagacaatgaaggcgatggtagaatttcgggagcacactgggaagcctactacatcctcatcagaggcctgccgcttctgcggtagtcggtcaggaacagaattatccgcggtaggatctgtctgttcggacgctgattgccaggaatacgccaaaatcgcctgctcaaaaacccacccttgcgggcatccttgtggaggcgtcaagaacgaggaacattgtcttccatgcctacatggttgcgataagagtgcaacaagcttaaaacaggatgcggacgatatgtgtatgatatgcttcaccgaagccctcagtgctgcgcccgccatacagttggattgcagtcacatctttcacctgcagtgttgccggagagtgttagagaacaggtggctcggacctcggattacatttggctttataagttgtcccatctgtaaaaacaagatcaatcacatcgttctcaaggatctcttggatcctatcaaagagctatacgaggatgtaaggagaaaggcactcatgcgactcgaatatgagggactgcataaatcagaagctatcactacacccggagtaagattctacaacgaccccgccgggtacgctatgaatcgctatgcctactacgtgtgctataaatgtcgcaaggcctactttgggggggaggctcggtgtgatgcagaggcaggccggggggacgactacgacccacgggagctcatatgcggcgcctgctcagacgtgtcgagggcacagatgtgtcctaaacacggaaccgatttcctcgagtataagtgtcgctactgttgttccgtcgccgtcttcttctgctttggcactacacacttttgcaacgcctgtcatgatgatttccagagaatgacatcgatcccaaaggaagaattaccccattgcccggcaggccccaagggcaaacagcttgagggcacagaatgccctcttcacgtagtgcatcctcccactggcgaggagttcgcactcggatgtggcgtttgcaggaacgctcacactttctag

SEQ ID NO: 184066 - DNA, 14735 bp, Artificial Sequence
  derived and/or modified sequence
cggcggcagtggcggcaccgcctcctcctcacattcccggggtggcggggttagatgagcggccccagtagcggcgccgggggcgctgttcatgccggttcccgacggctccgtggctgctgcggggctggggctggggctacccgccgcggactcccggggtcactaccagctgctgctgtcaggccgggccctggccgaccgctaccggaggatttataccgctgcgctcaatgacagggaccaggggggcggcagcgctggacacccagcctccaggaataagaaaattttaaataagaagaaattgaaaagaaaacagaagagcaaatcaaaagtgaagacaagaagcaagtctgaaaacttagagaatacagtaatcataccagatatcaaactacatagcaatccttctgctttcaatatttactgtaatgtacgccattgcgttctggaatggcagaaaaaggaaatatcattggcagccgcatctaagaactctgtgcagagtggagaatcagatagtgatgaagaagaggaatccaaagagccccctatcaagcttccaaagattattgaggttggcctttgtgaagtttttgaattgatcaaagagacacgattttctcatccatccctgtgtctcaggagtctccaagccctgctcaacgtgctgcagggccagcagccagaaggcctccagtctgagccacctgaggtcctagagtctctcttccagcttcttttggaaatcaccgttcgaagtactgggatgaatgacagcacaggacagtccttaacagcactttcctgtgcttgcctctttagtctggtggcttcttggggagaaacaggaaggacacttcaggccatctctgctatcctcaccaacaatggaagccatgcttgccaaactattcaggtgccaacaattctaaattcgctacagagaagtgtacaagcagttttggtgggaaaaattcaaattcaggactggtttagtaatggcattaagaaagcagctttaatgcacaagtggccattaaaagaaatatctgttgatgaagatgaccaatgtctacttcagaatgatggattttttctttatctattatgcaaggatggattatataaaataggctctggatacagtggaacagttaggggccatatatacaattctacatcccgtattagaaacagaaaagaaaaaaagtcttggttagggtatgctcagggttatttattatatagagatgtgaataaccacagcatgacagccataaggataagccctgaaacactggagcaagatggtactgtgatgttaccagattgccacactgaaggtcaaaatattttattcactgatggagaatatattaatcagatagctgcttcaagagatgatggctttgttgtcagaatatttgccacaagcactgaacctgttctacagcaagaattgcaacttaaactggctagaaaatgcttacatgcctgtggtatctcactattcgatctggaaaaggacttgcatattataagtacaggatttgatgaggagtcagcaattcttggtgcaggacgagagtttgcgctaatgaaaacagcaaatggaaagatatattacactggcaaataccagagtcttggaatcaaacaaggtggtccttcagcaggaaaatgggttgagctaccaattacaaaatctccaaagatagtacacttctcagttggacacgatggctctcacgcccttttagttgcagaagatgggagcatattctttacaggatctgctagtaaaggagaagatggagaatcaactaagagcagacggcaatccaaaccttataaacctaaaaagataattaagatggaaggaaagattgtggtatatacagcctgcaataatggaagtagttctgttatttctaaagatggagaactctacatgtttggaaaagatgccatttactctgatagttcaagtttggtaactgatttgaagggccattttgtaactcaggtagctatgggcaaagctcacacttgtgttttaatgaagaatggagaggtgtggacatttggtgtaaataataaaggacagtgtggacgagatactggtgccatgaaccaaggtgggaaagggtttggagttgaaaatatggcaacagcaatggatgaagacctggaagaagaactagatgaaaaagatgagaagtctatgatgtgccctccaggcatgcacaaatggaagctggagcagtgcatggtttgcactgtctgtggagactgtacaggttatggagccagctgtgtcagtagtggacggccagacagagtccccggagggatctgtggttgtggttccggagaatctggttgtgctgtgtgtggatgttgcaaggcctgtgcaagagagttagatggtcaagaggcaagacaaagaggaattcttgatgcagtgaaagaaatgatacctttagatcttcttttagctgtcccagtgcccggggttaacattgaagaacaccttcagttacgacaagaagaaaaacggcaacgtgtaatcagaaggcacagattagaggaaggaagaggcccccttgtatttgctggtcctatttttatgaaccatcgagaacaggctctagccagactcagatcccatccagcacagctaaagcataaacgggacaagcacaaagatggaagtggagaaagaggcgaaaaggatgcaagcaaaatcacaacataccctccaggctctgtgcgatttgactgtgagctccgggcagtccaagtcagctgtggatttcaccattcagtggttttaatggaaaatggagatgtctatacatttggttatgggcagcatgggcagctaggacatggagatgtcaactccaggggatgtcccactcttgttcaagcattgccaggccctagcacacaagtcactgcaggcagcaaccatacggcagtacttttaatggatggacaggtcttcacatttggaagtttttctaaaggacaactgggcagaccaattttggatgtgccatattggaatgcaaagccagctcccatgcctaacattggatcaaaatatggaagaaaagctacttggataggtgcaagtggggaccaaacttttttacgaattgatgaagcacttattaattctcatgtacttgctacatcagaaatttttgccagtaaacacataataggcttggtacctgcttctatatcagaacctcctccatttaaatgccttctgataaataaagtggatgggagttgtaaaacttttaatgactcagaacaagaggatctgcaaggatttggtgtgtgtcttgatcctgtatatgatgtaatttggaggtttcgaccaaatactagagagctgtggtgttacaatgcggtggttgctgatgccaggcttccctctgcagcagacatgcagtccagatgtagtatcctaagtcctgaacttgccttaccaacaggatcaagggccctcactacccgatctcatgcagctttgcacattttaggttgtcttgataccttggcagctatgcaggacttaaaaatgggtgttgcaagtacagaggaagagactcaagcagtaatgaaggtttattctaaagaagattatagtgtggtaaacaggtttgaaagtcatggaggaggctggggttattctgcccattcagtagaagctatacgtttcagtgccgacactgatattttacttggtggtcttggtctgtttggaggtagaggagaatatactgctaaaattaagctgtttgaattgggtcctgatggaggagatcatgaaactgatggtgaccttcttgcagagactgatgtattggcttatgactgtgctgctagagaaaaatatgcaatgatgtttgatgagcctgttctcctgcaagctgggtggtggtatgtggcatgggcccgagtgtcaggacccagcagtgactgtggatctcatggacaggcatctattaccacagatgatggggttgttttccagttcaagagttcaaagaaatcaaataatggtacagatgttaatgcgggtcagatacctcagttattatacagacttccaaccagtgatggcagtgcttcaaaaggcaaacagcaaaccagtgaacctgtacacattttaaagaggtcttttgcaagaactgtctcagtggaatgttttgagtcattgttgagtattcttcactggagctggaccaccttagtcttaggagttgaagaacttagaggattaaaaggattccagttcacagctacactcctagatttagagagactgcgctttgtgggtacctgttgtctgaggttattgcgtgtctatacctgtgaaatttacccagtgtcagctacaggaaaagcagttgtagaagaaactagcaaattagcagagtgtattggaaaaaccagaactttgttaagaaaaattttatcagaaggagttgatcactgcatggtgaaattggataatgatcctcaaggatatctcagtcaacccttgagtcttctagaagctgtccttcaggaatgtcataatactttcactgcctgctttcattctttctacccaactcctgccttacagtgggcttgcctttgtgatctgctgaattgtttggatcaggatatccaagaagcaaacttcaagacatcaagtagccgactccttgcagctgttatgtcagctctgtgtcacacgtctgttaagctgacttccatcttcccgattgcgtatgatggagaagtattactacgatcaattgttaaacaagttagtacagagaacgactcaacactagttcatcgttttccccttttggtggcacatatggaaaaactcagccagagtgaagagaatatctcagggatgacaagcttccgtgaagttctggagaaaatgctggtcattgttgtgctaccagtcaggaacagcctgaggagagaaaatgaactcttctcctcccacctcgtctctaacacctgtggattactggccagcattgtcagtgaactgacagcgtcagccctgggatctgaggttgatggacttaattctcttcactctgtaaaagctagtgctaaccgatttacaaaaacaagtcagggcagaagttggaacactgggaacgggtcccctgatgcaatctgtttttcagtagacaaacctggaatagttgtggttggtttctctgtctatggaggaggtggaattcatgaatatgaattagaggtgttggttgatgatagtgaacatgcaggagattcaactcattcccacagatggacatctctggaattagtgaaaggaacgtacacaacggatgactcacccagtgatatagctgagatcagacttgacaaagtggttcctttaaaggaaaatgttaaatatgctgtgcgcttgaggaactatggaagccgtacagccaatggagatggaggaatgaccacagttcagtgccctgatggtgtgacattcacattcagcacgtgcagcttgagcagtaacggcacaaaccaaaccagaggacagatcccacagatactctactataggagtgaatttgatggagatttacaatcccaacttctgagtaaagccaatgaagaagataaaaactgtagcagagcattgtctgttgtaagcactgtcgttcgagcctctaaggacctcctgcacagagctcttgctgtggatgctgatgacattccagaactgctgagttcttccagtctgttttccatgctgctcccccttattatagcctacataggaccagtagctgctgctattcccaaggtggctgtagaagtctttggccttgtccaacaattgcttccgtcagttgccattttgaatcagaagtatgcaccgcctgccttcaaccctaatcagtcgacagatagcaccacaggaaaccagcctgaacagggcctctctgcttgtacaacctccagtcactatgctgtcatagagagtgagcacccgtataaacctgcctgtgtgatgcattacaaggtgacattcccagaatgtgtgaggtggatgacaatcgaatttgaccctcagtgtggtactgcacagtcagaagatgtccttcgtttgttgattcctgtcagaactgttcagaattcaggatatggaccaaaattgacatctgttcatgaaaatcttaattcatggatagaattaaagaaattttcaggatcctctgggtggcctactatggttttggtgttgccaggaaatgaggcccttttttcattggagactgcatcagattatgtgaaagatgacaaagcttctttctatggttttaagtgttttgcaattggatatgaatttagccctggacctgatgagggagtcatccaattggaaaaagaattagccaatcttggtggggtttgtgcagcagctctgatgaagaaggacctagcacttcctattggtaatgaattagaagaagaccttgaaattcttgaggaggctgcattgcaggtgtgcaaaacccattctggaattcttggaaagggtctagctctttctcattcaccaactatattagaagcacttgagggaaatttaccactccaaatccaaagcaatgaacagtcttttctggatgattttattgcctgtgtcccaggatcaagtggtggaaggcttgcaaggtggcttcagccagattcatatgcggatcctcagaaaacatctttgatcctgaataaggatgatattcgttgtggttggcctaccaccataactgttcaaacaaaagaccagtatggggatgtggtacatgttcccaatatgaaggtggaagtgaaagctgtccctgtttctcagaaaaaaatgtctttacaacaagatcaagcaaagaaacctcaaaggattcctggcagtcctgcagtaacagctgcatcttctaatactgacatgacttatggagggctggcatcaccaaagctagatgtttcatatgaaccaatgatagtgaaggaagctcgatatattgccataacaatgatgaaggtttatgaaaattattcatttgaagaactacgttttgcatcaccaactcctaagagacccagtgagaatatgctgatccgtgtcaataatgatgggacttattgtgcaaattggactccaggggctattggactctacactcttcatgttaccattgatggcattgaaatcgatgctggtctggaagtaaaagtaaaagacccaccaaaagggatgataccaccaggaactcagttggtcaaaccaaagtctgaacctcagcctaataaggttcgaaaatttgtggccaaggacagtgcggggcttcgcatccgtagccacccttcccttcagagtgagcagataggcatagtgaaagtcaatggaactatcacttttattgatgagatccataatgatgatggtgtgtggctgaggctgaatgatgagacaataaagaagtatgtccctaacatgaatggttacactgaagcctggtgcctctcttttaatcaacatcttggcaagagtcttctggtccctgttgacgaatctaaaactaatactgatgactttttcaaagacataaactcctgctgcccacaggaagcaacaatgcaagaacaagatatgccattcttgcgaggagggccaggcatgtacaaggtagtgaagacgggaccttcaggtcacaacatcagaagctgccctaaccttagaggtatcccaattggaatgttagttctgggaaacaaagtcaaagcagtgggagaggtaaccaattctgaagggacatgggtgcaactggatcagaacagcatggtagagttctgtgagagtgatgaaggagaggcatggtccttagctagagacagaggcggaaaccagtacctccgacatgaagatgaacaagctcttctggatcagaattctcaaactcctcctccaagccctttctcagtgcaagcttttaataaaggggcaagttgcagtgcccaaggatttgattatggactcggaaatagcaaaggtgatcgaggaaacatctcaacatcttctaaaccagcctctacatcaggaaaatcagagctgtcctctaaacacagcagatcgcttaaacctgatggacgtatgagccggactactgctgatcagaagaagccaaggggcacagaaagtttatctgctagtgaatccctcatcttaaaatctgatgctgcaaagttgaggtcagattcccacagtaggtcattatcccccaaccataacaccttgcagacattgaaatctgatgggaggatgccttctagctccagagctgaatccccaggaccaggttctcggttgtcatctcctaagccaaagactctcccagccaataggtctagcccatcgggtgctagttctccacgctcctcctcaccacatgataaaaatctacctcaaaaaagtactgctcctgttaagacaaagcttgatcctcctcgggaacgttctaaatcagactcttacacacttgatccagataccctccgcaagaagaaaatgcccctcacagaacctttgagaggacggtcaacgtcaccaaaaccaaaatcagtaccaaaggattctacagattcccctggatctgaaaatagagctccctctccccatgtggtacaggaaaacctccacagtgaggtggtcgaagtctgcacctcaagtactttaaaaacaaatagtctaacagacagcacctgcgatgacagcagtgaatttaagagtgtggatgaaggttcaaataaagttcattttagcattggaaaagcaccactgaaagatgaacaggaaatgagagcatctcccaaaataagtcgaaaatgtgctaatagacacaccaggcccaaaaaagaaaaatcgagttttcttttcaaaggagatggatccaagcctttagagccagccaagcaagccatgtctccttctgtggccgaatgtgccagagctgtgtttgcttccttcctctggcatgaaggcatagtacatgatgcaatggcttgttcttctttcctaaagtttcatcctgaactttccaaagaacatgctcctataaggagtagtttaaatagccaacaacctacagaggaaaaagaaaccaagttaaaaaatagacattcattagaaatatcatctgcactgaatatgtttaatattgcaccccatggaccagatatatctaagatgggtagcatcaacaaaaacaaggtattgtctatgcttaaggaaccacctctgcatgaaaaatgtgaggatgggaaaaccgagaccacttttgaaatgtccatgcataacacaatgaagtctaagtctcctcttcccttaactttacaacatttagtggctttttgggaagacatctctttggctactatcaaagctgcttcccagaatatgatttttccaagtcctggttcctgtgcagttcttaaaaagaaagagtgtgagaaagagaataagaagtccaaaaaggaaaaaaagaaaaaagaaaaggcagaagttaggcccaggggtaatttgtttggagagatggcccagctggcagtaggaggaccagagaaagataccatctgtgaactgtgtggggagtcacatccatacccggtgacctatcacatgagacaagctcacccaggttgtggccgatatgctggtggacaaggttacaatagcattgggcatttttgtggaggatgggctggtaactgtggtgatggtggcataggaggaagcacttggtatctggtatgtgatcgctgtagagaaaaatacctccgcgaaaaacaggctgctgcaagggagaaggtcaaacaatctaggagaaaaccaatgcaagtcaagacccctcgtgccttgcccaccatggaagctcaccaggtgattaaagccaatgcactcttcctgctgtccctgagcagtgcagcagaaccgagcattctgtgttaccatcctgcaaagccattccaatctcagttgcccagtgtaaaagaaggcatttctgaggatcttcctgtgaaaatgccttgtctctacctgcagacattagctaggcatcatcatgaaaattttgtgggctatcaagatgacaatctattccaggatgaaatgagatatctacgttcaacatctgtacctgccccgtatatatcagtaactcctgatgcaagtcctaatgtatttgaagagccagagagcaatatgaagtctatgccaccaagtttagaaaccagtcccataactgatactgatcttgcaaagagaactgtcttccaaagatcatactcagttgttgcttccgaatatgataaacaacactccattttacctgcacgagttaaagctattcctagaagaagagttaacagtggagacactgaagttggttcttcccttttgagacatccgtctcctgagctttctcggctaatctcagcccacagctctctttctaaaggagaacgaaatttccagtggccagttttagcttttgttatacaacatcatgatctagaaggtcttgaaatagcaatgaaacaggccctaaggaaatctgcttgtcgagtttttgctatggaggctttcaactggcttctgtgtaatgtcatccaaaccacttctctccatgatattctgtggcattttgtggcatcactgactcctgcaccagtggaaccagaggaagaagaggatgaagaaaataaaacaagcaaagaaaattcagaacaagagaaagatacaagagtatgtgaacatccactctcagacatagtgattgccggggaagctgctcatcctttaccacacacctttcaccgcttgctgcagaccatctcagaccttatgatgtctctccccagcggcagttcattacagcaaatggccctgaggtgctggagtctcaaattcaagcaatctgatcaccagttccttcatcagagcaacgtctttcatcacattaacaatattttgtcaaagtcagatgatggcgatagtgaagagagttttagcatcagtatacagtctggctttgaagctatgagtcaggaattatgcatagtaatgtgcttaaaggacttaaccagcattgttgacataaaaacttcaagccgacctgccatgattggcagtttgacagacggctccacagaaaccttttgggaatcaggagatgaagataaaaacaaaactaagaacatcaccatcaactgtgtaaaaggaatcaatgcccgctatgtgtctgttcacgtggacaattcccgagatcttgggaataaagttacctcaatgaccttcttaactggcaaagcagtagaagatttgtgcagaataaagcaggttgatctggattccaggcacattggctgggtaacaagtgaacttccaggaggggataatcacatcataaaaattgaattaaaaggcccagaaaatacactgagagttcgacaagtcaaagtcctgggctggaaagatggtgaaagcacaaaaatagctggccagatttcagccagtgtggcccagcagaggaactgtgaagctgagactctgcgagtattcagactgattacgtctcaagtatttggaaagctcatctctggagatgctgaacctacaccagaacaagaggaaaaagcactattgtcatcacctgaaggagaagaaaaagtatacaatgcaacatcagatgctgacctgaaagaacatatggttggaatcatattcagcaggagtaagctgactaacttacaaaaacaggtgtgtgctcatattgtccaagctattcgcatggaagctaccagagtccgtgaagaatgggaacatgctatatcaagcaaagaaaatgccaattctcagccaaatgatgaagatgcctcctctgatgcctactgctttgagctgctctctatggttttagcactgagtggctctaacgttggccggcaatatctggctcaacagctaaccctgcttcaggatctcttctcgctgcttcacacagcctctcctagagtccagagacaggtaacctctttactaagaagagttttgcctgaagtaacccctagtcgtctggccagcatcataggagtgaaatccctccccccagcagatatcagtgatatcattcactcaacagagaaaggagactggaataagctgggtatcttggacatgtttctaggatgcattgccaaagcactcactgtacagctaaaagccaaaggaaccaccatcactggaacagctggtaccactgtgggcaaaggagttacaacagttactcttccgatgattttcaattccagttatctccgacgaggtgaaagtcattggtggatgaagggctcaacccctacccagatctcagagatcatcattaaacttatcaaggatatggcagcaggtcatctgtcagaagcttggtcccgagtgacaaaaaatgctattgcagaaaccatcattgccttgaccaagatggaagaagaatttaggtctccagtgagatgtattgcaacaactagactctggcttgctctcgcatccctatgtgttcttgatcaggaccacgtagatcgtctctcctcggggagatggatgggaaaggatggacaacaaaaacaaatgcctatgtgtgataaccatgatgatggtgaaactgcagcaatcattttatgcaatgtctgtggaaatttatgtacagactgtgacagattccttcaccttcatcgaagaaccaaaactcatcaaagacaggtcttcaaagaagaagaagaagctataaaggttgaccttcatgaaggttgtggtagaaccaaattgttctggttgatggcactggcagattctaaaacaatgaaggcaatggtggaattccgagaacacacaggcaaacccaccacgagtagctcagaagcatgtcgcttctgtggttccaggagtggaacagagttatctgctgttggcagtgtttgttctgatgcagattgccaggaatacgctaagatagcctgtagtaagacgcatccttgtggccatccatgcgggggtgttaaaaacgaagagcactgtctgccctgtctacacggctgtgacaaaagtgccacaagcctgaagcaagacgccgatgacatgtgcatgatatgtttcaccgaagcgctctcggcagcaccagccattcagctggattgtagtcacatattccacttacagtgctgtcggcgagtattagaaaatcgatggcttggcccaaggataacatttggatttatatcttgtcccatttgcaagaacaaaattaatcacatagtactaaaagacctacttgatccaataaaagaactctatgaggatgtcagaagaaaagccttaatgagattggaatatgaaggtctgcataagagtgaagctatcacaactcctggtgtgaggttttataatgacccagctggctatgcaatgaatagatatgcatattatgtgtgctacaaatgcagaaaggcatattttggtggtgaagctcgctgcgatgctgaggctggacggggagatgattatgatcccagagagctcatttgtggtgcctgttctgatgtttccagggctcagatgtgtcccaaacatggcacagactttttggaatataaatgtcgctactgctgttcagtggctgtttttttctgttttggaacaacacatttttgtaatgcttgtcatgatgattttcaaagaatgactagcattcctaaggaagaactaccacactgtcctgcaggtcccaaaggcaagcagttagaaggaactgaatgtccactccatgttgttcatccacccactggggaagagtttgctctgggatgtggagtgtgcagaaatgcccacactttttagaacacgcagatcctttgtctacagagagaaaaattgccttcatcccccaagaggatgcggtgaagtttaaactctgctcaggataaggacgggaccatttttacatccatgaaaatgaaccattcacagtgcaagaaggataccaaataccatgtacataattcttgctatgaaaagtttccccattattttggtttatcttcttttgaacaaatgacatcaaacttgtgaggtgtttgcatgtggccattaccgtcattggcctgtgaagcattggacatttatagataattgatataaaagaatcgccatgcccatggactaagaacgatgctggctttcaagcaaaaaagaaaaataatcattgtttattgtatactgcctttttgtaatcctgtacaattgcatcacgggtggggataaaaagaggaatattctggtttatttcctagactgttatttaaaaaaaaaaaaaacattgtgttaggacagcatataaatgtaataagtatcacactgtatataaacatatcaatgtttgtcctgtataagaattactaaattacaaatgcaatttcatttaaacttctaggttaagtttgagcctgaaattttaatgaagtgcaatactgagtgtgcctcattatcttgcagctgtaaacatattggaatgtacatgtcaataaaaccactgtacatttttatacagtgataaagtcta

SEQ ID NO: 184067 - DNA, 15025 bp, Artificial Sequence
  derived and/or modified sequence
cggcggcagtggcggcaccgcctcctcctcacattcccggggtggcggggttagatgagcggccccagtagcggcgagggcggcgcgggggggaggaggagaagaaggaggaggagaaggaggtcgctgtctttgtagtctccctgctgcgggagccagaggccgccgccggagccgtcgtcgttggaaaagggctgtgtgtgcgcgcgcgtgtctgcccgcccggcccgcggggacgaggcggcggcggcggcggcggcggcgaggatgatgatgtgcgcagcgactgcctcccccgccgccgcctcctcggggctcggcggggacggattctacccagccgccaccttctcttcctccccggcgccgggggcgctgttcatgccggttcccgacggctccgtggctgctgcggggctggggctggggctacccgccgcggactcccggggtcactaccagctgctgctgtcaggccgggccctggccgaccgctaccggaggatttataccgctgcgctcaatgacagggaccaggggggcggcagcgctggacacccagcctccaggaataagaaaattttaaataagaagaaattgaaaagaaaacagaagagcaaatcaaaagtgaagacaagaagcaagtctgaaaacttagagaatacagtaatcataccagatatcaaactacatagcaatccttctgctttcaatatttactgtaatgtacgccattgcgttctggaatggcagaaaaaggaaatatcattggcagccgcatctaagaactctgtgcagagtggagaatcagatagtgatgaagaagaggaatccaaagagccccctatcaagcttccaaagattattgaggttggcctttgtgaagtttttgaattgatcaaagagacacgattttctcatccatccctgtgtctcaggagtctccaagccctgctcaacgtgctgcagggccagcagccagaaggcctccagtctgagccacctgaggtcctagagtctctcttccagcttcttttggaaatcaccgttcgaagtactgggatgaatgacagcacaggacagtccttaacagcactttcctgtgcttgcctctttagtctggtggcttcttggggagaaacaggaaggacacttcaggccatctctgctatcctcaccaacaatggaagccatgcttgccaaactattcaggtgccaacaattctaaattcgctacagagaagtgtacaagcagttttggtgggaaaaattcaaattcaggactggtttagtaatggcattaagaaagcagctttaatgcacaagtggccattaaaagaaatatctgttgatgaagatgaccaatgtctacttcagaatgatggattttttctttatctattatgcaaggatggattatataaaataggctctggatacagtggaacagttaggggccatatatacaattctacatcccgtattagaaacagaaaagaaaaaaagtcttggttagggtatgctcagggttatttattatatagagatgtgaataaccacagcatgacagccataaggataagccctgaaacactggagcaagatggtactgtgatgttaccagattgccacactgaaggtcaaaatattttattcactgatggagaatatattaatcagatagctgcttcaagagatgatggctttgttgtcagaatatttgccacaagcactgaacctgttctacagcaagaattgcaacttaaactggctagaaaatgcttacatgcctgtggtatctcactattcgatctggaaaaggacttgcatattataagtacaggatttgatgaggagtcagcaattcttggtgcaggacgagagtttgcgctaatgaaaacagcaaatggaaagatatattacactggcaaataccagagtcttggaatcaaacaaggtggtccttcagcaggaaaatgggttgagctaccaattacaaaatctccaaagatagtacacttctcagttggacacgatggctctcacgcccttttagttgcagaagatgggagcatattctttacaggatctgctagtaaaggagaagatggagaatcaactaagagcagacggcaatccaaaccttataaacctaaaaagataattaagatggaaggaaagattgtggtatatacagcctgcaataatggaagtagttctgttatttctaaagatggagaactctacatgtttggaaaagatgccatttactctgatagttcaagtttggtaactgatttgaagggccattttgtaactcaggtagctatgggcaaagctcacacttgtgttttaatgaagaatggagaggtgtggacatttggtgtaaataataaaggacagtgtggacgagatactggtgccatgaaccaaggtgggaaagggtttggagttgaaaatatggcaacagcaatggatgaagacctggaagaagaactagatgaaaaagatgagaagtctatgatgtgccctccaggcatgcacaaatggaagctggagcagtgcatggtttgcactgtctgtggagactgtacaggttatggagccagctgtgtcagtagtggacggccagacagagtccccggagggatctgtggttgtggttccggagaatctggttgtgctgtgtgtggatgttgcaaggcctgtgcaagagagttagatggtcaagaggcaagacaaagaggaattcttgatgcagtgaaagaaatgatacctttagatcttcttttagctgtcccagtgcccggggttaacattgaagaacaccttcagttacgacaagaagaaaaacggcaacgtgtaatcagaaggcacagattagaggaaggaagaggcccccttgtatttgctggtcctatttttatgaaccatcgagaacaggctctagccagactcagatcccatccagcacagctaaagcataaacgggacaagcacaaagatggaagtggagaaagaggcgaaaaggatgcaagcaaaatcacaacataccctccaggctctgtgcgatttgactgtgagctccgggcagtccaagtcagctgtggatttcaccattcagtggttttaatggaaaatggagatgtctatacatttggttatgggcagcatgggcagctaggacatggagatgtcaactccaggggatgtcccactcttgttcaagcattgccaggccctagcacacaagtcactgcaggcagcaaccatacggcagtacttttaatggatggacaggtcttcacatttggaagtttttctaaaggacaactgggcagaccaattttggatgtgccatattggaatgcaaagccagctcccatgcctaacattggatcaaaatatggaagaaaagctacttggataggtgcaagtggggaccaaacttttttacgaattgatgaagcacttattaattctcatgtacttgctacatcagaaatttttgccagtaaacacataataggcttggtacctgcttctatatcagaacctcctccatttaaatgccttctgataaataaagtggatgggagttgtaaaacttttaatgactcagaacaagaggatctgcaaggatttggtgtgtgtcttgatcctgtatatgatgtaatttggaggtttcgaccaaatactagagagctgtggtgttacaatgcggtggttgctgatgccaggcttccctctgcagcagacatgcagtccagatgtagtatcctaagtcctgaacttgccttaccaacaggatcaagggccctcactacccgatctcatgcagctttgcacattttaggttgtcttgataccttggcagctatgcaggacttaaaaatgggtgttgcaagtacagaggaagagactcaagcagtaatgaaggtttattctaaagaagattatagtgtggtaaacaggtttgaaagtcatggaggaggctggggttattctgcccattcagtagaagctatacgtttcagtgccgacactgatattttacttggtggtcttggtctgtttggaggtagaggagaatatactgctaaaattaagctgtttgaattgggtcctgatggaggagatcatgaaactgatggtgaccttcttgcagagactgatgtattggcttatgactgtgctgctagagaaaaatatgcaatgatgtttgatgagcctgttctcctgcaagctgggtggtggtatgtggcatgggcccgagtgtcaggacccagcagtgactgtggatctcatggacaggcatctattaccacagatgatggggttgttttccagttcaagagttcaaagaaatcaaataatggtacagatgttaatgcgggtcagatacctcagttattatacagacttccaaccagtgatggcagtgcttcaaaaggcaaacagcaaaccagtgaacctgtacacattttaaagaggtcttttgcaagaactgtctcagtggaatgttttgagtcattgttgagtattcttcactggagctggaccaccttagtcttaggagttgaagaacttagaggattaaaaggattccagttcacagctacactcctagatttagagagactgcgctttgtgggtacctgttgtctgaggttattgcgtgtctatacctgtgaaatttacccagtgtcagctacaggaaaagcagttgtagaagaaactagcaaattagcagagtgtattggaaaaaccagaactttgttaagaaaaattttatcagaaggagttgatcactgcatggtgaaattggataatgatcctcaaggatatctcagtcaacccttgagtcttctagaagctgtccttcaggaatgtcataatactttcactgcctgctttcattctttctacccaactcctgccttacagtgggcttgcctttgtgatctgctgaattgtttggatcaggatatccaagaagcaaacttcaagacatcaagtagccgactccttgcagctgttatgtcagctctgtgtcacacgtctgttaagctgacttccatcttcccgattgcgtatgatggagaagtattactacgatcaattgttaaacaagttagtacagagaacgactcaacactagttcatcgttttccccttttggtggcacatatggaaaaactcagccagagtgaagagaatatctcagggatgacaagcttccgtgaagttctggagaaaatgctggtcattgttgtgctaccagtcaggaacagcctgaggagagaaaatgaactcttctcctcccacctcgtctctaacacctgtggattactggccagcattgtcagtgaactgacagcgtcagccctgggatctgaggttgatggacttaattctcttcactctgtaaaagctagtgctaaccgatttacaaaaacaagtcagggcagaagttggaacactgggaacgggtcccctgatgcaatctgtttttcagtagacaaacctggaatagttgtggttggtttctctgtctatggaggaggtggaattcatgaatatgaattagaggtgttggttgatgatagtgaacatgcaggagattcaactcattcccacagatggacatctctggaattagtgaaaggaacgtacacaacggatgactcacccagtgatatagctgagatcagacttgacaaagtggttcctttaaaggaaaatgttaaatatgctgtgcgcttgaggaactatggaagccgtacagccaatggagatggaggaatgaccacagttcagtgccctgatggtgtgacattcacattcagcacgtgcagcttgagcagtaacggcacaaaccaaaccagaggacagatcccacagatactctactataggagtgaatttgatggagatttacaatcccaacttctgagtaaagccaatgaagaagataaaaactgtagcagagcattgtctgttgtaagcactgtcgttcgagcctctaaggacctcctgcacagagctcttgctgtggatgctgatgacattccagaactgctgagttcttccagtctgttttccatgctgctcccccttattatagcctacataggaccagtagctgctgctattcccaaggtggctgtagaagtctttggccttgtccaacaattgcttccgtcagttgccattttgaatcagaagtatgcaccgcctgccttcaaccctaatcagtcgacagatagcaccacaggaaaccagcctgaacagggcctctctgcttgtacaacctccagtcactatgctgtcatagagagtgagcacccgtataaacctgcctgtgtgatgcattacaaggtgacattcccagaatgtgtgaggtggatgacaatcgaatttgaccctcagtgtggtactgcacagtcagaagatgtccttcgtttgttgattcctgtcagaactgttcagaattcaggatatggaccaaaattgacatctgttcatgaaaatcttaattcatggatagaattaaagaaattttcaggatcctctgggtggcctactatggttttggtgttgccaggaaatgaggcccttttttcattggagactgcatcagattatgtgaaagatgacaaagcttctttctatggttttaagtgttttgcaattggatatgaatttagccctggacctgatgagggagtcatccaattggaaaaagaattagccaatcttggtggggtttgtgcagcagctctgatgaagaaggacctagcacttcctattggtaatgaattagaagaagaccttgaaattcttgaggaggctgcattgcaggtgtgcaaaacccattctggaattcttggaaagggtctagctctttctcattcaccaactatattagaagcacttgagggaaatttaccactccaaatccaaagcaatgaacagtcttttctggatgattttattgcctgtgtcccaggatcaagtggtggaaggcttgcaaggtggcttcagccagattcatatgcggatcctcagaaaacatctttgatcctgaataaggatgatattcgttgtggttggcctaccaccataactgttcaaacaaaagaccagtatggggatgtggtacatgttcccaatatgaaggtggaagtgaaagctgtccctgtttctcagaaaaaaatgtctttacaacaagatcaagcaaagaaacctcaaaggattcctggcagtcctgcagtaacagctgcatcttctaatactgacatgacttatggagggctggcatcaccaaagctagatgtttcatatgaaccaatgatagtgaaggaagctcgatatattgccataacaatgatgaaggtttatgaaaattattcatttgaagaactacgttttgcatcaccaactcctaagagacccagtgagaatatgctgatccgtgtcaataatgatgggacttattgtgcaaattggactccaggggctattggactctacactcttcatgttaccattgatggcattgaaatcgatgctggtctggaagtaaaagtaaaagacccaccaaaagggatgataccaccaggaactcagttggtcaaaccaaagtctgaacctcagcctaataaggttcgaaaatttgtggccaaggacagtgcggggcttcgcatccgtagccacccttcccttcagagtgagcagataggcatagtgaaagtcaatggaactatcacttttattgatgagatccataatgatgatggtgtgtggctgaggctgaatgatgagacaataaagaagtatgtccctaacatgaatggttacactgaagcctggtgcctctcttttaatcaacatcttggcaagagtcttctggtccctgttgacgaatctaaaactaatactgatgactttttcaaagacataaactcctgctgcccacaggaagcaacaatgcaagaacaagatatgccattcttgcgaggagggccaggcatgtacaaggtagtgaagacgggaccttcaggtcacaacatcagaagctgccctaaccttagaggtatcccaattggaatgttagttctgggaaacaaagtcaaagcagtgggagaggtaaccaattctgaagggacatgggtgcaactggatcagaacagcatggtagagttctgtgagagtgatgaaggagaggcatggtccttagctagagacagaggcggaaaccagtacctccgacatgaagatgaacaagctcttctggatcagaattctcaaactcctcctccaagccctttctcagtgcaagcttttaataaaggggcaagttgcagtgcccaaggatttgattatggactcggaaatagcaaaggtgatcgaggaaacatctcaacatcttctaaaccagcctctacatcaggaaaatcagagctgtcctctaaacacagcagatcgcttaaacctgatggacgtatgagccggactactgctgatcagaagaagccaaggggcacagaaagtttatctgctagtgaatccctcatcttaaaatctgatgctgcaaagttgaggtcagattcccacagtaggtcattatcccccaaccataacaccttgcagacattgaaatctgatgggaggatgccttctagctccagagctgaatccccaggaccaggttctcggttgtcatctcctaagccaaagactctcccagccaataggtctagcccatcgggtgctagttctccacgctcctcctcaccacatgataaaaatctacctcaaaaaagtactgctcctgttaagacaaagcttgatcctcctcgggaacgttctaaatcagactcttacacacttgatccagataccctccgcaagaagaaaatgcccctcacagaacctttgagaggacggtcaacgtcaccaaaaccaaaatcagtaccaaaggattctacagattcccctggatctgaaaatagagctccctctccccatgtggtacaggaaaacctccacagtgaggtggtcgaagtctgcacctcaagtactttaaaaacaaatagtctaacagacagcacctgcgatgacagcagtgaatttaagagtgtggatgaaggttcaaataaagttcattttagcattggaaaagcaccactgaaagatgaacaggaaatgagagcatctcccaaaataagtcgaaaatgtgctaatagacacaccaggcccaaaaaagaaaaatcgagttttcttttcaaaggagatggatccaagcctttagagccagccaagcaagccatgtctccttctgtggccgaatgtgccagagctgtgtttgcttccttcctctggcatgaaggcatagtacatgatgcaatggcttgttcttctttcctaaagtttcatcctgaactttccaaagaacatgctcctataaggagtagtttaaatagccaacaacctacagaggaaaaagaaaccaagttaaaaaatagacattcattagaaatatcatctgcactgaatatgtttaatattgcaccccatggaccagatatatctaagatgggtagcatcaacaaaaacaaggtattgtctatgcttaaggaaccacctctgcatgaaaaatgtgaggatgggaaaaccgagaccacttttgaaatgtccatgcataacacaatgaagtctaagtctcctcttcccttaactttacaacatttagtggctttttgggaagacatctctttggctactatcaaagctgcttcccagaatatgatttttccaagtcctggttcctgtgcagttcttaaaaagaaagagtgtgagaaagagaataagaagtccaaaaaggaaaaaaagaaaaaagaaaaggcagaagttaggcccaggggtaatttgtttggagagatggcccagctggcagtaggaggaccagagaaagataccatctgtgaactgtgtggggagtcacatccatacccggtgacctatcacatgagacaagctcacccaggttgtggccgatatgctggtggacaaggttacaatagcattgggcatttttgtggaggatgggctggtaactgtggtgatggtggcataggaggaagcacttggtatctggtatgtgatcgctgtagagaaaaatacctccgcgaaaaacaggctgctgcaagggagaaggtcaaacaatctaggagaaaaccaatgcaagtcaagacccctcgtgccttgcccaccatggaagctcaccaggtgattaaagccaatgcactcttcctgctgtccctgagcagtgcagcagaaccgagcattctgtgttaccatcctgcaaagccattccaatctcagttgcccagtgtaaaagaaggcatttctgaggatcttcctgtgaaaatgccttgtctctacctgcagacattagctaggcatcatcatgaaaattttgtgggctatcaagatgacaatctattccaggatgaaatgagatatctacgttcaacatctgtacctgccccgtatatatcagtaactcctgatgcaagtcctaatgtatttgaagagccagagagcaatatgaagtctatgccaccaagtttagaaaccagtcccataactgatactgatcttgcaaagagaactgtcttccaaagatcatactcagttgttgcttccgaatatgataaacaacactccattttacctgcacgagttaaagctattcctagaagaagagttaacagtggagacactgaagttggttcttcccttttgagacatccgtctcctgagctttctcggctaatctcagcccacagctctctttctaaaggagaacgaaatttccagtggccagttttagcttttgttatacaacatcatgatctagaaggtcttgaaatagcaatgaaacaggccctaaggaaatctgcttgtcgagtttttgctatggaggctttcaactggcttctgtgtaatgtcatccaaaccacttctctccatgatattctgtggcattttgtggcatcactgactcctgcaccagtggaaccagaggaagaagaggatgaagaaaataaaacaagcaaagaaaattcagaacaagagaaagatacaagagtatgtgaacatccactctcagacatagtgattgccggggaagctgctcatcctttaccacacacctttcaccgcttgctgcagaccatctcagaccttatgatgtctctccccagcggcagttcattacagcaaatggccctgaggtgctggagtctcaaattcaagcaatctgatcaccagttccttcatcagagcaacgtctttcatcacattaacaatattttgtcaaagtcagatgatggcgatagtgaagagagttttagcatcagtatacagtctggctttgaagctatgagtcaggaattatgcatagtaatgtgcttaaaggacttaaccagcattgttgacataaaaacttcaagccgacctgccatgattggcagtttgacagacggctccacagaaaccttttgggaatcaggagatgaagataaaaacaaaactaagaacatcaccatcaactgtgtaaaaggaatcaatgcccgctatgtgtctgttcacgtggacaattcccgagatcttgggaataaagttacctcaatgaccttcttaactggcaaagcagtagaagatttgtgcagaataaagcaggttgatctggattccaggcacattggctgggtaacaagtgaacttccaggaggggataatcacatcataaaaattgaattaaaaggcccagaaaatacactgagagttcgacaagtcaaagtcctgggctggaaagatggtgaaagcacaaaaatagctggccagatttcagccagtgtggcccagcagaggaactgtgaagctgagactctgcgagtattcagactgattacgtctcaagtatttggaaagctcatctctggagatgctgaacctacaccagaacaagaggaaaaagcactattgtcatcacctgaaggagaagaaaaagtatacaatgcaacatcagatgctgacctgaaagaacatatggttggaatcatattcagcaggagtaagctgactaacttacaaaaacaggtgtgtgctcatattgtccaagctattcgcatggaagctaccagagtccgtgaagaatgggaacatgctatatcaagcaaagaaaatgccaattctcagccaaatgatgaagatgcctcctctgatgcctactgctttgagctgctctctatggttttagcactgagtggctctaacgttggccggcaatatctggctcaacagctaaccctgcttcaggatctcttctcgctgcttcacacagcctctcctagagtccagagacaggtaacctctttactaagaagagttttgcctgaagtaacccctagtcgtctggccagcatcataggagtgaaatccctccccccagcagatatcagtgatatcattcactcaacagagaaaggagactggaataagctgggtatcttggacatgtttctaggatgcattgccaaagcactcactgtacagctaaaagccaaaggaaccaccatcactggaacagctggtaccactgtgggcaaaggagttacaacagttactcttccgatgattttcaattccagttatctccgacgaggtgaaagtcattggtggatgaagggctcaacccctacccagatctcagagatcatcattaaacttatcaaggatatggcagcaggtcatctgtcagaagcttggtcccgagtgacaaaaaatgctattgcagaaaccatcattgccttgaccaagatggaagaagaatttaggtctccagtgagatgtattgcaacaactagactctggcttgctctcgcatccctatgtgttcttgatcaggaccacgtagatcgtctctcctcggggagatggatgggaaaggatggacaacaaaaacaaatgcctatgtgtgataaccatgatgatggtgaaactgcagcaatcattttatgcaatgtctgtggaaatttatgtacagactgtgacagattccttcaccttcatcgaagaaccaaaactcatcaaagacaggtcttcaaagaagaagaagaagctataaaggttgaccttcatgaaggttgtggtagaaccaaattgttctggttgatggcactggcagattctaaaacaatgaaggcaatggtggaattccgagaacacacaggcaaacccaccacgagtagctcagaagcatgtcgcttctgtggttccaggagtggaacagagttatctgctgttggcagtgtttgttctgatgcagattgccaggaatacgctaagatagcctgtagtaagacgcatccttgtggccatccatgcgggggtgttaaaaacgaagagcactgtctgccctgtctacacggctgtgacaaaagtgccacaagcctgaagcaagacgccgatgacatgtgcatgatatgtttcaccgaagcgctctcggcagcaccagccattcagctggattgtagtcacatattccacttacagtgctgtcggcgagtattagaaaatcgatggcttggcccaaggataacatttggatttatatcttgtcccatttgcaagaacaaaattaatcacatagtactaaaagacctacttgatccaataaaagaactctatgaggatgtcagaagaaaagccttaatgagattggaatatgaaggtctgcataagagtgaagctatcacaactcctggtgtgaggttttataatgacccagctggctatgcaatgaatagatatgcatattatgtgtgctacaaatgcagaaaggcatattttggtggtgaagctcgctgcgatgctgaggctggacggggagatgattatgatcccagagagctcatttgtggtgcctgttctgatgtttccagggctcagatgtgtcccaaacatggcacagactttttggaatataaatgtcgctactgctgttcagtggctgtttttttctgttttggaacaacacatttttgtaatgcttgtcatgatgattttcaaagaatgactagcattcctaaggaagaactaccacactgtcctgcaggtcccaaaggcaagcagttagaaggaactgaatgtccactccatgttgttcatccacccactggggaagagtttgctctgggatgtggagtgtgcagaaatgcccacactttttagaacacgcagatcctttgtctacagagagaaaaattgccttcatcccccaagaggatgcggtgaagtttaaactctgctcaggataaggacgggaccatttttacatccatgaaaatgaaccattcacagtgcaagaaggataccaaataccatgtacataattcttgctatgaaaagtttccccattattttggtttatcttcttttgaacaaatgacatcaaacttgtgaggtgtttgcatgtggccattaccgtcattggcctgtgaagcattggacatttatagataattgatataaaagaatcgccatgcccatggactaagaacgatgctggctttcaagcaaaaaagaaaaataatcattgtttattgtatactgcctttttgtaatcctgtacaattgcatcacgggtggggataaaaagaggaatattctggtttatttcctagactgttatttaaaaaaaaaaaaaacattgtgttaggacagcatataaatgtaataagtatcacactgtatataaacatatcaatgtttgtcctgtataagaattactaaattacaaatgcaatttcatttaaacttctaggttaagtttgagcctgaaattttaatgaagtgcaatactgagtgtgcctcattatcttgcagctgtaaacatattggaatgtacatgtcaataaaaccactgtacatttttatacagtgataaagtcta

SEQ ID NO: 184068 - DNA, 13923 bp, Artificial Sequence
  derived and/or modified sequence
atgcctgtacccgatggatctgtggccgctgccggtctgggactggggttacctgctgccgattctagaggacactaccagcttctgttgtcaggcagggccttggctgataggtatcggaggatttacactgctgccctaaatgacagggatcaggggggaggttccgctggacacccggcatcccgcaacaagaagatcctcaataaaaagaaacttaagaggaagcaaaaatcaaaaagcaaagtcaaaacccggtccaaaagtgaaaatctggagaataccgtgattattcccgacatcaaactccattccaacccaagtgcatttaatatctactgtaacgtgcggcactgtgttttagaatggcaaaagaaggagatcagcctggcagctgcttccaaaaatagcgttcagagcggagagagcgatagtgatgaagaggaagaaagtaaagaaccaccaataaagctgccaaaaatcattgaggtcggcctatgtgaggtgtttgaactcatcaaagaaactcggttctcacacccgagcttgtgcctccgaagtcttcaggccttgctgaacgttttgcaggggcaacagcctgaagggctgcagtctgagcctcctgaggtcctcgagagtcttttccaactgctgctcgagatcacggtcagatcaacaggtatgaatgattctactggtcagagtttaactgccttgtcttgcgcttgcttgttcagtcttgtggcttcttggggcgaaactggcaggacgcttcaagccatctccgccatcttaacaaacaatggctcacacgcatgtcaaacaatccaggtcccaaccatcctgaactctctgcaacggtcagtacaggctgtattggtgggcaagattcaaattcaggattggtttagcaatgggatcaagaaggctgcactcatgcataagtggcctcttaaagaaatctctgtggacgaggacgatcagtgtctcctgcagaatgacggatttttcctgtacctgctctgcaaggacggcttgtataagattgggtctggttacagcggtactgtcagaggccacatctacaattctacttcacgcatccggaacagaaaggagaagaagagctggctggggtacgcacagggctatttgctataccgggacgtgaacaaccacagtatgacagccatcaggataagtccagaaacattggagcaggacggcacggtcatgctgccggattgccatacggaagggcagaacatcctgtttaccgatggagagtacattaaccaaatcgcagcatctagggacgatgggtttgtagtgagaatcttcgccacgagcaccgaacctgtgctgcagcaagagctccagctgaagctcgcccgaaagtgtcttcacgcctgcgggatttcacttttcgaccttgagaaagacctccatatcatcagcacagggttcgacgaggaatctgcaattctgggggctgggagagagtttgcactcatgaagaccgccaacgggaagatctactataccggaaagtaccagtctttgggcatcaagcagggcggtcctagcgcgggtaaatgggtcgagctccccattacgaagagccctaaaatcgtgcactttagtgttggtcatgatgggtcacatgcactgctcgtggctgaagatggtagcatctttttcacagggtcagcctcaaaaggagaagacggtgagagcaccaagtccagacgacaaagtaagccctataaaccgaagaagattattaagatggagggaaagatagtcgtctatacggcctgtaacaacggtagttcttctgttatctccaaagatggcgagttgtatatgttcggcaaagacgcaatttattctgacagtagctccttggtcacagaccttaaagggcatttcgtcacacaagtcgctatggggaaggctcacacatgtgtgctgatgaagaatggggaggtttggactttcggcgtgaacaacaagggacagtgcggccgtgacacaggtgctatgaaccagggcggaaagggcttcggcgtcgagaacatggcaactgccatggatgaggacctcgaagaggagctcgacgagaaagatgaaaagtcaatgatgtgcccaccgggaatgcacaaatggaagctggaacagtgcatggtttgtactgtgtgtggcgactgcactggctacggagcgtcttgtgtgtcatcaggtagaccagatagagtcccgggtggtatctgcggatgcggcagcggtgagagtggctgtgcggtttgcgggtgctgtaaagcatgcgcacgggagctcgacggtcaagaggcaagacagaggggcatcctagacgctgtgaaagagatgatcccgcttgacctgttactcgccgttcctgtgcctggagttaacatcgaggagcacctgcaactccgccaggaagagaagagacagagggttatccgcaggcacagacttgaggagggcagaggtccgcttgtatttgcgggtccgattttcatgaatcatagggagcaggctttggcccgactcaggtcccacccggcacagctgaagcataagcgggataagcacaaagatggaagcggagagagaggggaaaaagatgcctcaaaaatcaccacttacccgccaggatccgtccgcttcgactgtgagcttcgggcagtgcaggtttcgtgtgggtttcaccacagcgtggttctgatggaaaatggcgacgtgtatacgttcggctatggacagcatgggcaacttgggcatggcgacgtgaattctagaggatgccccactctcgtgcaggcccttccaggcccttccacccaggtgactgccggaagcaatcatacggcggtgttgcttatggatggacaggtgtttacattcggttctttttctaagggccagctggggcgaccgattttagatgttccatactggaacgcaaaaccagcgcctatgcccaatattgggtccaagtacggacgcaaggccacttggatcggggcttccggtgatcagacatttcttcggatagatgaggctttgatcaattctcacgtgctggctacgtcggagattttcgcatctaaacacataatagggttagtgccagcttctatctctgaaccacctccatttaaatgcctgctgattaataaagtggacggaagctgcaagacattcaatgacagtgagcaggaggatctgcagggtttcggtgtatgcttggacccagtttatgatgtaatctggcggtttagacctaacacccgggaactctggtgctataatgctgtggtggctgatgctcgcctcccttcagcagcagacatgcagtcacgatgttctattctgtcaccagagctggcgctgcccactggctctcgagcactgacaacgcgtagccatgcagctcttcacattctgggatgtttggacaccctggcagcgatgcaggatctgaaaatgggggtagcttctacagaggaggaaactcaggcggtgatgaaggtgtacagtaaggaggactactcagtggtcaaccgtttcgaatcacatggaggaggctgggggtattctgcgcacagcgtggaggctatccgcttctctgctgatacggacatcttgctgggcggtttgggactgttcggagggagaggggagtataccgccaaaatcaagttgttcgagcttggtcccgatggcggagatcacgaaactgatggggatctcctggccgagaccgacgttctggcctatgactgtgccgcaagggaaaaatacgctatgatgtttgatgagccagttctgttgcaagctggatggtggtatgtagcttgggcaagggtgagtgggccaagctctgactgcggaagtcatgggcaggcctctatcaccacagacgacggagtggtttttcagtttaagagttcaaaaaaaagtaataatggtaccgacgttaacgcaggacagattcctcagctgttgtatcgcctccccacatccgatgggtcagccagcaaaggaaagcagcagacctcggagccagtccatattctgaagcgcagttttgcgagaaccgtgtctgtagagtgctttgaatctcttctgtctattcttcactggagctggactacactggttctaggtgttgaggaactgagaggcctgaagggcttccaatttaccgccactttactcgacctggagcggctgagatttgtgggaacatgctgcctcagactgcttagagtttatacctgtgaaatatacccagtctctgcaactggaaaggccgttgtggaagaaacctctaaacttgcggagtgcattggaaagaccaggaccctcctgcgcaaaattctgtcagagggcgtagatcattgtatggttaaacttgacaatgatcctcagggttatctgagtcagcccctctcactgctggaggccgtgttgcaggagtgccataacacctttacagcctgctttcactcattctatcccacccccgctcttcagtgggcctgcttgtgtgatctgctcaattgtctagatcaggatatccaggaggctaacttcaaaactagttcatctaggctcctggcagctgttatgagtgcgttgtgccatacaagcgttaaactaacatccatattcccaattgcttatgacggcgaggtgctgctccggtccattgtgaaacaggtgtcaacagagaacgattccacgttggtccaccggttccctctgcttgttgcccacatggaaaagctctctcagtcggaagagaacatctctggcatgaccagtttccgggaggtgcttgagaaaatgttagtcattgtggttttaccagtgcgaaactctcttcgcagggagaacgagttgttcagttcccatttggtgagcaacacgtgcggactgctcgcttctatcgtaagtgagctgactgcctctgcacttgggtccgaagtggacggactgaacagcctgcattctgtgaaagcgtccgcgaaccggttcaccaaaactagccaagggaggtcatggaacactggaaacgggtctccagacgcgatttgtttttctgttgataagcccggtattgtagtggtcgggttcagcgtgtacggagggggtggcatccacgagtacgagttagaagttctcgtggacgattctgaacacgctggggacagcacccacagtcacagatggacctccctggagttagttaagggcacctacaccacagacgactcccctagcgacatcgcagagatccgccttgacaaagtggttcccctcaaagaaaacgtaaagtacgctgtcaggctccggaactacggatctagaaccgccaacggggacggcggtatgaccaccgtgcaatgtcccgatggggtaacgtttactttcagtacgtgtagtttgagttcaaacgggacaaatcagacccgaggacagattcctcagatcctttactaccgctctgaatttgacggggacttacagtcacagctcctttcaaaggccaacgaggaggataaaaattgttcaagggcacttagtgtggtgagtacggttgtcagagcgagcaaagatttgcttcaccgcgcactcgctgttgacgcagatgatatccccgagctattgtcgtccagctctctgtttagcatgcttctgcctctgattattgcttatatcggaccagtcgccgcagcaatccccaaggtggcagtggaggtcttcgggctggtccagcagctcctaccctctgttgcgatactaaaccagaagtacgcccctcccgctttcaatcctaatcagtctacggactctaccacagggaatcagccagaacagggactgagtgcgtgcacgactagctcacactacgccgtaattgaaagcgagcacccctacaagccagcctgcgtgatgcattacaaagtgactttccccgaatgtgtacggtggatgacgattgagttcgacccccagtgcggcacagcccaaagcgaggatgtgctgcgtctgttgatcccggtcagaactgtccagaatagcggatacgggcctaagctgaccagcgtgcacgaaaatctcaactcttggatagagttgaaaaaattttccggctccagtggctggcccaccatggtgttggtcctacctggaaatgaggcattattttctttggaaaccgcatcagattacgttaaggacgacaaagccagtttctacggctttaagtgtttcgccatcggttatgagttctctccgggacccgacgaaggcgtcattcagctcgagaaagagttagctaatcttggcggtgtgtgcgcagctgctctcatgaagaaggatctggcgctgccaattggcaacgaactggaagaggacctggagatcctggaggaagcggctctacaagtgtgtaagacacactccgggatcctcggtaaaggattagccctgagccactctcctacaattctagaggcgttggagggaaacctccctctgcagatccagtcaaacgagcagtcattcctggatgactttatcgcttgcgttcccggaagctcaggcggaagactagctcgatggttgcagcccgacagttacgccgaccctcagaaaacgtccctgatcttgaacaaggatgatatacgctgtggttggcccaccaccatcacagttcagaccaaagaccagtatggcgatgttgtccacgtacctaatatgaaagttgaagtgaaagccgtgcccgtgtctcagaagaagatgagtctacaacaagaccaagcaaaaaagccacagcgcataccagggtctcctgccgtgaccgcagcttcttccaatacggacatgacatacgggggactggcatcacctaagctcgacgtgagttacgaaccgatgatagtgaaggaggcacggtacattgcgatcactatgatgaaggtgtatgagaattatagcttcgaggagcttagatttgcttcccctaccccaaaaaggccctcggagaatatgctcattcgcgtgaacaacgatgggacctactgcgccaattggacacctggcgctatcggtctgtacactctccatgttactattgacggtatagagatcgacgccggtctcgaggtgaaggttaaggatccaccaaagggtatgatcccacccggaactcagctcgtgaagccgaaatcagaaccacagcctaataaagtgcgcaagtttgtcgccaaggatagtgcagggctgcggatccgatctcatccgtccctccagtccgagcaaattgggattgttaaggttaacggcactatcacatttatagacgaaatccacaatgatgacggcgtatggctgagattgaacgacgaaactatcaagaaatatgttcctaatatgaatggctataccgaagcttggtgtctaagcttcaatcagcatctgggaaaaagtctcttggttcctgtggatgaaagtaagacgaatactgatgatttctttaaggatattaacagctgctgcccacaagaagcaactatgcaggagcaagacatgccttttcttaggggaggcccaggcatgtataaggtggtcaaaactggaccctctggtcacaatatacgttcatgccccaacttaaggggcatccccataggcatgttggtcctgggaaataaagtgaaggcagtaggggaggtgaccaacagcgagggaacatgggtgcaactggaccagaacagtatggtggagttctgcgaatccgacgaaggcgaggcttggtcactggcccgtgacagaggcggaaaccagtacttaagacatgaagacgaacaagcattactggaccaaaatagccagacaccgccaccaagccctttttctgtgcaggccttcaataagggcgcaagttgttctgcgcaaggctttgactacggccttggcaacagcaagggcgaccgcggaaacattagcacaagtagcaagccagcctcaacctccggaaagtccgagctttccagtaagcactcgcgctcccttaaacctgatggccgaatgtcccggaccactgccgaccagaaaaaacctcgcggtacagagagcctgagcgcaagcgagagcttaattcttaagagcgatgccgcaaagctgcgctctgattctcactcccgaagtctgtcacccaatcacaacacgctgcagacccttaagtctgacggtcggatgccatcaagcagtagagcggagagcccgggacccggatctcgtctgagcagcccgaagcccaaaactctgcccgcaaaccgtagctcccccagtggtgccagtagcccaaggtccagctctccccacgataaaaatttgcctcagaaaagtactgctccagtcaaaactaaacttgacccacccagagaaaggagcaagtccgatagctatacactggacccagatacactccgcaagaagaaaatgcctttaacggaacccctcagagggaggtccacctcccctaaacctaagagtgtgcccaaagattcaaccgattcccctggctccgagaatcgcgctccaagcccgcatgtggtgcaggaaaacctgcatagcgaagtggtggaggtttgcacctcttctaccctgaaaacaaactcattgactgacagcacatgcgacgactcatcagagttcaagtccgtggatgagggctcaaataaggtccacttcagcatcggtaaagctccgctgaaagacgaacaggagatgcgggcatctcccaagatcagcagaaaatgcgccaaccgccacactaggcctaagaaggagaagtcctcctttctgttcaaaggagatggtagtaagcccttggagcccgcaaaacaggctatgagccccagcgtggccgaatgcgctcgcgcagtcttcgcctccttcctttggcacgaaggaattgttcacgacgccatggcctgcagcagtttcctcaaatttcaccctgagctgtccaaagagcatgccccaattagatcctccctcaattcccaacaacctactgaagagaaagaaacgaaactgaagaacaggcattccctcgaaatctcctcagctttaaacatgttcaatatagcacctcacgggccagatatatcgaaaatgggctccattaacaagaacaaggtcctcagcatgctgaaggagcctcctttgcatgaaaagtgcgaggacggaaaaacagagaccactttcgaaatgtctatgcataataccatgaagagtaaatccccattgccccttactctccagcatctggtggccttttgggaagacatctccctagcgacaatcaaggctgctagtcagaacatgattttcccttctcccggatcctgcgccgtcctcaagaagaaagaatgcgagaaagagaacaagaagtcaaaaaaggagaaaaagaaaaaagagaaagccgaagtgaggcctaggggcaacctgtttggggaaatggcccaactggccgtggggggtcccgaaaaagacaccatctgcgagctctgtggtgagagccatccctatcccgttacttaccacatgcgccaggcacatcctggttgcggaaggtatgctggtggtcagggctacaacagtataggccacttttgtggcggatgggccggtaattgtggggacggagggatcgggggatcgacatggtatctggtatgtgataggtgcagggaaaaatacttgcgcgagaagcaggccgcagccagagaaaaagtgaagcagagcaggcggaaaccaatgcaggtaaagactcccagggccctgccgacaatggaagcgcaccaggtcataaaggcaaatgctctctttctcctgtcactgagcagcgccgctgagccgagtatcctgtgttaccacccagctaagcccttccagagccagctccctagcgttaaggagggcatatccgaggaccttcctgtgaaaatgccatgcctctatttgcaaaccctcgctcgacaccaccacgagaactttgttggctatcaggacgacaatctcttccaggatgaaatgcggtacctccgatccacttctgtgccagccccatacatctccgtgacacctgacgccagccccaatgtcttcgaggagccagagtctaacatgaaaagtatgccaccttccctggagaccagcccaatcactgatacagacctggctaagcgaactgtgtttcagcgatcttactctgtggtggcctcggaatacgacaagcagcactctatcctccccgcaagggtgaaggcaatccctcgacggcgagtaaacagtggcgatacagaagtgggctctagtctgttaagacacccgagcccggaactgagtcgcctcatttccgcacattcctcgctttcaaagggagagagaaacttccagtggcccgtgcttgcctttgtcattcagcaccatgacctggaaggactggagatcgccatgaaacaggcactacggaagagtgcctgtcgggtgttcgctatggaagctttcaactggctgctctgcaacgtgatccaaactacatccctccacgacatcttatggcatttcgtggccagcttaacccccgctccggtggaacccgaagaagaggaagacgaggagaacaagacatcgaaagaaaattccgagcaggagaaggacacgagggtctgcgaacaccccctgtccgatatagtgatcgccggtgaggctgcgcaccccctgccgcatacatttcacagactcctgcagaccataagcgatcttatgatgtcccttccttcaggaagcagtctccagcagatggcgctccgctgttggagtctgaaattcaagcagagtgatcaccagtttctgcatcagtctaatgtgttccaccatatcaacaatatcttgtcaaaatctgacgatggagactctgaagagtcattttccatttccattcagagcgggttcgaagccatgagccaagaactgtgcatagtgatgtgccttaaggacctgacctcaattgtggacatcaagacttcatctcgccctgctatgataggatctctcaccgacggcagcaccgaaacattttgggaaagtggcgacgaggacaaaaataagaccaagaatataactataaactgcgtcaagggtatcaacgcgcgttatgtttctgtccacgtagacaatagcagggacttgggtaataaagtaacctcgatgaccttccttactgggaaggcagtcgaagatctctgcagaatcaagcaagtggacctggactccaggcacatcggatgggttacttctgagcttccagggggagacaaccatattataaaaatcgagctgaagggtcctgaaaatactctgagagttaggcaggttaaggtgctcggctggaaagatggggagtccacaaaaatagccggacagatctccgcttcagttgcccagcagagaaactgtgaggctgaaacccttcgcgtcttcaggctaatcacatcacaagtgttcggcaaactcataagtggcgatgccgaacctacccctgaacaagaggagaaggctctgctgagttctcctgagggcgaggagaaggtctacaatgccaccagcgacgctgacttgaaggaacacatggtaggcatcatctttagccgttcaaaacttaccaatttacaaaagcaggtgtgtgcccacatagtccaggccatccggatggaagctacccgggttcgggaggagtgggaacacgccatctcatctaaagaaaatgccaactcccagcccaatgatgaggacgcgtcatcggacgcctactgttttgaactgctgtctatggtcctcgccctgagtggcagtaacgtaggacgccagtacttagcccaacagctgacactgttacaggatctgtttagcttgcttcataccgcgagccccagggtgcaacgtcaggtgacaagcctgctgagacgagtgctgcctgaggttactccgagtagactggcaagcattataggcgtgaaatccttaccaccagccgatatctccgacataattcatagtactgaaaagggagactggaataaactagggatactggatatgttcctcggttgcattgccaaggctttgacggttcagctgaaagctaaaggcaccactatcaccggtaccgctggaactacggtaggcaaaggagtgactacagtgacactgcctatgatcttcaattcctcatacctccgtcgcggagagtctcattggtggatgaaaggtagtactccaacgcaaatctcggagattatcataaagctgataaaggacatggccgcagggcacctgagcgaggcgtggagtcgcgtgaccaagaacgctatcgcagagacaataatcgctctgaccaaaatggaagaagagtttagatccccagtgagatgtatcgccacgacacgcctgtggctagccctggcatcattgtgtgtattagaccaggaccacgtggatagattaagcagcgggcgatggatgggaaaggacggacagcagaagcaaatgcccatgtgtgacaaccatgatgacggcgaaaccgccgctatcattctgtgtaacgtgtgcgggaatctgtgcaccgactgtgaccgatttctgcatctacaccggcgaactaaaacacaccagaggcaagtgtttaaggaagaggaagaggcaattaaggtcgacctgcacgaagggtgtggacgcaccaaactcttctggttaatggcactcgccgacagcaagaccatgaaagctatggtcgaattcagagagcatacaggtaagcccactacctccagctccgaggcctgtaggttttgcggcagtcggagtggaacggagctcagcgcggtgggaagcgtttgcagcgacgccgactgccaggaatacgcaaagatcgcctgcagcaagacacatccttgtgggcacccttgtggaggggtgaaaaacgaagagcattgtctgccctgtctgcatggctgtgacaaatctgccacttccctgaaacaagacgcagacgatatgtgcatgatctgcttcaccgaagccctttccgccgcacctgcaattcaactggactgctcccacatatttcatctgcagtgctgcaggcgggtccttgaaaatagatggctcgggccacgcatcacttttggttttatcagttgtcccatctgtaagaacaaaattaaccatatagttctgaaggacctgctggacccaataaaggagctgtacgaagacgtccgacgcaaagccctaatgcgtctggaatacgagggccttcacaaatccgaagctataaccacgccgggagtgcggttctataatgatcctgccggttatgctatgaaccgctatgcttattacgtttgctataagtgtaggaaggcttacttcggcggtgaggctcgatgtgacgcagaggctggcagaggggatgattatgaccccagggaactcatctgcggagcatgctcagacgtcagcagagctcagatgtgcccaaaacatggaacagacttcctggagtataagtgtcgatattgctgttccgtagccgtctttttctgcttcggcaccacacacttttgtaacgcctgccacgacgacttccagcgtatgacttctatcccaaaggaggagttgcctcactgccccgcaggtcccaagggaaaacagctcgaggggacggaatgccctctgcacgtggtgcaccccccaaccggcgaggagttcgcccttgggtgcggagtgtgccggaatgcccacacattctat

SEQ ID NO: 184069 - DNA, 14037 bp, Artificial Sequence
  derived and/or modified sequence
atgatgatgtgtgcagcaactgcctctccggcagccgctagtagcgggttggggggagatggattttatcctgcagctacgttttccagctcaccggctcctggcgcactgtttatgccagtcccagacggaagcgtggccgcagccggactggggctaggtcttccggctgcagattctcgtggccattatcagctgctgctctcaggcagggctctggcagaccgataccgcaggatttacaccgcagcgctgaatgaccgcgaccagggaggtggtagcgcagggcaccccgcatcgaggaataaaaaaattctgaataaaaagaagctaaagagaaaacagaaatcaaaatcaaaagtcaaaacacgctcaaaaagcgagaaccttgagaatactgtgataatacctgatatcaagttgcactctaacccttctgcgtttaatatatattgcaacgtcagacactgcgttctagagtggcagaagaaagagatatctttggctgcagcctctaagaacagcgtccagagtggggagtctgacagcgacgaggaagaggagtccaaagagccccctattaaactccccaagatcattgaagtgggtctgtgcgaggtgttcgagctgataaaggagacacgcttcagccatccaagtttgtgccttaggagcttgcaggcgttgctgaatgtgttgcagggccagcagccggaggggttacagagtgagccccctgaggtgctggagtcattattccagctcctgttggagattacagtgaggtcgaccggtatgaatgatagcaccggccagagcttaacagcattgtcatgcgcatgtctgttctccttggtcgcctcttggggtgagaccgggaggactttacaggcaatatccgccatcctgaccaataatggctctcatgcgtgccaaacgatccaggtccctactatactcaattcacttcagcgctccgtgcaagcagtcttggtcggcaagattcagatccaggattggttctctaacgggataaaaaaagctgccctgatgcataagtggcctttgaaggaaatatccgtggacgaggatgatcagtgtctcctccagaacgatggtttcttcctctacttactctgtaaggacggtctgtacaagataggctccggatactctggcacagtgagaggtcatatatacaacagcacatcgcgcatccgcaaccggaaggagaagaagtcctggcttggctatgcgcaagggtacctcctttatagagatgtaaataaccactctatgacagccattaggatatctcctgagaccctcgaacaggacggtactgttatgcttccggactgccatacagaggggcaaaacattctctttactgacggggagtacatcaaccagattgctgcctctcgggacgatggtttcgtggtgaggatttttgctacttccactgaacctgttctgcaacaggaactgcaactcaaactggcaagaaaatgccttcacgcctgtggcatttccttgtttgatctagaaaaggacctacatatcatttccaccggcttcgacgaggaatctgccatacttggcgctgggagggagttcgctttgatgaaaacagctaacgggaagatttattatacaggtaaataccaaagcctgggtattaagcaaggaggtccttcagctggaaaatgggtcgagcttcccatcacaaagtctccaaaaattgtgcacttctccgtggggcatgatggaagtcatgctctactggttgctgaggatggatctatctttttcactgggtccgcctccaagggtgaagatggcgagagcactaaaagccgcaggcagagtaagccctacaaacccaagaagatcatcaaaatggaagggaaaattgtggtgtacacggcttgtaacaatgggtcatcttccgttatctcaaaagatggcgaactgtatatgtttggtaaagacgccatctactctgatagcagctcactggtgaccgacttgaaagggcacttcgtaacacaagtggcgatggggaaagctcacacatgtgtgcttatgaagaatggagaggtttggacctttggggtgaataataagggccagtgcggcagggataccggagctatgaatcaaggtggcaaaggcttcggggtggagaatatggcaaccgccatggacgaggatctcgaggaagagctggacgagaaagatgaaaaaagcatgatgtgccctcctggaatgcacaagtggaaactggaacagtgcatggtgtgtacagtatgcggcgattgtacaggatacggggcatcgtgcgtgtctagcggcaggcctgatagggttccgggaggcatctgcggatgcggatccggcgaaagtggatgtgccgtgtgcggttgttgtaaagcatgtgcaagagagctcgatggtcaagaagctagacaacggggtatactcgacgcagtcaaagagatgattccacttgatttgttactggcggtgccggtcccaggggtgaacattgaagagcacttgcagctccggcaagaagagaaaaggcaaagagtgatccggaggcatcggttggaggaggggagagggccattggtttttgccggtccaatctttatgaaccaccgagagcaggcattggcccgactgcgaagtcatcctgctcagctgaagcacaagagagacaaacataaagacggctcgggggagcgcggagagaaagacgcatcaaaaattacgacctacccgcctgggagtgtgcgcttcgactgtgagctaagggctgtgcaagtgagttgtggctttcatcactcagtggtgctgatggaaaatggcgatgtttacaccttcggatatggccagcacggtcagttgggccacggggacgtgaacagtaggggttgccctaccctcgtgcaggctctgccgggtccctccacccaggtaacagctggaagtaatcacaccgcagtgctgctgatggatggtcaggtatttactttcgggtcattttctaagggccaattgggtaggcctattctggacgtgccctactggaatgccaagcctgcgccaatgcccaacatcggatccaaatatggcaggaaggccacctggatcggtgcatctggagatcaaaccttcctccggatcgatgaagcactcatcaattcccacgtcctcgctacctccgagatcttcgcttccaagcacattattgggctggtcccagcctctatctccgagccccctccctttaagtgtctgctgatcaataaggtggacggctcctgcaagacattcaacgacagcgagcaggaggatttacaagggttcggcgtttgtctggatccagtgtatgatgttatttggaggttccgcccaaacaccagggaactctggtgttataatgcggttgtggccgacgctcgacttccatccgcagccgacatgcagtctcgctgctctatactgagtccagaactagcgctgccgaccggcagtcgagctcttacgacacggtctcatgcggcattgcacattctaggatgcctggatactttggccgcaatgcaggatctaaagatgggagtcgcttcaacagaggaggagacacaagccgtcatgaaggtgtactcaaaagaggattacagtgttgtcaaccgattcgagtctcacgggggaggctggggatactctgcacattccgtggaagccattaggtttagcgcagatacagatattctactgggaggccttggattgtttggcggaagaggcgagtatactgcaaaaattaaactttttgagcttggtcctgatggcggtgaccacgaaacggatggggaccttctggccgaaacagatgtgctcgcatatgattgcgcggcacgggagaaatacgctatgatgttcgacgagccggtgcttctgcaggcgggatggtggtatgtagcttgggctcgggtgtcagggccatcctccgattgtggcagtcacggccaagcttcaatcaccaccgacgatggagtcgtgttccagtttaaatcatctaagaagtccaataacggcactgacgtcaatgccggtcagatcccccagctcctgtacagattacctacttccgatgggtcggcaagcaagggcaagcagcagacgtctgagcctgtccatatcctgaaacgttccttcgctagaacagtgtccgttgagtgtttcgaatcactgttaagcattctgcactggtcgtggaccacactcgtgcttggggtcgaggagctacggggtctgaagggattccagtttacagctaccctacttgacctggagagattgcgattcgtcggcacatgctgtcttcgactcctgcgcgtgtacacctgcgagatatacccagtgtcagcgacaggaaaagccgtcgtggaggagacttccaaactggctgagtgcataggaaaaacaaggacgttgctgcggaagatcttatccgagggtgtggatcactgcatggtgaagttagataatgatccgcagggatacctgtctcagcccctgagtcttctggaggccgtactgcaggagtgtcataacacttttaccgcttgttttcatagcttctacccaacgccggctttgcagtgggcctgtctttgcgatctgctgaactgcttggatcaggacattcaggaagcaaatttcaaaactagctcaagccgtctgctggccgcagtgatgagcgccctgtgccacacatccgtgaagctgaccagcattttccctatcgcatatgatggcgaagtccttctgcgatctatagtgaagcaggtctcaacagaaaacgacagtaccctcgtgcatagatttccactgctggtcgcacacatggagaagctgtcacagtccgaagagaacatcagtggcatgacatctttcagagaagtgctggagaagatgcttgtgattgtcgtgctccctgtgcggaacagcttgcggagagaaaacgaactgttttccagccatctggtttcgaacacctgcggcctgctcgctagcatcgtatcagagttgacagcttccgctctaggctccgaggtggatggcctcaatagcctgcattccgtgaaagcctccgctaatcgcttcactaaaacttcccagggtaggagttggaacacaggaaatggatcccccgacgctatttgcttcagcgttgataagcccggtatcgtggtggttgggttctccgtgtacggcggaggcggaatccacgaatatgagcttgaggtgctggtagacgactcagagcacgccggagacagcacacatagtcatcgttggaccagtcttgagcttgtcaagggaacttacacgactgacgattctcccagcgatatcgcggagattcgactggataaagttgtccctttaaaggagaatgtgaagtatgccgtcagactgcgtaattatgggtctagaacagcaaatggcgatgggggaatgaccactgtccagtgccccgatggcgtgacatttacattctctacctgttccttgtcttccaatggaactaatcagactcgtgggcagatcccacagatcctttattaccgcagcgagttcgatggcgacctgcaatcacaactgcttagcaaagccaatgaggaagataagaattgtagcagagcgctttctgtggtgtctactgtggtccgggcttctaaggatctactgcatcgcgctctagctgtcgacgccgacgacatacctgagttgcttagcagttcgtccctgttttccatgctcctgcccctcatcatcgcgtacataggaccagttgcggctgccatccctaaggtggctgtggaagtctttggactggtgcaacagttactgccaagcgtggcaattctaaatcagaaatatgcgccacccgctttcaacccgaatcagtcaacggattctaccacgggaaaccaacccgagcagggtctgtccgcttgtactaccagttcccactatgcggtcatagagtcggaacacccatacaaacctgcctgcgtgatgcactacaaagtgacatttccagagtgtgtgaggtggatgactatcgagttcgacccccagtgtggcaccgcgcagtccgaggatgtccttcggttgctgattcccgtgaggacagtacaaaactcaggatacggaccgaaactgacctctgtccacgagaacctcaactcatggatcgaacttaaaaaattttcaggctcaagtggttggccaactatggtgcttgtgctccctggaaacgaggccttatttagcctcgagacggccagcgactatgtgaaagatgacaaggcatcattctacggcttcaagtgtttcgctatcggctacgaattctcccctgggccagatgagggcgttattcaactagagaaggagttggcgaacctaggtggtgtctgtgctgctgcccttatgaagaaggatctagccctgccaattggcaatgaattggaggaggatctggaaatcttggaagaagcagccctgcaggtgtgcaagacgcacagcgggattctgggcaaaggtctggccctgtctcacagtccaacaatactggaggctctggaggggaatctcccactgcagatacaatctaacgagcagtccttccttgatgattttatcgcctgcgtgcctggctcaagcggcggaagactggcccgatggttacagcccgacagctacgcggatcctcagaaaaccagcctgatcctcaataaagacgatatccgatgtgggtggccaaccaccatcactgtgcagaccaaagaccaatatggggatgtagtgcacgtccctaacatgaaggtggaggtcaaggcagtccctgtgtcacaaaagaagatgagcctccaacaggatcaggccaaaaagccgcaaagaatccccggatcaccggctgttacagccgcatcaagtaatactgatatgacatatggcggtctggctagccctaaactggacgtgtcctacgagcctatgattgtaaaagaggcgaggtatatcgccataaccatgatgaaggtgtatgaaaactacagctttgaggaacttcgatttgccagtcccacgccaaagcgccctagcgagaatatgctcatccgcgttaacaatgatggaacctactgcgctaactggaccccaggagccattggactatatacactgcacgtcacgatcgacggaatcgagatagacgccggtcttgaggtcaaggtgaaagacccccctaagggaatgattcctcctggaactcaattggtcaagcctaaaagcgaacctcagccaaataaggtgagaaagttcgtggccaaggactcagctggcctacggatccggagccacccttccctccagagcgaacagattggaattgtcaaagtaaacggcacaattacgtttattgatgaaatccataatgatgacggggtctggctccgcttgaatgacgagacaatcaagaagtacgtcccgaacatgaacggatacaccgaggcctggtgcctctcgtttaaccaacatctggggaaatcactgctcgtccctgtggacgagtcgaaaactaataccgatgatttcttcaaggacataaactcttgctgtcctcaggaggctacgatgcaggaacaagacatgccttttctgcgcggtgggcctgggatgtacaaagttgtgaaaacaggaccctcagggcacaacataagatcctgcccaaaccttcgaggtatacccatcggaatgctggtgttgggcaacaaggttaaagccgttggggaggtaaccaattccgagggaacctgggtgcagctggaccagaactccatggttgagttttgcgagagcgacgagggagaggcctggtcactggccagagaccgcggtggcaaccagtatctgcggcacgaagacgaacaggcgcttctggaccagaactcacagacccctccacctagccccttttcagtccaggccttcaacaaaggcgcttcatgcagcgcccaggggtttgattacggattgggaaactcaaagggcgaccggggaaatatctccaccagctcaaaacccgcaagcacaagcggtaagtcggagctgtcgtcaaaacacagtcgtagtctgaaaccagacggaagaatgagtagaaccaccgctgatcagaaaaagcctaggggcaccgaatcattgagcgcatctgagagcctgatcctaaagtcggacgccgctaagctgaggagtgacagccacagccgatccctgagccccaatcacaacacgctgcagaccttaaaaagcgacggcagaatgccttcttcttcgagggcggagtcccctggcccagggtctaggctttcttcgcctaaacctaagacactgcccgctaacagatcctcaccgagcggggcatcttctcccaggtcctcatctccacacgataaaaatctccctcaaaaaagcacagcaccagtaaagacaaaactggaccctcctcgcgagcgttcaaaaagtgattcttataccctggatcctgacactctgcgtaagaagaaaatgccccttactgaacctctcaggggaagatctacctcccctaagcccaagagtgtacccaaagattcaacagattcgcctggctcagagaatcgggcaccaagcccccatgtagtgcaagaaaatttgcacagtgaggttgtggaagtgtgtacctcaagcactctgaaaaccaacagtctcactgacagtacctgtgacgactcatcggaatttaaatcagtggatgaggggagtaacaaggtgcacttcagtatcggcaaagccccactgaaggacgaacaggagatgcgcgcttcacccaaaattagtaggaagtgtgctaacaggcatactaggccaaagaaggagaaatcttcctttctatttaagggcgacggttcaaaacccctggaacccgctaagcaggctatgagtccaagcgtagccgagtgtgccagggccgtgttcgcaagttttctgtggcacgagggaatcgtgcacgacgccatggcatgcagttcattcctcaagttccatccagagctttccaaggaacacgcacctatccgatcttccctgaactcccaacagcctacagaggaaaaagagaccaagctcaagaaccgccattcactagaaatatcctcagccctgaatatgttcaatatagccccacacggccctgacatcagtaagatggggtctataaacaagaacaaagtgctctcaatgctgaaggaaccccctctgcacgagaaatgtgaagacggaaagacagagactaccttcgaaatgtctatgcataacaccatgaaaagcaaaagtccgttgccactgacccttcagcacctggttgctttttgggaagacatatctttggcaactataaaggcagcctcgcagaatatgatcttccccagccccggtagttgtgcagtgctcaagaaaaaagagtgcgaaaaggaaaacaaaaaaagcaagaaggaaaagaaaaaaaaggaaaaagctgaagtgagacccaggggcaatctgttcggcgaaatggctcagttagccgtaggcggtcccgaaaaagacaccatatgtgaactttgcggagaaagtcacccttaccctgtgacatatcacatgcggcaagctcatcccggatgcggaagatacgccggtggtcagggatacaactcaattggccacttttgcggtggctgggccggtaactgtggggatggaggaatcgggggatcaacatggtacctggtttgcgaccggtgcagagagaagtacctcagggaaaagcaagcagcggcaagagagaaagtaaaacagagtcggaggaagccgatgcaggtcaagacacccagggcactccccactatggaagcccaccaggtcatcaaggccaatgccctgtttctgctctcactatcaagcgctgccgagccttccattttgtgttaccatcccgctaagcccttccagtctcagctcccaagtgtgaaagagggaatttcggaagatcttcctgtaaagatgccctgtctttacctccagaccctggccaggcaccaccatgaaaactttgtaggctaccaagatgacaacctttttcaggacgagatgagatacctgcggagtacctcagtccccgcaccttatatttcagtgacacccgacgccagcccaaacgtatttgaggaaccagagagcaacatgaagtctatgccaccctcactggaaacttcgccgattaccgatacagatctcgctaagcgaacagtctttcaacggtcctacagtgtcgtcgccagcgaatacgataagcagcatagcatactccccgctcgagttaaggccattcctaggcgccgtgtcaacagcggcgacaccgaagtaggctcttccctgctgcgacacccctcaccggaactgtcgcgcctgatctctgcccatagctctctgtccaaaggcgagaggaacttccagtggcccgtgctagcatttgttatccagcatcacgaccttgaggggctcgagatcgccatgaaacaggccttaagaaaatccgcctgccgggtgttcgccatggaagctttcaattggctgctgtgcaatgtgattcaaacgacgtctctgcacgatatcctgtggcatttcgtggcatccctcacaccagcacctgttgagccagaggaagaagaggatgaagagaataagacatctaaggagaacagcgaacaggagaaagacacgagagtttgtgaacaccccctgtctgacatagtgatagctggggaggccgcacaccctctgcctcacaccttccacagactattacaaacaatcagtgatctgatgatgagcctcccttcagggtcatcattgcagcagatggcactgcggtgctggtccttgaagttcaagcagtcagaccaccagttcctacaccagagtaacgtgtttcatcacatcaataacatccttagcaaatccgacgacggagattcagaggagtctttctccattagcatccagtccggattcgaggcaatgagccaggaactgtgcatcgtgatgtgtctgaaagatctcaccagcatcgttgatatcaagacgtcttctcgtccagccatgattgggagcctgacagatggctctacagaaaccttctgggaatctggcgatgaggataagaacaaaactaagaacatcacaatcaactgcgttaagggtattaatgctcgatacgtgtctgtacacgtggacaattctagagacctgggcaataaagttacctcaatgacgttccttaccggcaaggcagtggaagatctctgcagaattaagcaggtggacctggattcaagacatatcgggtgggttacatccgagctgcccggtggtgataaccatataattaaaattgaattgaagggaccagagaataccttacgggtacgccaggtgaaagttctcggatggaaggacggagagagcaccaaaatcgctggccaaatctcagcttcagtggctcaacagcggaactgcgaggccgagacactcagagtgtttcgcctgataacgtctcaggtgtttggcaagctgattagtggggatgcggaaccgacccctgaacaagaggaaaaggccctcctgtcttcacctgaaggagaggagaaggtgtacaatgcaacctccgatgcagacctcaaagagcatatggtgggtattatcttctctcgctcgaagctgactaacctccagaagcaggtctgcgctcatattgtgcaggcaatccggatggaagctacaagagtcagggaagagtgggaacatgcaatcagttccaaagagaatgctaactcacagccaaatgatgaagacgcgtctagcgacgcctattgttttgagctgctctctatggtgctggcactgtctggctctaatgttgggagacagtacttggctcagcagctgacgctgctgcaggacctgttctctcttctgcacactgcaagccctagagtccagagacaagtgacaagccttcttagacgggttcttcccgaagtcacaccatcaaggctggcatctattatcggtgtcaagtctttaccacctgctgacattagtgatatcatccactccaccgaaaagggcgattggaacaaactgggcattcttgacatgtttttgggctgcatcgccaaagcccttacggtgcaacttaaggcaaaggggactacgatcacaggtactgcaggaacgacagtcggtaagggcgtgacaaccgtgacgctgcccatgatcttcaattcctcttatctgagacgtggtgaaagccattggtggatgaagggttccacgccaacacaaattagcgagattataattaaactgatcaaggatatggccgctggccacttgtctgaagcctggagtcgggtcacaaagaatgccattgcggagaccatcatagcactgaccaagatggaagaggaatttagatcccctgtcaggtgcattgcgaccacacgcctctggcttgccctggcgagtctctgtgtcctcgatcaggatcatgtggatagattgtctagcgggcgatggatgggaaaagacggccagcagaaacagatgccaatgtgtgacaatcatgatgacggcgaaaccgctgccatcatcctttgcaatgtatgtgggaacctatgtacggactgtgatcggtttcttcaccttcatcggagaactaagactcaccagaggcaagtatttaaggaggaggaggaagcaattaaagtggacctgcatgagggttgtggtagaaccaaactgttctggctgatggctctagctgactcgaagaccatgaaggctatggtggaattccgagagcacacgggaaagcccaccacatcatctagcgaggcttgccgtttctgcgggtccagaagtgggactgagctctccgctgtgggcagcgtttgtagcgacgcggattgtcaagagtatgccaagatcgcatgttcaaagacccatccatgtggccatccttgcggaggtgtgaagaacgaagagcactgcctaccatgcttacacggatgcgataaatccgctacaagtctcaaacaagatgctgacgacatgtgcatgatttgctttaccgaggcactgagcgccgctcctgcgatccagctggattgcagtcatatcttccacttgcagtgctgtcgaagagttctggagaatcggtggcttgggccaaggatcaccttcggattcatctcctgcccaatttgtaaaaacaagattaatcatatcgttctcaaagatctgctggatcctatcaaggagctttacgaggacgtacggaggaaagccctgatgcgcctcgaatatgagggcctgcacaaatccgaagccatcacgaccccaggagtgagattctacaatgacccggcaggttacgctatgaaccggtatgcctattacgtttgttacaaatgtaggaaggcctattttggcggagaggctaggtgtgacgcggaagccggaagaggggacgattacgatcctagggagttgatctgcggggcttgctccgacgtgagcagagcccagatgtgccccaagcacggcacggatttcctcgaatataaatgcagatactgttgtagtgtggcagtgttcttttgcttcgggactacacatttctgcaatgcatgccacgatgacttccagcggatgacaagcatacccaaggaggagctgcctcattgtccagccggacctaaaggcaagcagcttgaggggacagagtgccctctccatgtcgtccatccacctacaggcgaggaattcgccctgggatgcggcgtctgtcgaaacgcacacacattctag

SEQ ID NO: 184070 - DNA, 13923 bp, Artificial Sequence
  derived and/or modified sequence
atgccggtccccgatggaagtgtcgccgctgctgggctgggactgggcctgcctgccgctgattcaaggggtcactatcagctgctcctgagtggcagagctcttgcggatcggtacagacgcatttacacagcggcactgaatgatcgagatcagggaggcggaagcgcaggtcaccccgcatcaaggaacaaaaaaatactaaataaaaaaaagcttaaaagaaaacaaaagagcaaatccaaggtgaagacccggtcgaagtcagagaacttagagaacactgttatcattcccgacatcaagctgcattccaatccttccgcgttcaacatctactgtaacgtccgccactgtgtgttggaatggcaaaaaaaagaaatctccctggctgccgcttcaaaaaactcagtgcaaagtggggaatccgactcagacgaagaagaggaaagcaaagagccccctatcaagctaccgaaaattattgaggtcggactctgcgaggtattcgaactcattaaagagactaggtttagccatcccagcctgtgcctgcgttctctgcaggcattgctgaacgttctccaggggcaacagccagaaggcctgcagtcagagccacctgaagtgctggaatctctttttcagctgttacttgagattacagtgagaagtacgggcatgaatgactcaacaggccagagcctgacagctctttcctgtgcctgtctgttttccctcgtagcaagttggggagaaacagggaggacactccaggccatcagcgctatcctaacaaacaacgggtcacacgcctgccagaccatccaggtgccaacgatcctgaattcacttcagcgctctgtccaagctgtcctggtgggtaaaatacagatccaggactggttcagcaatggaataaagaaagcggcactgatgcacaaatggccactgaaagaaatatccgtggacgaagatgatcagtgtctgctccaaaacgatggctttttcctttacctgttatgcaaggatgggctgtacaagatcggttccggttattcgggtacagtgaggggacacatttataattccacttcccggatccgcaataggaaggagaaaaaaagttggttaggatacgctcagggttaccttctgtaccgggacgtaaacaatcactccatgacagctatccgaatctcccctgaaacactggagcaggacggcactgttatgctacccgactgccatactgagggccagaacattttatttacggacggagaatatattaatcagatcgcggcatcacgcgacgacggattcgtggtgaggatctttgccacctctaccgagcccgttttgcaacaagagcttcagctcaagctcgctcggaagtgtttacatgcttgtggcataagcctttttgatctggaaaaagaccttcacattatctccacgggcttcgatgaagagtccgcgatcctcggagctgggagggagttcgctttgatgaaaactgccaatggaaagatatactacacgggaaagtaccaatcactcggcatcaaacagggtggtcccagcgcaggtaaatgggtagagctccccattaccaagtccccaaagatagtgcatttttccgtgggacacgacggaagccatgcgttgcttgtggcagaggatggcagcatcttctttaccggctccgccagcaagggtgaggatggcgagagtactaaaagtcggcgacagagtaagccctacaagcctaagaagataattaagatggagggaaagatagtagtgtataccgcatgcaataatgggtcatctagcgtcatttctaaagacggtgagctctacatgtttgggaaggacgcgatttacagcgactcttccagcttggttacggatcttaagggccactttgtcacccaggttgctatggggaaggcccatacctgcgtgctgatgaaaaacggagaggtctggacatttggggtgaacaataagggacagtgtggacgcgatacgggtgccatgaaccaggggggaaaaggctttggtgtggaaaacatggctacggcgatggatgaggacctggaagaagagcttgacgagaaggatgagaagtctatgatgtgtccacccggtatgcacaagtggaagctcgaacagtgcatggtatgtacagtgtgcggggattgcaccgggtacggagctagctgcgtttcttcaggccgtcctgacagagtgcccggtggcatttgcggatgtggcagtggcgagagcgggtgcgcagtgtgcggctgctgtaaggcctgcgctcgagaactagatggccaggaagcaagacagagagggatactcgacgcagtgaaggagatgatccctcttgacctgctgctggcagtgcccgtccctggagttaacattgaggaacacctccagctgcgtcaggaagagaagaggcagcgagtgattaggaggcaccggctcgaggagggtcgcggtcccctggtctttgccggtcctatcttcatgaatcatcgcgaacaggcgctagcacgcctgaggagccatccagcccagctgaagcataaacgcgacaagcacaaagacgggagcggagagagaggagaaaaagacgcctctaagataacaacctacccacctgggtccgtgagatttgattgtgaactgcgcgcagtgcaagtctcttgtggcttccaccacagcgtggttctgatggaaaacggggacgtttacactttcggatacggtcaacatggtcagttgggccacggagacgttaattccagaggctgtccaaccttggttcaggctctgcctggccctagtacgcaggtgacagctggctctaatcatactgccgtgctattaatggatggccaggtgttcacttttggctcttttagtaagggccagctgggcaggcctattctggacgtcccatactggaacgccaagcctgctccgatgcctaatattggtagcaagtatggacgaaaagccacctggataggtgcttctggtgatcagacatttctacgaatcgacgaggcattaattaacagccacgtgctggctacgtctgaaattttcgcgagcaagcatatcattggcctggtgccggctagtatctcagaacccccaccattcaaatgtttactcattaacaaggttgacggatcctgcaaaacgttcaacgacagcgaacaggaagacctccagggctttggcgtttgcctcgatccagtgtatgatgtgatctggcgatttagaccaaacacacgagagttgtggtgctacaatgctgtggtcgccgacgccagactacctagtgcagccgatatgcagtcacgatgttcaattctctcacctgaactcgccctgccgacgggcagtcgagcactcaccactaggtcacatgccgctctgcatatactcggatgcctggacaccctagctgccatgcaggatttgaagatgggcgtggccagcactgaggaagagacacaagccgttatgaaagtgtacagtaaggaggactactcagtggttaataggtttgaatctcatggtgggggttggggctactctgcccactcagtggaagctattcggttttccgccgacaccgatattcttctggggggtctgggactttttggaggtcggggtgaatacacagcaaagatcaaactctttgagctgggacctgatggcggtgaccatgaaacagatggcgatctattggccgagacagatgtattggcatatgactgtgccgctcgggagaaatacgccatgatgttcgatgaacccgtcctcctccaggccggttggtggtacgtggcatgggctcgcgtgtctggaccttcatcagactgcggatctcacggacaagccagtatcactacagacgatggggtcgtgtttcaattcaagtcatctaagaagagtaacaacggaacagatgtcaatgctgggcagatccctcaactactctaccgcttaccaacctcagatggcagtgccagcaagggtaagcagcagacttctgagcccgtgcacatcctaaaaaggtcattcgccagaacagttagtgtggaatgctttgaaagcctgctaagtatactccactggtcctggactactttggtgctgggtgtggaggaactgagagggctcaaggggtttcagtttactgcaacactgctggacctcgagagactacgctttgtgggtacgtgctgcttgaggctcctccgcgtgtacacatgtgaaatttaccctgttagcgccacaggtaaggccgttgtcgaggaaaccagcaagctcgcagagtgcattggaaaaacacgcaccctcctgaggaagatcctcagtgaaggagtggatcactgtatggtaaagctggataacgatccacaggggtacctctctcagcccctcagtctgttggaggccgtcctccaggagtgccacaacacttttacggcatgtttccattccttttaccctacccccgctctgcagtgggcatgtctctgtgatctactcaactgtctggatcaggacatccaggaagctaatttcaagacttcatcatcacgcctcctggcggctgtcatgtctgccctctgccacacatctgtgaagctcacgagtattttccccattgcatacgatggggaggtgctgctgcggtcgatcgtcaaacaagtatctaccgagaacgattccaccctcgtccataggttccccctgctggtcgcacatatggagaagctcagtcagagcgaagagaacatcagcggcatgaccagctttcgcgaagtactggaaaagatgctcgtgatcgtagtgctgcctgtgcggaacagcctgaggcgggaaaacgaacttttctcatctcatttggtgagtaatacatgtggacttctagcaagcatcgtgtctgagctcacagccagcgcactgggcagcgaggtcgatgggctgaactcgctgcactcagttaaagcgtccgcaaaccgcttcacaaaaactagccaaggaaggtcttggaatacaggcaatggatctccagatgccatctgtttctcagtggacaaacctgggatcgtggtcgtaggtttcagcgtttatggcggtgggggtatccatgagtacgagctggaggtgcttgtggatgacagcgagcacgctggagattcaacccattcccatcgctggacctccttggaacttgtgaagggcacatacacgaccgacgactcaccaagtgatattgccgaaatcaggctggataaggttgtccctctaaaagagaacgttaaatacgctgtccgcctgcgaaactacggcagtagaacagcgaacggagacgggggaatgaccaccgtgcagtgtcccgatggcgtcactttcacgttttccacctgcagcttatcctcaaatggaacaaatcagacaaggggccaaatacctcagatcctctactatcgcagtgagtttgacggtgaccttcagtcacagcttctgagcaaagccaatgaagaagacaagaactgctctcgcgctctgagcgtcgttagcaccgtggtgcgtgcgtctaaagaccttctgcatcgtgccctggccgtcgacgccgacgacatccctgaactgcttagtagctcttcattgttctcgatgctcctgccacttatcattgcttatatcggacctgtggccgctgcaatccctaaggtcgccgtggaagtcttcgggctggttcagcagctcctgccttcagtcgccattctgaaccagaagtacgctcccccagcattcaatcccaaccagtccaccgactctactactggaaaccaacccgagcaggggctgtccgcttgcaccaccagttcacattacgccgtgatagagtctgaacacccttataagccagcctgcgtcatgcactacaaggtgacattccctgagtgcgtaaggtggatgaccatcgagttcgaccctcaatgtggcaccgcccagtcagaggatgtcctccggctgctgatccccgtgagaactgtccagaatagtggttatggcccaaagctgacttccgtgcatgagaatctgaattcttggatcgagctgaagaaatttagcggatcaagcggatggcctacaatggtgctcgtcctgcctggcaacgaggcgttgttctccctggaaaccgcgtctgattatgtgaaagatgacaaagctagcttttatggtttcaagtgctttgcaattggctatgagtttagtccaggacccgacgaaggcgtgatccagctggagaaggagctggctaacctcggaggtgtctgtgcagccgcactgatgaagaaagatctggctctacctattgggaacgaattggaggaggatctagaaattctggaagaggccgcattacaggtatgcaagacgcattccgggattctcggcaaagggcttgcattgagccactctcccactattctcgaagctctagagggaaacctgccgctgcaaatacagagcaatgagcagtccttccttgacgatttcattgcctgcgtgcctggctccagcggtgggaggctcgcgagatggctccagccagactcctatgctgatcctcagaaaacttccctgatccttaacaaggatgacatccgctgtggttggccaaccaccatcaccgttcaaactaaggatcagtatggggacgtggtgcatgtgccaaacatgaaggtggaagtaaaggctgtgccagtctctcaaaagaagatgtccctgcaacaggaccaggccaagaagccgcaaaggatcccgggaagccccgctgtaaccgcagcctcatccaatactgacatgacgtacggcggattagctagccccaaactcgatgtgagctacgaacccatgatcgtgaaagaggctcggtacattgctattaccatgatgaaggtctatgaaaattattcatttgaagaacttaggtttgccagcccgacccccaaaagaccgtcagagaacatgctcatcagggtgaataatgacgggacctactgcgcaaactggacccccggtgctatagggttatataccctgcacgtgactatcgacggaattgaaattgacgcaggcctggaagtgaaggttaaggatcctcctaaaggaatgatcccgccaggcactcagcttgtgaagccaaaatcagagccacaacctaataaggtccgcaaatttgtggctaaagactctgcaggactgagaatcagatcccacccttcgcttcagagtgaacagatcgggatcgtcaaggtgaatggcacgatcacatttatcgacgagattcataacgacgatggcgtgtggttgagattgaatgatgagaccattaaaaaatacgttcccaatatgaatgggtacactgaggcgtggtgcctgagttttaaccaacatctggggaagagcctcctggtcccagtggatgagtcaaagacaaatacggacgactttttcaaggatattaactcctgctgcccacaggaggctacaatgcaagagcaggacatgcctttcctccgcggagggccagggatgtataaggttgtcaagactggtcccagcggccacaatattagatcgtgtccaaatctgcggggaattcccatcggcatgctcgtgctcggcaacaaagtgaaggccgtaggtgaggtgactaacagcgagggcacctgggtacagctggatcagaactccatggtggagttctgcgagtcagacgagggtgaggcttggagcctggccagggatagaggcggaaatcagtacctccgacacgaagacgaacaggcactgctcgaccagaattcccaaacccccccaccatcacccttctcagtgcaggcttttaacaagggagcttcctgcagcgcgcaagggttcgattacggactgggtaattcaaagggcgatcggggtaacatatctacttcctccaaacctgccagcacgtcagggaagagcgagctatcttcgaagcacagccgctcacttaaacccgatggcaggatgtcgcgtacgacagctgaccagaagaagccacgcggaactgagagtctgagtgcctctgagtcactcattctgaaatcagacgccgctaaactaaggtcggactcccattctcgcagtctgagccctaatcacaatacattacagactctgaaatcggacggcaggatgccatcttcaagccgcgctgagagccccggaccaggatcccgcctgtccagcccaaagccaaaaactctgccagcaaatcgtagcagcccaagcggcgcttcgagccctcgcagtagctccccacatgacaaaaacctcccccagaaatccacagcccctgtcaaaaccaagttggatccccctagggagagatccaaatccgattcatatacactcgaccccgacacacttcgaaaaaagaaaatgcccctaaccgaacctctcagaggcaggagcacatcccctaaacctaaaagtgtccctaaggatagcacagactcaccagggtctgagaacagagctccctctccccacgtcgtgcaagaaaacttacacagcgaggtcgtggaggtttgcacgagctctacccttaagacgaactccctcacagactcaacttgcgatgactcatccgaattcaagagtgtagacgaaggttccaacaaggtacacttcagcattggtaaggcgcctctgaaagacgaacaggaaatgcgggcttctcccaaaataagccgcaagtgtgccaatcgccataccaggcctaagaaagaaaagtctagtttccttttcaagggtgacggcagcaaaccattagaacctgccaagcaggcaatgagtccttctgtagccgagtgtgcccgagctgtctttgcttccttcctgtggcacgaggggatcgtgcatgatgccatggcctgttcaagcttcctgaagttccaccctgagttgtcaaaggaacacgccccaattaggtcttctctcaacagccagcagccaaccgaagaaaaagaaactaagttgaagaaccgacactccttggaaatctcatccgccttgaatatgttcaatattgccccacacgggcctgatatttccaagatgggctcaattaataagaataaggtgttgtccatgctaaaggagccacccctgcatgaaaaatgcgaagacggcaaaacagagaccaccttcgaaatgagcatgcacaacaccatgaaatccaagtcccccctgcccctgactctacagcacctcgtggctttctgggaagacataagcctcgccacaataaaggcagcgtcgcagaacatgatcttccccagccctggcagctgcgccgtcctgaagaagaaggagtgtgagaaagagaataaaaaaagcaagaaggaaaaaaagaaaaaagaaaaggccgaagtccggcctagaggcaatctgtttggcgagatggcacaactggccgtgggtggcccagaaaaggacaccatatgcgagctctgtggcgaatctcatccttatccagtgacttatcatatgcgccaggcccacccgggttgcggacggtacgcaggaggtcaggggtacaacagcatcggtcacttctgtgggggttgggcaggaaactgcggcgacgggggaatcggcggatcaacctggtacctggtatgcgatcgttgtcgcgagaaatacctcagagaaaagcaggcagccgctagagaaaaagtgaaacagtccagacggaaaccaatgcaggtaaagacaccacgcgctcttcccacaatggaggcccaccaggtgattaaagcaaacgctctctttctactttcccttagttctgccgcagagccatctatactatgttaccaccccgctaagccttttcagagtcagttgccatccgttaaggagggcattagtgaggacctgccggtaaagatgccatgtctttaccttcagactttggcacgtcaccaccacgaaaacttcgtgggctaccaggacgataacctctttcaggatgaaatgcgctatctccgcagcacctctgttcctgccccatacatcagtgttacccccgacgcttccccaaacgtcttcgaggagcctgaaagtaatatgaaaagcatgcccccttccctggaaacttcaccaatcaccgataccgatctagcaaagcgaacagttttccagcgctcttatagtgttgtggcaagcgagtatgataagcagcactccatacttccggcacgcgtaaaggccatcccccgtcgtcgtgtgaattccggcgacaccgaggtgggttcaagtcttctcagacatccttcccctgaactgtcacggctgatttctgcccactctagtctgagtaaaggggaacggaattttcagtggcccgttctggcttttgtaattcagcaccacgacctggaaggtttggaaatcgccatgaaacaggcactgaggaaaagtgcctgcagagtgtttgcaatggaggcgttcaattggttgctctgcaatgtaattcaaactacttcactccacgacattctatggcactttgttgccagcctcacacccgctcctgtcgaaccagaagaagaggaggatgaggaaaacaagacctcaaaggagaactccgagcaggagaaggatacccgagtgtgcgagcatcccctgtccgacatcgtgatcgccggagaagccgctcatcctttaccccacaccttccatcggcttttgcaaactatctcagaccttatgatgtccctgccttccgggtcttccttacagcagatggcactgcggtgctggagtttaaaatttaaacagagcgaccaccagttcctgcatcagagcaatgtctttcatcacattaacaacattctgagcaagagtgatgatggagactctgaagagtcatttagcattagcatccaaagcgggttcgaggctatgtcacaggagttgtgcatcgtgatgtgtcttaaggatctcacttctattgtggatattaaaacatccagcagacctgccatgatcggctccctgaccgacggcagtactgaaacattctgggaatctggagatgaagataagaacaagacaaaaaacatcaccatcaattgcgtaaaaggcatcaatgcccgttacgtatcagtgcatgtggataatagtcgggatttggggaataaggtgacttctatgacctttctgacaggcaaagcagttgaggatctatgccgcatcaagcaggtggacctggacagccgacatatcggttgggtgacttcagagcttcccggtggtgacaaccacattataaaaattgaacttaaggggcctgaaaacactctaagagtgcggcaggtcaaggtgctggggtggaaggatggcgaaagtacaaagattgccggtcagattagtgcatccgtggcccagcagcgcaattgcgaagccgagacattgcgtgtatttaggcttataaccagccaggtgttcgggaagctcatctctggagacgccgagcccacacctgagcaggaggagaaggctctgctgagctctcccgagggggaagaaaaagtctataacgcgaccagcgatgcagatctcaaagaacatatggtgggtattatcttttccagaagcaaattaaccaatcttcagaaacaagtttgtgcccacatcgtgcaggcgatccgaatggaggcaacgcgcgtgagagaggagtgggaacacgccattagttcgaaggaaaacgcaaattctcaacctaatgatgaagacgcttcctctgacgcgtattgttttgagctactatccatggtattggcgctctcagggagcaacgtcgggaggcagtacctggcacagcagctaacgctgctgcaagacctcttttctctgctgcatacggcgtcacccagagtgcaacggcaggttacgagtctcctccgcagggtgctcccagaggtgacacctagccgcctggcctctatcattggcgtaaaatccctaccaccggctgatatctcagacattattcattccacggaaaagggcgattggaataagctgggcatcctggacatgttcctgggttgtatcgcaaaggctcttactgtgcagctcaaggctaagggtactacaattacaggaaccgcaggaacaactgtgggaaaaggagtgaccaccgtgacccttccaatgatctttaatagctcatacttgaggcgcggagagtcacactggtggatgaaaggttccacccccactcagatctctgagattattattaagctcattaaagacatggctgctggacacctcagcgaggcttggtcgcgggtcacaaagaatgccattgccgagacaataatcgcccttactaaaatggaggaagagttccgcagtccggttagatgcattgctaccacccgactgtggttggcactggcttccctgtgcgtattagatcaagatcatgtggataggctgagctcaggcaggtggatgggaaaggacggacagcagaagcaaatgccgatgtgtgataatcacgatgacggagaaacggcggctatcattctttgcaatgtgtgcgggaacctatgtacagactgtgataggttccttcatttacataggagaaccaaaacccaccaaaggcaagtgttcaaggaggaggaggaggccattaaggtcgatttgcacgagggctgcggccgaactaaactcttttggcttatggctttggccgactcaaaaacgatgaaggcaatggtggagttcagggaacacaccggcaagcccaccactagtagttcagaggcgtgccgtttttgcggctcaaggagcggcacagagctgtcggctgtggggtcagtgtgctctgacgctgactgccaagaatacgccaagattgcgtgttctaaaactcacccatgcggacatccgtgcggaggcgtaaaaaatgaagaacattgcctgccctgcctgcatggatgcgataagtccgcaacaagcttaaagcaggatgccgacgatatgtgtatgatttgctttactgaggccttgagcgctgcacctgccatccagttggactgctcacatatttttcacttgcagtgctgtagacgagtactcgagaaccgctggttaggaccaaggataaccttcggatttatcagctgtcccatctgcaagaataaaattaaccatatagtactcaaagatctcctggacccaatcaaggaactctatgaagacgtgaggcgaaaggcccttatgagactggaatatgagggcctgcataagagcgaggcaatcaccactccaggggttcgattctacaacgaccccgcaggctatgccatgaatagatacgcctactacgtttgctacaaatgccggaaggcgtactttggcggagaagcccgttgcgacgcagaagctggacgtggggatgactacgatccccgtgagcttatatgtggcgcttgctcagatgtaagccgagcacagatgtgcccaaagcatggaactgacttcctcgagtacaagtgcaggtattgctgttcagtcgccgtgttcttctgctttggcacgacacacttttgcaacgcatgtcatgatgattttcagcgcatgacctcaattcccaaggaggaattgcctcactgtccggcaggtccaaaaggcaaacagctggagggcacggaatgtcccctgcacgtggtacacccgccaacaggggaagagttcgctttggggtgcggggtctgccgcaacgcgcacaccttctag

SEQ ID NO: 184071 - protein, 1905 aa, Artificial Sequence
  derived and/or modified sequence
MQSRLLLLGAPGGHGGPASRRMRLLLRQVVQRRPGGDRQRPEVRLLHAGSGADTGDTVNIGDVSYKLKIPKNPELVPQNYISDSLAQSVVQHLRWIMQKDLLGQDVFLIGPPGPLRRSIAMQYLELTKREVEYIALSRDTTETDLKQRREIRAGTAFYIDQCAVRAATEGRTLILEGLEKAERNVLPVLNNLLENREMQLEDGRFLMSAERYDKLLRDHTKKELDSWKIVRVSENFRVIALGLPVPRYSGNPLDPPLRSRFQARDIYYLPFKDQLKLLYSIGANVSAEKVSQLLSFATTLCSQESSTLGLPDFPLDSLAAAVQILDSFPMMPIKHAIQWLYPYSILLGHEGKMAVEGVLKRFELQDSGSSLLPKEIVKVEKMMENHVSQASVTIRIADKEVTIKVPAGTRLLSQPCASDRFIQTLSHKQLQAEMMQSHMVKDICLIGGKGCGKTVIAKNFADTLGYNIEPIMLYQDMTARDLLQQRYTLPNGDTAWRSSPLVNAALEGKLVLLDGIHRVNAGTLAVLQRLIHDRELSLYDGSRLLREDRYMRLKEELQLSDEQLQKRSIFPIHPSFRIIALAEPPVIGSTAHQWLGPEFLTMFFFHYMKPLVKSEEIQVIKEKVPNVPQEALDKLLSFTHKLRETQDPTAQSLAASLSTRQLLRISRRLSQYPNENLHSAVTKACLSRFLPSLARSALEKNLADATIEINTDDNLEPELKDYKCEVTSGTLRIGAVSAPIYNAHEKMKVPDVLFYDNIQHVIVMEDMLKDFLLGEHLLLVGNQGVGKNKIVDRFLHLLNRPREYIQLHRDTTVQTLTLQPSVKDGLIVYEDSPLVKAVKLGHILVVDEADKAPTNVTCILKTLVENGEMILADGRRIVANSANVNGRENVVVIHPDFRMIVLANRPGFPFLGNDFFGTLGDIFSCHAVDNPKPHSELEMLRQYGPNVPEPILQKLVAAFGELRSLADQGIINYPYSTREVVNIVKHLQKFPTEGLSSVVRNVFDFDSYNNDMREILINTLHKYGIPIGAKPTSVQLAKELTLPEQTFMGYWTIGQARSGMQKLLCPVETHHIDIKGPALINIQEYPIERHEERSLNFTEECASWRIPLDEINIICDIATSHENEQNTLYVVTCNPASLYFMNMTGKSGFFVDFFDIFPRTANGVWHPFVTVAPLGSPLKGQVVLHEQQSNVILLLDTTGRALHRLILPSEKFTSKKPFWWNKEEAETYKMCKEFSHKNWLVFYKEKGNSLTVLDVLEGRTHTISLPINLKTVFLVAEDKWLLVESKTNQKYLLTKPAHIESEGSGVCQLYVLKEEPPSTGFGVTQETEFSIPHKISSDQLSSEHLSSAVEQKIASPNRILSDEKNYATIVVGFPDLMSPSEVYSWKRPSSLHKRSGTDTSFYRGKKKRGTPKQSNCVTLLDTNQVVRILPPGEVPLKDIYPKDVTPPQTSGYIEVTDLQSKKLRYIPIPRSESLSPYTTWLSTISDTDALLAEWDKSGVVTVDMGGHIRLWETGLERLQRSLMEWRNMIGQDDRNMQITINRDSGEDVSSPKHGKEDPDNMPHVGGNTWAGGTGGRDTAGLGGKGGPYRLDAGHTVYQVSQAEKDAVPEEVKRAAREMGQRAFQQRLKEIQMSEYDAATYERFSGAVRRQVHSLRIILDNLQAKGKERQWLRHQATGELDDAKIIDGLTGEKAIYKRRGELEPQLGSPQQKPKRLRLVVDVSGSMYRFNRMDGRLERTMEAVCMVMEAFENYEEKFQYDIVGHSGDGYNIGLVPMNKIPKDNKQRLEILKTMHAHSQFCMSGDHTLEGTEHAIKEIVKEEADEYFVIVLSDANLSRYGIHPAKFAQILTRDPQVNAFAIFIGSLGDQATRLQRTLPAGRSFVAMDTKDIPQILQQIFTSTMLSSV

SEQ ID NO: 184072 - DNA, 3120 bp, Artificial Sequence
  derived and/or modified sequence
atgcagtcacgcttactgctgcttggcgctcctggcggacacggaggtccagcctctcgtagaatgagactattgttgcgccaggtggttcagcgcagacctgggggagatagacagcgcccagaagttcggctgctccatgctggcagtggggcagacacgggcgataccgtgaatataggtgatgtgtcttataagttaaagattcccaaaaaccccgaattggtaccccagaactacatcagcgatagtttggcacagagcgtcgtgcagcacttgcggtggatcatgcagaaagacctgctcggacaggacgtgttcctgattgggccacccggacccttgcggaggagcatcgctatgcaatacctcgagcttaccaaaagggaggtcgaatatattgccctgtctagggatacgaccgagacagaccttaagcagagacgggagattcgcgctggtactgctttctatattgaccagtgtgctgtacgggctgccaccgaagggagaacactcattctcgagggcttagagaaggccgagcgcaatgtgcttcctgttcttaataatctccttgaaaatcgagaaatgcaactggaagacggacggttcctcatgtccgccgaacgctatgataaacttctcagagaccacactaagaaagaactggattcctggaaaatagtgagagtctccgaaaacttcagggtgattgccctgggtttgcccgtgccaaggtattccggtaacccattggaccctcctctgcgtagtcgcttccaggctcgagacatctactatctaccttttaaggatcagttaaagctgttgtacagtatcggcgcaaacgttagtgccgaaaaagtaagtcagcttctctccttcgctaccacattgtgcagccaggagtcatccacattaggattgccggatttcccactggattcactggcggctgctgtgcagatcctggactcgttccctatgatgccaattaagcatgcgatccagtggctgtacccctattcgattctgttgggccacgaaggcaaaatggcagtggaaggggtgttgaagagattcgaattgcaggactccggcagcagcctgttacccaaggagatcgtcaaagttgagaaaatgatggaaaaccacgtgagccaagcgagtgtgactattcggatcgctgataaagaggttaccataaaggtcccagctggcacccgcttgttgtcccaaccatgcgccagcgaccggttcattcagaccctgtcccacaaacaactacaggccgagatgatgcagtcgcatatggtaaaggatatttgcctgatcggcggaaagggttgcggcaagaccgtgatcgctaaaaattttgccgataccctcgggtacaatatagaaccgatcatgctgtatcaggacatgaccgccagggatttgctacaacaaaggtataccctacccaatggggataccgcatggcggtccagcccgttggtgaacgcggcattagaaggaaagcttgtgttgctcgacggcatacatagggtgaacgccggtactttggccgttctgcagcgattgatccacgatcgcgaactttctttatacgatggatctagattgctcagagaggatcgctacatgcgcctgaaggaagaactgcagttgtctgatgagcagttgcagaagagatctatctttcccatacatccctcctttcgcatcattgcactcgccgagccaccagtgattgggtcgacagcccaccagtggcttgggcctgagttcctcactatgtttttctttcattatatgaaaccacttgtaaaatccgaggagattcaggtaataaaggaaaaggtgcccaacgtcccccaggaagctctcgacaagcttctgagctttacccacaaactacgagaaactcaggacccaaccgcccagtctctggctgcatcgttatcaaccagacagttgcttagaatatccagaaggctaagtcagtaccccaacgaaaacctgcacagtgccgtcacaaaagcctgcctgtccagatttttgccatctctcgcaaggtcggctctggaaaaaaacctggctgacgctaccatcgaaattaatacagacgacaatctggaaccagagttaaaagattacaagtgcgaggttacctcgggtactctgagaataggggcagtgtcggcccctatttacaatgcccacgagaagatgaaggtgccagacgtgcttttttacgataacattcagcacgtcatcgtaatggaagacatgttaaaagacttcctcctgggggaacacctgctcctagtgggaaaccagggggtgggaaaaaacaaaatagttgaccgctttctgcacctcctgaaccggccacgcgaatacatccagctgcaccgcgacaccacagtgcagaccctcaccttacaacctagtgtgaaggacggcctcatagtgtatgaagactcccctcttgtgaaggcagtcaaattgggtcacattctcgtggttgacgaagcagacaaggcccctacaaatgtaacttgcattctgaagactctggtcgagaacggcgaaatgatcctggctgatggacgacggattgttgcgaattccgcgaatgtcaacggtcgagagaatgtggttgtaatccatcctgacttccgtatgatcgttttagcaaaccgtcctggtttccccttcctcgggaacgacttcttcgggaccttgggggatatcttttcctgccatgccgtggataatcctaagccccacagcgagctagagatgctgcgacagtacggtcccaatgtgcccgaaccaatccttcaaaaactggtcgccgcttttggcgagttacggtcactggctgaccaggggatcatcaactatccctactccacacgggaggtcgtaaatatagtcaaacatcttcagaaattcccaacagagggattgtcctcagtggtccgcaacgtgttcgattttgacagttataataatgacatgcgtgaaatcctgatcaataccctgcataaatacggaatccctattggagccaagcccacttctgttcagctcgccaaggaatag

SEQ ID NO: 184073 - DNA, 5718 bp, Artificial Sequence
  derived and/or modified sequence
atgcagagtcggcttctgttgctgggggcacccggaggtcacggaggacctgcttcccggcgaatgcgcttattactgcgccaggttgtgcaacgccgtcctgggggtgatcggcagcgaccagaagttaggcttctacatgctggctctggcgcagataccggcgatactgtgaatattggggatgtcagctacaagctgaagatccccaaaaatcctgaactggtgccacagaactatatatcggacagcctggcccaatcggtggtgcagcatctaaggtggataatgcaaaaagatttacttggtcaggatgtgtttctcataggacccccaggccctctgcgcagatcgatcgccatgcagtatctggagctcacaaagagagaagtagagtacatagccttatcccgcgatacaactgagaccgacctaaaacagagacgtgaaatccgggctggtacagctttttatatcgaccaatgtgctgtgagggctgcgacagaaggaagaactctcattctggaaggattagaaaaggcagagaggaacgtgctgcccgtccttaacaacctgctcgagaaccgggaaatgcagctggaagatgggcgttttctgatgagcgccgagaggtacgataaactgctgcgcgaccacactaagaaagagctggacagttggaagatcgtccgcgtttcagaaaatttcagagtcatcgctctgggcctgcccgtaccccgatactctgggaaccctttggatcccccactccgatccaggtttcaggcccgtgacatctactacctcccttttaaagatcagctgaagttactctactcaataggcgctaacgtgagcgctgagaaggtctcccaactcctatcgtttgccacaaccctttgctcccaggagtcctcaacactgggcctgcccgattttcctcttgactctttagcggcagctgttcagatcctcgactcgttccccatgatgcccataaaacacgcaattcagtggctctacccctacagtattctgctcggtcatgagggcaaaatggcggtggagggcgtgctgaagaggttcgagcttcaggattctggttccagccttctcccaaaagaaatagtgaaagtagagaagatgatggaaaaccacgtctcacaagcaagcgtgacgatcagaatagccgacaaagaggtgaccattaaagtgcccgcaggcacgagactgttgagccagccttgcgcctctgacagatttatccaaaccctaagccacaagcagctgcaagctgagatgatgcaatcccacatggtgaaggacatttgtctgatcggtggaaagggctgcgggaagactgtgattgccaaaaactttgctgataccctgggctacaacatcgaaccgatcatgctgtatcaggacatgactgccagggaccttctccagcagaggtacacccttccaaacggagatactgcctggcgttcctctcccctcgtgaatgcagcactggagggaaagctagtgctcttagatggaattcatcgggttaacgcaggaacactggctgtccttcaacggttgattcacgatagagagctcagcctgtacgatggttctagactcctccgtgaagatcgctacatgaggttgaaggaagaactccagctgtccgatgaacagctgcagaagcgttcaattttcccgatccatccatccttccgcataattgcactagccgaaccaccagtgatcggcagtaccgcccatcagtggctaggacctgaatttctcaccatgttcttcttccattacatgaaacccctggtcaaaagcgaagagatacaggtcattaaggaaaaggtgcctaatgtccctcaggaggctcttgacaaactgttaagttttacccataaactgagggaaactcaggatcctacagcgcagtctttagcagccagcctgagtacgagacaacttctgcggatcagtcgtcggctgtcacagtaccccaatgaaaacctgcacagtgcagtgaccaaagcttgtctttccagattcctccctagcctcgcgaggagcgctctggaaaagaatctcgccgacgccacgatagagatcaataccgacgacaacctcgagccggagcttaaggactataaatgcgaggtgacatcgggcactctgcgcataggcgcagtcagcgcaccgatttacaatgcgcatgaaaagatgaaagtgcccgatgtgctattctatgataatattcaacacgtgattgtgatggaagatatgctaaaggatttcctgctgggcgagcacctgttgctggtgggtaaccagggtgtcgggaagaacaaaatagtcgatcgctttcttcatctattaaatcggccacgcgagtacatccagttgcatcgcgatacaaccgttcagaccttaactcttcagccctccgttaaggatggcctgatcgtttatgaagatagtcccctggtgaaggctgttaagctcggccacattctggtggtggatgaggctgacaaagcgccaacaaacgttacttgcatcctaaaaaccctggtggagaatggggaaatgattctggctgacgggaggaggatcgtggccaactccgcgaacgtgaacggccgagagaacgtggtcgtgatccatccagatttccgcatgatcgtgctggccaatcggccaggattccctttcctggggaacgacttcttcgggactctaggcgatatcttctcctgtcatgctgtggacaatccaaagccacattccgaattagagatgctgcgccagtacggaccaaacgtacctgagccaatactgcagaaattagtcgcggcttttggcgagctgcgctctctcgccgatcaaggcattattaattacccctactctacacgtgaagttgtcaacatcgtgaagcacctgcagaaattccccacagaggggctttcgagcgtagtgagaaacgtgttcgacttcgattcctacaacaatgatatgagggaaatcctaatcaacaccctccataagtacggaattcccataggggctaagccgaccagcgtccaactagccaaagagcttacactcccagagcagacattcatgggctactggactatcggccaggcccgatcgggtatgcagaaactcctgtgccctgttgagactcatcacattgatatcaaaggaccagctttaatcaacattcaggagtacccaatagagcggcatgaagagagatcattgaactttacagaggagtgcgccagttggcggattcccctcgacgaaatcaacatcatttgtgacatcgccacctcacacgagaacgaacaaaacacactttatgtggtgacctgcaaccccgcttcgttgtattttatgaatatgaccggcaagagcggcttttttgttgacttttttgacattttcccaaggacggcgaatggtgtgtggcatccgttcgtaactgtggcccctcttggcagcccgttaaagggccaggtcgtcctccatgagcagcagtctaatgtgatcctattgctggacaccaccgggcgagcactccacaggcttatattacccagtgagaaatttacttccaagaagcccttctggtggaataaggaggaggcagaaacatacaagatgtgcaaggagtttagccataagaattggcttgtcttttacaaggaaaagggtaattctctgaccgtgcttgacgttttggaggggcgtacacacaccatctccctccccattaacctaaaaacggtgtttttagtcgccgaagacaagtggctgctggtagaatccaaaacaaatcagaagtacctgctgacaaaacctgctcacattgagtccgaaggttctggcgtctgtcagctgtatgtgctgaaagaggaacctcccagtactgggtttggggtgacacaggagactgagttctcaatcccacacaaaatctcaagcgaccagctttcttccgagcacctatcatccgcagtcgagcagaagatcgcctctcccaatcgtattctgtcggatgaaaagaattatgccaccattgttgtcgggtttcccgacttgatgagcccctctgaggtctattcctggaaaaggccttcatccctgcataagaggtctggcaccgatacctccttttaccgaggcaagaagaagagggggacacctaaacagagcaactgtgtgaccctcctggacacaaatcaggtggtgcgcattctacctccgggtgaagttcccctgaaagacatatatcctaaagacgtgacaccaccccagacttccggctatattgaggttaccgatctgcagtctaaaaaacttaggtacataccaattcctcgctcagaatccctcagtccctataccacgtggctcagcaccattagcgatacagacgctctgctggcagagtgggataaatcaggggtagtgacagtggatatgggaggacacattaggctgtgggagacaggacttgagagattacagcggagtctaatggaatggagaaacatgatcggccaggacgaccgcaacatgcagatcactatcaaccgagacagtggagaggacgtttcctcacctaaacatgggaaggaagacccagacaatatgcctcatgtggggggaaatacttgggcaggtggaaccggcggaagagacacggccggactcggtgggaagggaggtccctaccgcctggacgctggccatacagtgtatcaagtctctcaagcggagaaggatgccgtaccagaagaagtgaagcgtgccgctagagagatggggcagcgggcattccagcaaaggctcaaagagattcagatgagcgagtatgatgctgctacttacgaaagattttcgggcgctgtaagacggcaggtccacagtctgagaattatcctcgacaacctccaggccaaaggaaaggagcggcaatggcttcgccaccaggcaaccggagagctggacgacgctaagattatcgacgggctaaccggcgagaaagccatctataagagacgcggagaacttgaaccgcagcttggtagcccccagcaaaagccaaagaggctgcgactggtggtcgacgtgagcggtagcatgtataggtttaaccggatggatgggaggttggaaaggacgatggaagcagtctgcatggttatggaggcgtttgaaaactatgaagaaaaattccaatacgatattgtcggccactcgggagacggatataatattggactcgtgccaatgaacaagatcccaaaagataacaaacagcggctggagattctgaagacaatgcacgctcacagtcagttctgcatgtccggggaccatacgctagagggaaccgagcatgcaatcaaggagatcgttaaggaagaggctgatgaatacttcgtcatcgtgctttctgacgcaaatctgtctcgctatggcattcaccctgcgaagttcgctcaaatcctgaccagagatcctcaggttaatgcattcgccattttcattggttcattaggggaccaagctactcgcttgcagcgcactctgcctgctggcagatcctttgtggcaatggacaccaaagacatccctcaaattctgcagcagattttcacaagcactatgctgtcaagcgtgtat

SEQ ID NO: 184074 - DNA, 3120 bp, Artificial Sequence
  derived and/or modified sequence
atgcagagtagactgctcctgctgggtgctccagggggacacggcggtcctgctagccgccgcatgcggttgctcctcagacaggtggtacaaaggcgtcctggcggcgatcgccagcggccagaggtgaggctcctccatgcagggtccggcgccgacaccggagacacagttaacataggcgacgtgtcgtataaattaaaaatcccaaaaaaccccgaattagtaccacagaactacatttccgactcactcgcacagtccgttgttcaacatcttcgctggattatgcagaaagatctgttggggcaggatgtgtttttaatcggtcccccaggcccgctccgccgctcaatcgcaatgcaatatctggagttgaccaagcgggaagttgagtatatcgcgcttagccgggatacaactgaaacggaccttaaacagagaagagagattagggcaggcactgccttctacattgaccagtgtgcggtaagagcagctactgaaggtcgcacactcatcttagaaggattggagaaagctgagcgtaatgttcttcctgtgctgaacaatcttctcgaaaacagggagatgcagctggaggatggaaggttcctcatgtccgcagagagatacgacaaattacttagagatcatacgaaaaaagagctcgatagctggaaaatcgttcgcgtgagcgagaatttcagggtaattgcactggggctgccggtccccagatacagcggaaaccccctcgatccacccctcaggtcaagatttcaggctagagacatctactatctaccgttcaaggaccagctgaaactcctttatagtattggcgccaatgtgagcgcagaaaaagtgagtcagctcttaagtttcgcgactactctgtgctctcaggaaagcagcacacttgggcttcctgattttcctctggacagtctcgctgcagctgtacagatcctcgactccttccccatgatgcctatcaaacatgcaattcagtggctctatccctattccattctgctgggacacgaagggaaaatggccgtggaaggcgtcctcaagcgtttcgagttgcaggattccggtagctctcttttgccaaaagaaattgttaaggtcgagaaaatgatggagaatcatgtctctcaggccagcgtgaccattcgtatcgccgacaaggaagtaacaatcaaagtgccagccggtacacgtctgctctctcaaccttgtgcttccgatcgctttatccagactcttagccacaaacaactccaagcagaaatgatgcagagccatatggtgaaagacatttgtttgattgggggtaaaggatgcgggaagactgtaatagccaaaaactttgctgacacactgggttacaatatcgaacctatcatgctgtaccaggacatgactgctcgggatctgctgcagcaacggtatacgttacccaacggagatacggcctggcgaagctcaccccttgtgaacgcagctctggaaggaaagcttgtgctactggatggcattcaccgggtgaacgccgggacactggccgtcttgcaacgtctgatccacgacagggaactttccctttacgatggctccaggctgctcagagaagataggtatatgagactcaaagaagagctccagcttagcgacgagcaactgcagaaacgcagcatcttcccgatccacccgagtttcagaataatcgcactggcagagcctccagtgatcgggtctacagctcatcagtggctagggcctgagttcctgaccatgttctttttccactatatgaagccccttgttaaaagcgaggaaatccaggtgatcaaagagaaagtgccaaacgtgccacaggaggcactggataagctgctgtccttcactcacaagttgcgagaaacacaggacccaacagcccaatccctcgctgcaagcctctccaccaggcagcttctgcgaatttcccggagactttcccaatatccaaacgagaatcttcactccgcggtcaccaaggcttgcctgtctcgctttctcccctcgctggccagatctgcactggagaagaacctggccgatgccacaatcgagattaatacagatgacaacttggagcctgagctcaaagattacaagtgtgaagtcactagcggcactcttaggattggcgccgtttcggcccccatctataacgcccatgagaagatgaaggtcccggatgtgcttttctatgataatattcagcacgtgatcgtaatggaggacatgctgaaagactttttgctcggggaacacctcctgctggtcggtaatcagggtgtcgggaagaacaaaatagtggataggttcctacacctcctgaatagaccaagggagtacattcagctccatcgcgacacaaccgtccagaccctgacactacagcccagtgtgaaggatggactcatagtgtatgaggactcacccctggtgaaggctgtcaagttaggccatatcttggtggttgatgaggcagataaggcacccacaaatgtaacatgcatattgaagacgctggtggaaaacggcgagatgatcctcgctgatggtcgccgcatagttgcaaattctgcaaacgttaacgggcgggaaaacgtggtggtgatccatccagatttccgaatgattgtgcttgcgaatcggccaggatttccttttttggggaacgatttctttgggaccctcggcgacattttctcgtgccatgcagtggacaacccaaagccccattctgagctcgaaatgctgagacaatatggaccgaacgtgccggaaccaattttgcagaagctggtggctgctttcggggagttgcgttcactcgcagaccagggcattattaactatccctattcaacccgcgaagtggtaaatatagtgaagcatctccagaagtttccgactgagggcttgagtagtgtagtaagaaacgtatttgattttgatagctataataatgatatgcgtgaaatattgataaacactctgcataaatatggaattccaatcggagccaaacccacaagcgtccagcttgctaaggagtag

SEQ ID NO: 184075 - DNA, 5718 bp, Artificial Sequence
  derived and/or modified sequence
atgcagtctcggctcctgcttcttggggctcccggggggcacggcggccccgcttcacgcaggatgcgcctccttctgcgccaggtggtccagcgtcgaccaggcggcgataggcagaggccagaggtgagattactgcacgcaggcagcggcgcagatactggggacacggtcaatatcggggacgtatcttataagctaaaaatccccaagaaccctgagctcgtgccccagaattatataagcgactcactggcacagagcgtagtgcaacatctgaggtggattatgcagaaggacctactggggcaggacgtgttcctgatcggtcctccagggccactaaggaggtccattgcaatgcagtaccttgagttgacgaagcgcgaagtggaatacatcgccctaagtcgcgataccaccgaaacagacttgaagcaacgccgagaaatccgcgctggcacagcattctacatagatcagtgtgccgtgcgggctgcaaccgagggaaggaccctgatactcgaagggcttgaaaaagctgaacgaaacgtgctgccagtcctcaataatctcttggaaaatcgagaaatgcagcttgaggacggccgatttttaatgtctgccgaacgatacgacaaactattacgcgaccacacaaaaaaggaactcgacagctggaaaatagtccgagtgagtgaaaacttcagagtcatcgcgctcggcctacccgtaccgcggtacagtggaaaccctctggaccctccccttcgttctaggttccaagcccgggatatctattacctgccattcaaagaccagctgaaactgctgtacagtataggtgctaacgtgtctgcagaaaaagttagccaactgctgtcattcgccaccaccttgtgcagtcaggaaagcagcaccctgggattacctgattttccactggacagtctagctgccgcagttcaaatcctcgactcgtttcctatgatgcctatcaaacatgcaatacaatggttgtacccctattcgatccttctaggacacgagggcaagatggccgtggagggtgttctgaaacgcttcgagttgcaggactccggatcctccttgttacctaaagagattgtcaaggttgaaaagatgatggagaaccatgtatcacaggccagtgtgactatccgcatagcagacaaagaggttacgatcaaggtaccagccggtacaagactgcttagccagccttgcgctagtgatcgttttatacagacgctgagtcataaacagttgcaggccgagatgatgcaaagccacatggttaaagacatatgtctcataggcggtaagggttgtggcaaaacggtgatcgcaaagaactttgctgatacactgggttacaatatcgagcctattatgctatatcaggatatgactgctcgcgacctgttgcaacaacggtatacactgcctaacggcgacacagcgtggcggagttctccccttgtgaatgctgccttggaggggaagctcgtgttgctggatggcatccaccgtgtcaatgcgggaacgctcgccgtgctgcagagacttatccacgatcgggagctctccctttacgatggaagtcgcctgttaagagaagaccggtacatgcgcctaaaagaagaattacagttgtctgatgaacagcttcaaaagcgaagtatatttcctatccacccttcttttaggattattgctcttgctgaacccccagtgatcgggtcgacggctcaccagtggctgggacccgaatttctcactatgttcttctttcattacatgaaacccctggttaaaagtgaggaaattcaggtgatcaaggagaaggtccccaacgtacctcaggaagctttggataagctgttgtcttttacacacaagcttcgcgaaacccaggaccctacagcccagagcctggccgctagcctgagcacccgtcagctgctgaggatcagcagaaggctgtctcagtaccctaatgaaaacctgcactccgctgtaaccaaggcttgcctgagccgctttcttccctctctagcaaggagcgcattagaaaagaaccttgccgatgctacaattgaaattaacaccgatgacaatctggaacccgagctcaaggattacaagtgtgaggtaacgagcgggacactgcgaattggcgcggtgagtgcgccaatatataatgcccacgagaaaatgaaagtgccggatgtgttattttacgacaatattcaacatgtaatcgtcatggaggacatgctcaaagactttctcctcggcgagcatttgttattagtcggaaatcaaggtgttggcaaaaataagattgtcgaccggttcctccacctgctgaacaggccaagagaatatatccaattacaccgcgacacaactgtacagacactgacattgcaaccaagtgtgaaggatgggttgattgtatatgaggattcccctctcgttaaagcagttaaactgggacacatcctggtggtggatgaggcagataaggcccccaccaacgtgacatgcatcctcaagaccctcgtggaaaatggagagatgatcctggccgatggccggaggatcgtcgctaacagcgccaacgtcaacggccgcgaaaacgtagtggtcatccaccctgactttcggatgatcgttctggccaataggcctggcttcccttttcttggtaacgactttttcggcaccctaggtgatatattttcctgccacgccgtggataacccaaagccgcactctgaactggagatgctgagacagtatggaccaaacgttccagaacccatcttacagaaactggtagccgccttcggagagctacgctcattggctgatcagggcataatcaattacccttattcaaccagggaggttgtaaatatagtaaagcacctccagaaatttccgacagagggcctatcttccgtcgtgaggaatgttttcgacttcgacagctacaataacgatatgcgagagattctgatcaatacactgcacaaatatggaatccccatcggggctaaacccacttctgtgcagctggcaaaggagcttaccctgccagaacaaactttcatgggctactggacaatcggtcaagcaagaagcggtatgcaaaaacttctctgtccggtcgagacccaccatatcgacatcaaagggcccgcacttattaatatccaagagtacccgatcgagcggcacgaagagagatcacttaacttcaccgaggaatgcgcttcatggaggatcccgctcgacgaaataaacatcatttgtgacatcgccacatcacacgagaacgaacaaaatacattatatgtcgtcacctgcaatcctgcctccctgtatttcatgaatatgactggcaagtcaggatttttcgtggacttctttgacattttcccccggaccgctaatggggtttggcatccatttgtgacagtggccccactcgggagccccctgaaggggcaggtcgtcctccacgagcagcaatcaaacgtcatcctattactggatacaacgggcagagccttgcaccgattgatcctgccctcagagaaatttacaagcaagaagcccttttggtggaacaaagaggaggcagagacatataaaatgtgcaaggaatttagtcataagaactggttggtgttttataaagaaaagggtaattccctcaccgtcctcgatgtgctggaaggtcgcacccacaccatcagtctgccaatcaatttaaaaactgtgttcctggtggcagaggacaaatggttactcgttgagagtaagactaaccagaagtatttgttaactaagcccgcgcacattgaatccgagggatctggagtgtgtcagctgtacgttctgaaagaggaaccaccatcaacaggcttcggtgtaactcaggaaaccgagttctcaatacctcataaaatctcttcagaccaactgtcaagtgagcacctctcctcagccgttgaacagaagattgctagccccaatagaatactctctgatgagaagaactacgccaccatcgttgtaggtttccctgatcttatgagcccaagcgaggtctactcctggaagcggccatcttctcttcacaagcgcagcgggactgacaccagcttctaccgcggcaagaagaagcgggggacgccgaagcagagcaattgcgtcactctgttagatacaaatcaggtcgtgcggatcttaccaccaggcgaggtgccactgaaggatatctatccaaaagacgtaacaccaccacagacaagtggctatattgaagtgactgacctgcaatcgaaaaaacttagatacattccgattccgcggtccgaatccctgagcccgtacaccacctggctctcaaccattagcgacaccgatgctctgttggcggaatgggataagtcaggagtggtcacagtagatatgggggggcacattagattatgggaaacagggctcgagcgactgcagcgtagccttatggaatggagaaacatgatcggccaggacgacaggaacatgcaaattactattaaccgcgattctggcgaggatgtgagctctcccaagcacggcaaggaagaccctgacaacatgccccatgtgggaggtaacacatgggctggcggcacagggggccgggataccgcagggcttggaggcaaagggggcccatataggctggatgccggtcacaccgtgtaccaagtctcacaagccgaaaaggatgctgtccccgaggaggtgaaacgagctgcccgagaaatgggacagcgagcctttcagcagaggctcaaggaaatacagatgtctgagtacgatgctgcaacctatgagaggttttccggcgccgtcaggaggcaggtacattctttgcgcatcattctcgacaacctccaggctaagggcaaggaaaggcaatggttacgtcaccaggccacaggagagctggacgacgccaaaatcattgacgggcttactggcgagaaagccatttacaaacggaggggggagctggaaccccagctcggctcgccacaacagaaaccaaaaagattgagactggtggtggacgtcagcggtagcatgtaccgctttaaccgcatggacggtcgcctggaacgtactatggaagccgtgtgcatggtcatggaggcctttgaaaattatgaagaaaagttccaatacgacattgtcggacactccggagatgggtataacataggcctcgtgcccatgaacaagattcccaaagacaacaagcagcgcctggaaattctgaagacaatgcatgcgcattcgcaattttgtatgagcggagaccatacgctagagggcactgaacacgctattaaagaaatcgttaaggaggaggccgacgaatacttcgtgatcgtactctcagacgccaacttaagccggtacggcatccatccagcaaagtttgcccaaatcttaacaagagatcctcaggtgaacgcttttgccattttcattgggagcctgggcgatcaggcaacacgattgcagcggacactgccagcgggccgatcctttgtcgctatggacactaaggacatcccgcaaatcctacagcagatcttcacgagcactatgctgagtagcgtctag

SEQ ID NO: 184076 - DNA, 3120 bp, Artificial Sequence
  derived and/or modified sequence
atgcagagtagactgctcctgctgggtgctccagggggacacggcggtcctgctagccgccgcatgcggttgctcctcagacaggtggtacaaaggcgtcctggcggcgatcgccagcggccagaggtgaggctcctccatgcagggtccggcgccgacaccggagacacagttaacataggcgacgtgtcgtataaattaaaaatcccaaaaaaccccgaattagtaccacagaactacatttccgactcactcgcacagtccgttgttcaacatcttcgctggattatgcagaaagatcttctgggacaagacgtcttcttaataggacccccgggacctcttagacgcagtatcgctatgcagtatcttgaacttacaaaacgcgaggtggagtatatcgcactctccagggacactactgaaacagatttgaagcagaggcgggaaatccgtgcggggactgctttttatattgaccagtgtgcggtgcgtgccgccaccgagggcagaaccctaatattagagggacttgaaaaggcggaacggaatgtattgccagttttgaataatttgttggaaaaccgcgaaatgcaattggaagacggacggttccttatgtcagccgagcgttacgacaaactgttgcgggatcacacgaagaaagagctggacagttggaaaattgtgagagtgtccgagaattttagagtgatcgccctgggcctcccagttccccgttatagtggaaaccccctggacccacccctccgcagccgttttcaggcccgagacatttattatctccccttcaaagatcagctcaaactgttgtattctataggtgctaatgtttccgccgagaaagtttcccagttgctctccttcgcaacaaccctttgcagtcaggaatcttccacacttggcctccccgactttccactagactccctcgccgcagcagtgcagatcctggactcattccctatgatgcctattaagcatgctatccaatggctgtacccttattccattctcctcggtcacgaaggaaagatggccgtagagggtgtcttaaagagatttgaacttcaggacagtggaagctcactgctgcctaaagagatagttaaagtagaaaagatgatggagaaccatgtatcacaggcatccgtgactatccgcatcgctgacaaggaagtgactatcaaggtgcctgccggtactcgcctactgtctcagccctgtgcctctgatcgatttatccagactctgtcccacaaacagctacaggccgagatgatgcaatcccacatggtgaaggatatatgcttgataggtggaaaaggctgcggaaagaccgtgatcgccaaaaatttcgctgacaccctcggctataatatagaacccatcatgctctaccaggacatgactgcccgtgatctactgcagcagaggtataccttgcctaatggagataccgcttggagatcaagtcccctcgtcaatgctgcacttgagggtaaactggttctactcgacggcattcaccgagtcaacgccggcactctggctgtgctgcagcgcttaatccacgaccgagaactttccctttacgatggtagccgcctactgagggaggatagatacatgaggcttaaagaagaactacagctgtcggatgagcaattacaaaagagatctatctttccaatccatccctcattccgcatcatcgccctagcagaaccacccgtgattgggtctacagctcaccagtggctcggaccagaattcttaacaatgtttttttttcattatatgaaacccttggtcaaatcggaagaaattcaggtgatcaaagagaaggtgccaaatgtgccccaggaagcactggataagctgttatcttttacacataagctccgggagacccaggatcctaccgctcaatccctagccgcgtctctctctacacgacaacttctacgcatcagcaggaggctgtcccagtatccaaatgaaaatctacactctgctgtaacaaaggcatgtctttctagatttcttccctcactcgcacgctcagctctcgaaaaaaatttagcagacgccaccattgaaattaacacagacgacaacctcgaacctgagctgaaagactacaagtgtgaggttacctcagggacacttaggataggtgctgtgtctgcccctatttacaatgcccatgagaaaatgaaggtgcctgatgtgcttttttacgataatattcaacatgtgatcgtgatggaagatatgctaaaagactttctgctcggggaacatctcctgttggtcggaaaccagggcgtgggtaaaaataagatcgttgatcgcttcctccatctcttgaacagaccccgcgagtatattcaacttcatagagacaccactgtgcaaactctgaccctccagccttcggtgaaagacggacttatagtgtatgaggattcccccttggtgaaggccgttaaactcggacatattctggtggtggatgaggcagataaagcacccacaaatgtcacttgcattttgaaaacactggtggagaacggagagatgatcctcgccgatggtaggcgcattgtggcaaatagcgctaatgtgaatgggagagaaaatgtggtagtaattcatcccgatttcagaatgatagttctggctaatcggcccggcttcccctttctgggaaacgatttctttggaacattgggggatatcttttcttgccatgctgttgacaacccaaagcctcattcagaacttgaaatgctgcgccaatatggcccaaacgtacctgaaccgatactccagaagctagtggccgcatttggagagctgaggtccctagctgatcaaggaattattaactatccatactccacacgggaagtggtcaacatcgtcaaacacctacagaaattcccaactgaaggcctttcatcggtggtgaggaacgtattcgacttcgattcttataataatgacatgagagaaattctgataaataccctgcacaaatatggaatcccgatcggcgcaaaaccaacatctgtccagctagccaaagaatag

SEQ ID NO: 184077 - DNA, 5718 bp, Artificial Sequence
  derived and/or modified sequence
atgcagtcgagattactcctgttgggtgcacccggagggcatggcggtcccgcctccaggagaatgcggctacttttaagacaggtggtccagcgccgcccaggaggggacagacagcggcccgaggttagacttctgcacgccggatcaggggccgacaccggtgatacggtcaatataggcgatgttagctataagctaaaaattccaaagaatcccgaactcgtgcctcagaactacatcagcgattctctagcccaatcagttgtgcagcaccttcggtggatcatgcaaaaggatctgctgggccaagatgtcttccttattggaccacctggccccctgagacgtagcattgctatgcaatacctggagctcactaagcgggaagttgaatacatcgctctcagtagagacaccacggagactgacctgaagcagaggagggaaattcgcgccggtacagctttttacatagaccagtgtgccgtgagagccgctaccgaaggaagaactctgatccttgaaggactagaaaaggccgaacgcaatgtgttacctgtgctgaacaatttactcgagaaccgcgaaatgcagttagaggacggccgttttctgatgagcgccgagcgttacgacaagttactgagagatcacaccaagaaagagctcgatagctggaaaattgttcgtgtctccgaaaattttagagtgatcgcccttggtctgcccgttcctcgctactctggtaacccgctggatccaccacttagatctagattccaggcacgggacatctactaccttccttttaaagatcaactgaagctgctctattcgatcggtgctaacgtatccgcagagaaagtgtctcaattattgagcttcgcgactactttgtgttcacaggaatcgagcacactgggtctccccgactttcccttggattccctggctgctgcagtccaaatcttagacagctttccaatgatgccaatcaaacacgcaattcagtggctctacccttattccatactgctgggccatgaaggtaagatggccgtcgagggtgttctgaagaggtttgagctccaggatagcggatcttccttgctcccaaaagaaatcgtaaaagtagaaaagatgatggagaatcacgtttcgcaagcctctgtcactattaggattgccgacaaggaggtgaccatcaaagtccccgctggcaccaggcttctcagtcaaccatgcgcgagcgaccgattcattcagactctgagtcataagcaactgcaagccgaaatgatgcaatcccatatggttaaagatatttgcctaatcggaggaaaaggctgcgggaagacagttatcgccaagaatttcgctgacaccctcggctataatatagagccaatcatgctttaccaggatatgaccgcaagagatctgctgcagcaacggtacaccctcccaaacggcgataccgcgtggcgcagctccccgttagtaaacgccgccctcgagggcaagctggtgcttcttgacgggattcaccgagttaatgcaggaactcttgctgtcttgcaaagactcatacacgaccgggagttgagcctgtacgacggctcacggctgcttagagaagacagatacatgcgtttgaaagaggaattacaactgtcagacgagcagctgcaaaagcgaagcattttccctattcatccttctttcagaataattgcacttgcagaaccccccgtgataggtagcaccgctcatcagtggttgggccccgaattcctgaccatgttcttcttccactatatgaaaccactcgtgaaatcagaggaaatccaggtgattaaagaaaaggtgccgaacgttccccaagaagccctcgataagctattgtccttcacccataaacttagagagacacaggacccaacggcccagtcactcgctgcctccttgagtacccgacaactgctgcgcattagccggagactgtcacaataccccaatgagaaccttcatagtgcagtgaccaaagcttgcctgagcaggttcctgccctcattagccagatctgcacttgagaaaaatctggccgacgctaccattgagatcaacaccgatgacaatctagaaccggaactcaaggactacaaatgcgaggtgacgtctggtactctcaggatcggcgccgtgtctgcccctatctacaatgctcacgagaaaatgaaagtacctgatgttctattctatgacaatattcaacacgtcatcgttatggaggacatgctcaaggatttcttgctcggtgagcatctccttttagtcgggaatcagggcgtgggtaaaaacaagatcgtggaccgcttcttacacttactcaacagaccacgtgagtatattcagctgcatagagacacaaccgtgcaaacacttacccttcagccctccgtgaaagacggactaattgtttatgaagactcacccctcgtgaaggcagtgaagcttggacacattctggtcgtcgacgaggcagataaggcccctaccaatgtaacctgtatactcaagactttagttgagaatggtgagatgatcctcgccgatggacggcggatagtagccaacagcgccaacgttaacgggagagaaaacgtggtggtgattcaccctgattttagaatgatcgtgctcgccaatagacctgggttccctttcctgggcaatgatttttttgggaccctaggcgatatcttttcctgccatgcggtcgataatcctaagccacactccgaattagaaatgctccggcagtacggaccgaacgtgcctgagcctatccttcaaaagttggttgcagcgtttggtgaactgagaagcctggctgatcagggcattatcaactatccctatagcactcgcgaggttgtcaatatagtgaaacacctccaaaagttcccgactgagggcctttcctctgttgtgcgcaatgtattcgacttcgattcctacaataatgatatgcgagaaattctgattaatactcttcacaaatatgggattcctattggcgccaagccaacaagcgtgcagctggccaaggagctgactcttcccgagcaaactttcatgggttactggaccatcggacaagctagaagtggcatgcaaaaattgctgtgtcctgtcgaaacccatcacattgatatcaaaggaccggccctgattaatatacaagagtaccctattgaacgtcacgaggaacgatcgctgaatttcaccgaggaatgtgctagctggcgaatcccgctcgacgagattaatattatttgtgatattgccacctctcatgagaacgagcagaacacactatatgtagtgacttgcaatcccgcctctctgtattttatgaacatgactggcaagagtggattcttcgttgatttttttgacatatttcctcgaaccgccaatggagtgtggcatcctttcgttacagtagctccactaggctcaccccttaaagggcaggtcgtgctgcacgagcaacagagtaacgtaatcttgctccttgatactacgggcagagccttgcaccgtctcatattacctagcgaaaagtttaccagcaagaagcctttttggtggaataaagaagaagccgagacatacaagatgtgcaaggaattctcacacaaaaattggctagtgttctataaggaaaagggtaactccttgactgttttggatgtgttggagggacgcactcacactataagtcttccgattaacctgaaaaccgtgttcttggtagccgaagataaatggttgctcgtagaaagcaagacaaaccagaaatacctgttgaccaaacccgcccacatcgaatccgagggaagtggtgtgtgccagctgtacgtcctgaaggaggagcccccctcgaccggctttggagtaacccaggagacggagttttcaatcccccacaaaatatctagtgaccagttatcctccgaacacctcagctctgctgttgagcaaaagattgctagccccaatagaattttatcagacgaaaaaaattacgcaactattgtagttggtttccccgacttaatgagcccaagcgaagtgtattcttggaagcggccatcaagtctgcacaagagaagcggaacagacacctccttttatcggggcaaaaaaaagagaggtactccgaaacagtccaattgcgtgacccttctcgatacaaaccaagtagtacgaatcctgccccccggcgaggtgccacttaaggacatttacccaaaggacgtgaccccaccacagaccagtggttacatagaagtaactgacctccagagcaagaagttgagatatataccaataccccgcagcgaaagcctgtctccttataccacctggctgtcgacaattagtgatactgatgcgctgctcgctgaatgggataagagcggagttgtaacagtagacatgggcggtcatatacgtttgtgggagacgggactggaacgtttgcagcggtcactgatggagtggagaaacatgataggccaggatgatagaaacatgcaaatcacaatcaatagggactcaggggaagatgtgagctcacctaaacatgggaaggaggaccccgacaacatgcctcatgtgggcggcaacacctgggccggaggcacaggaggtagagatacagccggactgggtgggaaagggggcccttatcgcttggatgctggtcataccgtctaccaggtaagtcaggcagaaaaggatgcagtgcctgaagaagtgaaaagggccgctagagaaatggggcagagggcttttcagcagaggctcaaagaaattcagatgagtgaatacgacgcggcaacatacgagagattttcaggagcagtacggcgccaggtgcatagcctgcgtattattctcgataatctgcaagcaaaaggaaaggagagacagtggcttagacaccaggccacgggggagctagatgatgccaagatcattgatggattgacaggggagaaggccatatacaagaggcggggcgagcttgagccccagctaggaagcccacagcaaaaacctaagagattgaggctggtggttgatgtgtcaggaagtatgtatcgctttaacagaatggacggccggttggaacgtacgatggaagccgtgtgcatggtgatggaggcctttgaaaactatgaagagaagttccagtatgatattgtaggacatagtggcgacggctacaatatcggtctggtgcctatgaacaagatcccaaaggacaataagcagaggttagagattcttaaaacaatgcatgcgcacagccaattttgcatgtccggcgatcatactttggaaggaaccgaacacgctatcaaggagattgttaaggaggaagccgacgaatactttgtaattgtcctgtctgatgcaaacctctcacgttacggaatacacccagcgaaattcgcacagatattaactagggacccacaggtaaacgcctttgccattttcatcggcagtctcggagaccaggcaacaaggttacagagaacactgcctgcaggtagaagtttcgtcgccatggacactaaagacataccacagatattgcaacagattttcacgagtacaatgctttcttccgtctag

SEQ ID NO: 184078 - DNA, 3475 bp, Artificial Sequence
  derived and/or modified sequence
aggtgccgcttcctgtccccttctccgcgctgcctcacggtgcctgcacgggacgccgctcgatccccgagccccctcgccgtccccgacagcccccccggcgccatgcaatcccggcttctactcctcggggcacccggaggccacggcggcccggcctcgcggcgcatgcggctgctcctgcggcaggtggtgcagcgcaggccgggtggcgacaggcagcggccggaggtcagactgttgcacgccggctcgggggccgacacaggtgatacagttaatattggagatgtatcctacaagttgaaaattcctaagaatccagaacttgtgccacagaactacatttcagactctctggctcaatctgtagttcagcatctaagatggataatgcagaaggatcttttggggcaagatgtttttctaataggacctcctgggcctcttcgacgctctattgctatgcagtacttggagctgaccaaacgggaggtcgaatacattgccctgtcaagggacaccactgaaactgatctcaaacagcgacgagagatccgtgcaggcacagccttttacattgatcagtgtgcagttcgtgcagccacagaaggcagaactctcattttggaaggtttggaaaaggcagagaggaatgttttgcctgttttgaacaacttgctggaaaacagagagatgcagcttgaagatggacgcttcctgatgtctgctgagcgttacgacaaacttctccgagatcataccaaaaaagagttggattcttggaaaattgtccgagttagtgaaaatttccgagtgattgccttgggcttgccagtgccaaggtattctgggaatccattagacccccctcttcgttctcgatttcaagccagggatatttattatttacccttcaaggaccaacttaagttgttatattcaattggagccaatgtttctgctgagaaagtttctcagctcttgtcctttgccacaactctgtgttcccaagaatcttctactcttggacttccagactttcctttagatagtttagcagctgcggttcaaatcttggattcctttcctatgatgccaatcaaacatgcaatccagtggctttatccatatagtattttactaggtcatgaagggaagatggctgtggaaggtgttttaaagcgctttgaacttcaagattcaggaagctctctacttcctaaagagattgtaaaagtagagaagatgatggaaaaccatgtgtcccaagcttctgtgaccatccggattgcagataaagaggtgaccattaaggtgccagccgggaccaggctattaagtcaaccttgtgcgtcagaccgtttcatacagactttgagccataagcagctacaggctgaaatgatgcagtctcacatggttaaagatatatgtttaattggaggaaagggttgtggaaaaacagtgatcgctaagaactttgccgataccttaggatacaacatagaacctattatgctctatcaggatatgacagcgcgtgatctgctacagcagagatacacccttccaaatggagacactgcctggcggtcctcaccccttgtgaatgctgctctggaaggcaagctggtcctgctggatggcattcaccgggtgaatgcgggcacgcttgctgtattgcaaaggttaatccatgatcgagagctaagcctctatgatggttctaggctgctgagagaagacaggtatatgcgtttaaaggaggagctgcaactgtctgatgaacagctacagaagagatccatttttcctatccatccctccttcagaatcattgccttggcagaaccccctgttattggaagcacagcacaccagtggctgggaccagaattcttaaccatgttctttttccattacatgaaaccacttgtgaaaagtgaagaaatccaagtgattaaggaaaaggtcccaaatgtacctcaggaagctctggataagttattatcatttacacacaaactcagagaaacacaggatccaacggcacaatcattagcggcatcactttctaccagacaactgttgcgaatttctcgtcggctgtcacagtatcctaatgaaaatcttcacagtgctgttactaaagcctgcctttccaggtttttacccagtcttgctaggtcagcattagaaaaaaatctggcagatgctacaatagaaataaatactgatgacaatttggagccagaactgaaggattacaaatgtgaagtaacatctggaactctgaggattggtgctgttagtgcaccgatctataatgcacatgagaaaatgaaagtgcctgatgttcttttctatgacaacattcagcatgtgatagtgatggaagatatgctgaaagactttctccttggagaacacttattattggttggcaaccagggtgtaggaaaaaacaagattgttgacagattccttcacctgctcaacagaccccgagaatatattcagctacacagggataccacagtacaaactcttacgcttcagccttcggttaaagacggacttattgtatatgaagactcacctttggttaaagcagtaaagttgggtcatattctggtagtagatgaggctgacaaagctccaacaaatgtcacgtgtattttaaaaactctagtagaaaatggagaaatgattctagcagatggaagacgcattgttgcaaattctgctaatgtgaatggaagagaaaatgttgtagtgattcatcctgattttaggatgattgttctggcaaatagacctggatttcctttcctaggcaatgatttcttcggtaccttaggtgatatttttagctgccatgcagttgataaccccaaaccccactcggagctcgagatgctcagacagtatggaccaaatgtgcctgagcccatccttcagaagcttgtggctgcctttggagagctgaggagtttggctgaccaagggattattaactatccttattctaccagagaagttgtcaacatagtcaaacatttacagaaatttccgactgaaggtctctccagtgtagttcgaaatgtgtttgactttgattcctacaacaatgacatgagggagatattgattaacactttacacaaatacgggatacctatcggagcaaagcctaccagtgtgcagctggcaaaggagtaaggcaaattcagtactcttctgattcttaaatgctgatagttcttgatttatcattccattctacaaaactgagttgctatggaaattactttccatgagtaagcttttcaaatacatgtatatgttgctgtttgctggctgcttttcagttaaatagcattatttataggcctgtaaattgaaaattttgattattatgtatgtcccatgagtagatgtaataaataaagggaaatatttgtttctttaa

SEQ ID NO: 184079 - DNA, 3120 bp, Artificial Sequence
  derived and/or modified sequence
atgcagagcagactgctgctgctgggcgcccccggcggccacggcggccccgccagcagaagaatgagactgctgctgagacaggtggtgcagagaagacccggcggcgacagacagagacccgaggtgagactgctgcacgccggcagcggcgccgacaccggcgacaccgtgaacatcggcgacgtgagctacaagctgaagatccccaagaaccccgagctggtgccccagaactacatcagcgacagcctggcccagagcgtggtgcagcacctgagatggatcatgcagaaggacctgctgggccaggacgtgttcctgatcggcccccccggccccctgagaagaagcatcgccatgcagtacctggagctgaccaagagagaggtggagtacatcgccctgagcagagacaccaccgagaccgacctgaagcagagaagagagatcagagccggcaccgccttctacatcgaccagtgcgccgtgagagccgccaccgagggcagaaccctgatcctggagggcctggagaaggccgagagaaacgtgctgcccgtgctgaacaacctgctggagaacagagagatgcagctggaggacggcagattcctgatgagcgccgagagatacgacaagctgctgagagaccacaccaagaaggagctggacagctggaagatcgtgagagtgagcgagaacttcagagtgatcgccctgggcctgcccgtgcccagatacagcggcaaccccctggacccccccctgagaagcagattccaggccagagacatctactacctgcccttcaaggaccagctgaagctgctgtacagcatcggcgccaacgtgagcgccgagaaggtgagccagctgctgagcttcgccaccaccctgtgcagccaggagagcagcaccctgggcctgcccgacttccccctggacagcctggccgccgccgtgcagatcctggacagcttccccatgatgcccatcaagcacgccatccagtggctgtacccctacagcatcctgctgggccacgagggcaagatggccgtggagggcgtgctgaagagattcgagctgcaggacagcggcagcagcctgctgcccaaggagatcgtgaaggtggagaagatgatggagaaccacgtgagccaggccagcgtgaccatcagaatcgccgacaaggaggtgaccatcaaggtgcccgccggcaccagactgctgagccagccctgcgccagcgacagattcatccagaccctgagccacaagcagctgcaggccgagatgatgcagagccacatggtgaaggacatctgcctgatcggcggcaagggctgcggcaagaccgtgatcgccaagaacttcgccgacaccctgggctacaacatcgagcccatcatgctgtaccaggacatgaccgccagagacctgctgcagcagagatacaccctgcccaacggcgacaccgcctggagaagcagccccctggtgaacgccgccctggagggcaagctggtgctgctggacggcatccacagagtgaacgccggcaccctggccgtgctgcagagactgatccacgacagagagctgagcctgtacgacggcagcagactgctgagagaggacagatacatgagactgaaggaggagctgcagctgagcgacgagcagctgcagaagagaagcatcttccccatccaccccagcttcagaatcatcgccctggccgagccccccgtgatcggcagcaccgcccaccagtggctgggccccgagttcctgaccatgttcttcttccactacatgaagcccctggtgaagagcgaggagatccaggtgatcaaggagaaggtgcccaacgtgccccaggaggccctggacaagctgctgagcttcacccacaagctgagagagacccaggaccccaccgcccagagcctggccgccagcctgagcaccagacagctgctgagaatcagcagaagactgagccagtaccccaacgagaacctgcacagcgccgtgaccaaggcctgcctgagcagattcctgcccagcctggccagaagcgccctggagaagaacctggccgacgccaccatcgagatcaacaccgacgacaacctggagcccgagctgaaggactacaagtgcgaggtgaccagcggcaccctgagaatcggcgccgtgagcgcccccatctacaacgcccacgagaagatgaaggtgcccgacgtgctgttctacgacaacatccagcacgtgatcgtgatggaggacatgctgaaggacttcctgctgggcgagcacctgctgctggtgggcaaccagggcgtgggcaagaacaagatcgtggacagattcctgcacctgctgaacagacccagagagtacatccagctgcacagagacaccaccgtgcagaccctgaccctgcagcccagcgtgaaggacggcctgatcgtgtacgaggacagccccctggtgaaggccgtgaagctgggccacatcctggtggtggacgaggccgacaaggcccccaccaacgtgacctgcatcctgaagaccctggtggagaacggcgagatgatcctggccgacggcagaagaatcgtggccaacagcgccaacgtgaacggcagagagaacgtggtggtgatccaccccgacttcagaatgatcgtgctggccaacagacccggcttccccttcctgggcaacgacttcttcggcaccctgggcgacatcttcagctgccacgccgtggacaaccccaagccccacagcgagctggagatgctgagacagtacggccccaacgtgcccgagcccatcctgcagaagctggtggccgccttcggcgagctgagaagcctggccgaccagggcatcatcaactacccctacagcaccagagaggtggtgaacatcgtgaagcacctgcagaagttccccaccgagggcctgagcagcgtggtgagaaacgtgttcgacttcgacagctacaacaacgacatgagagagatcctgatcaacaccctgcacaagtacggcatccccatcggcgccaagcccaccagcgtgcagctggccaaggagtag

SEQ ID NO: 184080 - DNA, 5718 bp, Artificial Sequence
  derived and/or modified sequence
atgcagagcagactgctgctgctgggcgcccccggcggccacggcggccccgccagcagaagaatgagactgctgctgagacaggtggtgcagagaagacccggcggcgacagacagagacccgaggtgagactgctgcacgccggcagcggcgccgacaccggcgacaccgtgaacatcggcgacgtgagctacaagctgaagatccccaagaaccccgagctggtgccccagaactacatcagcgacagcctggcccagagcgtggtgcagcacctgagatggatcatgcagaaggacctgctgggccaggacgtgttcctgatcggcccccccggccccctgagaagaagcatcgccatgcagtacctggagctgaccaagagagaggtggagtacatcgccctgagcagagacaccaccgagaccgacctgaagcagagaagagagatcagagccggcaccgccttctacatcgaccagtgcgccgtgagagccgccaccgagggcagaaccctgatcctggagggcctggagaaggccgagagaaacgtgctgcccgtgctgaacaacctgctggagaacagagagatgcagctggaggacggcagattcctgatgagcgccgagagatacgacaagctgctgagagaccacaccaagaaggagctggacagctggaagatcgtgagagtgagcgagaacttcagagtgatcgccctgggcctgcccgtgcccagatacagcggcaaccccctggacccccccctgagaagcagattccaggccagagacatctactacctgcccttcaaggaccagctgaagctgctgtacagcatcggcgccaacgtgagcgccgagaaggtgagccagctgctgagcttcgccaccaccctgtgcagccaggagagcagcaccctgggcctgcccgacttccccctggacagcctggccgccgccgtgcagatcctggacagcttccccatgatgcccatcaagcacgccatccagtggctgtacccctacagcatcctgctgggccacgagggcaagatggccgtggagggcgtgctgaagagattcgagctgcaggacagcggcagcagcctgctgcccaaggagatcgtgaaggtggagaagatgatggagaaccacgtgagccaggccagcgtgaccatcagaatcgccgacaaggaggtgaccatcaaggtgcccgccggcaccagactgctgagccagccctgcgccagcgacagattcatccagaccctgagccacaagcagctgcaggccgagatgatgcagagccacatggtgaaggacatctgcctgatcggcggcaagggctgcggcaagaccgtgatcgccaagaacttcgccgacaccctgggctacaacatcgagcccatcatgctgtaccaggacatgaccgccagagacctgctgcagcagagatacaccctgcccaacggcgacaccgcctggagaagcagccccctggtgaacgccgccctggagggcaagctggtgctgctggacggcatccacagagtgaacgccggcaccctggccgtgctgcagagactgatccacgacagagagctgagcctgtacgacggcagcagactgctgagagaggacagatacatgagactgaaggaggagctgcagctgagcgacgagcagctgcagaagagaagcatcttccccatccaccccagcttcagaatcatcgccctggccgagccccccgtgatcggcagcaccgcccaccagtggctgggccccgagttcctgaccatgttcttcttccactacatgaagcccctggtgaagagcgaggagatccaggtgatcaaggagaaggtgcccaacgtgccccaggaggccctggacaagctgctgagcttcacccacaagctgagagagacccaggaccccaccgcccagagcctggccgccagcctgagcaccagacagctgctgagaatcagcagaagactgagccagtaccccaacgagaacctgcacagcgccgtgaccaaggcctgcctgagcagattcctgcccagcctggccagaagcgccctggagaagaacctggccgacgccaccatcgagatcaacaccgacgacaacctggagcccgagctgaaggactacaagtgcgaggtgaccagcggcaccctgagaatcggcgccgtgagcgcccccatctacaacgcccacgagaagatgaaggtgcccgacgtgctgttctacgacaacatccagcacgtgatcgtgatggaggacatgctgaaggacttcctgctgggcgagcacctgctgctggtgggcaaccagggcgtgggcaagaacaagatcgtggacagattcctgcacctgctgaacagacccagagagtacatccagctgcacagagacaccaccgtgcagaccctgaccctgcagcccagcgtgaaggacggcctgatcgtgtacgaggacagccccctggtgaaggccgtgaagctgggccacatcctggtggtggacgaggccgacaaggcccccaccaacgtgacctgcatcctgaagaccctggtggagaacggcgagatgatcctggccgacggcagaagaatcgtggccaacagcgccaacgtgaacggcagagagaacgtggtggtgatccaccccgacttcagaatgatcgtgctggccaacagacccggcttccccttcctgggcaacgacttcttcggcaccctgggcgacatcttcagctgccacgccgtggacaaccccaagccccacagcgagctggagatgctgagacagtacggccccaacgtgcccgagcccatcctgcagaagctggtggccgccttcggcgagctgagaagcctggccgaccagggcatcatcaactacccctacagcaccagagaggtggtgaacatcgtgaagcacctgcagaagttccccaccgagggcctgagcagcgtggtgagaaacgtgttcgacttcgacagctacaacaacgacatgagagagatcctgatcaacaccctgcacaagtacggcatccccatcggcgccaagcccaccagcgtgcagctggccaaggagctgaccctgcccgagcagaccttcatgggctactggaccatcggccaggccagaagcggcatgcagaagctgctgtgccccgtggagacccaccacatcgacatcaagggccccgccctgatcaacatccaggagtaccccatcgagagacacgaggagagaagcctgaacttcaccgaggagtgcgccagctggagaatccccctggacgagatcaacatcatctgcgacatcgccaccagccacgagaacgagcagaacaccctgtacgtggtgacctgcaaccccgccagcctgtacttcatgaacatgaccggcaagagcggcttcttcgtggacttcttcgacatcttccccagaaccgccaacggcgtgtggcaccccttcgtgaccgtggcccccctgggcagccccctgaagggccaggtggtgctgcacgagcagcagagcaacgtgatcctgctgctggacaccaccggcagagccctgcacagactgatcctgcccagcgagaagttcaccagcaagaagcccttctggtggaacaaggaggaggccgagacctacaagatgtgcaaggagttcagccacaagaactggctggtgttctacaaggagaagggcaacagcctgaccgtgctggacgtgctggagggcagaacccacaccatcagcctgcccatcaacctgaagaccgtgttcctggtggccgaggacaagtggctgctggtggagagcaagaccaaccagaagtacctgctgaccaagcccgcccacatcgagagcgagggcagcggcgtgtgccagctgtacgtgctgaaggaggagccccccagcaccggcttcggcgtgacccaggagaccgagttcagcatcccccacaagatcagcagcgaccagctgagcagcgagcacctgagcagcgccgtggagcagaagatcgccagccccaacagaatcctgagcgacgagaagaactacgccaccatcgtggtgggcttccccgacctgatgagccccagcgaggtgtacagctggaagagacccagcagcctgcacaagagaagcggcaccgacaccagcttctacagaggcaagaagaagagaggcacccccaagcagagcaactgcgtgaccctgctggacaccaaccaggtggtgagaatcctgccccccggcgaggtgcccctgaaggacatctaccccaaggacgtgacccccccccagaccagcggctacatcgaggtgaccgacctgcagagcaagaagctgagatacatccccatccccagaagcgagagcctgagcccctacaccacctggctgagcaccatcagcgacaccgacgccctgctggccgagtgggacaagagcggcgtggtgaccgtggacatgggcggccacatcagactgtgggagaccggcctggagagactgcagagaagcctgatggagtggagaaacatgatcggccaggacgacagaaacatgcagatcaccatcaacagagacagcggcgaggacgtgagcagccccaagcacggcaaggaggaccccgacaacatgccccacgtgggcggcaacacctgggccggcggcaccggcggcagagacaccgccggcctgggcggcaagggcggcccctacagactggacgccggccacaccgtgtaccaggtgagccaggccgagaaggacgccgtgcccgaggaggtgaagagagccgccagagagatgggccagagagccttccagcagagactgaaggagatccagatgagcgagtacgacgccgccacctacgagagattcagcggcgccgtgagaagacaggtgcacagcctgagaatcatcctggacaacctgcaggccaagggcaaggagagacagtggctgagacaccaggccaccggcgagctggacgacgccaagatcatcgacggcctgaccggcgagaaggccatctacaagagaagaggcgagctggagccccagctgggcagcccccagcagaagcccaagagactgagactggtggtggacgtgagcggcagcatgtacagattcaacagaatggacggcagactggagagaaccatggaggccgtgtgcatggtgatggaggccttcgagaactacgaggagaagttccagtacgacatcgtgggccacagcggcgacggctacaacatcggcctggtgcccatgaacaagatccccaaggacaacaagcagagactggagatcctgaagaccatgcacgcccacagccagttctgcatgagcggcgaccacaccctggagggcaccgagcacgccatcaaggagatcgtgaaggaggaggccgacgagtacttcgtgatcgtgctgagcgacgccaacctgagcagatacggcatccaccccgccaagttcgcccagatcctgaccagagacccccaggtgaacgccttcgccatcttcatcggcagcctgggcgaccaggccaccagactgcagagaaccctgcccgccggcagaagcttcgtggccatggacaccaaggacatcccccagatcctgcagcagatcttcaccagcaccatgctgagcagcgtgtag

SEQ ID NO: 184081 - DNA, 3120 bp, Artificial Sequence
  derived and/or modified sequence
atgcagtccagactgctacttctgggggcccctggcgggcacggagggccggccagcagaagaatgaggctgctgctgcggcaggtcgtgcaacggcgccctggtggggataggcagaggccagaagtgcgactcctacacgcagggagtggcgctgacaccggggacactgtgaacataggggacgtctcatacaagctgaagatccccaaaaatcccgagctggttcctcagaactacatatcagactctttggcccagtccgttgtgcagcatctgaggtggatcatgcagaaagatctgcttggacaggatgtttttctgatcggtccaccggggcccctccgcagaagcatcgcgatgcagtatctagagttgaccaagcgggaagttgagtacattgcgctgagcagagatactacggagaccgatctcaaacagaggagggaaatacgagctggaacagcgttctacattgaccagtgtgccgttcgggcagctactgaaggaaggactcttattctcgagggtctggaaaaggctgaacggaacgtgctcccggtgttgaataatctgctggagaatcgtgaaatgcagctggaagatgggagattcctaatgtccgcggaacggtatgacaagttactgagggaccacaccaagaaagagttggattcatggaagatagtgagggtgtcagagaacttcagggtcattgcgctaggcttgccagtccctagatatagcggcaatccactcgatcctcctttgcgttctcggtttcaggcacgcgatatctattaccttcccttcaaagaccagctcaagttactctactctattggggccaatgttagcgcagaaaaagtgagccagcttctctcttttgccaccactctctgctcacaggagtccagcacccttggcttgccagacttccccctcgattccttggcagccgctgtccaaattctcgattcttttcctatgatgcctatcaagcatgccattcagtggctgtacccctatagcattttattgggacacgaggggaagatggccgtggagggcgtgcttaagagatttgaactgcaggactctggcagctctctgctgcctaaagaaatagtcaaggtggaaaagatgatggagaatcacgtttctcaggcttccgttaccattaggatcgccgataaggaagtgactataaaagtgcccgctggcaccaggctcctctcacaaccttgcgccagcgatcggttcatccagaccctgtcccacaaacagctgcaagcagagatgatgcagagtcatatggtgaaggatatctgcctgatcggaggtaagggctgtgggaaaaccgtgattgcgaagaactttgccgatacccttggctacaacattgagcctattatgctataccaggacatgaccgcgagggatctccttcagcaacgctacacactgcccaatggagatacagcctggcgctcatccccgctggtcaacgccgcactcgagggtaaactggtccttctggatggaatccatagagtgaatgccggcacactcgctgtactgcagcgtctgatccacgatcgggagttgagtctctacgacggcagtaggctgctgagagaagaccgatacatgcgtcttaaagaggaactgcagttgagcgacgagcagctgcagaagagatcaatttttcccattcatcccagcttccgtatcattgccctggccgaacctccagtgatcggaagcaccgcccaccagtggctgggccccgagttcctgactatgtttttctttcactacatgaagccactggttaaatctgaagagatccaagtgatcaaggagaaggtcccgaatgtgcctcaggaggccttggataaactgctatcatttacccataaattgcgggagacccaggatcccacagcccagtccctggcagccagcctgtcaaccaggcagctgcttcgcatctccagacgcttgagccagtatcccaacgagaatctccattccgccgtcactaaagcttgcttgtctcgctttctcccaagcctggcccgctcagcactggagaagaatctggcagacgcgactattgagattaacaccgacgataacctggagcctgagttaaaggactacaagtgtgaagtgactagcggtaccctccgcattggagccgtctcggcaccaatttacaacgctcacgaaaagatgaaggtccccgatgttttgttttatgacaatattcaacatgtaatagttatggaagacatgctcaaggacttcctcctgggggagcacctgcttctcgtcggtaaccagggagtaggaaaaaataaaatcgtcgacaggtttctgcaccttcttaaccggcctagggagtatattcagctccatagagatactaccgtccagaccctgactctccaaccttccgtgaaagatggattgatcgtgtacgaggatagtcctttagtcaaggcagtgaagctgggacacatcctcgtcgtggacgaagctgacaaggcccctaccaacgtgacctgtatactgaagacgctggttgagaatggcgagatgatactggccgatggccgcagaatagtcgcgaacagcgcaaatgttaatggtagagaaaacgtggttgttatacatcctgattttcgaatgattgtgctggcgaaccgccctggcttcccctttctgggaaatgacttcttcggcacccttggtgacatattttcctgccatgccgtggataacccaaaaccccattccgaactcgaaatgttgcgccaatatggtcctaatgtgccagagcccattctccaaaagctagtggccgcattcggcgaactccgctcattggccgatcagggcatcattaactacccttacagcacaagggaggtagtcaacatcgttaagcacctgcaaaagttcccaacagaaggacttagcagcgtggtccggaatgtatttgattttgactcctacaataacgacatgagggaaattctcattaacacccttcataaatatggcattcccatcggcgctaagcctaccagcgttcagctggctaaagagtag

SEQ ID NO: 184082 - DNA, 5718 bp, Artificial Sequence
  derived and/or modified sequence
atgcagtctcgcttgctgctcctcggagcacctggaggacacggagggccggcatccagaaggatgcgtctcctgctgagacaggtggtgcagaggagaccaggcggtgaccgacagcggccagaagtccgccttttgcacgcaggtagtggcgcggacactggagacacggtaaatataggggatgtgtcttataagttgaaaatccccaagaaccctgaattggtgccacaaaattatattagcgattcccttgcccaaagcgtagtacagcatctgcggtggatcatgcaaaaagacctgctggggcaggacgttttcttaatcgggcccccaggtcctctccgccgcagcatcgcaatgcaatacttagagctcacaaaacgggaggttgaatatatagccctgtcccgcgataccaccgagacagacctgaagcagcgcagggagatccgagcaggtaccgccttctacatagaccagtgcgctgtgagagccgccaccgagggacggacactgatcctggaggggctcgaaaaggcggagaggaacgttctccctgttctgaataatttattggagaatagagagatgcagctggaagacggacgattcctgatgtctgctgagcgctatgacaaactgctgcgggaccacaccaagaaggaactggattcctggaagatcgtgcgtgtgtcagagaatttcagagtgatcgccttgggcctgcccgtgcctcgctactcaggtaaccccctggatccccctctgagatcacgtttccaggccagggatatttattacttaccatttaaggatcaactcaagctgctgtattcaattggagccaatgtgtctgctgagaaggtttcacagcttcttagttttgcaactactctgtgtagtcaagaaagttcaacactcggcttaccagacttccctctggatagcctggccgccgccgtacagatcttggactcttttcctatgatgccaattaaacacgccatccagtggctgtacccctactctatcctgctcggccacgaggggaagatggctgtagagggtgttctcaaacgattcgagctccaggactcaggctcctcgctcctcccaaaggagatagtgaaggtagagaagatgatggaaaatcatgtctctcaagcttcggtgactattcgtatagccgataaagaagtcacaataaaagtgcccgccggtactcgactgttgtctcagccttgcgcatcagaccgatttatccagactctgagccataaacagctgcaggccgaaatgatgcagagccacatggtgaaggacatctgcctaatcggcggcaaaggatgtggcaaaacggtcattgctaagaacttcgcagatacacttggatataatattgaaccaatcatgttgtatcaggacatgactgcaagagacttactgcagcagcgttatactctcccaaacggagatacagcttggaggagcagcccacttgtgaatgctgccctggaggggaagttggtcctcctcgatggcattcacagggttaatgcgggcaccctggccgttcttcaaagacttatccacgaccgggaactgagtctttatgatgggtcaagactcctgcgtgaggacagatacatgcgtctcaaggaagagctccagctaagcgacgagcaactgcaaaaacgaagcattttcccaattcacccctcgttccgcatcatcgccctggctgaacccccagtgataggaagtacagcgcatcagtggttgggccccgagttcctcaccatgttcttttttcattacatgaagcccttggtaaagtccgaggagatccaggtcattaaggagaaagtgccaaacgtgccccaggaggcgctggacaagttgttgagcttcactcataaactgagggagacacaagatcctactgcccagtctctcgccgcatccctgtcaactagacagttgctcagaatttcacgacgcttaagccagtaccccaatgagaacttgcattccgccgtgacaaaggcctgcctgagtagattcctaccttctctcgctcggtcagccttagagaaaaacctcgcagatgccaccatcgaaattaataccgatgataacttagagcctgagctgaaggactacaaatgcgaggtgacttctgggactctacgcatcggcgccgtgagcgcccctatttataatgcacatgagaaaatgaaagtccctgatgtcctgttttatgataacatccagcacgtaattgtgatggaggacatgctcaaggactttctccttggggaacacctgcttctggttggaaatcagggtgtcggaaagaacaagatcgtggaccgcttcctgcacctgttaaacagacccagggaatacattcaacttcatagagatacaaccgttcagactttgacactccaaccgtctgtcaaggacgggcttatcgtgtacgaagactcaccactggtgaaagctgtgaagctggggcacattttagtcgtagacgaagccgataaagcgcccaccaatgtgacgtgtatccttaaaaccctcgtagaaaatggcgaaatgatccttgctgatggacgtaggatcgtagctaacagcgccaatgtcaatggaagagagaatgttgtcgtgatacaccctgacttccggatgattgtgcttgccaaccgccctggctttcccttcctgggcaacgactttttcggcacactgggggacatatttagctgtcacgcggtggataacccaaagcctcactctgagctggagatgcttaggcagtatggcccaaacgttcccgagccgatactgcagaaattagtggctgcttttggggaactcaggtcactcgctgatcagggtataattaactacccttatagcacaagagaagtggtgaacatagttaagcacttgcagaaatttcctaccgaggggctgagctcagtggtacgtaacgtttttgatttcgactcttataataacgacatgagagaaattctgatcaatacgctccataaatatgggattccaattggtgcgaaacctacgtctgttcagctcgcgaaagagctaacactccccgagcaaacctttatgggttattggaccattggccaggccagaagcggcatgcagaagctcctttgccccgtcgagacacatcacatcgatatcaaaggacccgccctcataaatattcaggagtaccccatcgagaggcacgaagagaggagcctaaacttcactgaggagtgtgcttcttggcgcatcccgttagatgagataaacattatctgtgatattgccacaagccacgaaaacgagcagaataccctttatgtcgttacctgtaaccctgcgtctctctattttatgaatatgacaggaaaaagcggattttttgtggacttctttgacatttttccacggacagccaacggcgtgtggcacccttttgtaaccgtggcccctcttggtagcccacttaagggtcaagtggtgctgcatgagcagcaatccaatgtgatcctgctactcgacactacaggtcgcgcactgcaccgcctgattcttcctagcgagaaattcacctctaagaaaccattttggtggaacaaggaggaggccgagacctacaagatgtgcaaggaattttcacacaagaactggttggtgttctacaaagagaaggggaattccttgacggtactcgatgtcttggagggacgaacacacaccatttccctccccataaacctcaaaaccgtgttccttgttgcggaggacaaatggctcttggttgaaagcaaaaccaatcaaaaatacctgctgactaagccagctcacattgaatccgaggggtcaggagtgtgtcaactgtatgtcctaaaggaggaaccccccagcacgggctttggcgtcacccaggagactgagttcagcatcccgcacaagatctcaagcgatcaactatctagtgagcatctctcaagcgcagtggagcagaaaatcgcctctcccaaccgaatcctttccgacgagaagaattacgccacaattgtcgttggctttcctgacctgatgagccctagcgaagtgtattcttggaaacgccccagctctctacacaagagatccggaacagacacctctttttatcgtggaaaaaagaagaggggcaccccaaaacagtctaactgcgtgacgctgctcgacactaatcaggtggtgcgtatcttgcccccgggcgaagtgccgctgaaggatatctatcctaaggacgttacgccacctcagacaagtggctacattgaagttaccgaccttcagagtaagaagctacgttatattcccatcccgcggagtgagtctttgtcaccctacaccacctggttatctaccatcagtgataccgatgcattacttgctgagtgggacaagtccggggtggtgacagtcgacatgggggggcatatccgcctttgggagacgggcctcgagcggctacaacgatccctaatggagtggcggaacatgatcggacaggacgaccgaaacatgcagattacgatcaatcgggattctggagaagacgtgagttctcccaagcacgggaaagaggaccccgacaatatgcctcatgtcggcgggaacacatgggcaggaggaaccgggggccgggatactgccgggttgggtggcaaaggtggtccgtaccgactcgatgctgggcacactgtctaccaggtcagtcaggctgagaaggacgccgtccctgaggaagtgaaacgcgctgcccgggagatgggacagcgtgcttttcagcagagattgaaggaaatccagatgagtgagtatgatgctgctacctatgagcgattttcaggggctgtgagacgccaggtgcacagtttgcgaatcattctcgataatttgcaggcaaagggcaaggaaaggcaatggcttcgccatcaggccactggagagcttgacgacgcaaaaatcattgatggactgaccggtgagaaggccatctacaagaggcggggcgagctggagccgcagcttggcagcccgcaacagaagcctaagagactcaggttggtggtggatgtcagcggttccatgtataggtttaacagaatggacgggcgactggaaaggactatggaagccgtgtgcatggttatggaggcgttcgagaactatgaggagaaatttcagtacgatatcgtcggccactctggcgatggctacaatatcggactcgttcccatgaacaagattccgaaggataacaagcaaaggttagagatacttaaaactatgcacgcccacagtcaattttgcatgtccggagatcacactttggaaggcaccgagcacgccataaaagagatcgtgaaggaggaagctgacgaatacttcgtgatcgtgctgtctgacgcaaatctcagtcgctatggaatccaccccgcaaagttcgcacagattctcacccgggatccacaggtaaatgccttcgctatctttataggctccctcggcgatcaagctacgcgcctccagagaactctccctgcaggacggtctttcgttgctatggatacaaaagatattcctcagatcctccagcaaattttcacatcgacaatgctgagctccgtgtag

SEQ ID NO: 184083 - DNA, 3120 bp, Artificial Sequence
  derived and/or modified sequence
atgcagagccggctgctgctgctgggcgcccctgggggccacggcggccctgccagcaggaggatgaggctgctgctgcggcaggtggtgcagaggaggcctggaggagaccggcagaggcctgaggtgcggctgctgcacgccggcagcggggctgacaccggggacacagtgaacattggagatgtgtcctacaagctgaagatccccaagaaccctgagctggtgccccagaactacatcagtgacagcctggcccagagcgtggtgcagcacctgcgctggatcatgcagaaggacctgctgggccaggatgtgttcctgattggccccccaggccccctgcggcgcagcatcgccatgcagtacctggagctgaccaagcgggaggtggagtacatcgccctgagccgggacaccacagaaacagacctgaagcagaggcgggagatccgggccggcacagccttctacatcgaccagtgtgctgtgcgggccgccacagagggccgcaccctcatcctggagggcctggagaaggccgagagaaatgtgctgcctgtgctgaacaacctgctggagaaccgggagatgcagctggaggatggccgcttcctgatgtctgctgagagatatgacaagctgctgcgggaccacaccaagaaggagctggacagctggaagatcgtgcgggtgtctgagaacttccgggtgattgccctgggcctgcctgtgccccgctacagcggcaaccccctggacccccccctgcggagccgcttccaggcccgggacatctactacctgcccttcaaggaccagctgaagctgctgtacagcattggagccaacgtgtctgctgagaaggtgtcccagctgctgagctttgccaccaccctgtgcagccaggagagcagcaccctgggcctgcctgacttccccctggacagcctggccgctgctgtgcagatcctggacagcttccccatgatgcccatcaagcacgccatccagtggctgtacccctacagcatcctgctgggccacgagggcaagatggctgtggagggcgtgctgaagagatttgagctgcaggacagcggcagcagcctgctgcccaaggagatcgtgaaggtggagaagatgatggagaaccacgtgtcccaggcctctgtgaccatcagaattgctgacaaggaggtgaccatcaaggtgcctgctggcacccggctgctgagccagccctgtgccagtgaccgcttcatccagaccctgagccacaagcagctgcaggccgagatgatgcagagccacatggtgaaggacatctgcctgattggaggcaagggctgcggcaagacagtcatcgccaagaactttgctgacaccctgggctacaacatcgagcccatcatgctgtaccaggacatgacagcccgggacctgctgcagcagcgctacaccctgcccaatggagacacagcctggaggagcagccccctggtgaatgctgccctggagggcaagctggtgctgctggatggcatccaccgggtgaatgccggcaccctggccgtgctgcagaggctcatccatgaccgggagctgagcctgtatgatggcagccggctgctgagagaagatcgctacatgaggctgaaggaggagctgcagctgagtgatgagcagctgcagaagaggagcatcttccccatccaccccagcttccgcatcatcgccctggccgagccccctgtgattggcagcacagcccaccagtggctgggccctgagttcctgaccatgttcttcttccactacatgaagcccctggtgaagtctgaggagatccaggtgatcaaggagaaggtgcccaacgtgccccaggaggccctggacaagctgctgtccttcacccacaagctgcgggagacccaggaccccacagcccagagcctggccgccagcctgagcacccggcagctgctgcgcatcagccggcggctgagccagtacccaaatgaaaacctgcacagcgctgtgaccaaggcctgcctgagccgcttcctgcccagcctggcccggagcgccctggagaagaacctggctgatgccaccatcgagatcaacacagatgacaacctggagcctgagctgaaggactacaagtgtgaggtgaccagcggcaccctgagaattggagctgtgtctgcccccatctacaatgcccacgagaagatgaaggtgcctgatgtgctcttctatgacaacatccagcacgtgattgtgatggaggacatgctgaaggacttcctgctgggggagcacctgctgctggtgggcaaccagggcgtgggcaagaacaagatcgtggaccgcttcctgcacctgctgaaccggccccgggagtacatccagctgcaccgggacaccaccgtgcagaccctgaccctgcagcccagcgtgaaggatggcctgattgtgtatgaggacagccccctggtgaaggctgtgaagctgggccacatcctggtggtggatgaagctgacaaggcccccaccaacgtgacctgcatcctgaagaccctggtggagaatggagagatgatcctggctgatggaagaagaattgtggccaacagcgccaacgtgaatggccgggagaatgtggtggtgatccacccagacttcaggatgattgtgctggccaaccggcccggcttccccttcctgggcaatgacttcttcggcaccctgggggacatcttcagctgccacgctgtggacaaccccaagccccacagcgagctggagatgctgcggcagtatggccccaacgtgcctgagcccatcctgcagaagctggtggccgcctttggagagctgcggagcctggccgaccagggcatcatcaactacccctacagcacccgggaggtggtgaacatcgtgaagcacctgcagaagttccccacagagggcctgagctctgtggtgagaaatgtgtttgattttgacagctacaacaatgacatgagggagatcctgatcaacaccctgcacaagtatggcatccccatcggggccaagcccacctctgtgcagctggccaaggagtag

SEQ ID NO: 184084 - DNA, 5718 bp, Artificial Sequence
  derived and/or modified sequence
atgcagagccggctgctgctgctgggcgcccctgggggccacggcggccctgccagcaggaggatgaggctgctgctgcggcaggtggtgcagaggaggcctggaggagaccggcagaggcctgaggtgcggctgctgcacgccggcagcggggctgacaccggggacacagtgaacattggagatgtgtcctacaagctgaagatccccaagaaccctgagctggtgccccagaactacatcagtgacagcctggcccagagcgtggtgcagcacctgcgctggatcatgcagaaggacctgctgggccaggatgtgttcctgattggccccccaggccccctgcggcgcagcatcgccatgcagtacctggagctgaccaagcgggaggtggagtacatcgccctgagccgggacaccacagaaacagacctgaagcagaggcgggagatccgggccggcacagccttctacatcgaccagtgtgctgtgcgggccgccacagagggccgcaccctcatcctggagggcctggagaaggccgagagaaatgtgctgcctgtgctgaacaacctgctggagaaccgggagatgcagctggaggatggccgcttcctgatgtctgctgagagatatgacaagctgctgcgggaccacaccaagaaggagctggacagctggaagatcgtgcgggtgtctgagaacttccgggtgattgccctgggcctgcctgtgccccgctacagcggcaaccccctggacccccccctgcggagccgcttccaggcccgggacatctactacctgcccttcaaggaccagctgaagctgctgtacagcattggagccaacgtgtctgctgagaaggtgtcccagctgctgagctttgccaccaccctgtgcagccaggagagcagcaccctgggcctgcctgacttccccctggacagcctggccgctgctgtgcagatcctggacagcttccccatgatgcccatcaagcacgccatccagtggctgtacccctacagcatcctgctgggccacgagggcaagatggctgtggagggcgtgctgaagagatttgagctgcaggacagcggcagcagcctgctgcccaaggagatcgtgaaggtggagaagatgatggagaaccacgtgtcccaggcctctgtgaccatcagaattgctgacaaggaggtgaccatcaaggtgcctgctggcacccggctgctgagccagccctgtgccagtgaccgcttcatccagaccctgagccacaagcagctgcaggccgagatgatgcagagccacatggtgaaggacatctgcctgattggaggcaagggctgcggcaagacagtcatcgccaagaactttgctgacaccctgggctacaacatcgagcccatcatgctgtaccaggacatgacagcccgggacctgctgcagcagcgctacaccctgcccaatggagacacagcctggaggagcagccccctggtgaatgctgccctggagggcaagctggtgctgctggatggcatccaccgggtgaatgccggcaccctggccgtgctgcagaggctcatccatgaccgggagctgagcctgtatgatggcagccggctgctgagagaagatcgctacatgaggctgaaggaggagctgcagctgagtgatgagcagctgcagaagaggagcatcttccccatccaccccagcttccgcatcatcgccctggccgagccccctgtgattggcagcacagcccaccagtggctgggccctgagttcctgaccatgttcttcttccactacatgaagcccctggtgaagtctgaggagatccaggtgatcaaggagaaggtgcccaacgtgccccaggaggccctggacaagctgctgtccttcacccacaagctgcgggagacccaggaccccacagcccagagcctggccgccagcctgagcacccggcagctgctgcgcatcagccggcggctgagccagtacccaaatgaaaacctgcacagcgctgtgaccaaggcctgcctgagccgcttcctgcccagcctggcccggagcgccctggagaagaacctggctgatgccaccatcgagatcaacacagatgacaacctggagcctgagctgaaggactacaagtgtgaggtgaccagcggcaccctgagaattggagctgtgtctgcccccatctacaatgcccacgagaagatgaaggtgcctgatgtgctcttctatgacaacatccagcacgtgattgtgatggaggacatgctgaaggacttcctgctgggggagcacctgctgctggtgggcaaccagggcgtgggcaagaacaagatcgtggaccgcttcctgcacctgctgaaccggccccgggagtacatccagctgcaccgggacaccaccgtgcagaccctgaccctgcagcccagcgtgaaggatggcctgattgtgtatgaggacagccccctggtgaaggctgtgaagctgggccacatcctggtggtggatgaagctgacaaggcccccaccaacgtgacctgcatcctgaagaccctggtggagaatggagagatgatcctggctgatggaagaagaattgtggccaacagcgccaacgtgaatggccgggagaatgtggtggtgatccacccagacttcaggatgattgtgctggccaaccggcccggcttccccttcctgggcaatgacttcttcggcaccctgggggacatcttcagctgccacgctgtggacaaccccaagccccacagcgagctggagatgctgcggcagtatggccccaacgtgcctgagcccatcctgcagaagctggtggccgcctttggagagctgcggagcctggccgaccagggcatcatcaactacccctacagcacccgggaggtggtgaacatcgtgaagcacctgcagaagttccccacagagggcctgagctctgtggtgagaaatgtgtttgattttgacagctacaacaatgacatgagggagatcctgatcaacaccctgcacaagtatggcatccccatcggggccaagcccacctctgtgcagctggccaaggagctgaccctgcctgagcagaccttcatgggctactggaccatcggccaggcccggagcggcatgcagaagctgctgtgccctgtggagacccaccacatcgacatcaagggccctgccctgatcaacatccaggagtaccccatcgagagacatgaggagaggagcctgaacttcacagaggagtgtgcctcctggaggatccccctggatgagatcaacatcatctgtgacatcgccaccagccatgaaaatgagcagaacaccctgtatgtggtgacctgcaacccagccagcctgtacttcatgaacatgaccgggaagagcggcttctttgtggacttctttgacatcttccccaggacagccaacggggtgtggcacccctttgtgacagtggcccccctgggcagccccctgaagggccaggtggtgctgcacgagcagcagagcaatgtcatcctgctgctggacaccaccggccgggccctgcacaggctcatcctgcccagcgagaagttcaccagcaagaagcccttctggtggaacaaggaggaggccgagacctacaagatgtgcaaggagttcagccacaagaactggctggtgttctacaaggagaagggcaacagcctgactgtgctggatgtgctggagggccgcacccacaccatcagcctgcccatcaacctgaagacagtgttcctggtggccgaggacaagtggctgctggtggagagcaagaccaaccagaagtacctgctgaccaagccagcccacattgaaagtgagggcagcggcgtgtgccagctgtatgtgctgaaggaggagccccccagcactggatttggagtgacccaggagacagagttcagcatcccccacaagatcagcagtgaccagctgagcagcgagcacctgagcagcgctgtggagcagaagatcgccagccccaaccgcatcctgagtgatgagaagaactatgccaccatcgtggtgggcttcccagacctgatgagccccagcgaggtgtacagctggaagaggcccagcagcctgcacaagaggtctggaacagacaccagcttctaccggggcaagaagaagaggggcacccccaagcagagcaactgtgtgaccctgctggacaccaaccaggtggtgcgcatcctgcccccaggagaggtgcccctgaaggacatctaccccaaggatgtgaccccaccccagaccagcggctacatcgaggtgacagacctgcagagcaagaagctgcgctacatccccatccccaggtctgagagcctgagcccctacaccacctggctgagcaccatcagtgacacagatgccctgctggccgagtgggacaagtctggagtggtgacagtggacatgggcggccacatccggctgtgggagaccggcctggagcggctgcagaggagcctgatggagtggaggaacatgattggccaggatgacaggaacatgcagatcaccatcaacagagacagcggggaggatgtgagcagccccaagcacggcaaggaggaccctgacaacatgcctcatgtgggcggcaacacctgggccggcggcactggaggccgggacacagctggcctgggcggcaagggcggcccctaccgcctggatgctggccacacagtgtaccaggtgtcccaggccgagaaggatgctgtgcctgaggaggtgaagagagctgcccgggagatgggccagagggccttccagcagaggctgaaggagatccagatgtctgaatatgatgctgccacctatgagcgcttcagcggggctgtgcggcggcaggtgcacagcctgcgcatcatcctggacaacctgcaggccaagggcaaggagcggcagtggctgcggcaccaggccaccggggagctggatgatgccaagatcattgatggcctgactggagagaaggccatctacaagagaagaggagagctggagccccagctgggcagcccccagcagaagcccaagaggctgcggctggtggtggatgtgtctggctccatgtaccgcttcaacaggatggatggccgcctggagaggaccatggaggccgtgtgcatggtgatggaggcctttgagaactatgaggagaagttccagtatgacatcgtgggccacagcggagatggctacaacatcggcctggtgcccatgaacaagatccccaaggacaacaagcagaggctggagatcctgaagaccatgcacgcccacagccagttctgcatgtctggggaccacaccctggagggcacagaacatgccatcaaggagatcgtgaaggaggaggctgatgagtactttgtgattgtgctgagtgatgccaacctgagccgctatggcatccacccagccaagtttgcccagatcctgacccgggacccccaggtgaatgcctttgccatcttcatcggcagcctgggggaccaggccacccggctgcagaggaccctgcctgctggccgcagctttgtggccatggacaccaaggacatcccccagatcctgcagcagatcttcaccagcaccatgctgagctctgtgtag

SEQ ID NO: 184085 - DNA, 3120 bp, Artificial Sequence
  derived and/or modified sequence
atgcagagccggctgctgctgctgggcgcccccggcggccacggcggccctgcctccaggaggatgagactgctgttacgacaggttgtccagcgccggccgggcggtgacaggcagcgacccgaagtgcggctgctgcatgccggttcaggcgccgatactggtgatacggtgaatatcggggatgtgagttataaattaaaaatccccaaaaaccccgaactggtgccacagaattacataagtgattcattggcacaaagcgtggtgcagcaccttcggtggatcatgcaaaaggatcttctgggccaggatgtgttcctcattgggccgccgggacctctccgtcgatcgatcgcaatgcagtacctcgaattgacgaagagggaggttgaatatatagctctgtctcgtgacacaaccgagacagacctgaagcaaaggcgggagattagggctgggactgccttctatatcgatcagtgcgcggttagggcagctacggaaggcagaacgttaattctcgaaggcctcgagaaggcagaaaggaatgtgctgcccgtgctaaacaatctacttgaaaaccgcgagatgcagctcgaggatggacgattcctgatgtcagccgaaaggtatgacaaactgttgagagatcacactaaaaaagagctagactcctggaagattgtgcgcgtctcagaaaatttcagagtgattgcactgggactaccggttccacgctacagtggcaacccactggatcccccgctccgatctcggtttcaggccagggatatttattacctgccattcaaggatcagcttaagctgctgtattccattggcgcaaatgtcagcgctgagaaggtctcccaactgctaagctttgctacaacgctctgcagccaggagagctctacactcgggcttccggactttccgttggatagtcttgccgccgctgtacagatcctggacagtttccccatgatgcccatcaaacacgcaattcagtggctttatccatattctatcctcctaggacacgagggcaagatggctgtggaaggcgtgcttaaaaggtttgagctgcaggactctgggtcctcattgcttccaaaggagattgtgaaggttgaaaaaatgatggagaatcacgtaagccaggcctcggtgactatcagaatagccgacaaggaggtcacaatcaaagttcctgcaggcaccaggctgctctcacagccctgcgccagcgaccggtttattcaaactctcagccataaacagctgcaggccgaaatgatgcagtcccatatggtgaaagatatctgcctaataggaggtaaagggtgtggaaagaccgttatcgctaaaaactttgctgacacccttggctataacattgagccaattatgctgtaccaggacatgaccgcaagggacctgcttcagcagagatatacactgcccaacggtgatacagcttggcggtctagtcccttagtcaatgccgccctggagggaaaactggtgctcctcgatggcatacaccgggtcaacgctggcacgctcgctgtgctgcaacgcctgatccacgatcgggaactgagcctgtatgacggttctaggctgctgcgcgaagacagatatatgaggctgaaagaggagctgcaactttcagatgaacagttacagaagagatctattttcccaatccatcccagcttccggattatcgcactcgccgagcctcctgtaatcggttcaactgcacaccagtggctgggccctgagttcctaaccatgttctttttccattacatgaagcccctggtgaagtccgaggagatccaggtgattaaggagaaggtccccaatgtgcctcaggaagcccttgataagcttctgagcttcacgcataaactgagagagacccaagatcctacggcacaatcattggctgcttctttgagcaccaggcagctgttgagaatctctaggagacttagccaatatcccaacgaaaatctgcattcagccgtcactaaagcctgtctatcacgtttcctccctagcctcgcccgctctgctcttgaaaagaatctggctgacgctacgatcgaaatcaacacggacgataatttggagccagagctcaaggactacaagtgcgaggtgacttccggaacactgaggatcggggctgtgtcggcccctatttataatgctcacgagaaaatgaaagtgccggatgttctgttctacgacaatatccagcacgtcatcgtcatggaggatatgctaaaagatttcctgctcggcgaacatctcttgttggtgggtaaccagggagtgggaaaaaataagatcgtggaccgtttccttcacctcctgaatcgccccagggagtacatacagctgcacagggacaccactgtccagaccctaactctacaaccctctgtcaaggatggcctcatcgtgtacgaagatagcccactcgttaaggctgtgaagctgggccatattctggtagtcgatgaagccgacaaggcacccaccaacgtgacttgcatactcaagaccttagtggaaaatggggagatgattctcgctgatgggcggaggatagtggccaattccgcgaacgtcaatggccgggagaatgtggtcgttattcatcctgactttagaatgatcgttttagccaaccggcccggctttccattcctggggaatgatttttttggtacactgggggatatcttctcctgtcacgccgtggataatcctaaaccccactcagagcttgagatgctgcggcagtacggaccaaatgttcccgagccaatcctccagaagttggtggctgctttcggcgaactacgcagcctcgccgatcaggggattattaattatccatattccactcgcgaggtggtaaatatagtaaaacaccttcaaaagttccctaccgaaggcctgagcagtgtagtccgcaacgtgttcgatttcgactcttataacaatgacatgcgggaaatcctgatcaacactctgcataaatacggtattcccattggggccaagccaacatcggtgcaactcgcaaaggagtag

SEQ ID NO: 184086 - DNA, 7147 bp, Artificial Sequence
  derived and/or modified sequence
acggtgcctgcacgggacgccgctcgatccccgagccccctcgccgtccccgacagcccccccggcgccatgcaatcccggcttctactcctcggggcacccggaggccacggcggcccggcctcgcggcgcatgcggctgctcctgcggcaggtggtgcagcgcaggccgggtggcgacaggcagcggccggaggtcagactgttgcacgccggctcgggggccgacacaggtgatacagttaatattggagatgtatcctacaagttgaaaattcctaagaatccagaacttgtgccacagaactacatttcagactctctggctcaatctgtagttcagcatctaagatggataatgcagaaggatcttttggggcaagatgtttttctaataggacctcctgggcctcttcgacgctctattgctatgcagtacttggagctgaccaaacgggaggtcgaatacattgccctgtcaagggacaccactgaaactgatctcaaacagcgacgagagatccgtgcaggcacagccttttacattgatcagtgtgcagttcgtgcagccacagaaggcagaactctcattttggaaggtttggaaaaggcagagaggaatgttttgcctgttttgaacaacttgctggaaaacagagagatgcagcttgaagatggacgcttcctgatgtctgctgagcgttacgacaaacttctccgagatcataccaaaaaagagttggattcttggaaaattgtccgagttagtgaaaatttccgagtgattgccttgggcttgccagtgccaaggtattctgggaatccattagacccccctcttcgttctcgatttcaagccagggatatttattatttacccttcaaggaccaacttaagttgttatattcaattggagccaatgtttctgctgagaaagtttctcagctcttgtcctttgccacaactctgtgttcccaagaatcttctactcttggacttccagactttcctttagatagtttagcagctgcggttcaaatcttggattcctttcctatgatgccaatcaaacatgcaatccagtggctttatccatatagtattttactaggtcatgaagggaagatggctgtggaaggtgttttaaagcgctttgaacttcaagattcaggaagctctctacttcctaaagagattgtaaaagtagagaagatgatggaaaaccatgtgtcccaagcttctgtgaccatccggattgcagataaagaggtgaccattaaggtgccagccgggaccaggctattaagtcaaccttgtgcgtcagaccgtttcatacagactttgagccataagcagctacaggctgaaatgatgcagtctcacatggttaaagatatatgtttaattggaggaaagggttgtggaaaaacagtgatcgctaagaactttgccgataccttaggatacaacatagaacctattatgctctatcaggatatgacagcgcgtgatctgctacagcagagatacacccttccaaatggagacactgcctggcggtcctcaccccttgtgaatgctgctctggaaggcaagctggtcctgctggatggcattcaccgggtgaatgcgggcacgcttgctgtattgcaaaggttaatccatgatcgagagctaagcctctatgatggttctaggctgctgagagaagacaggtatatgcgtttaaaggaggagctgcaactgtctgatgaacagctacagaagagatccatttttcctatccatccctccttcagaatcattgccttggcagaaccccctgttattggaagcacagcacaccagtggctgggaccagaattcttaaccatgttctttttccattacatgaaaccacttgtgaaaagtgaagaaatccaagtgattaaggaaaaggtcccaaatgtacctcaggaagctctggataagttattatcatttacacacaaactcagagaaacacaggatccaacggcacaatcattagcggcatcactttctaccagacaactgttgcgaatttctcgtcggctgtcacagtatcctaatgaaaatcttcacagtgctgttactaaagcctgcctttccaggtttttacccagtcttgctaggtcagcattagaaaaaaatctggcagatgctacaatagaaataaatactgatgacaatttggagccagaactgaaggattacaaatgtgaagtaacatctggaactctgaggattggtgctgttagtgcaccgatctataatgcacatgagaaaatgaaagtgcctgatgttcttttctatgacaacattcagcatgtgatagtgatggaagatatgctgaaagactttctccttggagaacacttattattggttggcaaccagggtgtaggaaaaaacaagattgttgacagattccttcacctgctcaacagaccccgagaatatattcagctacacagggataccacagtacaaactcttacgcttcagccttcggttaaagacggacttattgtatatgaagactcacctttggttaaagcagtaaagttgggtcatattctggtagtagatgaggctgacaaagctccaacaaatgtcacgtgtattttaaaaactctagtagaaaatggagaaatgattctagcagatggaagacgcattgttgcaaattctgctaatgtgaatggaagagaaaatgttgtagtgattcatcctgattttaggatgattgttctggcaaatagacctggatttcctttcctaggcaatgatttcttcggtaccttaggtgatatttttagctgccatgcagttgataaccccaaaccccactcggagctcgagatgctcagacagtatggaccaaatgtgcctgagcccatccttcagaagcttgtggctgcctttggagagctgaggagtttggctgaccaagggattattaactatccttattctaccagagaagttgtcaacatagtcaaacatttacagaaatttccgactgaaggtctctccagtgtagttcgaaatgtgtttgactttgattcctacaacaatgacatgagggagatattgattaacactttacacaaatacgggatacctatcggagcaaagcctaccagtgtgcagctggcaaaggagttgactctgccagaacaaacgttcatgggctactggacaattggtcaggcaagaagtgggatgcaaaaactcttgtgtccagtggaaactcatcatatagacataaagggtccagcacttataaatatacaggagtatccaatagaaagacatgaagaaagatccctaaactttactgaagaatgtgcctcatggagaataccattggatgaaattaatataatctgtgacattgctacatcacatgaaaatgagcaaaatactctctatgtagttacatgcaatcccgcttccctgtactttatgaatatgactgggaaaagtggcttctttgtggacttttttgatatcttcccaagaacagccaatggcgtttggcacccttttgtgacagtggcaccgctgggaagtcctctcaaaggtcaagtggttctccatgagcagcagagtaatgttatcctgttgttagatactactggccgggcccttcatcgtctcatcctcccttccgagaagtttacatctaagaaacctttctggtggaacaaagaagaagctgaaacttataaaatgtgtaaagaattttcacacaaaaactggctggtgttctacaaagaaaaagggaacagcctgactgtgctggatgttctagaagggcgaactcacaccatctcacttcccatcaacctcaagacagttttccttgtagcagaggacaaatggcttctggtggagagcaaaacaaatcagaaatatcttttaactaagcctgcacacatcgaatctgagggtagtggggtttgccagttgtatgtgctgaaagaggagccgcccagcacagggtttggagttacacaagaaacagagttcagcatacctcataaaatttccagtgatcaactatcatctgaacatctaagttcagctgtggaacaaaagattgcctctcccaacagaattctctcagatgagaaaaattatgctacaatagttgttggttttccagatctcatgtcacccagtgaagtttattcttggaagagaccatcatctttgcataaacgaagtggcactgatacatcattctatagaggaaagaagaaaagggggactccaaaacaaagcaattgtgtgactcttttagatacgaatcaggtagtgaggattttacccccaggagaagtccctctaaaagatatctacccaaaagatgttactcctccacaaacatctggttatatagaagtcactgatcttcaatcaaagaaactccgatatatccctattcccagatcagaatctctctcgccgtataccacatggctgtcgaccatttcagacacagatgcactgctggctgagtgggacaaaagcggtgttgttactgttgatatgggaggtcacatcaggctttgggaaactggacttgaacgtctgcagcgatcactcatggaatggagaaacatgattggacaagatgacagaaatatgcagataacaatcaacagagacagtggtgaagatgtaagctcccccaaacacgggaaggaggacccagacaacatgcctcacgtgggcggcaacacttgggctggcggaacagggggaagagacacggcaggcctgggtggcaaaggaggcccttaccggctggatgcaggccatacggtgtaccaggtctctcaggctgagaaagatgcagttcccgaagaggtcaagagagctgctagagagatgggccagagagcattccagcagaggctaaaggagatccaaatgagtgaatacgatgctgcaacctatgaaaggttttcaggtgctgttcggcgacaggtgcactccctccgaatcatcctggataatttacaggctaaaggtaaagaaagacaatggctaagacatcaagctactggagaattagatgatgccaagatcattgatgggctgactggagaaaaagccatctacaaacgtcggggtgagctggagccacaacttggcagcccacaacagaaacccaagcgtctgcgcctggtggtagatgtgtctggtagcatgtaccgtttcaacaggatggatggccggcttgagcgcacaatggaggctgtgtgtatggtcatggaagccttcgagaactatgaggagaagttccagtatgacatcgttggacactctggagatggctacaacattggtctggttccaatgaacaaaatccccaaggacaataagcaaagactagaaattctgaagacaatgcatgcccactctcagttctgcatgagtggggaccacacgttagaagggacagaacatgccatcaaggaaattgtcaaagaagaagctgatgagtactttgtcatagtcttgagtgatgcaaatctgtcacgatatggaatacatcctgctaagtttgctcaaatcctcacaagagaccctcaagtaaatgcttttgccatttttattggctctttaggtgatcaagcaaccaggcttcagagaactttaccagctggtcggtctttcgttgccatggataccaaggatatccctcagattttacaacagatcttcacctccaccatgttgtcgagtgtctaagaagtgcccttcatcaccctgatgacaccaggatttgaaataagacaggaataaagagtattctgaaaaaaagaagatatggatgaagtgaacccatgcagtgactggatgattccggcattcctgggtcttcctacacttgctccgtaatgagaattcagagaagcagccagaaggagacttaaacatggaaagatactccactgatgagtttagaagtgattagggcaagctagttgacctgcactttatcaaaggttggggttaaaggaaggtggttttgagaactatgtgtttggtctatttccaaaaacctgagggggagaaaatactttgcttttgccttaacacatcatctggtcacgttagaaaagtgaccccatcaaactgagcctttgatgtcacattctgacacaagatgcaagtctgtgcaaaacccaccaaaatgctcctatccaacaattatttttattttctccctgctctgtattgaccagaaaacaatgattttataatatttaacccaccaaaaagtccctccaacagcaatatcttatgaaagtctggctgttctcaataatttcattttcttggccaaagccaaaaggaatcaaaaaatccttggagtgcttgcctttccacgtgacttttaaaaggctcttaaagagcaaatgtcctcttctccttgctgctagagtgggaggagaaagatgtcttgccttaaaagtttactgtttcttctgttcttctagcatctctcaaaaaattcacagtactccattttggggtccaaactgtaatgctcaaaataataaatgcttacacgaaaattatttattgagaatattcatataaaaattacctaaagcaaagtaaaaaaagtaaaatcaaggtggtatatttgaagtgaatggtgattggaaatttttagctgtaacaaaaagaaagaaaacaactttttttaaagcctcattctcttttctttcaaaatgtaccttattcccacacactcttgggctgacctttattttatcaataagctcaatattactttgtttaaaataagatgcttcagcaaaagtcattctctctttaaccatataatttaaaaactcctcttcacgattgatagcaaaatcagaaacgttagggcaccagtgagttgaaaaaactggtcttaagttggaaaaactattattaataatattatcctatccatccatatctattgaaattgtacaggtccataatttcattttaattaattataggaaagaagaaaagataatacccatttgttctatcacccctctccctatcattaactatcaaataaataaataaaagcaatctgatttcc

SEQ ID NO: 184087 - DNA, 5718 bp, Artificial Sequence
  derived and/or modified sequence
atgcagagccggctgctgctgctgggcgcccccggcggccacggcggcccagcgtctcgaagaatgagactcctactgagacaggtagtgcagcgcagaccagggggtgaccggcaaagaccagaagtgcgactcctccatgctggaagtggagctgacacgggcgacacagtcaatattggggacgtgagctacaagctaaaaatacccaagaatccggagctcgttccacagaattacatttcagactcgctggcacagtcagtggtacagcacttgcgatggataatgcagaaagaccttctggggcaagacgtctttcttatagggccacccggtccgttaagaagatctatcgccatgcaatacctcgagctaactaaaagggaagtggagtatatcgctctgagccgggataccaccgagacggacctgaagcagcggcgggagatacgggccggcacggccttttatatcgatcaatgcgcggtgcgtgccgccaccgaaggccgcacgttgatcctggaaggattggagaaagctgaaagaaatgtcctgcccgtacttaacaatctgctggagaatagggaaatgcagctcgaggacgggaggttcctgatgagcgccgagaggtacgataagcttcttcgagatcacaccaaaaaagagttggatagttggaagattgtgcgtgtgtcggaaaactttcgcgtgatagcgttgggcctaccagttcctaggtattcaggtaatccactcgaccccccactaagaagccgatttcaggcccgagacatttattatctccccttcaaggaccagctcaaactgttgtactcaattggcgccaacgtgtccgcggagaaagtgagccagcttctgtcattcgcaacaaccctttgctcacaagaatctagtacgctaggattaccggatttcccattggattcactcgcagccgcagtgcaaattttagactcatttcccatgatgccaattaagcacgccatccagtggctgtacccctactccatcttgcttgggcatgaaggaaagatggcggtggagggagtattaaagcggtttgaactgcaggactcagggtccagcctgctccctaaggagattgtgaaggtggaaaagatgatggaaaatcacgtgagtcaggcttccgtgacgattcgcatcgcagacaaagaggttactatcaaagttccggcaggcaccagattactctctcagccctgcgccagtgacagattcatacagacccttagtcataagcaacttcaggccgaaatgatgcagtcacacatggtgaaggacatctgtttaattggaggaaagggctgtggcaaaaccgtgattgctaagaattttgccgataccttaggatacaacattgagcctataatgctgtatcaagacatgacagcccgtgatctcctgcaacaaaggtacaccctaccaaacggggacaccgcgtggcgctcatctccacttgtaaacgctgcgttggagggaaagctggtccttctggacggtatccatcgggttaacgccggaacactggcggtgctccaacgcctaattcacgacagggagctgagcctgtacgatggttcccgacttctccgagaagaccggtatatgcgcttgaaagaggagttgcaactgagtgatgaacagctccagaaaagatctatttttccaatccatccatcgtttaggattatcgctctggccgagccccccgtgattgggtccactgcgcaccagtggctaggcccagaatttcttacgatgttcttctttcactacatgaaacccttagtaaaatcagaagagatccaggtcattaaagagaaggtacctaacgtgcctcaggaagctttggacaaattactgtctttcactcacaagctgagggagacccaggatcctaccgcccagtccctggctgctagtttgtcaacccgccagctgttgagaatctcacgccgcctcagtcagtaccctaatgagaatttgcactctgccgtcacaaaagcatgtctctcgcggttccttccatcgctggcccggagcgccctcgagaaaaacctggccgatgccactattgagattaacaccgatgataacctggagcctgagctgaaggactataaatgcgaggttacgtctggtaccctcaggattggagcggtgagcgcaccgatttataacgcacacgaaaaaatgaaggtcccagacgttctgttctacgataatatccaacatgttatcgtcatggaggatatgctgaaggattttttgctgggggagcacctgctactggtgggcaatcagggtgtgggtaagaataagattgttgatcgatttctgcacttactaaaccggcctagagagtacatccagctccacagagataccacagtgcagacgctcactttgcagccctcagttaaggacggacttattgtatatgaagacagcccactggtgaaggccgtgaagctcggacacattctggtagtggacgaggccgataaagcccctaccaatgtgacctgcatcctaaaaactcttgtcgaaaatggcgaaatgatcctagctgatggtagaagaatagtcgccaattccgccaatgtgaatgggagggaaaatgtagtggttatccatcccgattttcgcatgatagttctggcaaacaggcctggattccctttcttgggcaacgacttctttggcacactgggggacattttttcttgtcacgctgtggacaacccgaaacctcattccgagctcgaaatgctgcgacagtatggaccaaacgtgcccgaacctatactgcaaaagctggtagcagcatttggagaactccgaagcttggctgatcaggggattatcaactatccatactccacacgagaagtcgttaacatcgtaaaacacctacagaagtttccaaccgagggcctcagcagtgtcgtgcggaatgtcttcgatttcgattcatataacaacgatatgagggagatcttaattaatacactacataagtacggcatcccaatcggagctaagccgacctctgtgcaacttgccaaggagctcacactgcccgagcagaccttcatgggttattggaccattggacaggctagaagcgggatgcagaaactgctttgtccggtggagacccaccacattgacattaaaggacccgcactgatcaacatccaggagtaccccatagagagacacgaagaaaggtcgctaaatttcaccgaggaatgtgccagctggcggatccccctcgacgagatcaacatcatctgcgacatcgccacctcccacgaaaacgaacagaacacgctgtatgtggtcacctgcaatcctgccagcttgtactttatgaatatgactggtaagtcagggttttttgtcgattttttcgatattttccccagaaccgcaaatggcgtctggcatccatttgtgacggtggcccctctgggatcccctttaaaggggcaagtagttttgcacgagcagcagtcgaacgtgattctgctacttgatacgacaggtagggctttgcataggctcattcttccttcagagaagtttacttcaaagaagcccttttggtggaataaggaggaagctgagacttataagatgtgtaaagagttcagccacaagaattggctcgtcttctataaggaaaaaggcaattcactgactgttcttgatgtgctcgaaggaagaacccacactatctctctcccaatcaatttaaaaaccgtcttcttggtggccgaagataagtggcttctggttgagagcaaaaccaatcagaagtacctgctgacaaaaccggcacatatcgaatctgagggatctggcgtgtgtcagttgtacgtgctgaaggaggaaccaccatccacaggatttggcgtgacccaggaaaccgagttttccatccctcacaagatttccagcgaccagcttagctcggaacacctatcctctgctgtggaacagaagatcgccagccctaatcggatccttagcgatgagaagaattacgcaactatcgtcgtgggattccctgatctcatgagcccatcagaagtctactcctggaaacgtccaagctcactgcataaaaggagcggcactgatacatctttctatcggggaaagaaaaagaggggcactccaaagcaatcgaattgtgtcaccctgctcgacaccaatcaggtggtacgtattctcccgcccggtgaggtcccactgaaagatatttatccaaaggatgtgacacctccacagaccagcggatacattgaggtcactgacttacaaagcaaaaagcttagatacatccccatccccaggtccgaatcactatccccttatacaacatggctgtctaccatttcagacaccgacgcactgttggccgaatgggataaaagtggggttgttacagtggatatgggcggacacataagactgtgggaaactggactcgaacggctccagcggtcactgatggagtggcggaacatgatcggacaggatgatcggaacatgcagattaccattaacagggacagcggggaggatgtcagttctccaaaacatggaaaggaagatcctgataatatgccgcatgtaggcggtaatacctgggccggaggaacaggaggccgggacactgccggtctgggaggaaagggaggaccttaccgacttgatgcgggacacaccgtgtatcaggtgtctcaggctgaaaaggacgctgtccccgaggaggtcaagagggctgcaagggaaatgggacagcgcgccttccagcagcgcctgaaggaaattcagatgtccgaatacgacgccgcaacctacgagcggttttccggagcagtccgcaggcaggtgcattcgctccggataatactggacaatctccaggctaaggggaaagagcgccagtggctgcgccaccaggctacaggtgagttggatgacgctaagatcattgacgggctcaccggcgaaaaggccatctacaaaagacggggtgagcttgagccccaactagggtcgccgcaacagaaacccaagagactgcggcttgtggtcgacgtttcagggagtatgtataggtttaaccgcatggacggacgactcgaaagaacgatggaggccgtctgcatggttatggaggcctttgagaactatgaagaaaagtttcagtatgatattgtgggtcactccggcgatggctataacattgggctggtacctatgaacaaaatcccaaaggataacaagcaacggctcgaaatcttaaagactatgcacgctcactcacagttctgtatgagtggggatcacaccctcgagggtacagagcatgccatcaaagagatcgtcaaggaggaggccgacgagtactttgtcatcgtcctgagtgatgctaacttgtctcgctatgggatacaccctgctaaattcgcccagatcttaactcgagacccccaagtcaacgccttcgccatcttcattggctctctgggggatcaggccacacgcctgcaaagaacacttccagcgggcagatcatttgtcgccatggacactaaggatatcccccagatcctccagcagatcttcacgagcacaatgttgagctctgtttag

SEQ ID NO: 184088 - RNA, 3120 nt, Artificial Sequence
  derived and/or modified sequence
augcagaguagacugcuccugcugggugcuccagggggacacggcgguccugcuagccgccgcaugcgguugcuccucagacaggugguacaaaggcguccuggcggcgaucgccagcggccagaggugaggcuccuccaugcaggguccggcgccgacaccggagacacaguuaacauaggcgacgugucguauaaauuaaaaaucccaaaaaaccccgaauuaguaccacagaacuacauuuccgacucacucgcacaguccguuguucaacaucuucgcuggauuaugcagaaagaucuguuggggcaggauguguuuuuaaucggucccccaggcccgcuccgccgcucaaucgcaaugcaauaucuggaguugaccaagcgggaaguugaguauaucgcgcuuagccgggauacaacugaaacggaccuuaaacagagaagagagauuagggcaggcacugccuucuacauugaccagugugcgguaagagcagcuacugaaggucgcacacucaucuuagaaggauuggagaaagcugagcguaauguucuuccugugcugaacaaucuucucgaaaacagggagaugcagcuggaggauggaagguuccucauguccgcagagagauacgacaaauuacuuagagaucauacgaaaaaagagcucgauagcuggaaaaucguucgcgugagcgagaauuucaggguaauugcacuggggcugccgguccccagauacagcggaaacccccucgauccaccccucaggucaagauuucaggcuagagacaucuacuaucuaccguucaaggaccagcugaaacuccuuuauaguauuggcgccaaugugagcgcagaaaaagugagucagcucuuaaguuucgcgacuacucugugcucucaggaaagcagcacacuugggcuuccugauuuuccucuggacagucucgcugcagcuguacagauccucgacuccuuccccaugaugccuaucaaacaugcaauucaguggcucuaucccuauuccauucugcugggacacgaagggaaaauggccguggaaggcguccucaagcguuucgaguugcaggauuccgguagcucucuuuugccaaaagaaauuguuaaggucgagaaaaugauggagaaucaugucucucaggccagcgugaccauucguaucgccgacaaggaaguaacaaucaaagugccagccgguacacgucugcucucucaaccuugugcuuccgaucgcuuuauccagacucuuagccacaaacaacuccaagcagaaaugaugcagagccauauggugaaagacauuuguuugauuggggguaaaggaugcgggaagacuguaauagccaaaaacuuugcugacacacuggguuacaauaucgaaccuaucaugcuguaccaggacaugacugcucgggaucugcugcagcaacgguauacguuacccaacggagauacggccuggcgaagcucaccccuugugaacgcagcucuggaaggaaagcuugugcuacuggauggcauucaccgggugaacgccgggacacuggccgucuugcaacgucugauccacgacagggaacuuucccuuuacgauggcuccaggcugcucagagaagauagguauaugagacucaaagaagagcuccagcuuagcgacgagcaacugcagaaacgcagcaucuucccgauccacccgaguuucagaauaaucgcacuggcagagccuccagugaucgggucuacagcucaucaguggcuagggccugaguuccugaccauguucuuuuuccacuauaugaagccccuuguuaaaagcgaggaaauccaggugaucaaagagaaagugccaaacgugccacaggaggcacuggauaagcugcuguccuucacucacaaguugcgagaaacacaggacccaacagcccaaucccucgcugcaagccucuccaccaggcagcuucugcgaauuucccggagacuuucccaauauccaaacgagaaucuucacuccgcggucaccaaggcuugccugucucgcuuucuccccucgcuggccagaucugcacuggagaagaaccuggccgaugccacaaucgagauuaauacagaugacaacuuggagccugagcucaaagauuacaagugugaagucacuagcggcacucuuaggauuggcgccguuucggcccccaucuauaacgcccaugagaagaugaaggucccggaugugcuuuucuaugauaauauucagcacgugaucguaauggaggacaugcugaaagacuuuuugcucggggaacaccuccugcuggucgguaaucagggugucgggaagaacaaaauaguggauagguuccuacaccuccugaauagaccaagggaguacauucagcuccaucgcgacacaaccguccagacccugacacuacagcccagugugaaggauggacucauaguguaugaggacucaccccuggugaaggcugucaaguuaggccauaucuuggugguugaugaggcagauaaggcacccacaaauguaacaugcauauugaagacgcugguggaaaacggcgagaugauccucgcugauggucgccgcauaguugcaaauucugcaaacguuaacgggcgggaaaacgugguggugauccauccagauuuccgaaugauugugcuugcgaaucggccaggauuuccuuuuuuggggaacgauuucuuugggacccucggcgacauuuucucgugccaugcaguggacaacccaaagccccauucugagcucgaaaugcugagacaauauggaccgaacgugccggaaccaauuuugcagaagcugguggcugcuuucggggaguugcguucacucgcagaccagggcauuauuaacuaucccuauucaacccgcgaagugguaaauauagugaagcaucuccagaaguuuccgacugagggcuugaguaguguaguaagaaacguauuugauuuugauagcuauaauaaugauaugcgugaaauauugauaaacacucugcauaaauauggaauuccaaucggagccaaacccacaagcguccagcuugcuaaggaguag

SEQ ID NO: 184089 - RNA, 5718 nt, Artificial Sequence
  derived and/or modified sequence
augcagucucggcuccugcuucuuggggcucccggggggcacggcggccccgcuucacgcaggaugcgccuccuucugcgccaggugguccagcgucgaccaggcggcgauaggcagaggccagaggugagauuacugcacgcaggcagcggcgcagauacuggggacacggucaauaucggggacguaucuuauaagcuaaaaauccccaagaacccugagcucgugccccagaauuauauaagcgacucacuggcacagagcguagugcaacaucugagguggauuaugcagaaggaccuacuggggcaggacguguuccugaucgguccuccagggccacuaaggagguccauugcaaugcaguaccuugaguugacgaagcgcgaaguggaauacaucgcccuaagucgcgauaccaccgaaacagacuugaagcaacgccgagaaauccgcgcuggcacagcauucuacauagaucagugugccgugcgggcugcaaccgagggaaggacccugauacucgaagggcuugaaaaagcugaacgaaacgugcugccaguccucaauaaucucuuggaaaaucgagaaaugcagcuugaggacggccgauuuuuaaugucugccgaacgauacgacaaacuauuacgcgaccacacaaaaaaggaacucgacagcuggaaaauaguccgagugagugaaaacuucagagucaucgcgcucggccuacccguaccgcgguacaguggaaacccucuggacccuccccuucguucuagguuccaagcccgggauaucuauuaccugccauucaaagaccagcugaaacugcuguacaguauaggugcuaacgugucugcagaaaaaguuagccaacugcugucauucgccaccaccuugugcagucaggaaagcagcacccugggauuaccugauuuuccacuggacagucuagcugccgcaguucaaauccucgacucguuuccuaugaugccuaucaaacaugcaauacaaugguuguaccccuauucgauccuucuaggacacgagggcaagauggccguggaggguguucugaaacgcuucgaguugcaggacuccggauccuccuuguuaccuaaagagauugucaagguugaaaagaugauggagaaccauguaucacaggccagugugacuauccgcauagcagacaaagagguuacgaucaagguaccagccgguacaagacugcuuagccagccuugcgcuagugaucguuuuauacagacgcugagucauaaacaguugcaggccgagaugaugcaaagccacaugguuaaagacauaugucucauaggcgguaaggguuguggcaaaacggugaucgcaaagaacuuugcugauacacuggguuacaauaucgagccuauuaugcuauaucaggauaugacugcucgcgaccuguugcaacaacgguauacacugccuaacggcgacacagcguggcggaguucuccccuugugaaugcugccuuggaggggaagcucguguugcuggauggcauccaccgugucaaugcgggaacgcucgccgugcugcagagacuuauccacgaucgggagcucucccuuuacgauggaagucgccuguuaagagaagaccgguacaugcgccuaaaagaagaauuacaguugucugaugaacagcuucaaaagcgaaguauauuuccuauccacccuucuuuuaggauuauugcucuugcugaacccccagugaucgggucgacggcucaccaguggcugggacccgaauuucucacuauguucuucuuucauuacaugaaaccccugguuaaaagugaggaaauucaggugaucaaggagaagguccccaacguaccucaggaagcuuuggauaagcuguugucuuuuacacacaagcuucgcgaaacccaggacccuacagcccagagccuggccgcuagccugagcacccgucagcugcugaggaucagcagaaggcugucucaguacccuaaugaaaaccugcacuccgcuguaaccaaggcuugccugagccgcuuucuucccucucuagcaaggagcgcauuagaaaagaaccuugccgaugcuacaauugaaauuaacaccgaugacaaucuggaacccgagcucaaggauuacaagugugagguaacgagcgggacacugcgaauuggcgcggugagugcgccaauauauaaugcccacgagaaaaugaaagugccggauguguuauuuuacgacaauauucaacauguaaucgucauggaggacaugcucaaagacuuucuccucggcgagcauuuguuauuagucggaaaucaagguguuggcaaaaauaagauugucgaccgguuccuccaccugcugaacaggccaagagaauauauccaauuacaccgcgacacaacuguacagacacugacauugcaaccaagugugaaggauggguugauuguauaugaggauuccccucucguuaaagcaguuaaacugggacacauccuggugguggaugaggcagauaaggcccccaccaacgugacaugcauccucaagacccucguggaaaauggagagaugauccuggccgauggccggaggaucgucgcuaacagcgccaacgucaacggccgcgaaaacguaguggucauccacccugacuuucggaugaucguucuggccaauaggccuggcuucccuuuucuugguaacgacuuuuucggcacccuaggugauauauuuuccugccacgccguggauaacccaaagccgcacucugaacuggagaugcugagacaguauggaccaaacguuccagaacccaucuuacagaaacugguagccgccuucggagagcuacgcucauuggcugaucagggcauaaucaauuacccuuauucaaccagggagguuguaaauauaguaaagcaccuccagaaauuuccgacagagggccuaucuuccgucgugaggaauguuuucgacuucgacagcuacaauaacgauaugcgagagauucugaucaauacacugcacaaauauggaauccccaucggggcuaaacccacuucugugcagcuggcaaaggagcuuacccugccagaacaaacuuucaugggcuacuggacaaucggucaagcaagaagcgguaugcaaaaacuucucuguccggucgagacccaccauaucgacaucaaagggcccgcacuuauuaauauccaagaguacccgaucgagcggcacgaagagagaucacuuaacuucaccgaggaaugcgcuucauggaggaucccgcucgacgaaauaaacaucauuugugacaucgccacaucacacgagaacgaacaaaauacauuauaugucgucaccugcaauccugccucccuguauuucaugaauaugacuggcaagucaggauuuuucguggacuucuuugacauuuucccccggaccgcuaaugggguuuggcauccauuugugacaguggccccacucgggagcccccugaaggggcaggucguccuccacgagcagcaaucaaacgucauccuauuacuggauacaacgggcagagccuugcaccgauugauccugcccucagagaaauuuacaagcaagaagcccuuuugguggaacaaagaggaggcagagacauauaaaaugugcaaggaauuuagucauaagaacugguugguguuuuauaaagaaaaggguaauucccucaccguccucgaugugcuggaaggucgcacccacaccaucagucugccaaucaauuuaaaaacuguguuccugguggcagaggacaaaugguuacucguugagaguaagacuaaccagaaguauuuguuaacuaagcccgcgcacauugaauccgagggaucuggagugugucagcuguacguucugaaagaggaaccaccaucaacaggcuucgguguaacucaggaaaccgaguucucaauaccucauaaaaucucuucagaccaacugucaagugagcaccucuccucagccguugaacagaagauugcuagccccaauagaauacucucugaugagaagaacuacgccaccaucguuguagguuucccugaucuuaugagcccaagcgaggucuacuccuggaagcggccaucuucucuucacaagcgcagcgggacugacaccagcuucuaccgcggcaagaagaagcgggggacgccgaagcagagcaauugcgucacucuguuagauacaaaucaggucgugcggaucuuaccaccaggcgaggugccacugaaggauaucuauccaaaagacguaacaccaccacagacaaguggcuauauugaagugacugaccugcaaucgaaaaaacuuagauacauuccgauuccgcgguccgaaucccugagcccguacaccaccuggcucucaaccauuagcgacaccgaugcucuguuggcggaaugggauaagucaggaguggucacaguagauaugggggggcacauuagauuaugggaaacagggcucgagcgacugcagcguagccuuauggaauggagaaacaugaucggccaggacgacaggaacaugcaaauuacuauuaaccgcgauucuggcgaggaugugagcucucccaagcacggcaaggaagacccugacaacaugccccaugugggagguaacacaugggcuggcggcacagggggccgggauaccgcagggcuuggaggcaaagggggcccauauaggcuggaugccggucacaccguguaccaagucucacaagccgaaaaggaugcuguccccgaggaggugaaacgagcugcccgagaaaugggacagcgagccuuucagcagaggcucaaggaaauacagaugucugaguacgaugcugcaaccuaugagagguuuuccggcgccgucaggaggcagguacauucuuugcgcaucauucucgacaaccuccaggcuaagggcaaggaaaggcaaugguuacgucaccaggccacaggagagcuggacgacgccaaaaucauugacgggcuuacuggcgagaaagccauuuacaaacggaggggggagcuggaaccccagcucggcucgccacaacagaaaccaaaaagauugagacuggugguggacgucagcgguagcauguaccgcuuuaaccgcauggacggucgccuggaacguacuauggaagccgugugcauggucauggaggccuuugaaaauuaugaagaaaaguuccaauacgacauugucggacacuccggagauggguauaacauaggccucgugcccaugaacaagauucccaaagacaacaagcagcgccuggaaauucugaagacaaugcaugcgcauucgcaauuuuguaugagcggagaccauacgcuagagggcacugaacacgcuauuaaagaaaucguuaaggaggaggccgacgaauacuucgugaucguacucucagacgccaacuuaagccgguacggcauccauccagcaaaguuugcccaaaucuuaacaagagauccucaggugaacgcuuuugccauuuucauugggagccugggcgaucaggcaacacgauugcagcggacacugccagcgggccgauccuuugucgcuauggacacuaaggacaucccgcaaauccuacagcagaucuucacgagcacuaugcugaguagcgucuag

SEQ ID NO: 184090 - RNA, 3120 nt, Artificial Sequence
  derived and/or modified sequence
augcagaguagacugcuccugcugggugcuccagggggacacggcgguccugcuagccgccgcaugcgguugcuccucagacaggugguacaaaggcguccuggcggcgaucgccagcggccagaggugaggcuccuccaugcaggguccggcgccgacaccggagacacaguuaacauaggcgacgugucguauaaauuaaaaaucccaaaaaaccccgaauuaguaccacagaacuacauuuccgacucacucgcacaguccguuguucaacaucuucgcuggauuaugcagaaagaucuucugggacaagacgucuucuuaauaggacccccgggaccucuuagacgcaguaucgcuaugcaguaucuugaacuuacaaaacgcgagguggaguauaucgcacucuccagggacacuacugaaacagauuugaagcagaggcgggaaauccgugcggggacugcuuuuuauauugaccagugugcggugcgugccgccaccgagggcagaacccuaauauuagagggacuugaaaaggcggaacggaauguauugccaguuuugaauaauuuguuggaaaaccgcgaaaugcaauuggaagacggacgguuccuuaugucagccgagcguuacgacaaacuguugcgggaucacacgaagaaagagcuggacaguuggaaaauugugagaguguccgagaauuuuagagugaucgcccugggccucccaguuccccguuauaguggaaacccccuggacccaccccuccgcagccguuuucaggcccgagacauuuauuaucuccccuucaaagaucagcucaaacuguuguauucuauaggugcuaauguuuccgccgagaaaguuucccaguugcucuccuucgcaacaacccuuugcagucaggaaucuuccacacuuggccuccccgacuuuccacuagacucccucgccgcagcagugcagauccuggacucauucccuaugaugccuauuaagcaugcuauccaauggcuguacccuuauuccauucuccucggucacgaaggaaagauggccguagagggugucuuaaagagauuugaacuucaggacaguggaagcucacugcugccuaaagagauaguuaaaguagaaaagaugauggagaaccauguaucacaggcauccgugacuauccgcaucgcugacaaggaagugacuaucaaggugccugccgguacucgccuacugucucagcccugugccucugaucgauuuauccagacucugucccacaaacagcuacaggccgagaugaugcaaucccacauggugaaggauauaugcuugauagguggaaaaggcugcggaaagaccgugaucgccaaaaauuucgcugacacccucggcuauaauauagaacccaucaugcucuaccaggacaugacugcccgugaucuacugcagcagagguauaccuugccuaauggagauaccgcuuggagaucaaguccccucgucaaugcugcacuugaggguaaacugguucuacucgacggcauucaccgagucaacgccggcacucuggcugugcugcagcgcuuaauccacgaccgagaacuuucccuuuacgaugguagccgccuacugagggaggauagauacaugaggcuuaaagaagaacuacagcugucggaugagcaauuacaaaagagaucuaucuuuccaauccaucccucauuccgcaucaucgcccuagcagaaccacccgugauugggucuacagcucaccaguggcucggaccagaauucuuaacaauguuuuuuuuucauuauaugaaacccuuggucaaaucggaagaaauucaggugaucaaagagaaggugccaaaugugccccaggaagcacuggauaagcuguuaucuuuuacacauaagcuccgggagacccaggauccuaccgcucaaucccuagccgcgucucucucuacacgacaacuucuacgcaucagcaggaggcugucccaguauccaaaugaaaaucuacacucugcuguaacaaaggcaugucuuucuagauuucuucccucacucgcacgcucagcucucgaaaaaaauuuagcagacgccaccauugaaauuaacacagacgacaaccucgaaccugagcugaaagacuacaagugugagguuaccucagggacacuuaggauaggugcugugucugccccuauuuacaaugcccaugagaaaaugaaggugccugaugugcuuuuuuacgauaauauucaacaugugaucgugauggaagauaugcuaaaagacuuucugcucggggaacaucuccuguuggucggaaaccagggcguggguaaaaauaagaucguugaucgcuuccuccaucucuugaacagaccccgcgaguauauucaacuucauagagacaccacugugcaaacucugacccuccagccuucggugaaagacggacuuauaguguaugaggauucccccuuggugaaggccguuaaacucggacauauucuggugguggaugaggcagauaaagcacccacaaaugucacuugcauuuugaaaacacugguggagaacggagagaugauccucgccgaugguaggcgcauuguggcaaauagcgcuaaugugaaugggagagaaaaugugguaguaauucaucccgauuucagaaugauaguucuggcuaaucggcccggcuuccccuuucugggaaacgauuucuuuggaacauugggggauaucuuuucuugccaugcuguugacaacccaaagccucauucagaacuugaaaugcugcgccaauauggcccaaacguaccugaaccgauacuccagaagcuaguggccgcauuuggagagcugaggucccuagcugaucaaggaauuauuaacuauccauacuccacacgggaaguggucaacaucgucaaacaccuacagaaauucccaacugaaggccuuucaucgguggugaggaacguauucgacuucgauucuuauaauaaugacaugagagaaauucugauaaauacccugcacaaauauggaaucccgaucggcgcaaaaccaacaucuguccagcuagccaaagaauag

SEQ ID NO: 184091 - RNA, 5718 nt, Artificial Sequence
  derived and/or modified sequence
augcagucgagauuacuccuguugggugcacccggagggcauggcggucccgccuccaggagaaugcggcuacuuuuaagacaggugguccagcgccgcccaggaggggacagacagcggcccgagguuagacuucugcacgccggaucaggggccgacaccggugauacggucaauauaggcgauguuagcuauaagcuaaaaauuccaaagaaucccgaacucgugccucagaacuacaucagcgauucucuagcccaaucaguugugcagcaccuucgguggaucaugcaaaaggaucugcugggccaagaugucuuccuuauuggaccaccuggcccccugagacguagcauugcuaugcaauaccuggagcucacuaagcgggaaguugaauacaucgcucucaguagagacaccacggagacugaccugaagcagaggagggaaauucgcgccgguacagcuuuuuacauagaccagugugccgugagagccgcuaccgaaggaagaacucugauccuugaaggacuagaaaaggccgaacgcaauguguuaccugugcugaacaauuuacucgagaaccgcgaaaugcaguuagaggacggccguuuucugaugagcgccgagcguuacgacaaguuacugagagaucacaccaagaaagagcucgauagcuggaaaauuguucgugucuccgaaaauuuuagagugaucgcccuuggucugcccguuccucgcuacucugguaacccgcuggauccaccacuuagaucuagauuccaggcacgggacaucuacuaccuuccuuuuaaagaucaacugaagcugcucuauucgaucggugcuaacguauccgcagagaaagugucucaauuauugagcuucgcgacuacuuuguguucacaggaaucgagcacacugggucuccccgacuuucccuuggauucccuggcugcugcaguccaaaucuuagacagcuuuccaaugaugccaaucaaacacgcaauucaguggcucuacccuuauuccauacugcugggccaugaagguaagauggccgucgaggguguucugaagagguuugagcuccaggauagcggaucuuccuugcucccaaaagaaaucguaaaaguagaaaagaugauggagaaucacguuucgcaagccucugucacuauuaggauugccgacaaggaggugaccaucaaaguccccgcuggcaccaggcuucucagucaaccaugcgcgagcgaccgauucauucagacucugagucauaagcaacugcaagccgaaaugaugcaaucccauaugguuaaagauauuugccuaaucggaggaaaaggcugcgggaagacaguuaucgccaagaauuucgcugacacccucggcuauaauauagagccaaucaugcuuuaccaggauaugaccgcaagagaucugcugcagcaacgguacacccucccaaacggcgauaccgcguggcgcagcuccccguuaguaaacgccgcccucgagggcaagcuggugcuucuugacgggauucaccgaguuaaugcaggaacucuugcugucuugcaaagacucauacacgaccgggaguugagccuguacgacggcucacggcugcuuagagaagacagauacaugcguuugaaagaggaauuacaacugucagacgagcagcugcaaaagcgaagcauuuucccuauucauccuucuuucagaauaauugcacuugcagaaccccccgugauagguagcaccgcucaucagugguugggccccgaauuccugaccauguucuucuuccacuauaugaaaccacucgugaaaucagaggaaauccaggugauuaaagaaaaggugccgaacguuccccaagaagcccucgauaagcuauuguccuucacccauaaacuuagagagacacaggacccaacggcccagucacucgcugccuccuugaguacccgacaacugcugcgcauuagccggagacugucacaauaccccaaugagaaccuucauagugcagugaccaaagcuugccugagcagguuccugcccucauuagccagaucugcacuugagaaaaaucuggccgacgcuaccauugagaucaacaccgaugacaaucuagaaccggaacucaaggacuacaaaugcgaggugacgucugguacucucaggaucggcgccgugucugccccuaucuacaaugcucacgagaaaaugaaaguaccugauguucuauucuaugacaauauucaacacgucaucguuauggaggacaugcucaaggauuucuugcucggugagcaucuccuuuuagucgggaaucagggcguggguaaaaacaagaucguggaccgcuucuuacacuuacucaacagaccacgugaguauauucagcugcauagagacacaaccgugcaaacacuuacccuucagcccuccgugaaagacggacuaauuguuuaugaagacucaccccucgugaaggcagugaagcuuggacacauucuggucgucgacgaggcagauaaggccccuaccaauguaaccuguauacucaagacuuuaguugagaauggugagaugauccucgccgauggacggcggauaguagccaacagcgccaacguuaacgggagagaaaacgugguggugauucacccugauuuuagaaugaucgugcucgccaauagaccuggguucccuuuccugggcaaugauuuuuuugggacccuaggcgauaucuuuuccugccaugcggucgauaauccuaagccacacuccgaauuagaaaugcuccggcaguacggaccgaacgugccugagccuauccuucaaaaguugguugcagcguuuggugaacugagaagccuggcugaucagggcauuaucaacuaucccuauagcacucgcgagguugucaauauagugaaacaccuccaaaaguucccgacugagggccuuuccucuguugugcgcaauguauucgacuucgauuccuacaauaaugauaugcgagaaauucugauuaauacucuucacaaauaugggauuccuauuggcgccaagccaacaagcgugcagcuggccaaggagcugacucuucccgagcaaacuuucauggguuacuggaccaucggacaagcuagaaguggcaugcaaaaauugcuguguccugucgaaacccaucacauugauaucaaaggaccggcccugauuaauauacaagaguacccuauugaacgucacgaggaacgaucgcugaauuucaccgaggaaugugcuagcuggcgaaucccgcucgacgagauuaauauuauuugugauauugccaccucucaugagaacgagcagaacacacuauauguagugacuugcaaucccgccucucuguauuuuaugaacaugacuggcaagaguggauucuucguugauuuuuuugacauauuuccucgaaccgccaauggaguguggcauccuuucguuacaguagcuccacuaggcucaccccuuaaagggcaggucgugcugcacgagcaacagaguaacguaaucuugcuccuugauacuacgggcagagccuugcaccgucucauauuaccuagcgaaaaguuuaccagcaagaagccuuuuugguggaauaaagaagaagccgagacauacaagaugugcaaggaauucucacacaaaaauuggcuaguguucuauaaggaaaaggguaacuccuugacuguuuuggauguguuggagggacgcacucacacuauaagucuuccgauuaaccugaaaaccguguucuugguagccgaagauaaaugguugcucguagaaagcaagacaaaccagaaauaccuguugaccaaacccgcccacaucgaauccgagggaaguggugugugccagcuguacguccugaaggaggagccccccucgaccggcuuuggaguaacccaggagacggaguuuucaaucccccacaaaauaucuagugaccaguuauccuccgaacaccucagcucugcuguugagcaaaagauugcuagccccaauagaauuuuaucagacgaaaaaaauuacgcaacuauuguaguugguuuccccgacuuaaugagcccaagcgaaguguauucuuggaagcggccaucaagucugcacaagagaagcggaacagacaccuccuuuuaucggggcaaaaaaaagagagguacuccgaaacaguccaauugcgugacccuucucgauacaaaccaaguaguacgaauccugccccccggcgaggugccacuuaaggacauuuacccaaaggacgugaccccaccacagaccagugguuacauagaaguaacugaccuccagagcaagaaguugagauauauaccaauaccccgcagcgaaagccugucuccuuauaccaccuggcugucgacaauuagugauacugaugcgcugcucgcugaaugggauaagagcggaguuguaacaguagacaugggcggucauauacguuugugggagacgggacuggaacguuugcagcggucacugauggaguggagaaacaugauaggccaggaugauagaaacaugcaaaucacaaucaauagggacucaggggaagaugugagcucaccuaaacaugggaaggaggaccccgacaacaugccucaugugggcggcaacaccugggccggaggcacaggagguagagauacagccggacugggugggaaagggggcccuuaucgcuuggaugcuggucauaccgucuaccagguaagucaggcagaaaaggaugcagugccugaagaagugaaaagggccgcuagagaaauggggcagagggcuuuucagcagaggcucaaagaaauucagaugagugaauacgacgcggcaacauacgagagauuuucaggagcaguacggcgccaggugcauagccugcguauuauucucgauaaucugcaagcaaaaggaaaggagagacaguggcuuagacaccaggccacgggggagcuagaugaugccaagaucauugauggauugacaggggagaaggccauauacaagaggcggggcgagcuugagccccagcuaggaagcccacagcaaaaaccuaagagauugaggcuggugguugaugugucaggaaguauguaucgcuuuaacagaauggacggccgguuggaacguacgauggaagccgugugcauggugauggaggccuuugaaaacuaugaagagaaguuccaguaugauauuguaggacauaguggcgacggcuacaauaucggucuggugccuaugaacaagaucccaaaggacaauaagcagagguuagagauucuuaaaacaaugcaugcgcacagccaauuuugcauguccggcgaucauacuuuggaaggaaccgaacacgcuaucaaggagauuguuaaggaggaagccgacgaauacuuuguaauuguccugucugaugcaaaccucucacguuacggaauacacccagcgaaauucgcacagauauuaacuagggacccacagguaaacgccuuugccauuuucaucggcagucucggagaccaggcaacaagguuacagagaacacugccugcagguagaaguuucgucgccauggacacuaaagacauaccacagauauugcaacagauuuucacgaguacaaugcuuucuuccgucuag

SEQ ID NO: 184092 - protein, 1047 aa, Artificial Sequence
  derived and/or modified sequence
MEVAEVESPLNPSCKIMTFRPSMEEFREFNKYLAYMESKGAHRAGLAKVIPPKEWKPRQCYDDIDNLLIPAPIQQMVTGQSGLFTQYNIQKKAMTVKEFRQLANSGKYCTPRYLDYEDLERKYWKNLTFVAPIYGADINGSIYDEGVDEWNIARLNTVLDVVEEECGISIEGVNTPYLYFGMWKTTFAWHTEDMDLYSINYLHFGEPKSWYAIPPEHGKRLERLAQGFFPSSSQGCDAFLRHKMTLISPSVLKKYGIPFDKITQEAGEFMITFPYGYHAGFNHGFNCAESTNFATVRWIDYGKVAKLCTCRKDMVKISMDIFVRKFQPDRYQLWKQGKDIYTIDHTKPTPASTPEVKAWLQRRRKVRKASRSFQCARSTSKRPKADEEEEVSDEVDGAEVPNPDSVTDDLKVSEKSEAAVKLRNTEASSEEESSASRMQVEQNLSDHIKLSGNSCLSTSVTEDIKTEDDKAYAYRSVPSISSEADDSIPLSSGYEKPEKSDPSELSWPKSPESCSSVAESNGVLTEGEESDVESHGNGLEPGEIPAVPSGERNSFKVPSIAEGENKTSKSWRHPLSRPPARSPMTLVKQQAPSDEELPEVLSIEEEVEETESWAKPLIHLWQTKSPNFAAEQEYNATVARMKPHCAICTLLMPYHKPDSSNEENDARWETKLDEVVTSEGKTKPLIPEMCFIYSEENIEYSPPNAFLEEDGTSLLISCAKCCVRVHASCYGIPSHEICDGWLCARCKRNAWTAECCLCNLRGGALKQTKNNKWAHVMCAVAVPEVRFTNVPERTQIDVGRIPLQRLKLKCIFCRHRVKRVSGACIQCSYGRCPASFHVTCAHAAGVLMEPDDWPYVVNITCFRHKVNPNVKSKACEKVISVGQTVITKHRNTRYYSCRVMAVTSQTFYEVMFDDGSFSRDTFPEDIVSRDCLKLGPPAEGEVVQVKWPDGKLYGAKYFGSNIAHMYQVEFEDGSQIAMKREDIYTLDEELPKRVKARFVSAGRCHLGTCQVNSLSSPHVSQAQQETYLGFWINSKKSQCNIFLSGTY

SEQ ID NO: 184093 - protein, 1056 aa, Artificial Sequence
  derived and/or modified sequence
MEVAEVESPLNPSCKIMTFRPSMEEFREFNKYLAYMESKGAHRAGLAKVIPPKEWKPRQCYDDIDNLLIPAPIQQMVTGQSGLFTQYNIQKKAMTVKEFRQLANSGKYCTPRYLDYEDLERKYWKNLTFVAPIYGADINGSIYDEGVDEWNIARLNTVLDVVEEECGISIEGVNTPYLYFGMWKTTFAWHTEDMDLYSINYLHFGEPKSWYAIPPEHGKRLERLAQGFFPSSSQGCDAFLRHKMTLISPSVLKKYGIPFDKITQEAGEFMITFPYGYHAGFNHGFNCAESTNFATVRWIDYGKVAKLCTCRKDMVKISMDIFVRKFQPDRYQLWKQGKDIYTIDHTKPTPASTPEVKAWLQRRRKVRKASRSFQCARSTSKRPKADEEEEVSDEVDGAEVPNPDSVTDDLKVSEKSEAAVKLRNTEASSEEESSASRMQVEQNLSDHIKLSGNSCLSTSVTEDIKTEDDKAYAYRSVPSISSEADDSIPLSSGYEKPEKSDPSELSWPKSPESCSSVAESNGVLTEGEESDVESHGNGLEPGEIPAVPSGERNSFKVPSIAEGENKTSKSWRHPLSRPPARSPMTLVKQQAPSDEELPEVLSIEEEVEETESWAKPLIHLWQTKSPNFAAEQEYNATVARMKPHCAICTLLMPYHKPDSSNEENDARWETKLDEVVTSEGKTKPLIPEMCFIYSEENIEYSPPNAFLEEDGTSLLISCAKCCVRVHASCYGIPSHEICDGWLCARCKRNAWTAECCLCNLRGGALKQTKNNKWAHVMCAVAVPEVRFTNVPERTQIDVGRIPLQRLKLKCIFCRHRVKRVSGACIQCSYGRCPASFHVTCAHAAGVLMEPDDWPYVVNITCFRHKVNPNVKSKACEKVISVGQTVITKHRNTRYYSCRVMAVTSQTFYEVMFDDGSFSRDTFPEDIVSRDCLKLGPPAEGEVVQVKWPDGKLYGAKYFGSNIAHMYQVEFEDGSQIAMKREDIYTLDEELPKRVKARFSTASDMRFEDTFYGADIIQGERKRQRVLSSRFKNEYVADPVYRTFLKSSFQKKCQKRQ

SEQ ID NO: 184094 - protein, 743 aa, Artificial Sequence
  derived and/or modified sequence
MVKISMDIFVRKFQPDRYQLWKQGKDIYTIDHTKPTPASTPEVKAWLQRRRKVRKASRSFQCARSTSKRPKADEEEEVSDEVDGAEVPNPDSVTDDLKVSEKSEAAVKLRNTEASSEEESSASRMQVEQNLSDHIKLSGNSCLSTSVTEDIKTEDDKAYAYRSVPSISSEADDSIPLSSGYEKPEKSDPSELSWPKSPESCSSVAESNGVLTEGEESDVESHGNGLEPGEIPAVPSGERNSFKVPSIAEGENKTSKSWRHPLSRPPARSPMTLVKQQAPSDEELPEVLSIEEEVEETESWAKPLIHLWQTKSPNFAAEQEYNATVARMKPHCAICTLLMPYHKPDSSNEENDARWETKLDEVVTSEGKTKPLIPEMCFIYSEENIEYSPPNAFLEEDGTSLLISCAKCCVRVHASCYGIPSHEICDGWLCARCKRNAWTAECCLCNLRGGALKQTKNNKWAHVMCAVAVPEVRFTNVPERTQIDVGRIPLQRLKLKCIFCRHRVKRVSGACIQCSYGRCPASFHVTCAHAAGVLMEPDDWPYVVNITCFRHKVNPNVKSKACEKVISVGQTVITKHRNTRYYSCRVMAVTSQTFYEVMFDDGSFSRDTFPEDIVSRDCLKLGPPAEGEVVQVKWPDGKLYGAKYFGSNIAHMYQVEFEDGSQIAMKREDIYTLDEELPKRVKARFSTASDMRFEDTFYGADIIQGERKRQRVLSSRFKNEYVADPVYRTFLKSSFQKKCQKRQ

SEQ ID NO: 184095 - DNA, 4182 bp, Artificial Sequence
  derived and/or modified sequence
gggtcctgtgcgcgtgcgcagcgaacagctgtcacctagtgcggaacaagtctcccaaatttcccaaatctccctgggccggaggccactgtcttctcttcctcctccaccgagtcgtgctctcgccccaacccgcgcgccagacactgccctaaccatcatggaggtggccgaggtggaaagtcctctgaaccccagctgtaagataatgaccttcagaccctccatggaggagttccgggagttcaacaaataccttgcatacatggagtctaaaggagcccatcgtgcgggtcttgcaaaggtgattcctcctaaggagtggaagccaagacagtgctatgatgacattgataatttgctcattccagcaccaattcagcagatggtcacagggcagtcaggactgttcactcagtacaacatccagaaaaaagcgatgactgtgaaggagttcaggcagctggccaacagtggcaaatattgtactccaagatacttggattacgaagatttggagcgcaagtactggaagaacttaacttttgtggcacctatctatggtgcagatattaatgggagcatatatgatgagggtgtggatgaatggaacatagctcgcctcaatacagtcttggatgtggttgaagaagagtgtggcatttctattgagggtgtaaataccccatatctctattttggcatgtggaagaccacgtttgcatggcacaccgaagacatggacctctatagcattaattatctccactttggagagcccaagtcttggtatgctatacctccggagcatggaaaacgacttgaaagactagctcaaggttttttcccaagcagctcccaagggtgtgatgcatttcttcgccacaagatgacattgatttctccatcagtattgaagaaatatggtattccctttgacaagataacccaggaggctggagaattcatgatcactttcccatatggctaccatgctggttttaatcatggtttcaactgtgcagaatctacaaattttgctactgtcagatggattgactatggaaaagttgccaaattgtgcacttgcaggaaagacatggtgaagatttcaatggatatctttgtgaggaaatttcagccagacagatatcagctttggaaacaaggaaaggatatatacaccattgatcacacgaagcctactccagcatccacccctgaagtaaaagcatggctgcagaggaggaggaaagtaagaaaagcatcccgaagcttccagtgtgctaggtctacctctaaaaggcctaaggctgatgaggaagaggaagtgtcagatgaagtcgatggggcagaggtccctaaccccgactcagtcacagatgacctcaaggtcagtgaaaagtcagaagcagcagtgaagctgaggaacacagaagcatcttcagaagaagagtcatctgctagcaggatgcaggtggagcagaatttatcagatcatatcaaactctcaggaaacagctgcttaagtacatctgtaacagaagacataaaaactgaggatgacaaagcttatgcatatagaagtgtaccttctatatccagtgaggctgatgattccattccattgtctactggctatgagaagcccgagaaatcagacccatccgagctttcatggccaaagtcacctgagtcatgctcatcagtggcagagagtaatggtgtgttaacagagggagaagagagtgatgtggagagccatgggaatggccttgaacctggggaaatcccagcggtccccagtggagagagaaatagcttcaaagtccccagtatagcagagggagagaacaaaacctctaagagttggcgccatccacttagcaggcctccagcaagatctccgatgactcttgtgaagcagcaggcgccaagtgatgaagaattgcctgaggttctgtccattgaggaggaagtggaagaaacagagtcttgggcgaaacctctcatccacctttggcagacgaagtcccctaacttcgcagctgagcaagagtataatgcaacagtggccaggatgaagccacactgtgccatctgcactctgctcatgccgtaccacaagccagatagcagcaatgaagaaaatgatgctagatgggagacaaaattagatgaagtcgttacatcggagggaaagactaagcccctcataccagagatgtgttttatttatagtgaagaaaatatagaatattctccacccaatgccttccttgaagaggatggaacaagtctccttatttcctgtgcaaagtgctgcgtacgggttcatgcaagttgttatggtattccttctcatgagatctgtgatggatggctgtgtgcccggtgcaaaagaaatgcgtggacagcagaatgctgtctctgcaatttgagaggaggtgctcttaagcaaacgaagaacaataagtgggcccatgtcatgtgcgccgttgcggtcccagaagttcgattcactaatgtcccagaaaggacacaaatagatgtaggcagaatacctttacagaggttaaaattgaaatgcatcttctgcagacaccgggttaagagggtctctggagcctgcatccagtgttcctacggtcgctgcccggcctccttccatgtcacttgtgcccatgctgctggggtactgatggagcctgatgattggccttatgtggtgaacattacatgctttcgacataaggtcaaccccaacgtgaagtccaaggcttgcgagaaggtcatttccgtgggtcaaacggtcatcacgaagcatcggaacacccggtattacagttgcagagtgatggctgtgacatcgcagaccttctatgaggtcatgtttgatgatggctcctttagcagagacacatttcctgaggatatcgtgagccgagactgtctgaagctgggcccacctgctgagggagaagtcgtccaagtcaagtggcccgatggcaaactctatggagcaaaatattttggatcaaatattgcccacatgtaccaggttgagtttgaagatggatcccagatagcaatgaagagagaggacatctacactttagatgaagagttacccaagagagtgaaagctcgatttgtaagtgctggcagatgccacttggggacctgccaagtgaattccttgtcctcacctcatgtttcccaagcccagcaggaaacatacttgggcttttggattaattctaaaaaaagccaatgcaacattttccttagtggaacctattgaatgcaaacttcaaattcaaccaaaatcggggaaattaatgcatgtgctttacttttcttctaatgaagtcacatgatgcttctttgtgttgacatttattggtgcacaaaaatacttactgaatgtgtgctctgtgtaaaacaccaggagcaaacaaagataccatcaaggcatttgcaatcttgttagtagaagcaacattaaaagtattcaggagtagatcaaaggggactcggcataattgaatgtctgtctattcttttataggtttttcatggattgactaccttctgtctcagaaagttactgatgtttgtgtcagttcatcattaagctaaactctgactttcataataaaagggataaacaaagcctaaatgctagttgtgggaatactaaagcagttttttaaaaaggaaatagtagtttcatgccctcacataccattaaaagatgaacaaacatggacaaatattcaaaactgcagtcattgaaaaatataattcacaataatttagacttcatattattgtatcataaaatattcagtggaccctgaaatgaagtcagttttattcatttagaattatatctattgtgtctgtgaaatgataaatcctaaatagagaaatttgaatggatggggtttttctgactaaaatgaaattttttttctgaataattcagtttagtgagtgcttatgatatacttgtctgcagtgatagagtcactatagattatttggttattttggaaaaaccaagggttttcttaaatcagggatgtccaatctttttgcatccctgggccatacttgaagaagaagaattgtctttggcctcacataaactacactaacaatagctgatgagctacc

SEQ ID NO: 184096 - DNA, 4601 bp, Artificial Sequence
  derived and/or modified sequence
cggcgcccaggaggacgtgtggcgcgtggactacatcaggtccagccctgcgggaccccagccagcgcttccgggcaaggttctgtgcacctgttttctccttctacgcgagtatctttcccctccggaaagaatgggatatgcctgtgtccaaaggacaagaagatgcgcgccagcaagcctaagttaaccacagcgcggaagttgagcccaaagcaagagcgtgccgggcacctttaagctgtttgtaagcccacgtgactcaccaagtgcgggccccagcggtcacgtgacggcgcgcgcgccctcgcgcagggagagccggcggtgcgcgcgccttcgccgctgcctcccacccaccccctcgacgggagggtgaggcgcggcgcagtgatcgggcggccggggtcctgtgcgcgtgcgcagcgaacagctgtcacctagtgcggaacaagtctcccaaatttcccaaatctccctgggccggaggccactgtcttctcttcctcctccaccgagtcgtgctctcgccccaacccgcgcgccagacactgccctaaccatcatggaggtggccgaggtggaaagtcctctgaaccccagctgtaagataatgaccttcagaccctccatggaggagttccgggagttcaacaaataccttgcatacatggagtctaaaggagcccatcgtgcgggtcttgcaaaggtgattcctcctaaggagtggaagccaagacagtgctatgatgacattgataatttgctcattccagcaccaattcagcagatggtcacagggcagtcaggactgttcactcagtacaacatccagaaaaaagcgatgactgtgaaggagttcaggcagctggccaacagtggcaaatattgtactccaagatacttggattacgaagatttggagcgcaagtactggaagaacttaacttttgtggcacctatctatggtgcagatattaatgggagcatatatgatgagggtgtggatgaatggaacatagctcgcctcaatacagtcttggatgtggttgaagaagagtgtggcatttctattgagggtgtaaataccccatatctctattttggcatgtggaagaccacgtttgcatggcacaccgaagacatggacctctatagcattaattatctccactttggagagcccaagtcttggtatgctatacctccggagcatggaaaacgacttgaaagactagctcaaggttttttcccaagcagctcccaagggtgtgatgcatttcttcgccacaagatgacattgatttctccatcagtattgaagaaatatggtattccctttgacaagataacccaggaggctggagaattcatgatcactttcccatatggctaccatgctggttttaatcatggtttcaactgtgcagaatctacaaattttgctactgtcagatggattgactatggaaaagttgccaaattgtgcacttgcaggaaagacatggtgaagatttcaatggatatctttgtgaggaaatttcagccagacagatatcagctttggaaacaaggaaaggatatatacaccattgatcacacgaagcctactccagcatccacccctgaagtaaaagcatggctgcagaggaggaggaaagtaagaaaagcatcccgaagcttccagtgtgctaggtctacctctaaaaggcctaaggctgatgaggaagaggaagtgtcagatgaagtcgatggggcagaggtccctaaccccgactcagtcacagatgacctcaaggtcagtgaaaagtcagaagcagcagtgaagctgaggaacacagaagcatcttcagaagaagagtcatctgctagcaggatgcaggtggagcagaatttatcagatcatatcaaactctcaggaaacagctgcttaagtacatctgtaacagaagacataaaaactgaggatgacaaagcttatgcatatagaagtgtaccttctatatccagtgaggctgatgattccattccattgtctagtggctatgagaagcccgagaaatcagacccatccgagctttcatggccaaagtcacctgagtcatgctcatcagtggcagagagtaatggtgtgttaacagagggagaagagagtgatgtggagagccatgggaatggccttgaacctggggaaatcccagcggtccccagtggagagagaaatagcttcaaagtccccagtatagcagagggagagaacaaaacctctaagagttggcgccatccacttagcaggcctccagcaagatctccgatgactcttgtgaagcagcaggcgccaagtgatgaagaattgcctgaggttctgtccattgaggaggaagtggaagaaacagagtcttgggcgaaacctctcatccacctttggcagacgaagtcccctaacttcgcagctgagcaagagtataatgcaacagtggccaggatgaagccacactgtgccatctgcactctgctcatgccgtaccacaagccagatagcagcaatgaagaaaatgatgctagatgggagacaaaattagatgaagtcgttacatcggagggaaagactaagcccctcataccagagatgtgttttatttatagtgaagaaaatatagaatattctccacccaatgccttccttgaagaggatggaacaagtctccttatttcctgtgcaaagtgctgcgtacgggttcatgcaagttgttatggtattccttctcatgagatctgtgatggatggctgtgtgcccggtgcaaaagaaatgcgtggacagcagaatgctgtctctgcaatttgagaggaggtgctcttaagcaaacgaagaacaataagtgggcccatgtcatgtgcgccgttgcggtcccagaagttcgattcactaatgtcccagaaaggacacaaatagatgtaggcagaatacctttacagaggttaaaattgaaatgcatcttctgcagacaccgggttaagagggtctctggagcctgcatccagtgttcctacggtcgctgcccggcctccttccatgtcacttgtgcccatgctgctggggtactgatggagcctgatgactggccttatgtggtgaacattacatgctttcgacataaggtcaaccccaacgtgaagtccaaggcttgcgagaaggtcatttccgtgggtcaaacggtcatcacgaagcatcggaacacccggtattacagttgcagagtgatggctgtgacatcgcagaccttctatgaggtcatgtttgatgatggctcctttagcagagacacatttcctgaggatatcgtgagccgagactgtctgaagctgggcccacctgctgagggagaagtcgtccaagtcaagtggcccgatggcaaactctatggagcaaaatattttggatcaaatattgcccacatgtaccaggttgagtttgaagatggatcccagatagcaatgaagagagaggacatctacactttagatgaagagttacccaagagagtgaaagctcgatttgtaagtgctggcagatgccacttggggacctgccaagtgaattccttgtcctcacctcatgtttcccaagcccagcaggaaacatacttgggcttttggattaattctaaaaaaagccaatgcaacattttccttagtggaacctattgaatgcaaacttcaaattcaaccaaaatcggggaaattaatgcatgtgctttacttttcttctaatgaagtcacatgatgcttctttgtgttgacatttattggtgcacaaaaatacttactgaatgtgtgctctgtgtaaaacaccaggagcaaacaaagataccatcaaggcatttgcaatcttgttagtagaagcaacattaaaagtattcaggagtagatcaaaggggactcggcataattgaatgtctgtctattcttttataggtttttcatggattgactaccttctgtctcagaaagttactgatgtttgtgtcagttcatcattaagctaaactctgactttcataataaaagggataaacaaagcctaaatgctagttgtgggaatactaaagcagttttttaaaaaggaaatagtagtttcatgccctcacataccattaaaagatgaacaaacatggacaaatattcaaaactgcagtcattgaaaaatataattcacaataatttagacttcatattattgtatcataaaatattcagtggaccctgaaatgaagtcagttttattcatttagaattatatctattgtgtctgtgaaatgataaatcctaaatagagaaatttgaatggatggggtttttctgactaaaatgaaattttttttctgaataattcagtttagtgagtgcttatgatatacttgtctgcagtgatagagtcactatagattatttggttattttggaaaaaccaagggttttcttaaatcagggatgtccaatctttttgcatccctgggccatacttgaagaagaagaattgtctttggcctcacataaactacactaacaatagctgatgagctactaaaaaaaaaaaaaa

SEQ ID NO: 184097 - DNA, 4655 bp, Artificial Sequence
  derived and/or modified sequence
cggcgcccaggaggacgtgtggcgcgtggactacatcaggtccagccctgcgggaccccagccagcgcttccgggcaaggttctgtgcacctgttttctccttctacgcgagtatctttcccctccggaaagaatgggatatgcctgtgtccaaaggacaagaagatgcgcgccagcaagcctaagttaaccacagcgcggaagttgagcccaaagcaagagcgtgccgggcacctttaagctgtttgtaagcccacgtgactcaccaagtgcgggccccagcggtcacgtgacggcgcgcgcgccctcgcgcagggagagccggcggtgcgcgcgccttcgccgctgcctcccacccaccccctcgacgggagggtgaggcgcggcgcagtgatcgggcggccggggtcctgtgcgcgtgcgcagcgaacagctgtcacctagtgcggaacaagtctcccaaatttcccaaatctccctgggccggaggccactgtcttctcttcctcctccaccgagtcgtgctctcgccccaacccgcgcgccagacactgccctaaccatcatggaggtggccgaggtggaaagtcctctgaaccccagctgtaagataatgaccttcagaccctccatggaggagttccgggagttcaacaaataccttgcatacatggagtctaaaggagcccatcgtgcgggtcttgcaaaggtgattcctcctaaggagtggaagccaagacagtgctatgatgacattgataatttgctcattccagcaccaattcagcagatggtcacagggcagtcaggactgttcactcagtacaacatccagaaaaaagcgatgactgtgaaggagttcaggcagctggccaacagtggcaaatattgtactccaagatacttggattacgaagatttggagcgcaagtactggaagaacttaacttttgtggcacctatctatggtgcagatattaatgggagcatatatgatgagggtgtggatgaatggaacatagctcgcctcaatacagtcttggatgtggttgaagaagagtgtggcatttctattgagggtgtaaataccccatatctctattttggcatgtggaagaccacgtttgcatggcacaccgaagacatggacctctatagcattaattatctccactttggagagcccaagtcttggtatgctatacctccggagcatggaaaacgacttgaaagactagctcaaggttttttcccaagcagctcccaagggtgtgatgcatttcttcgccacaagatgacattgatttctccatcagtattgaagaaatatggtattccctttgacaagataacccaggaggctggagaattcatgatcactttcccatatggctaccatgctggttttaatcatggtttcaactgtgcagaatctacaaattttgctactgtcagatggattgactatggaaaagttgccaaattgtgcacttgcaggaaagacatggtgaagatttcaatggatatctttgtgaggaaatttcagccagacagatatcagctttggaaacaaggaaaggatatatacaccattgatcacacgaagcctactccagcatccacccctgaagtaaaagcatggctgcagaggaggaggaaagtaagaaaagcatcccgaagcttccagtgtgctaggtctacctctaaaaggcctaaggctgatgaggaagaggaagtgtcagatgaagtcgatggggcagaggtccctaaccccgactcagtcacagatgacctcaaggtcagtgaaaagtcagaagcagcagtgaagctgaggaacacagaagcatcttcagaagaagagtcatctgctagcaggatgcaggtggagcagaatttatcagatcatatcaaactctcaggaaacagctgcttaagtacatctgtaacagaagacataaaaactgaggatgacaaagcttatgcatatagaagtgtaccttctatatccagtgaggctgatgattccattccattgtctagtggctatgagaagcccgagaaatcagacccatccgagctttcatggccaaagtcacctgagtcatgctcatcagtggcagagagtaatggtgtgttaacagagggagaagagagtgatgtggagagccatgggaatggccttgaacctggggaaatcccagcggtccccagtggagagagaaatagcttcaaagtccccagtatagcagagggagagaacaaaacctctaagagttggcgccatccacttagcaggcctccagcaagatctccgatgactcttgtgaagcagcaggcgccaagtgatgaagaattgcctgaggttctgtccattgaggaggaagtggaagaaacagagtcttgggcgaaacctctcatccacctttggcagacgaagtcccctaacttcgcagctgagcaagagtataatgcaacagtggccaggatgaagccacactgtgccatctgcactctgctcatgccgtaccacaagccagatagcagcaatgaagaaaatgatgctagatgggagacaaaattagatgaagtcgttacatcggagggaaagactaagcccctcataccagagatgtgttttatttatagtgaagaaaatatagaatattctccacccaatgccttccttgaagaggatggaacaagtctccttatttcctgtgcaaagtgctgcgtacgggttcatgcaagttgttatggtattccttctcatgagatctgtgatggatggctgtgtgcccggtgcaaaagaaatgcgtggacagcagaatgctgtctctgcaatttgagaggaggtgctcttaagcaaacgaagaacaataagtgggcccatgtcatgtgcgccgttgcggtcccagaagttcgattcactaatgtcccagaaaggacacaaatagatgtaggcagaatacctttacagaggttaaaattgaaatgcatcttctgcagacaccgggttaagagggtctctggagcctgcatccagtgttcctacggtcgctgcccggcctccttccatgtcacttgtgcccatgctgctggggtactgatggagcctgatgactggccttatgtggtgaacattacatgctttcgacataaggtcaaccccaacgtgaagtccaaggcttgcgagaaggtcatttccgtgggtcaaacggtcatcacgaagcatcggaacacccggtattacagttgcagagtgatggctgtgacatcgcagaccttctatgaggtcatgtttgatgatggctcctttagcagagacacatttcctgaggatatcgtgagccgagactgtctgaagctgggcccacctgctgagggagaagtcgtccaagtcaagtggcccgatggcaaactctatggagcaaaatattttggatcaaatattgcccacatgtaccaggttgagtttgaagatggatcccagatagcaatgaagagagaggacatctacactttagatgaagagttacccaagagagtgaaagctcgattttccacagcctctgacatgcgatttgaagacacgttttatggagcagacattatccaaggggagagaaagagacaaagagtgctgagctccaggtttaagaatgaatatgtggccgaccctgtataccgcacttttttgaagagctctttccagaagaagtgccagaagagacagtagtctgcatacatcgctgcaggccacagagcagcttgggttggaagagagaagatgaagggacatccttggggctgtgccgtgagttttgctggcataggtgacagggtgtgtctctgacagtggtaaatcgggtttccagagtttggtcaccaaaaatacaaaatacacccaatgaattggacgcagcaatctgaaatcatctctagtcttgctttcacttgtgagcagttgtcttctatgatcccaaagaagttttctaagtgaaaggaaatactagtgaatcacccacaaggaaaagccactgccacagaggaggcgggtccccttgtgcggcttagggccctgtcaggaaacacacggggacctctctctctagctccagcaggtggcacctcggtacccagcgggtagggcgataatttatatattttccacagtcagggaaggactctcacttatttgtttcaaattgcagtttttataaaacatttttaaaacacaaatggcatgtatgctaatgagatttacccgtgtgctatctgtatttcccttgtacagaacttttacatttttgaatattcctattacttttgattgtgtctgatgggaactgagttgttggcctttgtgaaatgaaatttttggctcttgagaaagaattcttatgaattgttatgcgaattttatatatttaaagagggagatctggggctgttatttttaaacactttttttcataatacatattccgagtagatatttataaaatatatgtttctttcattatgtgtttgtaaaattagagtttaaataaatatgctttgatgcatagttttgaactaatgtaacatgatttttcttttttaaaacagcctgaaaatgtactagtgtttaaaaataaagatttccattttctcca

SEQ ID NO: 184098 - DNA, 3039 bp, Artificial Sequence
  derived and/or modified sequence
gctcatgctgctttcaatctcctggcatcaagcagtcctcccaccttggcctcccgaagttctggtacaagtgggagccaccatgcctgggcagaccctcagttctaaaaccgtcttggcttgtttaccatcagcccttcaccgtttcagaaagatgctgttcggagaacttgcacttgcaggaaagacatggtgaagatttcaatggatatctttgtgaggaaatttcagccagacagatatcagctttggaaacaaggaaaggatatatacaccattgatcacacgaagcctactccagcatccacccctgaagtaaaagcatggctgcagaggaggaggaaagtaagaaaagcatcccgaagcttccagtgtgctaggtctacctctaaaaggcctaaggctgatgaggaagaggaagtgtcagatgaagtcgatggggcagaggtccctaaccccgactcagtcacagatgacctcaaggtcagtgaaaagtcagaagcagcagtgaagctgaggaacacagaagcatcttcagaagaagagtcatctgctagcaggatgcaggtggagcagaatttatcagatcatatcaaactctcaggaaacagctgcttaagtacatctgtaacagaagacataaaaactgaggatgacaaagcttatgcatatagaagtgtaccttctatatccagtgaggctgatgattccattccattgtctagtggctatgagaagcccgagaaatcagacccatccgagctttcatggccaaagtcacctgagtcatgctcatcagtggcagagagtaatggtgtgttaacagagggagaagagagtgatgtggagagccatgggaatggccttgaacctggggaaatcccagcggtccccagtggagagagaaatagcttcaaagtccccagtatagcagagggagagaacaaaacctctaagagttggcgccatccacttagcaggcctccagcaagatctccgatgactcttgtgaagcagcaggcgccaagtgatgaagaattgcctgaggttctgtccattgaggaggaagtggaagaaacagagtcttgggcgaaacctctcatccacctttggcagacgaagtcccctaacttcgcagctgagcaagagtataatgcaacagtggccaggatgaagccacactgtgccatctgcactctgctcatgccgtaccacaagccagatagcagcaatgaagaaaatgatgctagatgggagacaaaattagatgaagtcgttacatcggagggaaagactaagcccctcataccagagatgtgttttatttatagtgaagaaaatatagaatattctccacccaatgccttccttgaagaggatggaacaagtctccttatttcctgtgcaaagtgctgcgtacgggttcatgcaagttgttatggtattccttctcatgagatctgtgatggatggctgtgtgcccggtgcaaaagaaatgcgtggacagcagaatgctgtctctgcaatttgagaggaggtgctcttaagcaaacgaagaacaataagtgggcccatgtcatgtgcgccgttgcggtcccagaagttcgattcactaatgtcccagaaaggacacaaatagatgtaggcagaatacctttacagaggttaaaattgaaatgcatcttctgcagacaccgggttaagagggtctctggagcctgcatccagtgttcctacggtcgctgcccggcctccttccatgtcacttgtgcccatgctgctggggtactgatggagcctgatgactggccttatgtggtgaacattacatgctttcgacataaggtcaaccccaacgtgaagtccaaggcttgcgagaaggtcatttccgtgggtcaaacggtcatcacgaagcatcggaacacccggtattacagttgcagagtgatggctgtgacatcgcagaccttctatgaggtcatgtttgatgatggctcctttagcagagacacatttcctgaggatatcgtgagccgagactgtctgaagctgggcccacctgctgagggagaagtcgtccaagtcaagtggcccgatggcaaactctatggagcaaaatattttggatcaaatattgcccacatgtaccaggttgagtttgaagatggatcccagatagcaatgaagagagaggacatctacactttagatgaagagttacccaagagagtgaaagctcgattttccacagcctctgacatgcgatttgaagacacgttttatggagcagacattatccaaggggagagaaagagacaaagagtgctgagctccaggtttaagaatgaatatgtggccgaccctgtataccgcacttttttgaagagctctttccagaagaagtgccagaagagacagtagtctgcatacatcgctgcaggccacagagcagcttgggttggaagagagaagatgaagggacatccttggggctgtgccgtgagttttgctggcataggtgacagggtgtgtctctgacagtggtaaatcgggtttccagagtttggtcaccaaaaatacaaaatacacccaatgaattggacgcagcaatctgaaatcatctctagtcttgctttcacttgtgagcagttgtcttctatgatcccaaagaagttttctaagtgaaaggaaatactagtgaatcacccacaaggaaaagccactgccacagaggaggcgggtccccttgtgcggcttagggccctgtcaggaaacacacggggacctctctctctagctccagcaggtggcacctcggtacccagcgggtagggcgataatttatatattttccacagtcagggaaggactctcacttatttgtttcaaattgcagtttttataaaacatttttaaaacacaaatggcatgtatgctaatgagatttacccgtgtgctatctgtatttcccttgtacagaacttttacatttttgaatattcctattacttttgattgtgtctgatgggaactgagttg

SEQ ID NO: 184099 - DNA, 3144 bp, Artificial Sequence
  derived and/or modified sequence
atggaagtggccgaagtggagtcccccctcaacccatcgtgcaaaatcatgacttttcgacccagcatggaggaattccgcgagtttaacaagtatctagcttacatggagtcaaagggggcccacagggccgggctggctaaagtaatccctccgaaagaatggaagccacgacagtgttacgatgatatcgataaccttctgatccccgcccctattcaacaaatggtcaccgggcagagtggtttgttcacacagtataacatccagaagaaagctatgacagtcaaggaattcaggcagctggcaaatagcggcaagtattgtactcccaggtacctcgactacgaggatttggagcgcaagtactggaagaatctaacttttgtggcgccgatctacggggccgacattaacggatcgatctacgacgaaggcgtggacgagtggaacattgcaaggctgaataccgtgcttgatgtcgtcgaggaggaatgcgggatttcaattgagggggtcaatacgccctatctgtattttggaatgtggaaaacaacattcgcctggcataccgaggatatggacctgtactctatcaactatctgcacttcggagaacctaaatcatggtatgcaatcccacctgagcatggcaaaagactggagcggttagcgcagggcttttttccctcgagctcccagggctgcgacgcattcctgcgccacaaaatgactctgatctctcctagcgttctcaagaaatacggtattccgttcgacaagataactcaggaagctggggagttcatgatcactttcccatacgggtatcacgccggattcaatcacggcttcaattgcgctgagtccaccaacttcgccactgtacgctggatagattatggtaaggtggctaagctttgcacctgccgcaaggatatggtcaagatttcaatggatatcttcgttcgcaagtttcagccagacagataccagctctggaaacagggaaaagacatctacaccatagaccacaccaagccgactcctgccagcacccctgaggtgaaggcatggcttcagcgtcgtcgcaaggtgcggaaagccagcaggtcatttcagtgcgctagatctacttccaagcggcctaaggcagacgaggaggaagaagtgtctgacgaggtggacggagctgaagttcctaatcctgactccgttacagacgatttaaaggtgtctgaaaaatctgaggctgccgtgaagctgcgaaacacagaggcctcaagtgaggaagagagctcggcctcccgcatgcaggtcgagcagaatttgtcagaccacattaagctgagcggaaactcctgtttgtcaacttccgtcacagaggacataaaaactgaggacgataaggcctatgcttaccgtagtgtcccatcaattagcagcgaagccgatgactccattccactgtcctcgggttacgagaaacccgagaaatcagacccctctgagctgagctggcctaagtcacctgaatcttgctcgagcgttgcagagtcaaatggagtgctgactgaaggtgaagaatccgacgtggagtcccacggaaacgggctcgaacctggagagatccccgccgttccctcgggagagaggaatagctttaaggtcccctctattgctgagggagagaacaagacatcaaaatcatggcgacatccgctctcccgaccccctgctcgctccccaatgacccttgtaaagcagcaagctccgagcgacgaggagctgccagaagtactttccattgaggaggaggtggaggagactgagtcatgggccaaacccctgatccatctttggcagaccaaaagccccaactttgccgctgagcaagagtataacgcaaccgtggcccgcatgaagccacattgcgccatatgtacgctgttgatgccttatcataagcccgacagctcaaacgaggagaatgacgcgcggtgggagacaaaattagacgaggtggtaacctctgagggtaaaactaagccgctcatcccagaaatgtgttttatttactccgaggagaacatcgaatattccccacccaatgcttttctggaggaagatggtacctctctgctcatctcttgcgcaaaatgctgcgtccgggtacacgctagttgttacggcatcccttcccatgagatctgcgacggatggttatgtgccaggtgcaaacgcaacgcctggaccgcagagtgctgtttgtgtaatttaagaggcggcgccctgaaacagaccaaaaataataaatgggcacatgtcatgtgcgcagtggccgttcccgaagtgcgctttacaaatgtccctgaacgaacgcagattgacgttgggcgaatcccgctgcaacgcttgaagctgaaatgcatattctgtcggcatagagtcaagagagttagcggagcctgcatccagtgctcatacgggagatgtccagcatcgttccacgtgacgtgcgcccatgctgccggggtgctgatggaaccggacgactggccctacgtggtaaatatcacttgttttcgccataaagtcaacccgaacgtaaaaagcaaggcatgtgagaaggtgatttcagtggggcagaccgtcattaccaaacaccgaaatacccggtattatagttgccgagttatggcagttactagtcaaaccttctacgaagtcatgtttgacgacggatctttcagcagggacactttcccggaagatatagtttcacgggattgcctcaagctgggacctccagcagaaggcgaggtggtgcaagttaagtggccagatggcaaactgtacggcgccaagtactttggatctaatattgcacacatgtatcaagtggagttcgaggatggctcccagattgccatgaaacgagaagatatttatacgctggatgaggaactacctaaacgcgtgaaagcaagattcgtgtccgctgggcgctgtcatctgggcacctgtcaagtcaattctctgagttccccgcacgtctcccaggctcagcaggagacatacttaggtttctggatcaatagcaaaaagtcccagtgtaacatttttctttctggaacgtactag

SEQ ID NO: 184100 - DNA, 3171 bp, Artificial Sequence
  derived and/or modified sequence
atggaggttgccgaggtggaaagcccactgaaccctagctgtaagatcatgacttttcgcccaagcatggaggaatttagagagttcaacaagtatctcgcgtacatggaatcgaagggggcccatagagccggactggccaaagtgataccccccaaagaatggaaaccccgtcagtgttatgacgatatcgacaacttactgattcccgcccccatacagcagatggtgaccgggcagagcggactctttactcagtacaatatccaaaagaaggctatgacagtgaaggaattccgccagctggccaactctggcaaatactgtacacctcggtacttggattacgaggatctagagcgaaaatactggaagaatctgaccttcgtcgcgccgatatatggggctgatatcaacggctctatatacgacgaaggagttgatgagtggaatattgctaggttgaacaccgtactggacgttgtggaagaagaatgtggaatctccattgagggcgttaatactccttacctgtatttcggaatgtggaaaaccacatttgcctggcacaccgaagacatggacctctactccattaattatctccatttcggggagcctaagagttggtatgccattcccccggaacacggaaaacgcctggaacggctcgcacaaggattttttccttcttcaagccagggttgcgacgccttcttaagacataagatgactctaatctctccaagtgtactaaaaaaatatggcatacccttcgataaaatcacacaggaagccggagagttcatgatcaccttcccctatggctatcatgccggatttaaccacggattcaattgtgctgagagcaccaattttgcaactgtgagatggatcgactatggcaaagtcgcaaagctttgtacatgtaggaaggacatggttaagatttccatggacatattcgtacgcaaatttcagccagaccggtaccaattgtggaagcaagggaaggacatatataccatcgatcatactaaacctacccccgcaagtacccccgaggtcaaagcttggctgcagagaagacggaaggttcgcaaggcctcacgcagctttcaatgtgctcgctccacatccaagcgcccaaaggcggacgaggaggaggaggtgtccgacgaggtggacggcgctgaagtgccaaaccccgatagtgttacagacgacctaaaggtgtcggagaaatccgaggccgcagttaagttaaggaatacagaggcatcgagcgaagaagaaagcagtgcttcccgcatgcaggtcgagcaaaatttgtctgaccatatcaaattatcgggaaatagctgtctgagtacatctgtgacagaagacattaaaacggaagatgacaaagcctacgcttaccgctccgtcccttcgatttcaagtgaagccgatgactccataccgctatccagtggctacgaaaaaccagagaagagcgacccaagtgagctgagctggccaaagagtcccgagtcttgcagtagtgtagctgaatcaaatggtgtcctaaccgaaggcgaagaatcggatgttgaatctcatggaaacggcctcgaacccggggaaatccccgcagtgcccagtggcgagagaaacagttttaaggtaccttcaattgctgaaggagagaacaaaacatcaaaaagctggcggcaccctctatctaggcctcccgccaggagccccatgactttagtgaagcaacaggcaccgtctgatgaggaacttcctgaagttctttctatcgaagaggaggtcgaggaaaccgaaagttgggccaaacctctgatccatctgtggcagacaaagtcgccgaacttcgctgcggagcaggagtataatgcaacagtggcccggatgaaacctcattgtgcaatctgtactctcctcatgccctaccataagccagatagctccaacgaagaaaacgacgccagatgggaaacaaagcttgacgaggtcgtaacttccgaggggaaaaccaaaccacttattccagagatgtgttttatttactcggaagaaaacatcgagtactcccctcccaacgcttttctcgaagaagacgggacctctcttctcatctcatgcgcaaaatgctgtgttagggtgcacgcctcctgctacggaatccctagtcacgaaatttgtgacgggtggctctgtgccagatgcaaacgaaatgcctggactgctgaatgctgtctgtgtaatttgagagggggtgccctgaagcagaccaagaacaacaagtgggcacacgtgatgtgcgccgttgccgtcccagaggtgaggttcaccaatgtaccagagagaacccagatcgacgttgggcggatccccttacaacgcctaaagctaaaatgtattttttgcagacaccgggtcaaaagagtctccggtgcttgtatacaatgctcctacggccgttgtcctgccagttttcacgtgacgtgcgcgcacgccgccggggtattgatggaacctgatgactggccatatgtagttaacatcacgtgtttcaggcacaaggtcaacccaaatgtaaagtctaaagcatgcgagaaagtgatatcagttgggcagactgtcatcaccaagcaccgaaatacccgctactatagttgcagggtaatggctgtgacgagccagactttttacgaggttatgtttgacgatggatcattcagccgagatacattccctgaagacatcgtgagccgcgattgtctgaaacttggccctccagctgagggggaggtggttcaggtcaaatggccggacggaaaactgtacggagcaaaatatttcgggtctaatatcgcccacatgtaccaggtggagttcgaagacgggtcccaaattgctatgaagcgcgaagacatatacacgctggacgaggagttacctaaaagagtaaaagcccgcttttctacagctagtgacatgcggtttgaggataccttctacggggcagatatcatccaaggggagaggaagaggcaacgggttctgtcatctcgattcaaaaatgagtacgtcgccgaccccgtctacaggacatttctgaaatcaagtttccagaaaaagtgccaaaagcgccagtag

SEQ ID NO: 184101 - DNA, 2232 bp, Artificial Sequence
  derived and/or modified sequence
atggtgaaaatctctatggacattttcgtgagaaagttccagccggaccgataccaattatggaagcagggcaaagacatttataccattgaccataccaagcctacccccgccagcacgcccgaggtaaaggcatggcttcagaggcgccggaaggtaaggaaagccagcagaagtttccagtgtgcccgttcaaccagcaaaagaccaaaggccgatgaggaggaggaggtatctgatgaggttgatggcgccgaggtgccaaacccagacagtgtaaccgatgacctaaaggtaagcgagaagagcgaagcggccgtgaagcttaggaataccgaggccagcagcgaagaggagagtagcgcatctcggatgcaggtggaacagaacctgtctgaccacataaagctgtccgggaacagctgtctgagcacatccgtcaccgaggacattaagacggaggacgacaaggcttacgcttaccgttccgtccccagcatctcatctgaggctgacgatagcatccccctctctagcggatacgaaaagcccgagaaatcggatccttccgaactgtcatggcctaagtctcctgaatcctgcagtagcgtggccgaaagcaacggcgtcttaactgaaggcgaagaaagtgacgtggaatcacatggtaacggattggagccaggcgaaattccagcagtcccatcaggtgagcgcaactctttcaaagtgccctcaattgctgagggggaaaataaaacaagcaaatcctggcggcacccattgtctcgacctcccgcgcgctcaccaatgaccctggtgaagcagcaggcaccatctgatgaggagttgcctgaggtgctgagcatcgaagaagaagtggaagagacagaaagctgggccaagccactcatacacttatggcagacaaagtctcctaattttgccgctgagcaagagtataatgccacagtggctcggatgaagcctcactgcgcgatctgtaccttgcttatgccatatcataaacccgatagtagcaatgaggaaaatgatgcccgctgggagacgaagctggatgaggtggtaactagcgaaggtaagaccaagccgttaatacccgagatgtgctttatttattcagaggagaacatcgagtattcccccccaaacgcattcctcgaggaggatgggacctcacttctcatttcctgcgctaagtgttgcgtgcgtgtgcatgcgtcttgctacgggatccctagccacgagatttgcgatggctggttatgcgcgagatgtaagcgaaacgcctggaccgcagagtgttgtctctgcaacctccgggggggggccctgaagcagaccaaaaataacaagtgggctcacgtgatgtgcgctgtggccgtcccagaagttcgattcactaacgtgcccgagcgaacccagatagatgttgggagaattccattgcagcggctgaagcttaagtgtatattctgccggcatcgtgtgaaacgggtgtcgggcgcttgtatccagtgtagctatggccggtgtccagccagcttccatgtcacttgcgcacacgccgcgggtgtgctgatggagcctgacgattggccctatgtggtaaatatcacttgttttcgacataaggtgaacccaaatgtcaagtctaaggcttgcgagaaggtgatcagcgtcggccaaacagtgataacgaagcaccggaacactagatattattcctgtagggtgatggccgtgaccagtcagactttctacgaggtgatgtttgacgatggttctttctcccgggatactttcccggaagatatcgtgtctcgggattgcctaaagttgggcccccctgcagagggcgaggttgtccaagtcaagtggcctgatggaaagctgtacggcgctaagtacttcggcagtaatatagcacatatgtatcaagttgagtttgaggacgggagtcagatcgccatgaagagagaggacatctatacgctcgatgaggaactccctaagcgagtcaaagcccggtttagcaccgccagcgatatgcgcttcgaggatacattctatggcgcagacatcatacaaggtgagcggaagaggcaaagagtcctgtcttcccgatttaagaatgagtatgtagcagaccccgtctatcgcactttcctgaagtcatcttttcaaaagaagtgccagaaaaggcagtag

SEQ ID NO: 184102 - DNA, 3144 bp, Artificial Sequence
  derived and/or modified sequence
atggaggtggccgaggtggagagccccctgaaccccagctgcaagatcatgaccttccggcccagcatggaggagttccgggagttcaacaagtacctggcctacatggagagcaaaggagcccaccgggccggcctggccaaggtgattcctcccaaggagtggaagccccggcagtgctatgatgacatcgacaacctgctgatcccagcccccatccagcagatggtgacaggccagagcggcctcttcacccagtacaacatccagaagaaggccatgacagtgaaggagttccggcagctggccaacagcggcaagtactgcaccccccgctacctggactatgaggacctggagaggaagtactggaagaacctgacctttgtggcccccatctacggggctgacatcaatggcagcatctatgatgagggcgtggatgagtggaacatcgcccggctgaacacagtgctggatgtggtggaggaggagtgtggcatcagcattgagggcgtgaacaccccctacctgtacttcggcatgtggaagaccacctttgcctggcacacagaggacatggacctgtacagcatcaactacctgcactttggagagcccaagtcctggtacgccatccccccagagcacggcaagaggctggagcggctggcccagggcttcttccccagcagcagccagggctgtgatgccttcctgcggcacaagatgaccctcatcagccccagcgtgctgaagaagtatggcatcccctttgacaagatcacccaggaggccggggagttcatgatcaccttcccctacggctaccacgccggcttcaaccacggcttcaactgtgccgagagcaccaactttgccaccgtgcgctggattgattatggcaaggtggccaagctgtgcacctgcaggaaggacatggtgaagatctccatggacatctttgtgaggaagttccagcctgaccgctaccagctgtggaagcagggcaaggacatctacaccatcgaccacaccaagcccaccccagccagcaccccagaggtgaaggcctggctgcagaggaggaggaaggtgaggaaggccagccgctccttccagtgtgcccggagcaccagcaagaggcccaaggcagatgaggaggaggaggtgtctgatgaggtggatggagctgaggtgcccaacccagattctgtgacagatgacctgaaggtgtctgagaagtctgaggccgctgtgaagctgaggaacacagaggccagcagcgaggaggagagcagcgccagcaggatgcaggtggagcagaacctgagtgaccacatcaagctgagcggcaacagctgcctgagcacctctgtgacagaggacatcaagacagaagatgacaaggcctatgcctacagatctgtgcccagcatcagcagcgaggctgatgacagcatccccctgagcagcggctatgagaagccagagaagagtgaccccagcgagctgtcctggcccaagagccctgagagctgcagctctgtggccgagagcaatggagtgctgacagaaggagaggagagtgatgtggagagccatggaaatggcctggagcctggagagatcccagctgtgcccagcggggagaggaacagcttcaaggtgcccagcattgctgagggggagaacaagaccagcaagtcctggaggcaccccctgagccggcccccagcccggagccccatgaccctggtgaagcagcaggcccccagtgatgaggagctgcctgaggtgctgagcattgaggaggaggtggaggagacagagagctgggccaagcccctcatccacctgtggcagaccaagagccccaactttgctgctgagcaggagtacaatgccaccgtggccaggatgaagccccactgtgccatctgcaccctgctgatgccctaccacaagccagacagcagcaatgaagaaaatgatgcccgctgggagaccaagctggatgaggtggtgaccagcgagggcaagaccaagcccctcatccctgagatgtgcttcatctacagcgaggagaacatcgagtacagccccccaaatgccttcctggaggaggatggcaccagcctgctgatcagctgtgccaagtgctgcgtgcgggtgcacgccagctgctacggcatccccagccatgagatctgtgatggctggctgtgtgcccgctgcaagagaaatgcctggacagctgagtgctgcctgtgcaacctgcggggcggggccctgaagcagaccaagaacaacaagtgggcccacgtgatgtgtgctgtggccgtgcctgaggtgcgcttcaccaacgtgcctgagaggacccagattgatgtgggccgcatccccctgcagaggctgaagctgaagtgcatcttctgccgccaccgggtgaagagggtgtctggggcctgcatccagtgcagctatggccgctgcccagccagcttccacgtgacctgtgcccatgctgctggggtgctgatggagccagatgactggccctacgtggtgaacatcacctgcttccgccacaaggtgaaccccaacgtgaagagcaaggcctgtgagaaggtgatctctgtgggccagaccgtcatcaccaagcacaggaacacccgctactacagctgccgggtgatggctgtgaccagccagaccttctatgaggtgatgtttgatgatggcagcttcagccgggacaccttccctgaggacatcgtgtcccgggactgcctgaagctgggccccccagctgagggggaggtggtgcaggtgaagtggccagatggcaagctgtatggagccaagtacttcggcagcaacatcgcccacatgtaccaggtggagtttgaagatggcagccagatcgccatgaagcgggaggacatctacaccctggatgaggagctgcccaagagggtgaaggccaggtttgtgtctgctggccgctgccacctgggcacctgccaggtgaacagcctgagcagcccccacgtgtcccaggcccagcaggagacctacctgggcttctggatcaacagcaagaagagccagtgcaacatcttcctgagcggcacctactag

SEQ ID NO: 184103 - DNA, 3171 bp, Artificial Sequence
  derived and/or modified sequence
atggaggtggccgaggtggagagccccctgaaccccagctgcaagatcatgaccttccggcccagcatggaggagttccgggagttcaacaagtacctggcctacatggagagcaaaggagcccaccgggccggcctggccaaggtgattcctcccaaggagtggaagccccggcagtgctatgatgacatcgacaacctgctgatcccagcccccatccagcagatggtgacaggccagagcggcctcttcacccagtacaacatccagaagaaggccatgacagtgaaggagttccggcagctggccaacagcggcaagtactgcaccccccgctacctggactatgaggacctggagaggaagtactggaagaacctgacctttgtggcccccatctacggggctgacatcaatggcagcatctatgatgagggcgtggatgagtggaacatcgcccggctgaacacagtgctggatgtggtggaggaggagtgtggcatcagcattgagggcgtgaacaccccctacctgtacttcggcatgtggaagaccacctttgcctggcacacagaggacatggacctgtacagcatcaactacctgcactttggagagcccaagtcctggtacgccatccccccagagcacggcaagaggctggagcggctggcccagggcttcttccccagcagcagccagggctgtgatgccttcctgcggcacaagatgaccctcatcagccccagcgtgctgaagaagtatggcatcccctttgacaagatcacccaggaggccggggagttcatgatcaccttcccctacggctaccacgccggcttcaaccacggcttcaactgtgccgagagcaccaactttgccaccgtgcgctggattgattatggcaaggtggccaagctgtgcacctgcaggaaggacatggtgaagatctccatggacatctttgtgaggaagttccagcctgaccgctaccagctgtggaagcagggcaaggacatctacaccatcgaccacaccaagcccaccccagccagcaccccagaggtgaaggcctggctgcagaggaggaggaaggtgaggaaggccagccgctccttccagtgtgcccggagcaccagcaagaggcccaaggcagatgaggaggaggaggtgtctgatgaggtggatggagctgaggtgcccaacccagattctgtgacagatgacctgaaggtgtctgagaagtctgaggccgctgtgaagctgaggaacacagaggccagcagcgaggaggagagcagcgccagcaggatgcaggtggagcagaacctgagtgaccacatcaagctgagcggcaacagctgcctgagcacctctgtgacagaggacatcaagacagaagatgacaaggcctatgcctacagatctgtgcccagcatcagcagcgaggctgatgacagcatccccctgagcagcggctatgagaagccagagaagagtgaccccagcgagctgtcctggcccaagagccctgagagctgcagctctgtggccgagagcaatggagtgctgacagaaggagaggagagtgatgtggagagccatggaaatggcctggagcctggagagatcccagctgtgcccagcggggagaggaacagcttcaaggtgcccagcattgctgagggggagaacaagaccagcaagtcctggaggcaccccctgagccggcccccagcccggagccccatgaccctggtgaagcagcaggcccccagtgatgaggagctgcctgaggtgctgagcattgaggaggaggtggaggagacagagagctgggccaagcccctcatccacctgtggcagaccaagagccccaactttgctgctgagcaggagtacaatgccaccgtggccaggatgaagccccactgtgccatctgcaccctgctgatgccctaccacaagccagacagcagcaatgaagaaaatgatgcccgctgggagaccaagctggatgaggtggtgaccagcgagggcaagaccaagcccctcatccctgagatgtgcttcatctacagcgaggagaacatcgagtacagccccccaaatgccttcctggaggaggatggcaccagcctgctgatcagctgtgccaagtgctgcgtgcgggtgcacgccagctgctacggcatccccagccatgagatctgtgatggctggctgtgtgcccgctgcaagagaaatgcctggacagctgagtgctgcctgtgcaacctgcggggcggggccctgaagcagaccaagaacaacaagtgggcccacgtgatgtgtgctgtggccgtgcctgaggtgcgcttcaccaacgtgcctgagaggacccagattgatgtgggccgcatccccctgcagaggctgaagctgaagtgcatcttctgccgccaccgggtgaagagggtgtctggggcctgcatccagtgcagctatggccgctgcccagccagcttccacgtgacctgtgcccatgctgctggggtgctgatggagccagatgactggccctacgtggtgaacatcacctgcttccgccacaaggtgaaccccaacgtgaagagcaaggcctgtgagaaggtgatctctgtgggccagaccgtcatcaccaagcacaggaacacccgctactacagctgccgggtgatggctgtgaccagccagaccttctatgaggtgatgtttgatgatggcagcttcagccgggacaccttccctgaggacatcgtgtcccgggactgcctgaagctgggccccccagctgagggggaggtggtgcaggtgaagtggccagatggcaagctgtatggagccaagtacttcggcagcaacatcgcccacatgtaccaggtggagtttgaagatggcagccagatcgccatgaagcgggaggacatctacaccctggatgaggagctgcccaagagggtgaaggcccgcttcagcacagccagtgacatgagatttgaggacaccttctatggagctgacatcatccagggcgagaggaagaggcagagggtgctgagcagccgcttcaagaatgaatatgtggccgaccctgtgtaccgcaccttcctgaagagcagcttccagaagaagtgccagaagaggcagtag

SEQ ID NO: 184104 - DNA, 2232 bp, Artificial Sequence
  derived and/or modified sequence
atggtgaagatctccatggacatctttgtgaggaagttccagcctgaccgctaccagctgtggaagcagggcaaggacatctacaccatcgaccacaccaagcccaccccagccagcaccccagaggtgaaggcctggctgcagaggaggaggaaggtgaggaaggccagccgctccttccagtgtgcccggagcaccagcaagaggcccaaggcagatgaggaggaggaggtgtctgatgaggtggatggagctgaggtgcccaacccagacagcgtgacagatgacctgaaggtgtctgagaagtctgaggccgctgtgaagctgaggaacacagaggccagcagcgaggaggagagcagcgccagcaggatgcaggtggagcagaacctgagtgaccacatcaagctgagcggcaacagctgcctgagcacctctgtgacagaggacatcaagacagaagatgacaaggcctatgcctacagatctgtgcccagcatcagcagcgaggctgatgacagcatccccctgagcagcggctatgagaagccagagaagagtgaccccagcgagctgtcctggcccaagagccctgagagctgcagctctgtggccgagagcaatggagtgctgacagaaggagaggagagtgatgtggagagccacggcaatggcctggagcccggggagatcccagctgtgcccagcggggagagaaattccttcaaggtgcccagcattgctgaaggagagaacaagaccagcaagtcctggaggcaccccctgagccggcccccagcccggagccccatgaccctggtgaagcagcaggcccccagtgatgaggagctgcctgaggtgctgagcattgaggaggaggtggaggagacagagagctgggccaagcccctcatccacctgtggcagaccaagagccccaactttgctgctgagcaggagtacaatgccaccgtggccaggatgaagccccactgtgccatctgcaccctgctgatgccctaccacaagccagacagcagcaatgaggagaatgatgcccgctgggagaccaagctggatgaggtggtgaccagcgagggcaagaccaagcccctcatccctgagatgtgcttcatctacagtgaagaaaatattgagtacagccccccaaatgccttcctggaggaggatggcaccagcctgctgatcagctgtgccaagtgctgcgtgcgggtgcacgccagctgctacggcatccccagccatgagatctgtgatggctggctgtgtgcccgctgcaagagaaatgcctggacagctgagtgctgcctgtgcaacctgcggggcggggccctgaagcagaccaagaacaacaagtgggcccacgtgatgtgtgctgtggccgtgcctgaggtgcgcttcaccaacgtgcctgagaggacccagattgatgtgggccgcatccccctgcagaggctgaagctgaagtgcatcttctgccgccaccgggtgaagagggtgtctggggcctgcatccagtgcagctatggccgctgcccagccagcttccacgtgacctgtgcccacgccgccggcgtgctgatggagccagatgactggccctacgtggtgaacatcacctgcttccgccacaaggtgaaccccaacgtgaagagcaaggcctgtgagaaggtgatctctgtgggccagaccgtcatcaccaagcacaggaacacccgctactacagctgccgggtgatggctgtgaccagccagaccttctatgaggtgatgtttgatgatggcagcttcagccgggacaccttcccagaagatattgtgtcccgggactgcctgaagctgggccccccagctgagggggaggtggtgcaggtgaagtggccagatggcaagctgtatggagccaagtacttcggcagcaacatcgcccacatgtaccaggtggagtttgaagatggcagccagatcgccatgaagcgggaggacatctacaccctggatgaggagctgcccaagagggtgaaggcccgcttcagcacagccagtgacatgagatttgaggacaccttctacggggctgacatcatccagggcgagaggaagaggcagagggtgctgagcagccgcttcaagaatgaatatgtggccgaccctgtgtaccgcaccttcctgaagagcagcttccagaagaagtgccagaagaggcagtag

SEQ ID NO: 184105 - DNA, 3144 bp, Artificial Sequence
  derived and/or modified sequence
atggaggtggccgaggtggagagccccctgaaccccagctgcaagattatgacttttagaccaagcatggaggaatttagagagttcaataagtaccttgcttacatggagagcaagggagcccatagggccgggctcgcgaaggtaattccaccaaaggagtggaaacctcggcagtgctatgatgatatcgacaatctgttaatcccagctccaattcaacaaatggtcacaggacaatccggcctgttcacccagtacaatattcagaaaaaggctatgactgtgaaggaattccggcagctcgctaatagcgggaagtattgcacccctcgctacctagattatgaggatctggaacggaaatattggaagaatctgacttttgtagcccctatttacggagcggatattaacgggagcatttacgacgagggagtagatgagtggaacatagcgcgcctgaatactgttcttgacgtagtcgaggaggaatgcgggatttcaatcgagggggttaacacaccgtatctatattttggaatgtggaaaaccaccttcgcgtggcacactgaggacatggatctgtattccatcaattacctccatttcggggaacccaagagctggtacgccatcccccccgagcacggtaagcggttggagagattagcgcagggcttcttccccagctccagtcaagggtgcgacgcttttctgaggcataaaatgactttgatcagcccttcagtcctgaaaaagtatggaattccattcgacaagattacgcaagaggctggcgagttcatgatcacttttccatacggctatcacgctggcttcaatcacggattcaattgcgccgaatccaccaacttcgccaccgtcaggtggatcgactatggcaaagtggctaaactctgcacgtgccggaaagacatggtcaaaatctcaatggatatatttgtgcgaaagttccaacctgaccgctaccagctttggaagcagggcaaggatatttacacgattgaccatacaaaacccacccccgccagcaccccggaagtcaaagcctggctgcagagacggcgaaaggtccgaaaagcaagcaggagcttccagtgtgcccgcagcacaagtaaacggcccaaagcagatgaggaagaggaagtctcagatgaagtggacggggcagaggtgcctaatcccgacagtgtgacagacgacttaaaggtgagtgaaaagtccgaggctgctgtgaagcttagaaatacagaggcttcttcggaagaggaatcatccgctagcagaatgcaagtcgaacaaaatctgagcgatcacatcaagttgagtggtaactcctgcctgagcactagcgtcactgaggatataaaaacagaggatgacaaagcatacgcctacagatctgtcccgagtattagcagtgaagccgacgattctatccccctctcaagtggctatgaaaaacccgaaaaatcagacccctccgaactttcatggcccaagtctcccgaaagttgctcttcagtggcagaaagcaacggagtccttacagagggagaggagagcgatgtggaatcccacggaaacggccttgaacccggtgagatacccgccgtcccctccggagaacgcaactcatttaaagtgccaagcattgctgagggggagaacaagacctcaaagtcttggcggcaccctctgtcccgacctccagctcgctctcccatgactctggtcaagcagcaggccccatccgatgaggagctgccagaggtgctgagcatcgaggaggaggtggaggagacagagagttgggcaaagcccctgatacatctgtggcagaccaaaagccctaatttcgccgccgagcaggaatataatgccaccgtggctcgaatgaaaccccactgtgccatttgcaccttgctgatgccctatcataaaccggactcatcaaatgaggaaaatgacgcacggtgggagacgaagctcgacgaagtggtgacctccgaaggaaagaccaagcccttgattccggagatgtgttttatatattctgaagagaacatagaatactctccgcctaacgcctttctagaggaagatggaacctctctgctaatcagctgcgctaaatgttgcgtccgggtacacgcttcctgctacggcattcctagccatgagatctgtgatggctggctgtgcgccaggtgcaaaagaaacgcctggactgccgaatgttgcttgtgcaatctgcgcgggggagcactgaaacagactaaaaacaataagtgggctcacgttatgtgtgcggttgcagtgcctgaggtccgatttaccaacgttcctgaacgaacccagatcgacgtcggaagaatccctcttcagagactgaagctcaagtgcattttctgcaggcaccgcgtgaaacgcgtcagcggtgcatgcattcagtgtagctacggacggtgtccagccagcttccacgtcacctgtgcgcatgccgcgggggttctcatggagcctgacgattggccctacgtcgtgaacattacctgcttccggcacaaagttaatccaaacgtgaaatcgaaggcttgcgagaaggtgattagcgttgggcagacagtgatcacaaagcaccggaacacccggtactacagttgccgcgtgatggcggtgacctcccagaccttttacgaggtcatgtttgacgatggctccttcagcagagatacattccccgaggacatagtgagtcgtgactgtctgaaacttggtccacctgcagagggagaggtggtacaagttaagtggccagacggcaagctgtatggggccaagtatttcggctctaatattgcgcacatgtatcaggtggagtttgaggacggttctcagatcgccatgaagcgagaggatatctacactctggacgaggaactacccaaacgcgtcaaagctcgtttcgtatctgccggacgatgtcacctgggtacctgccaggtaaactcgcttagttccccccacgtatctcaggcgcaacaagagacctatcttgggttctggatcaactctaagaaatcacagtgtaatattttcctttccggaacctattag

SEQ ID NO: 184106 - DNA, 3171 bp, Artificial Sequence
  derived and/or modified sequence
atggaggtggccgaggtggagagccccctgaaccccagctgcaagatcatgaccttcagaccttctatggaagaattccgggagtttaataagtatttagcttacatggagagcaagggtgcccacagagccggcttagcaaaggtaatacctcccaaggagtggaagccacggcagtgctacgatgatatcgataacctgctaatacccgctcccatacagcagatggttacaggacagtctggcttatttacccagtacaatattcagaaaaaggctatgacagtgaaagagtttcggcagcttgccaactcaggaaagtattgcaccccacgttatctggactacgaggatctggaacggaagtattggaagaacctgacattcgtggcgcccatctatggggccgatatcaatggcagtatatacgatgagggcgtggatgagtggaacatcgctcgactgaacactgttctggacgtggttgaagaagagtgcggcattagtatcgaaggggtgaataccccatatttgtatttcggaatgtggaaaacaacgttcgcgtggcacacggaagacatggacctgtatagcatcaattatctgcacttcggcgagccaaaaagctggtacgctatccccccggagcatggcaagcggcttgaaaggcttgcccagggattcttccctagttctagccaaggatgcgacgcatttttacgccacaaaatgactctgatttctcctagtgtgcttaaaaagtacggtattccctttgataagattacacaggaggctggagagttcatgattaccttcccgtatggataccacgctggattcaaccacggattcaattgcgccgaaagtactaacttcgccacggtccgctggattgactacggcaaggttgccaagttgtgcacctgccggaaagatatggtcaaaattagcatggacatctttgtccgaaagtttcaaccggatagataccaactgtggaagcaaggaaaagatatttacacaatcgatcacactaaaccgacaccagcttcgacacctgaggtgaaggcgtggctgcagaggcgccggaaggtgaggaaggcttccagatccttccagtgcgcaagaagtaccagcaagaggccaaaagctgatgaggaggaggaagtatctgacgaagtcgacggagctgaagttccaaacccagactcagtgacagacgacctgaaggtgagcgaaaagtcagaagctgcagtcaagttgaggaacacagaggcctcttcagaggaggagtcctcagcctcgcgcatgcaggtcgagcaaaatctctccgaccacataaaactatcaggcaattcttgccttagtacttcggttaccgaggacatcaaaactgaggacgacaaagcgtatgcctaccgtagtgttccatcaatctccagcgaagccgacgattccatccctctctcttctggatacgaaaaacctgagaagagcgacccgtcagagctgagctggcctaaaagtccagagtcctgttcatcagtggccgagtctaacggagtgctgacagagggcgaggagtctgatgttgaatcccatggcaatggattggagcccggcgagattcccgcggttcccagcggggagaggaattccttcaaagtgcccagcatcgcagagggcgagaacaaaacttctaagagttggcgccaccctctgagtcgccctcccgcaagaagtcccatgactctcgtgaaacaacaggcgccaagcgatgaagaacttcctgaggtcctttctattgaggaggaggtggaggaaaccgagagctgggccaaaccgctcattcatctctggcaaacgaagtcccccaattttgcagccgagcaggaatataatgcgacagtagcgaggatgaaaccacactgtgccatctgtaccttgttgatgccctatcacaaacccgattccagcaacgaggaaaatgatgctaggtgggagacgaagctcgacgaggtagtgacttctgagggcaagacaaagccacttattcctgagatgtgtttcatttacagtgaagaaaacatcgagtattcaccccccaacgcctttctcgaagaagatggaaccagcctactcataagctgcgctaaatgttgcgtgcgggttcatgcatcctgttatggaattccaagccacgagatctgcgacggatggctctgtgctaggtgcaaacggaacgcttggacagccgagtgctgcctgtgtaacctgcgggggggggcgcttaaacagactaagaataacaagtgggctcacgtgatgtgcgccgttgccgttcccgaagttaggtttaccaacgtgcccgagagaacgcagatcgatgtcggccggatccccctgcagcggctcaagctcaagtgcatcttctgtcgccacagggtaaaacgcgtctcaggcgcttgtattcagtgcagctatggaaggtgcccagcctcctttcacgtgacatgcgcgcatgcggcaggagtcctgatggagccagatgactggccttatgtggtgaatatcacgtgttttaggcacaaagtgaatcccaatgtgaagtctaaggcctgcgagaaagttattagcgtaggtcagaccgtgatcacgaagcataggaatactagatattatagctgtcgagtcatggcggtaacaagccagacattctacgaggttatgttcgatgacgggagctttagcagagatacttttcctgaggatatcgtgtccagggactgcttgaagctcggaccacccgctgaaggcgaagtcgtgcaggtgaagtggccagatgggaaactgtacggcgccaagtattttggatccaacattgctcatatgtatcaggtcgagttcgaggatggctcacaaatagccatgaaacgcgaagatatttacacactggacgaggagcttcctaagagagtcaaagcacgctttagtacagcatccgatatgcgttttgaggataccttctatggagctgatattattcagggggagcggaagcggcagcgggtcctgagctcccggtttaagaacgagtatgtggcagacccagtgtacaggacattccttaagtctagctttcagaagaagtgccaaaagcgacagtag

SEQ ID NO: 184107 - DNA, 2232 bp, Artificial Sequence
  derived and/or modified sequence
atggtgaagatcagcatggacatcttcgtgcggaagttccagcccgatagataccagctgtggaaacagggcaaagacatctatacaattgatcacactaagcccacccctgcaagcactcctgaagtgaaagcatggctccagcgtcgccgcaaggtgcggaaggcctcccgcagttttcaatgcgcacgctctacaagcaagcgacccaaagcggacgaagaggaggaggtatccgacgaggtggacggtgccgaagttccaaatcccgattccgttacggacgacctcaaggtctccgagaaaagcgaagctgctgtcaaactgcggaacacggaggcaagctcagaggaggagtcttccgcctctcgcatgcaggtggaacagaacctgtctgatcatatcaaactttctggtaactcgtgcctgtctacctctgtgacagaggacatcaagaccgaggatgacaaggcatacgcttatagaagtgtgccatccatttcgtccgaggctgacgacagtatcccgctgtccagcggctacgaaaagccagaaaagagcgatccgtccgagctgtcttggcccaagtctcccgagagctgtagttctgtggctgaatccaacggtgttctcaccgagggggaagagtcggatgttgagagccacggaaatggactcgaaccgggtgaaatccccgctgtccccagcggagagaggaattctttcaaggtaccaagcatcgccgaaggggagaacaagaccagcaagtcatggcgacatccactttccaggcctccagccaggtctcctatgaccttagtcaaacagcaagccccatccgacgaggagttacccgaggtcttgagtatagaggaggaggtcgaggagacagagtcttgggcgaaaccattgatccatttgtggcagacaaaatctcctaattttgcggcggaacaggaatataatgccacagtcgccagaatgaagccccactgtgccatatgcacacttctcatgccgtaccacaagccagactcctccaacgaggagaatgatgcgcgatgggagactaaattggatgaggtagtcacaagtgaggggaagacaaagccactcattccagagatgtgctttatttattcagaagagaatatcgagtacagcccgccgaacgccttcttggaggaagatggtacatctctgcttatcagctgtgcaaaatgctgcgttagagtccacgcctcgtgctacggaattccttcccacgagatctgcgacgggtggctctgcgctcggtgtaagcgtaacgcctggaccgctgaatgctgcctctgcaatttacgcgggggagcgctcaagcagacaaagaataataagtgggcccatgtcatgtgtgctgtcgccgttcccgaagtgcgttttacaaacgtgccagagcgaacacagattgacgtgggtagaatccccctccagaggttaaaactgaagtgcatcttttgtcgccatagggttaagcgagtgtcgggggcctgcatacaatgctcttacggtagatgtcccgcaagcttccatgtaacttgcgcccatgctgccggagtgttgatggaaccggacgattggccgtacgtggtgaatatcacctgctttagacataaggttaatccgaacgtgaaatctaaggcctgcgaaaaggtgatctccgtagggcagacagtcattactaaacacagaaacactaggtactactcatgccgggtgatggctgtcacatctcagactttctacgaggtcatgtttgacgatgggtcattcagccgggacacattcccagaggacatcgtgagccgagactgcctgaagctcggacctcccgctgagggcgaagtagtacaggtgaagtggcccgatggaaagctttatggagccaagtacttcggaagcaatatcgcccatatgtatcaggtagaattcgaagatggcagccagatagccatgaagcgagaggacatctataccctggatgaggagctacccaagcgagtgaaggcccgtttcagtaccgcttccgacatgcgattcgaagacacattttacggtgccgacatcatacagggcgagcggaaacggcaaagagtgctgtcatcgcgcttcaaaaacgagtatgttgcagacccagtgtatcgaacgttcctgaagtcatcgtttcagaaaaagtgtcaaaaacgccagtag

SEQ ID NO: 184108 - DNA, 3144 bp, Artificial Sequence
  derived and/or modified sequence
atggaagtagcagaggtggagagcccgctgaacccttcttgtaagatcatgaccttccgccctagcatggaagagttcagggaattcaataagtatctcgcatatatggaatcgaagggcgcacaccgcgctggtctggctaaagtaatccctcctaaagaatggaaacccagacagtgctacgacgacatagacaacctcttaattccggctccaatccagcagatggtaactggccagtctgggctctttacccagtacaacattcagaaaaaggctatgacagttaaagagttccgacagctggcaaattccggcaagtattgtacgcctcgatacctggactatgaggacctggaacggaagtactggaagaatttgaccttcgtagcccctatttatggtgcggatatcaacgggtctatttacgacgagggagtggatgaatggaacatcgctcggcttaataccgtgcttgacgtcgttgaagaagagtgcgggatctccatcgagggtgtgaacactccttacctgtattttggaatgtggaaaactacctttgcttggcataccgaggacatggacctgtatagcatcaattatctgcacttcggcgagccaaagagctggtatgccataccccctgagcacggcaagagactggaacggcttgctcagggttttttccccagctcctcccaggggtgtgacgcatttttaagacacaagatgactttaatcagcccctctgtgttgaaaaagtatgggatccccttcgacaagatcacgcaggaggcaggagagtttatgatcactttcccttacggctatcacgcgggtttcaaccatggcttcaactgcgctgaatctacaaacttcgccacagtcagatggatcgactacggcaaggtggctaagctgtgtacgtgccgtaaggacatggtgaagatctctatggacatcttcgtaaggaaattccagccggatcgctaccagctctggaaacagggcaaagacatctacacaatcgatcatactaaacccacccctgcctctactcctgaagtaaaagcatggctgcagcgccgtcgcaaggtgagaaaggcctctagaagttttcagtgcgcgagaagcacctctaaacggcctaaagcagacgaagaagaggaggtcagcgatgaggtggatggggcagaggtacctaatcctgactccgtaaccgatgatctgaaggtgtcggaaaagtcagaggccgctgtgaaactgcggaatacagaagcaagcagcgaggaggaatccagcgcctctcgcatgcaggtcgaacaaaacctgtcagaccacatcaaattatccggcaactcctgtttatccacaagcgttactgaagacataaagacagaggacgacaaagcttacgcgtataggtccgtgccctcaatttcttccgaggccgacgactcaatccccctcagttcaggatacgaaaaaccagagaagtccgatccgtctgagttaagttggcccaaaagcccggaatcttgctccagcgtcgccgagtctaatggggttttaacagaaggagaggaaagcgacgtcgagtcccatggaaacggtttggaacctggagaaatcccggcagtcccttcgggggagaggaattccttcaaagtgccttcaatagccgagggcgagaataaaacgagtaaaagttggcgtcacccgctgtcccgaccaccggctcgcagtccaatgacgttagtcaaacagcaagcaccaagcgacgaagaactacctgaggtgctgagtatcgaagaggaagtggaggaaacagagtcttgggcaaagcccttgatacacctgtggcaaacaaaatctccgaactttgccgctgaacaggagtacaatgcgactgtggctcggatgaaaccacactgcgcgatttgcactctgctgatgccataccacaagcccgactctagcaacgaggagaacgatgcccgttgggagacaaaactggacgaggtcgtgactagtgagggcaagaccaagccacttatacctgagatgtgttttatatactctgaggagaatatcgaatacagcccaccaaacgcttttcttgaagaggacgggacttccctgctgatctcatgcgcgaaatgctgtgtcagagtccatgcatcttgctacggaatcccttcacacgagatctgcgacggatggctctgcgcacgatgtaaaaggaacgcatggacagccgagtgttgcctgtgcaacctccgcggaggtgcattgaagcagaccaaaaacaataaatgggcccacgtgatgtgtgctgtggctgttccagaggtcaggtttacaaatgtccctgagagaacccagatcgacgtaggccgtattccactgcagcgcctaaaactcaagtgtatattctgtagacaccgtgtcaaacgcgttagcggtgcttgtattcaatgctcctacggtcggtgtcccgcatcatttcacgtcacttgtgcacacgccgctggggttttgatggaacccgacgactggccttatgtggtgaatatcacttgtttccggcataaggtaaatcccaacgtgaaaagtaaggcttgcgagaaagttatcagcgtggggcagactgtgattaccaaacatcgtaacacacgatattactcctgccgggtcatggctgtcacctcccagaccttttatgaggttatgttcgacgacgggtcattttctcgcgataccttcccggaggatattgtaagcagagattgcctcaaactcgggccacccgcagaaggggaagtcgtgcaggttaagtggccagacggtaagctgtatggtgcaaaatactttggtagtaatatcgcgcacatgtatcaggtggaattcgaagacggttctcagatcgccatgaaacgagaggacatctatacactggatgaggagctacctaagcgcgtgaaagccagatttgttagcgccggacggtgtcatctgggtacttgccaagtaaacagcttatcaagccctcatgtatcccaggcgcagcaagagacatatctcggattctggatcaattccaagaaaagccagtgtaatatctttctgtctggcacttactag

SEQ ID NO: 184109 - DNA, 3171 bp, Artificial Sequence
  derived and/or modified sequence
atggaagtcgcagaggtcgagtcccccctcaaccctagctgtaagatcatgacttttcgtccaagtatggaggaattccgggaatttaacaaatacctggcttatatggagtctaaaggtgcccatagggctggactagctaaagtgatccctccgaaagagtggaagccccgacagtgttacgacgacatcgacaatctcctgatccccgcaccaatccagcaaatggtcactggccagtccggtctcttcacccagtacaacatccagaagaaggccatgacagttaaggaatttcgacagttagccaactccggaaagtattgcaccccccgatacttggactatgaagatttagagagaaaatattggaaaaatctgacatttgtggctcccatctacggagcagatataaacggctcaatctatgacgagggagtggacgagtggaacatagctcgccttaatacagttctagatgtggtggaggaagaatgcggtatctccatcgagggagttaataccccttatttgtatttcgggatgtggaagactacttttgcatggcacacagaggacatggatctgtattctattaactatctccactttggcgaaccaaaatcttggtatgcgattccacccgaacatgggaagcgcctggagagactggcacaaggcttcttcccttccagtagccagggttgtgatgcattcctgcgacataagatgaccctcataagtccctccgttttaaagaagtatggaattcccttcgataaaatcacccaagaggctggcgagtttatgattactttcccatacgggtatcacgcaggctttaatcacggattcaactgcgccgagagcactaattttgctactgtgcgctggatcgattatgggaaggtggcaaagctctgcacctgtcgaaaggatatggtgaagatctctatggacatttttgtcagaaaattccagcccgacagataccaactgtggaaacaaggcaaggatatctatacgatcgaccatacaaagccaacacctgcttccacacctgaagttaaggcttggctccaaaggcgccgtaaggtccgcaaagcctccaggtctttccagtgtgctcggagcacttccaaacgcccaaaggctgatgaagaagaagaagtgagcgatgaggtggacggggcagaggtaccaaacccggattccgtgacagacgaccttaaggtctcggaaaaatcagaggccgctgtgaagctgagaaacaccgaagcctccagcgaagaggagtcctctgcgtccaggatgcaggtggaacaaaatctgtctgaccacattaaactgagcggcaacagctgtctgtctacttctgttacagaggacattaagaccgaggatgataaagcttacgcctatcggtcagttccgtctatttcgagtgaagctgatgactccattccattgtccagcggatatgagaagccagagaaaagcgacccaagcgagctcagttggccaaagagcccagagtcatgttcatctgttgccgagagtaatggcgttctgacggagggagaagagtcggacgtcgagagccacgggaacggcctcgagccaggagaaatccctgccgtcccctctggggaaaggaattctttcaaggtcccaagtatagcagagggcgagaacaagacatccaaaagctggagacaccccctgtctaggccaccagctaggtctcccatgaccttggtgaaacagcaggctcctagtgatgaagagttgccagaagtgcttagcatcgaggaagaggtggaggagactgaatcatgggctaaacctcttatccatctttggcagacgaagagtcccaattttgcagcggagcaggaatacaatgcaactgtggccaggatgaagcctcattgcgctatctgtacactgctaatgccatatcacaagccagattcttcgaacgaagagaatgatgctagatgggaaacaaaactggacgaagtggtcacatcggagggcaagactaagccactcatccccgaaatgtgcttcatctactctgaagaaaacatcgaatattccccgccaaacgcttttttagaggaggacggtacatccctcctgatttcttgtgctaagtgttgtgtgagggtacatgcatcgtgctacggaatcccaagccacgaaatttgcgatgggtggctgtgcgcgagatgcaaacggaatgcgtggactgcggaatgttgtttatgcaatctgagaggaggtgctctgaagcagacaaaaaataacaagtgggcacacgtgatgtgtgccgtggccgttcctgaggtcaggttcacaaatgttcccgagcggactcagattgacgtggggaggattcccttgcagcggctgaagctgaaatgtatcttctgtaggcaccgggtgaaacgggtctccggtgcttgtatacaatgctcatacggtaggtgccccgcatcctttcacgtgacctgcgctcatgcggcaggcgtcctgatggagccagatgactggccgtatgtcgtgaatattacatgcttcaggcacaaggtgaatccaaatgttaaatccaaagcttgcgaaaaagtgattagcgtcgggcagacggtaatcacaaagcaccgaaatacccgttactacagctgtagggtgatggcggtgacatctcagacattttatgaggtgatgtttgacgatggtagtttctcacgggatacattccctgaggacatagtgtcaagagattgcctcaaattggggccaccagccgaaggagaggtggtacaggttaagtggcccgacggcaaattatatggtgcaaagtatttcggatcaaatatcgctcatatgtaccaggtcgagtttgaggacggttctcaaatcgccatgaaacgcgaggacatttatacactggatgaggaattaccaaaacgggtgaaagcacggttttcaaccgctagcgatatgagatttgaggacactttctacggagccgacatcattcagggagagcgtaaacgtcagcgggtgctgagttctagattcaagaatgagtatgtcgccgatcctgtgtaccgcactttcctgaagtcctccttccagaagaaatgccagaagcgccagtag

SEQ ID NO: 184110 - DNA, 2232 bp, Artificial Sequence
  derived and/or modified sequence
atggttaagatctctatggacatttttgtcaggaagttccagcctgaccgataccagctgtggaagcaggggaaggacatctataccatcgaccacaccaaaccgacccccgcttcaacaccagaggttaaagcctggctgcaaagaaggcggaaggtgagaaaggcctctagatccttccagtgtgctagatctacctccaaaagacctaaggctgacgaggaagaagaggtcagtgacgaggttgatggcgctgaagtcccaaatcctgatagtgtaacagacgatctgaaggtctctgagaagagtgaagccgctgtgaagctgaggaatacagaggcctccagcgaggaagaatcctcggcctcccgcatgcaagttgagcagaatctctcggatcacatcaaactgtctggcaactcatgcctgagcacatctgtaactgaggatatcaagaccgaagacgataaagcctatgcgtacaggtctgttccatcaataagctccgaggccgatgatagtattcctcttagctctggatatgagaaaccagagaagtccgatcctagcgagttaagctggcctaagagccccgagagttgtagcagtgtggccgagtcaaatggagtactgactgagggagaagagtctgatgttgaatcccacggaaatggcctcgaacccggtgagatcccggctgttccatctggtgaacggaacagtttcaaggtgccctccatcgctgaaggggagaataagacctcaaagtcctggcggcatccgctgtctcggccacctgcaaggtcccccatgacccttgtcaagcagcaggctccatctgatgaggagttgcctgaagttttatccatagaagaggaagttgaggagactgaatcatgggccaaacctctcatccatctgtggcagaccaaatcacccaactttgccgctgagcaggagtacaacgctaccgtagctcggatgaaacctcactgtgcaatctgcactcttctcatgccctaccacaagcctgactcctcgaacgaggaaaatgatgccagatgggagaccaaactggatgaagttgttacctctgagggcaaaactaagcctttaattcccgaaatgtgctttatatacagcgaagagaatatcgagtacagtccaccaaatgccttcctggaagaagatggcacctcattgctgatcagctgcgcaaaatgttgcgttcgggttcatgcttcatgctacggaataccatctcatgagatttgcgatgggtggctatgtgctcgatgcaagcgtaacgcgtggaccgcggagtgctgcttgtgtaatttacggggaggggcactcaagcaaactaaaaataataagtgggcacacgtgatgtgcgccgttgcagtccccgaggtcaggttcaccaatgttcccgagaggacccagatcgatgttggaaggattccattacagaggttgaagctgaagtgtattttttgtcggcatagagttaaaagagttagcggggcatgtatacagtgtagctacggtcggtgtcctgcgtccttccacgtgacgtgtgcccacgcagctggagtgctgatggagccagatgattggccgtacgtggtgaatattacttgctttcgtcacaaggtgaaccctaatgtgaagtcgaaggcttgcgaaaaagtaataagcgtgggacagacagtaatcacgaaacacaggaacactaggtactatagttgcagagtaatggccgttacatctcagacgttttacgaagtcatgttcgacgatggttctttctctcgagacaccttccccgaggatatcgtatccagagactgtctgaaactggggccaccggcagagggggaggtggtccaggtaaaatggccagatggcaaattgtatggcgcaaagtactttgggtctaacattgcccatatgtatcaggtggaattcgaggacggctcccagatagccatgaagcgggaagacatctatactctagacgaggaactccccaagagagtgaaagccaggtttagcacggcttcggatatgagatttgaagacaccttttacggagctgacatcattcagggcgagcgtaaacgacagagggtgctgtccagtcggttcaagaacgagtacgtggccgatccggtctacagaacattcctgaagagctcatttcagaaaaagtgccagaaaaggcagtag

SEQ ID NO: 184111 - DNA, 3144 bp, Artificial Sequence
  derived and/or modified sequence
atggaggtggccgaggtggagagccccctgaaccccagctgcaagatcatgaccttcagacccagcatggaggagttcagagagttcaacaagtacctggcctacatggagagcaagggcgcccacagagccggcctggccaaggtgatcccccccaaggagtggaagcccagacagtgctacgacgacatcgacaacctgctgatccccgcccccatccagcagatggtgaccggccagagcggcctgttcacccagtacaacatccagaagaaggccatgaccgtgaaggagttcagacagctggccaacagcggcaagtactgcacccccagatacctggactacgaggacctggagagaaagtactggaagaacctgaccttcgtggcccccatctacggcgccgacatcaacggcagcatctacgacgagggcgtggacgagtggaacatcgccagactgaacaccgtgctggacgtggtggaggaggagtgcggcatcagcatcgagggcgtgaacaccccctacctgtacttcggcatgtggaagaccaccttcgcctggcacaccgaggacatggacctgtacagcatcaactacctgcacttcggcgagcccaagagctggtacgccatcccccccgagcacggcaagagactggagagactggcccagggcttcttccccagcagcagccagggctgcgacgccttcctgagacacaagatgaccctgatcagccccagcgtgctgaagaagtacggcatccccttcgacaagatcacccaggaggccggcgagttcatgatcaccttcccctacggctaccacgccggcttcaaccacggcttcaactgcgccgagagcaccaacttcgccaccgtgagatggatcgactacggcaaggtggccaagctgtgcacctgcagaaaggacatggtgaagatcagcatggacatcttcgtgagaaagttccagcccgacagataccagctgtggaagcagggcaaggacatctacaccatcgaccacaccaagcccacccccgccagcacccccgaggtgaaggcctggctgcagagaagaagaaaggtgagaaaggccagcagaagcttccagtgcgccagaagcaccagcaagagacccaaggccgacgaggaggaggaggtgagcgacgaggtggacggcgccgaggtgcccaaccccgacagcgtgaccgacgacctgaaggtgagcgagaagagcgaggccgccgtgaagctgagaaacaccgaggccagcagcgaggaggagagcagcgccagcagaatgcaggtggagcagaacctgagcgaccacatcaagctgagcggcaacagctgcctgagcaccagcgtgaccgaggacatcaagaccgaggacgacaaggcctacgcctacagaagcgtgcccagcatcagcagcgaggccgacgacagcatccccctgagcagcggctacgagaagcccgagaagagcgaccccagcgagctgagctggcccaagagccccgagagctgcagcagcgtggccgagagcaacggcgtgctgaccgagggcgaggagagcgacgtggagagccacggcaacggcctggagcccggcgagatccccgccgtgcccagcggcgagagaaacagcttcaaggtgcccagcatcgccgagggcgagaacaagaccagcaagagctggagacaccccctgagcagaccccccgccagaagccccatgaccctggtgaagcagcaggcccccagcgacgaggagctgcccgaggtgctgagcatcgaggaggaggtggaggagaccgagagctgggccaagcccctgatccacctgtggcagaccaagagccccaacttcgccgccgagcaggagtacaacgccaccgtggccagaatgaagccccactgcgccatctgcaccctgctgatgccctaccacaagcccgacagcagcaacgaggagaacgacgccagatgggagaccaagctggacgaggtggtgaccagcgagggcaagaccaagcccctgatccccgagatgtgcttcatctacagcgaggagaacatcgagtacagcccccccaacgccttcctggaggaggacggcaccagcctgctgatcagctgcgccaagtgctgcgtgagagtgcacgccagctgctacggcatccccagccacgagatctgcgacggctggctgtgcgccagatgcaagagaaacgcctggaccgccgagtgctgcctgtgcaacctgagaggcggcgccctgaagcagaccaagaacaacaagtgggcccacgtgatgtgcgccgtggccgtgcccgaggtgagattcaccaacgtgcccgagagaacccagatcgacgtgggcagaatccccctgcagagactgaagctgaagtgcatcttctgcagacacagagtgaagagagtgagcggcgcctgcatccagtgcagctacggcagatgccccgccagcttccacgtgacctgcgcccacgccgccggcgtgctgatggagcccgacgactggccctacgtggtgaacatcacctgcttcagacacaaggtgaaccccaacgtgaagagcaaggcctgcgagaaggtgatcagcgtgggccagaccgtgatcaccaagcacagaaacaccagatactacagctgcagagtgatggccgtgaccagccagaccttctacgaggtgatgttcgacgacggcagcttcagcagagacaccttccccgaggacatcgtgagcagagactgcctgaagctgggcccccccgccgagggcgaggtggtgcaggtgaagtggcccgacggcaagctgtacggcgccaagtacttcggcagcaacatcgcccacatgtaccaggtggagttcgaggacggcagccagatcgccatgaagagagaggacatctacaccctggacgaggagctgcccaagagagtgaaggccagattcgtgagcgccggcagatgccacctgggcacctgccaggtgaacagcctgagcagcccccacgtgagccaggcccagcaggagacctacctgggcttctggatcaacagcaagaagagccagtgcaacatcttcctgagcggcacctactag

SEQ ID NO: 184112 - DNA, 3171 bp, Artificial Sequence
  derived and/or modified sequence
atggaggtggccgaggtggagagccccctgaaccccagctgcaagatcatgaccttcagacccagcatggaggagttcagagagttcaacaagtacctggcctacatggagagcaagggcgcccacagagccggcctggccaaggtgatcccccccaaggagtggaagcccagacagtgctacgacgacatcgacaacctgctgatccccgcccccatccagcagatggtgaccggccagagcggcctgttcacccagtacaacatccagaagaaggccatgaccgtgaaggagttcagacagctggccaacagcggcaagtactgcacccccagatacctggactacgaggacctggagagaaagtactggaagaacctgaccttcgtggcccccatctacggcgccgacatcaacggcagcatctacgacgagggcgtggacgagtggaacatcgccagactgaacaccgtgctggacgtggtggaggaggagtgcggcatcagcatcgagggcgtgaacaccccctacctgtacttcggcatgtggaagaccaccttcgcctggcacaccgaggacatggacctgtacagcatcaactacctgcacttcggcgagcccaagagctggtacgccatcccccccgagcacggcaagagactggagagactggcccagggcttcttccccagcagcagccagggctgcgacgccttcctgagacacaagatgaccctgatcagccccagcgtgctgaagaagtacggcatccccttcgacaagatcacccaggaggccggcgagttcatgatcaccttcccctacggctaccacgccggcttcaaccacggcttcaactgcgccgagagcaccaacttcgccaccgtgagatggatcgactacggcaaggtggccaagctgtgcacctgcagaaaggacatggtgaagatcagcatggacatcttcgtgagaaagttccagcccgacagataccagctgtggaagcagggcaaggacatctacaccatcgaccacaccaagcccacccccgccagcacccccgaggtgaaggcctggctgcagagaagaagaaaggtgagaaaggccagcagaagcttccagtgcgccagaagcaccagcaagagacccaaggccgacgaggaggaggaggtgagcgacgaggtggacggcgccgaggtgcccaaccccgacagcgtgaccgacgacctgaaggtgagcgagaagagcgaggccgccgtgaagctgagaaacaccgaggccagcagcgaggaggagagcagcgccagcagaatgcaggtggagcagaacctgagcgaccacatcaagctgagcggcaacagctgcctgagcaccagcgtgaccgaggacatcaagaccgaggacgacaaggcctacgcctacagaagcgtgcccagcatcagcagcgaggccgacgacagcatccccctgagcagcggctacgagaagcccgagaagagcgaccccagcgagctgagctggcccaagagccccgagagctgcagcagcgtggccgagagcaacggcgtgctgaccgagggcgaggagagcgacgtggagagccacggcaacggcctggagcccggcgagatccccgccgtgcccagcggcgagagaaacagcttcaaggtgcccagcatcgccgagggcgagaacaagaccagcaagagctggagacaccccctgagcagaccccccgccagaagccccatgaccctggtgaagcagcaggcccccagcgacgaggagctgcccgaggtgctgagcatcgaggaggaggtggaggagaccgagagctgggccaagcccctgatccacctgtggcagaccaagagccccaacttcgccgccgagcaggagtacaacgccaccgtggccagaatgaagccccactgcgccatctgcaccctgctgatgccctaccacaagcccgacagcagcaacgaggagaacgacgccagatgggagaccaagctggacgaggtggtgaccagcgagggcaagaccaagcccctgatccccgagatgtgcttcatctacagcgaggagaacatcgagtacagcccccccaacgccttcctggaggaggacggcaccagcctgctgatcagctgcgccaagtgctgcgtgagagtgcacgccagctgctacggcatccccagccacgagatctgcgacggctggctgtgcgccagatgcaagagaaacgcctggaccgccgagtgctgcctgtgcaacctgagaggcggcgccctgaagcagaccaagaacaacaagtgggcccacgtgatgtgcgccgtggccgtgcccgaggtgagattcaccaacgtgcccgagagaacccagatcgacgtgggcagaatccccctgcagagactgaagctgaagtgcatcttctgcagacacagagtgaagagagtgagcggcgcctgcatccagtgcagctacggcagatgccccgccagcttccacgtgacctgcgcccacgccgccggcgtgctgatggagcccgacgactggccctacgtggtgaacatcacctgcttcagacacaaggtgaaccccaacgtgaagagcaaggcctgcgagaaggtgatcagcgtgggccagaccgtgatcaccaagcacagaaacaccagatactacagctgcagagtgatggccgtgaccagccagaccttctacgaggtgatgttcgacgacggcagcttcagcagagacaccttccccgaggacatcgtgagcagagactgcctgaagctgggcccccccgccgagggcgaggtggtgcaggtgaagtggcccgacggcaagctgtacggcgccaagtacttcggcagcaacatcgcccacatgtaccaggtggagttcgaggacggcagccagatcgccatgaagagagaggacatctacaccctggacgaggagctgcccaagagagtgaaggccagattcagcaccgccagcgacatgagattcgaggacaccttctacggcgccgacatcatccagggcgagagaaagagacagagagtgctgagcagcagattcaagaacgagtacgtggccgaccccgtgtacagaaccttcctgaagagcagcttccagaagaagtgccagaagagacagtag

SEQ ID NO: 184113 - DNA, 2232 bp, Artificial Sequence
  derived and/or modified sequence
atggtgaagatcagcatggacatcttcgtgagaaagttccagcccgacagataccagctgtggaagcagggcaaggacatctacaccatcgaccacaccaagcccacccccgccagcacccccgaggtgaaggcctggctgcagagaagaagaaaggtgagaaaggccagcagaagcttccagtgcgccagaagcaccagcaagagacccaaggccgacgaggaggaggaggtgagcgacgaggtggacggcgccgaggtgcccaaccccgacagcgtgaccgacgacctgaaggtgagcgagaagagcgaggccgccgtgaagctgagaaacaccgaggccagcagcgaggaggagagcagcgccagcagaatgcaggtggagcagaacctgagcgaccacatcaagctgagcggcaacagctgcctgagcaccagcgtgaccgaggacatcaagaccgaggacgacaaggcctacgcctacagaagcgtgcccagcatcagcagcgaggccgacgacagcatccccctgagcagcggctacgagaagcccgagaagagcgaccccagcgagctgagctggcccaagagccccgagagctgcagcagcgtggccgagagcaacggcgtgctgaccgagggcgaggagagcgacgtggagagccacggcaacggcctggagcccggcgagatccccgccgtgcccagcggcgagagaaacagcttcaaggtgcccagcatcgccgagggcgagaacaagaccagcaagagctggagacaccccctgagcagaccccccgccagaagccccatgaccctggtgaagcagcaggcccccagcgacgaggagctgcccgaggtgctgagcatcgaggaggaggtggaggagaccgagagctgggccaagcccctgatccacctgtggcagaccaagagccccaacttcgccgccgagcaggagtacaacgccaccgtggccagaatgaagccccactgcgccatctgcaccctgctgatgccctaccacaagcccgacagcagcaacgaggagaacgacgccagatgggagaccaagctggacgaggtggtgaccagcgagggcaagaccaagcccctgatccccgagatgtgcttcatctacagcgaggagaacatcgagtacagcccccccaacgccttcctggaggaggacggcaccagcctgctgatcagctgcgccaagtgctgcgtgagagtgcacgccagctgctacggcatccccagccacgagatctgcgacggctggctgtgcgccagatgcaagagaaacgcctggaccgccgagtgctgcctgtgcaacctgagaggcggcgccctgaagcagaccaagaacaacaagtgggcccacgtgatgtgcgccgtggccgtgcccgaggtgagattcaccaacgtgcccgagagaacccagatcgacgtgggcagaatccccctgcagagactgaagctgaagtgcatcttctgcagacacagagtgaagagagtgagcggcgcctgcatccagtgcagctacggcagatgccccgccagcttccacgtgacctgcgcccacgccgccggcgtgctgatggagcccgacgactggccctacgtggtgaacatcacctgcttcagacacaaggtgaaccccaacgtgaagagcaaggcctgcgagaaggtgatcagcgtgggccagaccgtgatcaccaagcacagaaacaccagatactacagctgcagagtgatggccgtgaccagccagaccttctacgaggtgatgttcgacgacggcagcttcagcagagacaccttccccgaggacatcgtgagcagagactgcctgaagctgggcccccccgccgagggcgaggtggtgcaggtgaagtggcccgacggcaagctgtacggcgccaagtacttcggcagcaacatcgcccacatgtaccaggtggagttcgaggacggcagccagatcgccatgaagagagaggacatctacaccctggacgaggagctgcccaagagagtgaaggccagattcagcaccgccagcgacatgagattcgaggacaccttctacggcgccgacatcatccagggcgagagaaagagacagagagtgctgagcagcagattcaagaacgagtacgtggccgaccccgtgtacagaaccttcctgaagagcagcttccagaagaagtgccagaagagacagtag

SEQ ID NO: 184114 - protein, 1664 aa, Artificial Sequence
  derived and/or modified sequence
MAARRGRRDGVAPPPSGGPGPDPGGGARGSGWGSRSQAPYGTLGAVSGGEQVLLHEEAGDSGFVSLSRLGPSLRDKDLEMEELMLQDETLLGTMQSYMDASLISLIEDFGSLGESRLSLEDQNEVSLLTALTEILDNADSENLSPFDSIPDSELLVSPREGSSLHKLLTLSRTPPERDLITPVDPLGPSTGSSRGSGVEMSLPDPSWDFSPPSFLETSSPKLPSWRPPRSRPRWGQSPPPQQRSDGEEEEEVASFSGQILAGELDNCVSSIPDFPMHLACPEEEDKATAAEMAVPAAGDESISSLSELVRAMHPYCLPNLTHLASLEDELQEQPDDLTLPEGCVVLEIVGQAATAGDDLEIPVVVRQVSPGPRPVLLDDSLETSSALQLLMPTLESETEAAVPKVTLCSEKEGLSLNSEEKLDSACLLKPREVVEPVVPKEPQNPPANAAPGSQRARKGRKKKSKEQPAACVEGYARRLRSSSRGQSTVGTEVTSQVDNLQKQPQEELQKESGPLQGKGKPRAWARAWAAALENSSPKNLERSAGQSSPAKEGPLDLYPKLADTIQTNPIPTHLSLVDSAQASPMPVDSVEADPTAVGPVLAGPVPVDPGLVDLASTSSELVEPLPAEPVLINPVLADSAAVDPAVVPISDNLPPVDAVPSGPAPVDLALVDPVPNDLTPVDPVLVKSRPTDPRRGAVSSALGGSAPQLLVESESLDPPKTIIPEVKEVVDSLKIESGTSATTHEARPRPLSLSEYRRRRQQRQAETEERSPQPPTGKWPSLPETPTGLADIPCLVIPPAPAKKTALQRSPETPLEICLVPVGPSPASPSPEPPVSKPVASSPTEQVPSQEMPLLARPSPPVQSVSPAVPTPPSMSAALPFPAGGLGMPPSLPPPPLQPPSLPLSMGPVLPDPFTHYAPLPSWPCYPHVSPSGYPCLPPPPTVPLVSGTPGAYAVPPTCSVPWAPPPAPVSPYSSTCTYGPLGWGPGPQHAPFWSTVPPPPLPPASIGRAVPQPKMESRGTPAGPPENVLPLSMAPPLSLGLPGHGAPQTEPTKVEVKPVPASPHPKHKVSALVQSPQMKALACVSAEGVTVEEPASERLKPETQETRPREKPPLPATKAVPTPRQSTVPKLPAVHPARLRKLSFLPTPRTQGSEDVVQAFISEIGIEASDLSSLLEQFEKSEAKKECPPPAPADSLAVGNSGGVDIPQEKRPLDRLQAPELANVAGLTPPATPPHQLWKPLAAVSLLAKAKSPKSTAQEGTLKPEGVTEAKHPAAVRLQEGVHGPSRVHVGSGDHDYCVRSRTPPKKMPALVIPEVGSRWNVKRHQDITIKPVLSLGPAAPPPPCIAASREPLDHRTSSEQADPSAPCLAPSSLLSPEASPCRNDMNTRTPPEPSAKQRSMRCYRKACRSASPSSQGWQGRRGRNSRSVSSGSNRTSEASSSSSSSSSSSRSRSRSLSPPHKRWRRSSCSSSGRSRRCSSSSSSSSSSSSSSSSSSSSRSRSRSPSPRRRSDRRRRYSSYRSHDHYQRQRVLQKERAIEERRVVFIGKIPGRMTRSELKQRFSVFGEIEECTIHFRVQGDNYGFVTYRYAEEAFAAIESGHKLRQADEQPFDLCFGGRRQFCKRSYSDLDSNREDFDPAPVKSKFDSLDFDTLLKQAQKNLRR

SEQ ID NO: 184115 - DNA, 4995 bp, Artificial Sequence
  derived and/or modified sequence
atggccgccaggcgggggcgccgagacggcgttgcaccaccacctagcggcggtcctggccccgaccccggaggaggggcgcgaggaagcggatggggatctagatctcaggccccctacggtacccttggtgctgtatccggcggcgaacaggtgttacttcatgaggaggctggggacagcgggttcgtaagcctgtccagactgggtccatcacttcgcgataaagatctggagatggaggagctaatgctgcaggacgaaacactgcttgggactatgcagtcatacatggatgcctccctgatcagcctgatcgaggatttcggcagtcttggcgagagccgcctgagtctggaagaccagaatgaagtttctctgttaactgcgctaacagagattctggacaatgcggactccgagaacctgtccccttttgatagcattccggatagcgaattacttgttagtcccagagaggggtccagtctgcacaaactgctgactctgtcccggacacctccagagcgagacttaattactcccgttgacccacttggcccctcgacaggttccagccgtggcagcggagtggaaatgagcctccctgatccaagttgggatttttcaccaccatcgttcctagagacctctagtcccaagctccctagttggaggcccccccggagccggcctcgctgggggcagtcacctcctccacagcaacggtctgatggggaggaagaggaagaggtcgctagtttcagcgggcagatactggctggcgaactggataactgcgtctcctctattcccgacttcccaatgcacctggcttgcccggaagaggaagacaaggccactgccgcagaaatggcagtccctgccgccggcgatgagtccattagtagcttgtcagaactggtgcgggctatgcacccctattgcctgccaaacttgactcaccttgcctcgctggaggacgaactgcaggagcaacctgatgacctcactttgccagaggggtgcgtggttctggagatcgttggtcaggctgcaacagcaggagacgacttagagataccggtggttgttcgccaggtgagtcccgggcccagacccgttttactggatgactcattggaaacctcttctgcactgcagctcttaatgcctacgctggagtcggagacagaagctgccgttcctaaggtgacactgtgctcagagaaggagggtctgtccttgaacagcgaagagaagctggatagcgcctgcctgctgaaacctagggaggtggtggagcccgttgtgcctaaggagccgcagaacccaccagcgaatgccgcgccaggttcacaaagagcccgaaaagggagaaaaaagaagagcaaagaacagccagcagcctgcgtggaaggatacgccaggcgcctcagatcatctagtagaggacagtcaacagtgggaactgaagtgacatcccaggtggacaacctccaaaaacaaccgcaggaagagctgcagaaagagagcggtccactgcagggcaaaggaaaacctagggcttgggcacgcgcatgggctgctgccctggaaaatagcagccccaagaatcttgaaaggagtgcaggccagagtagccccgccaaggaaggcccactagatctttacccgaaacttgcagacactattcagacgaatccgataccgacccacctgagtctggttgatagtgctcaggcaagtcccatgcccgtggactctgtggaggctgatccgactgcggtggggcctgtactggcaggccccgttccagtggatcctggcctcgtcgatctggcatccaccagcagcgagctggtggagccattgcccgcagagcccgtgttgatcaatcctgtgttggcagattcagccgccgttgatccagcagtcgtccctatttccgacaacttgcctcctgtggacgccgtcccttctggcccagcaccagtcgacctcgcactcgtcgacccagtgcctaatgatttgactccagtcgatcccgttctcgtaaaatcaagacccaccgacccccgccggggggctgtgtcctcagcattaggggggagcgcacctcaacttctggtcgaatcagagtctctggaccctcctaaaaccataattcccgaggtgaaggaggtcgtcgacagtttgaagatcgaaagcgggactagtgcaactacccacgaggcgcgacccagacccctttcgctctctgagtacaggagacggcgccaacagagacaggctgaaactgaggagagatcccctcagccaccaacaggcaaatggccgtcgttaccagaaaccccaaccggactcgccgacattccatgcctggtcatcccccccgcgccggcgaagaagacggctttgcagagatcccctgagacgcccttagaaatctgtctagtgccagttgggccaagccccgcttccccttcgcccgagcctcccgtgtctaaacccgtggcctcttcccctactgaacaggtgccctcccaggagatgcctctcttagctaggccgtcccccccagtacagtcagtttcgccggcagtgccaacaccaccctcaatgtcggctgctctgccatttcccgcaggggggctcggcatgccaccaagcctgccgcccccaccattgcaacctccctccctgccactcagtatgggtcctgtgctgcccgacccctttacacattatgctcctctaccttcctggccctgttatccccacgtatctccaagtggatatccatgcctgccccctccaccaactgtacctctggtgtccggaactccaggagcctacgccgtaccgcccacctgctcagttccctgggccccgccacctgctcccgtaagcccctatagctcaacctgcacgtacgggcctctggggtggggtcctggaccccagcacgcccctttttggtctacggtccccccacctccgttgcctcctgcctctataggtagagcagtcccgcagcccaaaatggaatccagagggacccctgccggacctcctgaaaacgttctgcctctgtcaatggcgcctccactgagcctcggactgcccggccatggcgctccacagactgagccaactaaggtcgaagtgaagccagtgccagcctcaccacacccaaagcataaagtaagcgccctagtgcaatctcctcagatgaaggccttggcctgcgtgtctgcagagggagtcaccgttgaagaaccggcttcagaaaggctcaaacctgagacccaggaaacacgcccgcgggagaagccccctctcccagccacaaaggcagtccccactcccagacagtcaacagtgccaaaactgccggctgtgcatccagcccgcctacggaagctgtccttcctgccaacacctcgcacgcagggctctgaggacgttgttcaggccttcattagcgagattggaattgaggcctctgacctctcttctctgctggagcaattcgaaaaatctgaggcgaagaaagaatgcccacctccagcccctgctgattccttggcggtcggcaactccggtggtgttgacatcccacaggaaaagagaccccttgatcggctccaggcacccgagctcgccaatgtggcgggattaactcccccagccacccctcctcaccaattgtggaagccactggcggcagtctccttgttggccaaggccaagagccccaagagcaccgctcaagagggcactctgaaacccgaaggcgtaaccgaggcaaaacatcctgccgccgtgcggcttcaagagggagtgcacgggcccagccgggtccatgttggctcaggtgatcacgattactgtgtccggtcccgcaccccccctaagaagatgccagctctcgtgatccctgaggttggcagtcggtggaatgtgaagaggcatcaagacattaccatcaagcctgtgctgtcactggggcctgccgccccccctcccccatgtatcgcagcctctcgcgagcctttggaccacaggacttctagcgagcaagccgatccgtctgctccttgtctggccccatcaagtctgttatctcccgaggccagcccttgtcggaacgacatgaatacacggacccctcccgagcctagcgccaaacagagaagtatgcgctgctacaggaaagcctgcaggtctgccagtcccagttcacaggggtggcagggccgtcggggtcgcaactcaaggtctgtgtcatcaggctctaacaggacatcagaagcttctagttctagtagttcctccagttcttctagcagatccaggtcacgtagcctctctcccccccacaaacggtggcgtcgcagctcttgctcctcctccgggaggtcccgcagatgcagttccagctcttcttcttctagctccagctctagttcctcctcttcatcctcttcctcacggagccgaagtcgatcaccttcaccccgtcgcaggagcgacaggagacggcggtattcttcataccggtcccatgaccattaccagagacaacgggtcctgcagaaggaacgggctatcgaggagaggagggtcgtgttcattggaaaaattccagggagaatgacccgcagtgagctgaagcaacgcttctccgttttcggcgagatcgaagaatgtactattcattttcgggtgcaaggcgacaattatgggttcgtcacatacaggtatgctgaggaagccttcgcagcaatagaatccggccacaaactcaggcaggccgacgagcagccatttgacttatgcttcggagggagacgacaattctgcaaacgcagctattcagatctcgattcaaaccgagaagacttcgaccccgctcctgtaaaatcaaaatttgattcgctggacttcgacacactgctcaaacaggctcagaaaaatcttagaaggtag

SEQ ID NO: 184116 - DNA, 5330 bp, Artificial Sequence
  derived and/or modified sequence
gccagcgatcagagcagcgctgggtgttcaggggccaagatggcggcgcgccggggacggagagacggagtcgcgccgcccccgagtgggggccccggtccggaccctggcgggggagcccgcggcagtggttggggaagtcgaagccaagcgccgtatgggactttgggcgctgtgagcggcggcgagcaggtgctgctgcatgaggaggcgggtgattctggctttgtcagtctctctcggctgggcccatctctgagggacaaggacctggaaatggaggagctaatgctgcaggatgagacactgctggggaccatgcagagctacatggatgcctcccttatctccctcattgaggattttgggagccttggagagagcaggttatctctggaggaccagaatgaagtgtcgctgctcacggctctgacggagatcttggacaatgcagattctgagaacctttctccatttgacagcattcctgattcggagctgcttgtgtcaccccgggagggctcctctctgcacaagctgcttactctctctcggacacccccagaacgtgacctcatcaccccagttgacccactggggcccagtacaggcagcagtagagggagtggggttgaaatgtctcttccagatccctcttgggacttctccccaccctctttcttagagacctcttcccccaagcttcctagctggagacccccaagatcaagaccacgctggggccaatccccacctccccagcagcgcagtgatggagaagaagaggaggaggtggccagcttcagtggccagattcttgccggggagcttgacaactgtgtgagcagtatcccggacttccccatgcatttggcctgccctgaggaggaagataaagcaacagcagcagagatggcagtgccagcagctggtgatgagagcatctcctccctgagtgagctggtgcgggccatgcacccatactgcctgcccaacctcacccacctggcatcacttgaggatgagcttcaggagcagccagatgatttgacactgcctgagggctgcgtagtgctggagattgtggggcaggcagccacagctggcgatgacctggagatcccagttgtggtgcgacaggtctctcctggaccccggcctgtgctcctggatgactcgctagagactagttctgccttgcagctgcttatgcctacactggagtcagagacagaggctgctgtgcccaaggtaaccctctgctctgagaaagaggggttgtcattgaactcagaggagaagctggactcagcctgcttattgaagcccagggaggtcgtggagccggtggtgcccaaggagcctcagaacccacctgccaatgcagcaccaggttcccagagagctcgaaagggcaggaagaagaagagcaaggagcagccagcagcctgtgtggaaggctatgccaggaggctgaggtcatcttctcgcgggcagtctactgtaggtacagaagtgacctctcaggtagacaacttgcagaaacagcctcaggaagaacttcaaaaagagtctgggcctctccagggtaaggggaagccccgggcttgggctcgggcctgggcagctgccttggagaattctagccctaagaacttggagagaagtgctggacaaagtagtcctgctaaagaaggccctctagacctctacccaaagctggctgacactatccaaaccaatcctataccaacccatctctcattggtcgactctgcccaagccagccccatgccagttgactctgttgaagctgatcccactgcagttggccctgttctagctggccctgtacctgttgaccctgggttggttgaccttgcttcaaccagctcagaactggttgagcctctcccggctgagccagtgctgatcaacccagtcctggctgactcagcagcagttgaccctgcagtggttcccatctcagataacttgccaccagttgatgctgtcccgtctggcccagcaccagttgatctagcactggttgaccctgttcctaatgacctgactccagttgacccagtgctagttaagtccagaccaactgatcccagacgtggtgcagtgtcatcagccctggggggttcagcaccccagctcctcgtggagtcagagtccttggacccaccaaagaccatcatccctgaagtcaaagaggttgtggattctctgaaaattgaaagtggtaccagtgctacaacccatgaagccagacctcggcctctcagcttatctgagtaccggcgacgaaggcagcaacgccaagcagaaacagaagagagaagtccacagcccccaactgggaagtggcctagccttccagagactcccacagggctggcagacatcccttgtcttgtcatcccaccagccccagccaagaagacagctctgcagagaagccctgaaacaccccttgagatttgccttgtgcctgtaggtcccagccctgcttctcctagtcctgagccacctgtaagcaaacctgtggcctcatctcccactgagcaggtgccatcccaggagatgccactgttggcgagaccttcccctcctgtgcagtctgtgtcccctgctgtgcccacacctccctcgatgtctgctgccctgcctttccctgcaggtgggcttggcatgccccccagtctgcccccacctcccttgcagcctcctagtcttccattgtctatggggccagtactacctgatccgtttactcactatgcccccttgccatcctggccttgttatcctcatgtgtccccttctggctatccttgcctgccccccccaccaacggtgcccctagtgtctggtactcctggtgcctatgccgtgcctcccacttgcagtgtgccttgggcaccccctcctgccccagtctcaccttacagttccacatgtacctatgggcccttgggatggggcccagggcctcaacatgctccattctggtctactgttcccccacctcctttgcctccagcctccattgggagagctgttccccaacctaaaatggagtctaggggcactccagctggccctcctgaaaatgtacttcccttgtcgatggctcctcccctcagtcttgggctacctggccatggagctcctcagacagagcctaccaaggtggaggtcaagccagtgcctgcatctccccatccgaaacacaaggtgtctgccctggtgcaaagtccccagatgaaggctctagcatgtgtgtctgctgaaggtgtgactgttgaggagcctgcatcagagaggctaaagcctgagacccaagagaccaggcccagggagaagccccccttgcctgctaccaaggctgttcccacaccaaggcagagcactgtccccaagctgcctgctgtccacccagcccgtctaaggaagctgtccttcctgcctaccccacgtactcagggttctgaagatgtggtacaggctttcatcagtgagattggaattgaggcatcggacctgtccagtctgctggagcagtttgagaaatcagaagccaaaaaggagtgtcctcctccggctcctgctgacagcttggctgtaggaaactcaggcggcgttgacattccccaggagaagaggcccctagaccggttacaagccccagaactggccaacgtggcagggctcacccctccagctacccctccccaccagttatggaagcccctggctgctgtctcactgctggccaaagccaaatctcctaagtccaccgcccaggagggaaccctgaagcctgaaggagttacggaggccaaacatccagctgcagttcgcctccaagaaggggtccatggccctagtcgagtccatgtgggctctggggaccatgactattgtgtccggagcaggacccccccaaaaaagatgcctgccctagtcattccagaggtgggctcccgatggaatgtcaagcgccatcaggacatcaccatcaaacctgtcttgtccttgggcccagctgcccctccgcccccatgcatagctgcctcccgggagccgcttgatcacaggactagcagtgagcaggcagatccctcagcaccctgccttgccccatccagcttgctgtcccctgaggcctcaccctgccggaatgacatgaacactaggactccccctgaaccctcagccaagcagcggtcaatgcgctgttaccgaaaagcctgcaggtcagccagcccctcaagccagggctggcagggccgccgaggccgcaacagccgttctgtcagctctgggtccaaccggactagcgaagcatcttcctcatcctcatcatcgtcttcctcatcccgatctcggtccaggtccctctcccccccacacaagaggtggcgaaggtccagctgtagttcctctggacgttctcgaagatgctcttcctcttcttcgtcatcatcttcctcttcgtcttcctcatcctcatcatccagttctcgaagccgctcacgatccccatccccccgccggagaagtgacaggaggcggcggtacagctcttatcgttcacatgaccattaccaaaggcaaagagtgctacaaaaggagcgtgcaatagaagaaagaagggtggtcttcattggaaagatacctggccgcatgactcgatcagagctgaaacagaggttctccgtttttggagagattgaggagtgcaccatccacttccgtgtccaaggggacaactacggcttcgtcacttatcgctatgctgaggaggcatttgcagccattgagagtggccacaagctgcggcaggcagatgagcagccctttgatctctgctttgggggccgaaggcagttctgcaagaggagctattctgatcttgactccaaccgggaagactttgacccagcacctgtaaagagcaaatttgattctcttgactttgacacattgttgaaacaggcccagaagaacctcaggaggtaaccttgggcccttccctgctatcctttttctcctttggaggtgcccaacctcctccacccccttcccctactctaggggagagagctgctagtgagatgactgttttataaagaaatggaaaaaagtgaaataaaaaatatgttgaatcagattttttaaaaggggtatttgtttttttataacaggtattgaaacaagttaacttgcattcctatgtaagataggaggggctgaggggatccccagtgtttggaacataagtcactatgcagactaataaacatcaactagagaga

SEQ ID NO: 184117 - DNA, 4995 bp, Artificial Sequence
  derived and/or modified sequence
atggccgcccggcggggcagaagagatggagtggcccccccacccagcggcggccctggccctgaccccggcggcggggcccggggcagcggctggggcagccgcagccaggccccctacggcaccctgggcgctgtgtctggaggagagcaggtgctgctgcacgaggaggccggggacagcggctttgtgtccctgagccggctgggccccagcctgcgggacaaggacctggagatggaggagctgatgctgcaggatgagaccctgctgggcaccatgcagagctacatggatgccagcctcatcagcctgattgaagattttggcagcctgggggagagccggctgagcctggaggaccagaatgaggtgtccctgctgacagccctgacagagatcctggacaatgctgacagcgagaacctgagcccctttgacagcatcccagacagcgagctgctggtgagcccccgggagggcagcagcctgcacaagctgctgaccctgagcaggaccccacctgagcgggacctgatcacccctgtggaccccctgggccccagcacaggcagcagccggggcagcggcgtggagatgagcctgcctgaccccagctgggacttcagccccccatccttcctggagaccagcagccccaagctgcccagctggaggcctcccaggagccggccccgctggggccagagccccccaccccagcagaggagtgatggagaggaggaggaggaggtggccagcttcagcggccagatcctggccggggagctggacaactgtgtgagcagcatcccagacttccccatgcacctggcctgcccagaggaggaggacaaggccacagctgctgagatggctgtgcctgctgctggagatgagagcatcagcagcctgtctgagctggtgcgggccatgcacccctactgcctgcccaacctgacccacctggccagcctggaggatgagctgcaggagcagccagatgacctgaccctgcctgagggctgtgtggtgctggagatcgtgggccaggccgccacagctggagatgacctggagatccctgtggtggtgcggcaggtgtccccaggccccaggcctgtgctgctggatgacagcctggagaccagcagcgccctgcagctgctgatgcccaccctggagagcgagacagaggccgctgtgcccaaggtgaccctgtgcagcgagaaggagggcctgagcctgaacagcgaggagaagctggacagcgcctgcctgctgaagccccgggaggtggtggagcctgtggtgcccaaggagccccagaaccccccagccaatgctgcccctggcagccagagggccaggaagggcaggaagaagaagagcaaggagcagcctgctgcctgtgtggagggctacgcccggcggctgcggagcagcagccggggccagagcacagtgggcacagaggtgaccagccaggtggacaacctgcagaagcagccccaggaggagctgcagaaggagagcggccccctgcagggcaagggcaagccccgggcctgggcccgggcctgggccgccgccctggagaacagcagccccaagaacctggagaggtctgctggccagagcagccctgccaaggagggccccctggacctgtaccccaagctggccgacaccatccagaccaaccccatccccacccacctgagcctggtggacagcgcccaggccagccccatgcctgtggacagcgtggaggccgaccccacagctgtgggccctgtgctggccggccctgtgcctgtggaccccggcctggtggacctggccagcaccagcagcgagctggtggagcccctgcctgctgagcctgtgctgatcaaccctgtgctggccgacagcgctgctgtggaccctgctgtggtgcccatcagtgacaacctgccccctgtggatgctgtgcccagcggccctgcccctgtggacctggccctggtggaccctgtgcccaatgacctgacccctgtggaccctgtgctggtgaagagccggcccacagaccccaggagaggagctgtgagcagcgccctgggcggcagcgccccccagctgctggtggagagcgagagcctggacccccccaagaccatcatccctgaggtgaaggaggtggtggacagcctgaagattgaaagtggcaccagcgccaccacccatgaggcccggccccggcccctgagcctgtctgagtacagaagaagacggcagcagaggcaggccgagacagaggagaggagcccccagccccccaccgggaagtggcccagcctgcctgagacccccaccggcctggccgacatcccctgcctggtgatccccccagccccagccaagaagacagccctgcagaggagccctgagacccccctggagatctgcctggtgcctgtgggccccagccctgccagccccagccctgagccccctgtgtccaagcctgtggccagcagccccacagagcaggtgcccagccaggagatgcccctgctggcccggcccagcccccctgtgcagagcgtgtccccagctgtgcccaccccacccagcatgtctgctgccctgcccttccctgctgggggcctgggcatgccacccagcctgcccccaccacccctgcagccccccagcctgcccctgtccatgggccctgtgctgcctgaccccttcacccactacgcccccctgcccagctggccctgctacccccacgtgagccccagcggctacccctgcctgcccccaccacccaccgtgcccctggtgtctggcacccctggggcctatgctgtgccccccacctgcagcgtgccctgggcccctcctccagcccctgtgagcccctacagcagcacctgcacctacggccccctgggctggggccctggcccccagcacgcccccttctggagcacagtgcccccaccacccctgcccccagccagcatcggccgggctgtgccccagcccaagatggagagccggggcaccccagctggccccccagaaaatgtgctgcccctgtccatggccccacccctgagcctgggcctgcccggccatggagccccccagacagagcccaccaaggtggaggtgaagcctgtgcctgccagcccccaccccaagcacaaggtgtctgccctggtgcagagcccccagatgaaggccctggcctgtgtgtctgctgagggcgtgacagtggaggagcccgccagcgagcggctgaagccagagacccaggagacccggccccgggagaagccacccctgcctgccaccaaggctgtgcccaccccccggcagagcacagtgcccaagctgcctgctgtgcacccagcccggctgaggaagctgtccttcctgcccacccccaggacccagggctctgaagatgtggtgcaggccttcatcagcgagattggaattgaggccagtgacctgagcagcctgctggagcagtttgagaagtctgaggccaagaaggaatgtcctcctccagccccagctgacagcctggccgtgggcaacagcggcggcgtggacatcccccaggagaagaggcccctggaccggctgcaggcccctgagctggccaacgtggccggcctgaccccaccagccaccccaccccaccagctgtggaagcccctggccgctgtgtccctgctggccaaggccaagagccccaagagcacagcccaggagggcaccctgaagccagagggcgtgacagaggccaagcaccctgctgctgtgcggctgcaggagggcgtgcacggccccagccgggtgcacgtgggcagcggggaccatgactactgtgtgcgcagcaggaccccacccaagaagatgcctgccctggtgattcctgaggtgggcagccgctggaatgtgaagaggcaccaggacatcaccatcaagcctgtgctgagcctgggccctgctgcccctcctccaccctgcatcgccgccagccgggagcccctggaccacaggaccagcagcgagcaggccgaccccagcgccccctgcctggcccccagcagcctgctgagccctgaggccagcccctgcagaaatgacatgaacaccaggaccccacctgagcccagcgccaagcagaggtccatgcgctgctacaggaaggcctgccgcagcgccagccccagcagccagggctggcagggccggcggggcaggaacagccgctctgtgagcagcggcagcaacagaaccagcgaggccagcagcagcagcagcagcagcagcagcagcagccgcagccgcagccgcagcctgagccccccccacaagcgctggaggaggagcagctgcagcagcagcggccgcagccgccgctgcagcagcagcagcagcagcagcagcagcagcagcagcagcagcagcagcagcagcagcagccgcagccgcagccgcagccccagcccccggcggcggagtgacagaagaagacgctacagcagctaccgcagccatgaccactaccagaggcagagggtgctgcagaaggagcgggccatcgaggagcggcgggtggtgttcatcggcaagatccctggccgcatgaccaggtctgagctgaagcagcgcttctctgtgtttggagaaattgaagaatgtaccatccacttccgggtgcagggcgacaactacggctttgtgacctaccgctatgcagaggaggcctttgctgccatcgagagcggccacaagctgcggcaggctgatgagcagccctttgacctgtgcttcggcggccggcggcagttctgcaagaggagctacagcgacctggacagcaacagagaagattttgatcctgcccctgtgaagagcaagtttgacagcctggactttgacaccctgctgaagcaggcccagaagaacctgcggaggtag

SEQ ID NO: 184118 - DNA, 4995 bp, Artificial Sequence
  derived and/or modified sequence
atggccgcccggcggggccggcgggacggcgtggccccccccccctctggaggccccggccccgacccaggcggcggagctcgcggcagcgggtggggctcgcggtctcaggcgccgtatgggactctgggtgccgtttccggaggggaacaggtgctgctccacgaggaagctggtgacagcggatttgtgtcactgagtaggctcgggccaagtctcagggacaaagatctcgagatggaggaactgatgttacaggacgagactctgttgggaacaatgcaatcatatatggacgccagcttgatttccctgatcgaagactttgggtctttaggcgaatcacgcctatcactggaagatcagaatgaagtcagcttactgacagctttgaccgagatcctcgacaacgccgactccgagaacctcagcccgtttgatagcatccccgatagcgagctccttgtgagcccaagggagggcagcagtctacataagctgctgacactgtctagaacgccaccagagcgagatcttatcacccctgtcgatccacttggaccctctacaggaagcagccgaggatccggggtggagatgtcgctccctgatccatcttgggatttcagccccccttcattcctcgagacatctagcccaaaactgccttcctggagacccccccgttctaggccaaggtggggacagagcccacctcctcagcagcggtcagacggtgaagaggaagaggaagtggccagtttctctggccagatccttgctggcgaattggataactgtgtgagctcaatacctgatttcccgatgcatctggcctgtccagaagaagaagacaaggccaccgccgccgaaatggcggtaccggccgctggtgatgaatcaatctcgtccttatccgagctggtgagagctatgcacccttattgcttacctaatctgactcacttggcatctctggaagacgaactgcaggaacagcccgacgacctgactctaccagagggctgcgtcgtgctggagatagtggggcaggcagccacagctggtgacgacctcgaaatcccagtcgtcgtccgccaggtatcacccggcccaagaccagtactgctggacgactctctggaaaccagctccgctctgcagctgctgatgccaactctggaatcagagacagaagcagccgtgccaaaggtcacactgtgctctgagaaggaggggctgtctcttaattcggaagagaagctggactcagcttgtcttctgaaacctcgcgaagtggtagagcccgtagtccccaaagagccccagaatccacctgccaacgcagctcccgggagtcagagggccaggaaaggaagaaaaaaaaaatccaaagaacagcctgccgcctgcgttgaaggatacgcacggaggttaagatcttcttcccggggccagagcaccgtgggtacggaggtgacttctcaggttgataacctgcagaaacaacctcaagaagaattacaaaaggagagtgggcctctccaggggaagggaaaacccagagcttgggcgcgggcgtgggccgcggcactggaaaactcttcccctaagaatctggaacgctcggctggccagtcctctccagcaaaggaagggcctcttgatctctacccgaaactggctgacaccattcagaccaaccccatccccacacacctctcacttgtggatagcgcccaggcaagtccaatgcctgtggacagcgtggaggctgaccccacagcagtaggacccgtactggccggcccggttcccgtggaccccgggctggtggaccttgcgtccacctctagcgagctggtcgagccccttcccgccgagcccgtcctgatcaacccagttttagcagacagcgccgccgtggaccccgcagtagtccccatatcggataacttgccccctgtggacgctgtgccgtccgggcctgctcctgtcgacctagcgctggtggatcccgttcctaatgatctcacacccgtggatcccgtactggtaaagtcccggcctaccgaccccagacgcggagcagtgtcttcggccctgggtggctctgctcctcagttgctggtggagagtgagagtttggacccccccaagaccatcataccagaggtgaaggaagttgtggatagcctgaagattgaatcggggacctcagcaaccacgcatgaagcgcgccctcgaccactgtccttgagtgaataccgtagaagaaggcaacagcgccaggcagagacagaggaacgcagcccacagccgcccaccgggaagtggcccagtttaccagaaacccctactggcctggctgatatcccttgcttggtgatcccccccgcacccgccaaaaagactgctctgcagcggagcccagaaacccccctcgagatatgtctcgttccagtcgggccaagtcccgcttcaccatctcccgaacccccagtgagtaagccagttgcatcctcccctaccgaacaagttccgagccaggagatgcccctcctggctcgcccttcaccacccgtccagagtgttagtcccgctgtgcccaccccaccttctatgtctgccgcactaccattcccggctggagggttaggtatgccccccagccttcccccccctcccctgcagcccccatccctgcccttgagcatggggcctgtacttcctgatccatttactcactacgcaccacttccctcctggccttgctatcctcatgtgagtcccagcgggtatccttgtctgccgcccccaccaaccgtgccgctggtaagcggtacacccggggcgtacgctgtgcccccaacttgttccgtgccttgggcgccgccacccgcacctgtgagtccatattccagcacatgtacctacggcccattaggttggggccctggcccccagcacgctcccttttggagcacagtgcctccgccccctcttccccccgcatcaattggccgggcggtaccccagcctaagatggagagtcgaggcaccccagccggtccacctgagaatgttcttcccctgtcaatggctccgcctctttctctgggattgccgggccatggagcaccccagaccgaacctacgaaggtggaggtgaaacccgtgcccgccagccctcatccaaaacataaggtctccgccctagtgcaatctccacagatgaaggccttggcctgtgtgtccgcagagggagtgaccgtggaagagcccgcgagtgaacgcctgaaaccggagacccaggaaacgcgtccacgcgagaagccacccctaccagcgactaaagccgtgcccacccctagacaatctactgtaccaaagttacctgccgtacatccagctcggcttcggaaactttcattcctgcctactccccgcacccaaggaagcgaggatgttgtacaggcttttatctctgagattggaatcgaagcaagcgacctcagctccttgcttgagcagtttgagaagagtgaagcaaaaaaggaatgtcccccaccggcaccagccgactccctggcggtcggaaattcaggaggcgttgacatcccccaggaaaaacgacccctcgatcgcctgcaagcaccagaactggcaaacgtggcgggactgactcctcccgccaccccaccacaccagctgtggaaacccctcgcagctgtgtcattactcgctaaagccaaaagtccaaagtctaccgctcaagaaggaacgcttaaacccgagggggtcactgaagccaaacatccagccgcggtgcggctgcaggagggtgtgcacggacccagcagagtccacgtcggctctggcgatcatgattactgcgtgaggtcacgaaccccgcccaagaagatgcctgcactggtaattcctgaagtagggtctcgttggaacgttaaacgacatcaagatatcaccatcaaaccagtgctcagtctaggtcctgccgcacctccacctccatgcattgccgcttcacgggaacccctggatcaccgcacgtcgtcagaacaagccgatccttctgccccttgtctggcaccttcctccttgctttcccctgaggcctccccatgccggaatgacatgaacacgagaacaccccctgagccaagtgcaaaacagcgctcaatgcgctgctatagaaaagcctgccggtctgcctccccaagtagccaaggctggcagggtcggcgaggccgaaatagcagatctgtcagttccggtagtaataggacaagtgaggcaagctcttcctcctcaagcagctcctcatcatctagatcacgctccagatcactgtcccctccccacaagagatggcggagaagcagctgttcctcttccggtagaagtaggaggtgctccagcagttcttcaagcagcagctcttcctcctcttcctcttcttccagctcaagctcccgctctaggtctaggtccccctcacctaggcgacggtctgacaggagaaggagatactcttcttaccgctcccacgaccactaccagcgacagcgtgtgttgcagaaggagagggccatcgaggagagacgtgtggtatttatagggaagattccaggccgcatgaccaggtccgaactcaaacagagattttcagtgttcggggaaattgaggagtgtacaatccatttcagggtccagggtgacaactatggctttgtgacctatagatacgccgaggaggccttcgccgccatagagagcggtcacaaactgaggcaggctgacgaacagccattcgatctatgctttggtgggcgtcggcagttttgtaagcgctcttacagcgacttggactccaatagagaggattttgaccctgcccctgtaaaatcaaaatttgactctctcgactttgacaccttactcaagcaggcgcagaaaaacctgagaagatag

SEQ ID NO: 184119 - DNA, 4995 bp, Artificial Sequence
  derived and/or modified sequence
atggccgcacgaaggggaagacgggatggagtagcgcctcccccatctgggggtccaggacccgatcccggaggcggagcacgaggcagcggctggggtagtcgctcacaggctccatacggtacgctcggggcagtgtccggcggagaacaggtgttacttcacgaggaagcaggagatagcggcttcgtgtccctctctcgcctaggtccaagcctaagagacaaagacctggagatggaagaactgatgctgcaggatgagaccttacttggcactatgcagtcctacatggacgcatcactcatcagccttatcgaggactttggtagcttgggagaatcgagactatctctcgaggaccagaacgaggtgagtcttctcactgccttgactgaaattcttgataatgcagactccgaaaacctgagccctttcgatagcattcctgattccgagctgctggtcagcccaagggaaggctcttccctgcataagctcctcacactgagccgaacgcctcccgagcgcgatctaattaccccggtggaccccctgggtccctctaccggctcctcccgtgggtcgggagtggagatgagcttgcctgaccctagttgggacttcagtccaccttctttcctcgagacctcctccccgaagttgcccagttggcggcctccaagatcccgcccacgctgggggcagagtccgcctccacagcaaaggtcagatggcgaagaggaggaggaggtggcctcgttttcggggcagattctggctggggaactcgataattgcgtgtcctctatccccgattttcccatgcatttggcctgcccagaagaagaggataaagctacagccgctgaaatggccgttccagctgctggcgatgagtccatctcctccctgtcagagttggtcagggcaatgcatccttactgcctccccaatcttactcacctcgccagcttagaagatgaacttcaggaacagccggacgatctcactttgcctgagggatgcgtggttctggagatcgtggggcaggctgcaactgctggcgacgatcttgagatccctgtcgtggtgcggcaagtttcaccgggtccacgcccagtcctgctggacgatagcttggaaacgtcaagcgctctccagcttctaatgcctaccctggagagcgaaacagaagctgccgtgcccaaggttactctgtgcagcgagaaggaaggcctgtcactgaactctgaggagaagctcgacagtgcctgcctcctaaagcctagagaagtggtcgagccggtagtaccgaaagagccccagaatccaccagccaacgccgctcccggtagccagcgcgcacgtaagggccgtaaaaaaaagagtaaggagcaacctgcagcgtgtgtggaaggttacgccaggaggctccggtcatcatcccggggtcagtcgaccgtcgggacagaggtcactagccaggttgacaacctacagaaacagccacaggaggaactgcagaaagaatctgggccattgcagggtaaaggcaaacccagagcctgggctcgcgcttgggcagccgcactcgagaattctagccctaagaaccttgagcggagcgcagggcaatccagtcctgcaaaggagggacccctggatctctaccccaagctggcagataccattcagacaaaccccatacctacccacctctcccttgtcgattctgctcaagcgtcccccatgccagttgattcagtggaggcggatccaaccgccgtaggcccagtattggccggacctgtgcctgtcgacccaggtctggtggacctggcaagtactagttccgagctggtcgaacctctccccgcagagcccgtgctgatcaatcccgtgctagccgattctgccgctgttgatccagctgtggtgcctatcagtgacaatctccccccagtcgacgctgtcccatcaggtcccgctcctgttgacttggccctagtggaccccgtgccgaacgatctgacccctgtagatccagtgctcgtgaagtctaggcctaccgatccgagacggggtgcagtgagttctgccctaggcggatcagccccacagctgctggtcgaatcagaaagccttgaccctcctaagaccataattccagaggtaaaagaagtggttgatagcctgaagatcgagagcggaacttctgcaacaacacatgaggcaagacctagaccgctgagtctctccgagtatcgccgaaggagacaacagaggcaagcagagactgaggaaagaagccctcagccgccaactggcaagtggccatcactgccggagacaccaacaggactcgccgacattccctgtctcgtcatcccacccgcacccgcaaaaaagaccgcactgcagcggagtcccgagactccactggagatttgtctcgtgccggtcggtccctcacctgccagcccctcccccgaacctccagtcagtaagccggtcgccagcagtcccacagaacaggtgccttctcaggaaatgccactgcttgcaaggccctctcctcccgtgcagtctgtgtccccggcagtaccgactcccccttccatgagcgctgccttgcccttccccgcaggaggtctcggcatgcctccatcattgcctccacctccgttgcagcccccttctttaccactgtcaatgggtcctgtgctgcccgacccgttcacacactatgctccactcccatcttggccatgctatcctcatgtatcaccaagtggttacccttgccttccaccgcctcctactgtcccactggtgagcgggactcctggagcctatgcggttccacctacttgtagtgtaccgtgggccccaccgccagcacccgtttctccatactcttccacatgtacatacgggcctctgggttggggccctggcccacagcatgctcctttctggtccacggtgcctcctccccctctgcctccagctagcattggaagagccgtcccgcagcctaaaatggagtctcggggaacccctgccggtcctcctgagaatgtgctccctttatcaatggctcctcctttgagcctggggttacccggtcatggggcaccacagaccgaaccaacaaaagtcgaagtcaaacccgtgcccgcaagtccacaccctaagcataaggtaagtgccctggtgcagagccctcaaatgaaggccttagcatgcgtatccgctgagggggtgacagtggaagagcccgcttctgaacgactgaaacccgagacccaggaaacgcgcccacgagaaaagcctccattgccagccacaaaggcagttcctacacccagacagtcaacagtccctaaactcccggcagtccatcccgcacgcctccggaaacttagcttccttccgacccctcgcactcagggttcagaggatgtagtccaggcatttattagtgagatagggatcgaggcttccgacctatcatccctgctggagcagttcgagaagtccgaagccaaaaaagagtgccctccgccagctccagcggactccttagcagtgggcaattccggtggggtggatatacctcaggaaaaaagacctctcgaccggctgcaagcacccgaactagctaacgtcgcaggacttacccctcctgccaccccgcctcaccagctgtggaagcctcttgccgcagtctcactgttagctaaagcgaaatcacctaagagcacagctcaggaaggcacactgaaacctgagggggtaactgaggccaagcacccggcagccgttcgccttcaggaaggagtccatggacccagtagggtccacgtgggaagcggcgaccatgactactgtgtgcgctcccgcaccccacccaaaaaaatgcctgccttagttataccagaggtggggtctagatggaatgtcaagaggcatcaggatataacaattaagccagtcctctctctagggccagccgctcccccacccccatgcatcgccgctagcagggagcctttggatcaccgtacctcatcagagcaagctgatcccagcgctccatgcctggcccctagcagtctcctcagccccgaggcctcaccctgccggaacgacatgaatacgaggacgccccctgagcccagcgcaaagcagcgctccatgagatgttaccgaaaagcctgcagatctgcttctccttcgagccagggctggcaaggcagacgaggcaggaactcaagaagtgtaagctctggaagcaaccgtactagcgaagcctcaagctctagctccagttccagctcctcaagtcgctcaagatccagaagcctgtccccacctcacaaaagatggcggagatcctcttgtagttcctccggccgttctaggcgttgttcctcgtcctccagctccagttcaagcagtagctcttctagctcatcttcttctagtagcaggagccggtctaggagtcccagtccgcgtaggaggtctgaccgaagaagacgatatagctcttacagatcccacgatcattaccagcggcaaagagtgttgcagaaagagcgcgcaatcgaggagcggagagttgtgtttataggtaagatcccagggagaatgacccgcagtgaactgaaacaacgcttctctgttttcggagaaattgaggagtgcactatccatttcagagtgcaaggagacaactatgggttcgtgacataccgctacgccgaagaagctttcgctgccatcgaatccggccataagcttcgccaggctgacgagcagcccttcgacctgtgcttcggcggacgacgacaattttgcaaaaggtcttactctgacctggatagtaatcgcgaggacttcgatcccgcacccgtgaagagtaagtttgattcccttgacttcgacacgctgcttaagcaggctcagaaaaatctccgcagatag

SEQ ID NO: 184120 - DNA, 4995 bp, Artificial Sequence
  derived and/or modified sequence
atggccgccagaagaggcagaagagacggcgtggcccccccccccagcggcggccccggccccgaccccggcggcggcgccagaggcagcggctggggcagcagaagccaggccccctacggcaccctgggcgccgtgagcggcggcgagcaggtgctgctgcacgaggaggccggcgacagcggcttcgtgagcctgagcagactgggccccagcctgagagacaaggacctggagatggaggagctgatgctgcaggacgagaccctgctgggcaccatgcagagctacatggacgccagcctgatcagcctgatcgaggacttcggcagcctgggcgagagcagactgagcctggaggaccagaacgaggtgagcctgctgaccgccctgaccgagatcctggacaacgccgacagcgagaacctgagccccttcgacagcatccccgacagcgagctgctggtgagccccagagagggcagcagcctgcacaagctgctgaccctgagcagaaccccccccgagagagacctgatcacccccgtggaccccctgggccccagcaccggcagcagcagaggcagcggcgtggagatgagcctgcccgaccccagctgggacttcagcccccccagcttcctggagaccagcagccccaagctgcccagctggagaccccccagaagcagacccagatggggccagagcccccccccccagcagagaagcgacggcgaggaggaggaggaggtggccagcttcagcggccagatcctggccggcgagctggacaactgcgtgagcagcatccccgacttccccatgcacctggcctgccccgaggaggaggacaaggccaccgccgccgagatggccgtgcccgccgccggcgacgagagcatcagcagcctgagcgagctggtgagagccatgcacccctactgcctgcccaacctgacccacctggccagcctggaggacgagctgcaggagcagcccgacgacctgaccctgcccgagggctgcgtggtgctggagatcgtgggccaggccgccaccgccggcgacgacctggagatccccgtggtggtgagacaggtgagccccggccccagacccgtgctgctggacgacagcctggagaccagcagcgccctgcagctgctgatgcccaccctggagagcgagaccgaggccgccgtgcccaaggtgaccctgtgcagcgagaaggagggcctgagcctgaacagcgaggagaagctggacagcgcctgcctgctgaagcccagagaggtggtggagcccgtggtgcccaaggagccccagaacccccccgccaacgccgcccccggcagccagagagccagaaagggcagaaagaagaagagcaaggagcagcccgccgcctgcgtggagggctacgccagaagactgagaagcagcagcagaggccagagcaccgtgggcaccgaggtgaccagccaggtggacaacctgcagaagcagccccaggaggagctgcagaaggagagcggccccctgcagggcaagggcaagcccagagcctgggccagagcctgggccgccgccctggagaacagcagccccaagaacctggagagaagcgccggccagagcagccccgccaaggagggccccctggacctgtaccccaagctggccgacaccatccagaccaaccccatccccacccacctgagcctggtggacagcgcccaggccagccccatgcccgtggacagcgtggaggccgaccccaccgccgtgggccccgtgctggccggccccgtgcccgtggaccccggcctggtggacctggccagcaccagcagcgagctggtggagcccctgcccgccgagcccgtgctgatcaaccccgtgctggccgacagcgccgccgtggaccccgccgtggtgcccatcagcgacaacctgccccccgtggacgccgtgcccagcggccccgcccccgtggacctggccctggtggaccccgtgcccaacgacctgacccccgtggaccccgtgctggtgaagagcagacccaccgaccccagaagaggcgccgtgagcagcgccctgggcggcagcgccccccagctgctggtggagagcgagagcctggacccccccaagaccatcatccccgaggtgaaggaggtggtggacagcctgaagatcgagagcggcaccagcgccaccacccacgaggccagacccagacccctgagcctgagcgagtacagaagaagaagacagcagagacaggccgagaccgaggagagaagcccccagccccccaccggcaagtggcccagcctgcccgagacccccaccggcctggccgacatcccctgcctggtgatcccccccgcccccgccaagaagaccgccctgcagagaagccccgagacccccctggagatctgcctggtgcccgtgggccccagccccgccagccccagccccgagccccccgtgagcaagcccgtggccagcagccccaccgagcaggtgcccagccaggagatgcccctgctggccagacccagcccccccgtgcagagcgtgagccccgccgtgcccaccccccccagcatgagcgccgccctgcccttccccgccggcggcctgggcatgccccccagcctgccccccccccccctgcagccccccagcctgcccctgagcatgggccccgtgctgcccgaccccttcacccactacgcccccctgcccagctggccctgctacccccacgtgagccccagcggctacccctgcctgccccccccccccaccgtgcccctggtgagcggcacccccggcgcctacgccgtgccccccacctgcagcgtgccctgggcccccccccccgcccccgtgagcccctacagcagcacctgcacctacggccccctgggctggggccccggcccccagcacgcccccttctggagcaccgtgccccccccccccctgccccccgccagcatcggcagagccgtgccccagcccaagatggagagcagaggcacccccgccggcccccccgagaacgtgctgcccctgagcatggccccccccctgagcctgggcctgcccggccacggcgccccccagaccgagcccaccaaggtggaggtgaagcccgtgcccgccagcccccaccccaagcacaaggtgagcgccctggtgcagagcccccagatgaaggccctggcctgcgtgagcgccgagggcgtgaccgtggaggagcccgccagcgagagactgaagcccgagacccaggagaccagacccagagagaagccccccctgcccgccaccaaggccgtgcccacccccagacagagcaccgtgcccaagctgcccgccgtgcaccccgccagactgagaaagctgagcttcctgcccacccccagaacccagggcagcgaggacgtggtgcaggccttcatcagcgagatcggcatcgaggccagcgacctgagcagcctgctggagcagttcgagaagagcgaggccaagaaggagtgccccccccccgcccccgccgacagcctggccgtgggcaacagcggcggcgtggacatcccccaggagaagagacccctggacagactgcaggcccccgagctggccaacgtggccggcctgaccccccccgccacccccccccaccagctgtggaagcccctggccgccgtgagcctgctggccaaggccaagagccccaagagcaccgcccaggagggcaccctgaagcccgagggcgtgaccgaggccaagcaccccgccgccgtgagactgcaggagggcgtgcacggccccagcagagtgcacgtgggcagcggcgaccacgactactgcgtgagaagcagaaccccccccaagaagatgcccgccctggtgatccccgaggtgggcagcagatggaacgtgaagagacaccaggacatcaccatcaagcccgtgctgagcctgggccccgccgcccccccccccccctgcatcgccgccagcagagagcccctggaccacagaaccagcagcgagcaggccgaccccagcgccccctgcctggcccccagcagcctgctgagccccgaggccagcccctgcagaaacgacatgaacaccagaaccccccccgagcccagcgccaagcagagaagcatgagatgctacagaaaggcctgcagaagcgccagccccagcagccagggctggcagggcagaagaggcagaaacagcagaagcgtgagcagcggcagcaacagaaccagcgaggccagcagcagcagcagcagcagcagcagcagcagcagaagcagaagcagaagcctgagccccccccacaagagatggagaagaagcagctgcagcagcagcggcagaagcagaagatgcagcagcagcagcagcagcagcagcagcagcagcagcagcagcagcagcagcagcagcagcagaagcagaagcagaagccccagccccagaagaagaagcgacagaagaagaagatacagcagctacagaagccacgaccactaccagagacagagagtgctgcagaaggagagagccatcgaggagagaagagtggtgttcatcggcaagatccccggcagaatgaccagaagcgagctgaagcagagattcagcgtgttcggcgagatcgaggagtgcaccatccacttcagagtgcagggcgacaactacggcttcgtgacctacagatacgccgaggaggccttcgccgccatcgagagcggccacaagctgagacaggccgacgagcagcccttcgacctgtgcttcggcggcagaagacagttctgcaagagaagctacagcgacctggacagcaacagagaggacttcgaccccgcccccgtgaagagcaagttcgacagcctggacttcgacaccctgctgaagcaggcccagaagaacctgagaagatag

SEQ ID NO: 184121 - protein, 921 aa, Artificial Sequence
  derived and/or modified sequence
MAPLALVGVTLLLAAPPCSGAATPTPSLPPPPANDSDTSTGGCQGSYRCQPGVLLPVWEPDDPSLGDKAARAVVYFVAMVYMFLGVSIIADRFMAAIEVITSKEKEITITKANGETSVGTVRIWNETVSNLTLMALGSSAPEILLSVIEVCGHNFQAGELGPGTIVGSAAFNMFVVIAVCIYVIPAGESRKIKHLRVFFVTASWSIFAYVWLYLILAVFSPGVVQVWEALLTLVFFPVCVVFAWMADKRLLFYKYVYKRYRTDPRSGIIIGAEGDPPKSIELDGTFVGAEAPGELGGLGPGPAEARELDASRREVIQILKDLKQKHPDKDLEQLVGIANYYALLHQQKSRAFYRIQATRLMTGAGNVLRRHAADASRRAAPAEGAGEDEDDGASRIFFEPSLYHCLENCGSVLLSVTCQGGEGNSTFYVDYRTEDGSAKAGSDYEYSEGTLVFKPGETQKELRIGIIDDDIFEEDEHFFVRLLNLRVGDAQGMFEPDGGGRPKGRLVAPLLATVTILDDDHAGIFSFQDRLLHVSECMGTVDVRVVRSSGARGTVRLPYRTVDGTARGGGVHYEDACGELEFGDDETMKTLQVKIVDDEEYEKKDNFFIELGQPQWLKRGISALLLNQGDGDRKLTAEEEEARRIAEMGKPVLGENCRLEVIIEESYDFKNTVDKLIKKTNLALVIGTHSWREQFLEAITVSAGDEEEEEDGSREERLPSCFDYVMHFLTVFWKVLFACVPPTEYCHGWACFGVSILVIGLLTALIGDLASHFGCTVGLKDSVNAVVFVALGTSIPDTFASKVAALQDQCADASIGNVTGSNAVNVFLGLGVAWSVAAVYWAVQGRPFEVRTGTLAFSVTLFTVFAFVGIAVLLYRRRPHIGGELGGPRGPKLATTALFLGLWLLYILFASLEAYCHIRGF

SEQ ID NO: 184122 - protein, 825 aa, Artificial Sequence
  derived and/or modified sequence
MFVVIAVCIYVIPAGESRKIKHLRVFFVTASWSIFAYVWLYLILAVFSPGVVQVWEALLTLVFFPVCVVFAWMADKRLLFYKYVYKRYRTDPRSGIIIGAEGDPPKSIELDGTFVGAEAPGELGGLGPGPAEARELDASRREVIQILKDLKQKHPDKDLEQLVGIANYYALLHQQKSRAFYRIQATRLMTGAGNVLRRHAADASRRAAPAEGAGEDEDDGASRIFFEPSLYHCLENCGSVLLSVTCQGGEGNSTFYVDYRTEDGSAKAGSDYEYSEGTLVFKPGETQKELRIGIIDDDIFEEDEHFFVRLLNLRVGDAQGMFEPDGGGRPKGRLVAPLLATVTILDDDHAGIFSFQDRLLHVSECMGTVDVRVVRSSGARGTVRLPYRTVDGTARGGGVHYEDACGELEFGDDETMKTLQVKIVDDEEYEKKDNFFIELGQPQWLKRGISALLLNQGDGDRKLTAEEEEARRIAEMGKPVLGENCRLEVIIEESYDFKNTVDKLIKKTNLALVIGTHSWREQFLEAITVSAGDEEEEEDGSREERLPSCFDYVMHFLTVFWKVLFACVPPTEYCHGWACFGVSILVIGLLTALIGDLASHFGCTVGLKDSVNAVVFVALGTSIPGNTLGDFGGVGSQMSQAGATQDPAKMRHVRQQGGGAAGPVRRRVHRQRDRLQRGERVPWPGRRLVCGRRVLGGAGPPLRGAHWHAGLLRHALHRLRLRGHCRAAVPAPAAHRRRAGRPARTQARHHRALPGPLAPVHPLRQPGGVLPHPGLLGPRAETRPHRPPGARDSAAPALGPWSPFPPRLGLLSWDSASLLRPLPWL

SEQ ID NO: 184123 - protein, 384 aa, Artificial Sequence
  derived and/or modified sequence
MGTVDVRVVRSSGARGTVRLPYRTVDGTARGGGVHYEDACGELEFGDDETMKTLQVKIVDDEEYEKKDNFFIELGQPQWLKRGISALLLNQGDGDRKLTAEEEEARRIAEMGKPVLGENCRLEVIIEESYDFKNTVDKLIKKTNLALVIGTHSWREQFLEAITVSAGDEEEEEDGSREERLPSCFDYVMHFLTVFWKVLFACVPPTEYCHGWACFGVSILVIGLLTALIGDLASHFGCTVGLKDSVNAVVFVALGTSIPDTFASKVAALQDQCADASIGNVTGSNAVNVFLGLGVAWSVAAVYWAVQGRPFEVRTGTLAFSVTLFTVFAFVGIAVLLYRRRPHIGGELGGPRGPKLATTALFLGLWLLYILFASLEAYCHIRGF

SEQ ID NO: 184124 - protein, 677 aa, Artificial Sequence
  derived and/or modified sequence
MADKRLLFYKYVYKRYRTDPRSGIIIGAEGDPPKSIELDGTFVGAEAPGELGGLGPGPAEARELDASRREVIQILKDLKQKHPDKDLEQLVGIANYYALLHQQKSRAFYRIQATRLMTGAGNVLRRHAADASRRAAPAEGAGEDEDDGASRIFFEPSLYHCLENCGSVLLSVTCQGGEGNSTFYVDYRTEDGSAKAGSDYEYSEGTLVFKPGETQKELRIGIIDDDIFEEDEHFFVRLLNLRVGDAQGMFEPDGGGRPKGRLVAPLLATVTILDDDHAGIFSFQDRLLHVSECMGTVDVRVVRSSGARGTVRLPYRTVDGTARGGGVHYEDACGELEFGDDETMKTLQVKIVDDEEYEKKDNFFIELGQPQWLKRGISALLLNQGDGDRKLTAEEEEARRIAEMGKPVLGENCRLEVIIEESYDFKNTVDKLIKKTNLALVIGTHSWREQFLEAITVSAGDEEEEEDGSREERLPSCFDYVMHFLTVFWKVLFACVPPTEYCHGWACFGVSILVIGLLTALIGDLASHFGCTVGLKDSVNAVVFVALGTSIPDTFASKVAALQDQCADASIGNVTGSNAVNVFLGLGVAWSVAAVYWAVQGRPFEVRTGTLAFSVTLFTVFAFVGIAVLLYRRRPHIGGELGGPRGPKLATTALFLGLWLLYILFASLEAYCHIRGF

SEQ ID NO: 184125 - DNA, 2766 bp, Artificial Sequence
  derived and/or modified sequence
atggcccccctggccctggtgggcgtgaccctgctgctggccgcccccccctgcagcggcgccgccacccccacccccagcctgccccccccccccgccaacgacagcgacaccagcaccggcggctgccagggcagctacagatgccagcccggcgtgctgctgcccgtgtgggagcccgacgaccccagcctgggcgacaaggccgccagagccgtggtgtacttcgtggccatggtgtacatgttcctgggcgtgagcatcatcgccgacagattcatggccgccatcgaggtgatcaccagcaaggagaaggagatcaccatcaccaaggccaacggcgagaccagcgtgggcaccgtgagaatctggaacgagaccgtgagcaacctgaccctgatggccctgggcagcagcgcccccgagatcctgctgagcgtgatcgaggtgtgcggccacaacttccaggccggcgagctgggccccggcaccatcgtgggcagcgccgccttcaacatgttcgtggtgatcgccgtgtgcatctacgtgatccccgccggcgagagcagaaagatcaagcacctgagagtgttcttcgtgaccgccagctggagcatcttcgcctacgtgtggctgtacctgatcctggccgtgttcagccccggcgtggtgcaggtgtgggaggccctgctgaccctggtgttcttccccgtgtgcgtggtgttcgcctggatggccgacaagagactgctgttctacaagtacgtgtacaagagatacagaaccgaccccagaagcggcatcatcatcggcgccgagggcgacccccccaagagcatcgagctggacggcaccttcgtgggcgccgaggcccccggcgagctgggcggcctgggccccggccccgccgaggccagagagctggacgccagcagaagagaggtgatccagatcctgaaggacctgaagcagaagcaccccgacaaggacctggagcagctggtgggcatcgccaactactacgccctgctgcaccagcagaagagcagagccttctacagaatccaggccaccagactgatgaccggcgccggcaacgtgctgagaagacacgccgccgacgccagcagaagagccgcccccgccgagggcgccggcgaggacgaggacgacggcgccagcagaatcttcttcgagcccagcctgtaccactgcctggagaactgcggcagcgtgctgctgagcgtgacctgccagggcggcgagggcaacagcaccttctacgtggactacagaaccgaggacggcagcgccaaggccggcagcgactacgagtacagcgagggcaccctggtgttcaagcccggcgagacccagaaggagctgagaatcggcatcatcgacgacgacatcttcgaggaggacgagcacttcttcgtgagactgctgaacctgagagtgggcgacgcccagggcatgttcgagcccgacggcggcggcagacccaagggcagactggtggcccccctgctggccaccgtgaccatcctggacgacgaccacgccggcatcttcagcttccaggacagactgctgcacgtgagcgagtgcatgggcaccgtggacgtgagagtggtgagaagcagcggcgccagaggcaccgtgagactgccctacagaaccgtggacggcaccgccagaggcggcggcgtgcactacgaggacgcctgcggcgagctggagttcggcgacgacgagaccatgaagaccctgcaggtgaagatcgtggacgacgaggagtacgagaagaaggacaacttcttcatcgagctgggccagccccagtggctgaagagaggcatcagcgccctgctgctgaaccagggcgacggcgacagaaagctgaccgccgaggaggaggaggccagaagaatcgccgagatgggcaagcccgtgctgggcgagaactgcagactggaggtgatcatcgaggagagctacgacttcaagaacaccgtggacaagctgatcaagaagaccaacctggccctggtgatcggcacccacagctggagagagcagttcctggaggccatcaccgtgagcgccggcgacgaggaggaggaggaggacggcagcagagaggagagactgcccagctgcttcgactacgtgatgcacttcctgaccgtgttctggaaggtgctgttcgcctgcgtgccccccaccgagtactgccacggctgggcctgcttcggcgtgagcatcctggtgatcggcctgctgaccgccctgatcggcgacctggccagccacttcggctgcaccgtgggcctgaaggacagcgtgaacgccgtggtgttcgtggccctgggcaccagcatccccgacaccttcgccagcaaggtggccgccctgcaggaccagtgcgccgacgccagcatcggcaacgtgaccggcagcaacgccgtgaacgtgttcctgggcctgggcgtggcctggagcgtggccgccgtgtactgggccgtgcagggcagacccttcgaggtgagaaccggcaccctggccttcagcgtgaccctgttcaccgtgttcgccttcgtgggcatcgccgtgctgctgtacagaagaagaccccacatcggcggcgagctgggcggccccagaggccccaagctggccaccaccgccctgttcctgggcctgtggctgctgtacatcctgttcgccagcctggaggcctactgccacatcagaggcttctag

SEQ ID NO: 184126 - DNA, 2478 bp, Artificial Sequence
  derived and/or modified sequence
atgttcgtggtgatcgccgtgtgcatctacgtgatccccgccggcgagagcagaaagatcaagcacctgagagtgttcttcgtgaccgccagctggagcatcttcgcctacgtgtggctgtacctgatcctggccgtgttcagccccggcgtggtgcaggtgtgggaggccctgctgaccctggtgttcttccccgtgtgcgtggtgttcgcctggatggccgacaagagactgctgttctacaagtacgtgtacaagagatacagaaccgaccccagaagcggcatcatcatcggcgccgagggcgacccccccaagagcatcgagctggacggcaccttcgtgggcgccgaggcccccggcgagctgggcggcctgggccccggccccgccgaggccagagagctggacgccagcagaagagaggtgatccagatcctgaaggacctgaagcagaagcaccccgacaaggacctggagcagctggtgggcatcgccaactactacgccctgctgcaccagcagaagagcagagccttctacagaatccaggccaccagactgatgaccggcgccggcaacgtgctgagaagacacgccgccgacgccagcagaagagccgcccccgccgagggcgccggcgaggacgaggacgacggcgccagcagaatcttcttcgagcccagcctgtaccactgcctggagaactgcggcagcgtgctgctgagcgtgacctgccagggcggcgagggcaacagcaccttctacgtggactacagaaccgaggacggcagcgccaaggccggcagcgactacgagtacagcgagggcaccctggtgttcaagcccggcgagacccagaaggagctgagaatcggcatcatcgacgacgacatcttcgaggaggacgagcacttcttcgtgagactgctgaacctgagagtgggcgacgcccagggcatgttcgagcccgacggcggcggcagacccaagggcagactggtggcccccctgctggccaccgtgaccatcctggacgacgaccacgccggcatcttcagcttccaggacagactgctgcacgtgagcgagtgcatgggcaccgtggacgtgagagtggtgagaagcagcggcgccagaggcaccgtgagactgccctacagaaccgtggacggcaccgccagaggcggcggcgtgcactacgaggacgcctgcggcgagctggagttcggcgacgacgagaccatgaagaccctgcaggtgaagatcgtggacgacgaggagtacgagaagaaggacaacttcttcatcgagctgggccagccccagtggctgaagagaggcatcagcgccctgctgctgaaccagggcgacggcgacagaaagctgaccgccgaggaggaggaggccagaagaatcgccgagatgggcaagcccgtgctgggcgagaactgcagactggaggtgatcatcgaggagagctacgacttcaagaacaccgtggacaagctgatcaagaagaccaacctggccctggtgatcggcacccacagctggagagagcagttcctggaggccatcaccgtgagcgccggcgacgaggaggaggaggaggacggcagcagagaggagagactgcccagctgcttcgactacgtgatgcacttcctgaccgtgttctggaaggtgctgttcgcctgcgtgccccccaccgagtactgccacggctgggcctgcttcggcgtgagcatcctggtgatcggcctgctgaccgccctgatcggcgacctggccagccacttcggctgcaccgtgggcctgaaggacagcgtgaacgccgtggtgttcgtggccctgggcaccagcatccccggcaacaccctgggcgacttcggcggcgtgggcagccagatgagccaggccggcgccacccaggaccccgccaagatgagacacgtgagacagcagggcggcggcgccgccggccccgtgagaagaagagtgcacagacagagagacagactgcagagaggcgagagagtgccctggcccggcagaagactggtgtgcggcagaagagtgctgggcggcgccggcccccccctgagaggcgcccactggcacgccggcctgctgagacacgccctgcacagactgagactgagaggccactgcagagccgccgtgcccgcccccgccgcccacagaagaagagccggcagacccgccagaacccaggccagacaccacagagccctgcccggccccctggcccccgtgcaccccctgagacagcccggcggcgtgctgccccaccccggcctgctgggccccagagccgagaccagaccccacagaccccccggcgccagagacagcgccgcccccgccctgggcccctggagccccttcccccccagactgggcctgctgagctgggacagcgccagcctgctgagacccctgccctggctgtag

SEQ ID NO: 184127 - DNA, 1155 bp, Artificial Sequence
  derived and/or modified sequence
atgggcaccgtggacgtgagagtggtgagaagcagcggcgccagaggcaccgtgagactgccctacagaaccgtggacggcaccgccagaggcggcggcgtgcactacgaggacgcctgcggcgagctggagttcggcgacgacgagaccatgaagaccctgcaggtgaagatcgtggacgacgaggagtacgagaagaaggacaacttcttcatcgagctgggccagccccagtggctgaagagaggcatcagcgccctgctgctgaaccagggcgacggcgacagaaagctgaccgccgaggaggaggaggccagaagaatcgccgagatgggcaagcccgtgctgggcgagaactgcagactggaggtgatcatcgaggagagctacgacttcaagaacaccgtggacaagctgatcaagaagaccaacctggccctggtgatcggcacccacagctggagagagcagttcctggaggccatcaccgtgagcgccggcgacgaggaggaggaggaggacggcagcagagaggagagactgcccagctgcttcgactacgtgatgcacttcctgaccgtgttctggaaggtgctgttcgcctgcgtgccccccaccgagtactgccacggctgggcctgcttcggcgtgagcatcctggtgatcggcctgctgaccgccctgatcggcgacctggccagccacttcggctgcaccgtgggcctgaaggacagcgtgaacgccgtggtgttcgtggccctgggcaccagcatccccgacaccttcgccagcaaggtggccgccctgcaggaccagtgcgccgacgccagcatcggcaacgtgaccggcagcaacgccgtgaacgtgttcctgggcctgggcgtggcctggagcgtggccgccgtgtactgggccgtgcagggcagacccttcgaggtgagaaccggcaccctggccttcagcgtgaccctgttcaccgtgttcgccttcgtgggcatcgccgtgctgctgtacagaagaagaccccacatcggcggcgagctgggcggccccagaggccccaagctggccaccaccgccctgttcctgggcctgtggctgctgtacatcctgttcgccagcctggaggcctactgccacatcagaggcttctag

SEQ ID NO: 184128 - DNA, 2034 bp, Artificial Sequence
  derived and/or modified sequence
atggccgacaagagactgctgttctacaagtacgtgtacaagagatacagaaccgaccccagaagcggcatcatcatcggcgccgagggcgacccccccaagagcatcgagctggacggcaccttcgtgggcgccgaggcccccggcgagctgggcggcctgggccccggccccgccgaggccagagagctggacgccagcagaagagaggtgatccagatcctgaaggacctgaagcagaagcaccccgacaaggacctggagcagctggtgggcatcgccaactactacgccctgctgcaccagcagaagagcagagccttctacagaatccaggccaccagactgatgaccggcgccggcaacgtgctgagaagacacgccgccgacgccagcagaagagccgcccccgccgagggcgccggcgaggacgaggacgacggcgccagcagaatcttcttcgagcccagcctgtaccactgcctggagaactgcggcagcgtgctgctgagcgtgacctgccagggcggcgagggcaacagcaccttctacgtggactacagaaccgaggacggcagcgccaaggccggcagcgactacgagtacagcgagggcaccctggtgttcaagcccggcgagacccagaaggagctgagaatcggcatcatcgacgacgacatcttcgaggaggacgagcacttcttcgtgagactgctgaacctgagagtgggcgacgcccagggcatgttcgagcccgacggcggcggcagacccaagggcagactggtggcccccctgctggccaccgtgaccatcctggacgacgaccacgccggcatcttcagcttccaggacagactgctgcacgtgagcgagtgcatgggcaccgtggacgtgagagtggtgagaagcagcggcgccagaggcaccgtgagactgccctacagaaccgtggacggcaccgccagaggcggcggcgtgcactacgaggacgcctgcggcgagctggagttcggcgacgacgagaccatgaagaccctgcaggtgaagatcgtggacgacgaggagtacgagaagaaggacaacttcttcatcgagctgggccagccccagtggctgaagagaggcatcagcgccctgctgctgaaccagggcgacggcgacagaaagctgaccgccgaggaggaggaggccagaagaatcgccgagatgggcaagcccgtgctgggcgagaactgcagactggaggtgatcatcgaggagagctacgacttcaagaacaccgtggacaagctgatcaagaagaccaacctggccctggtgatcggcacccacagctggagagagcagttcctggaggccatcaccgtgagcgccggcgacgaggaggaggaggaggacggcagcagagaggagagactgcccagctgcttcgactacgtgatgcacttcctgaccgtgttctggaaggtgctgttcgcctgcgtgccccccaccgagtactgccacggctgggcctgcttcggcgtgagcatcctggtgatcggcctgctgaccgccctgatcggcgacctggccagccacttcggctgcaccgtgggcctgaaggacagcgtgaacgccgtggtgttcgtggccctgggcaccagcatccccgacaccttcgccagcaaggtggccgccctgcaggaccagtgcgccgacgccagcatcggcaacgtgaccggcagcaacgccgtgaacgtgttcctgggcctgggcgtggcctggagcgtggccgccgtgtactgggccgtgcagggcagacccttcgaggtgagaaccggcaccctggccttcagcgtgaccctgttcaccgtgttcgccttcgtgggcatcgccgtgctgctgtacagaagaagaccccacatcggcggcgagctgggcggccccagaggccccaagctggccaccaccgccctgttcctgggcctgtggctgctgtacatcctgttcgccagcctggaggcctactgccacatcagaggcttctag

SEQ ID NO: 184129 - DNA, 2766 bp, Artificial Sequence
  derived and/or modified sequence
atggctccactggcgctcgtcggcgttaccctgctgcttgctgcaccaccttgctctggagccgcaacacccactcccagcctgcctccaccacccgccaatgacagtgatacaagcaccggaggatgtcaagggtcttaccgctgtcaacccggtgtgttactgcctgtgtgggaacccgacgatccatccctgggcgataaagccgctcgggctgtagtgtatttcgtagccatggtctacatgttcctaggcgtatctatcatcgctgaccgctttatggcggccattgaggtgatcacatccaaagagaaagagattactatcaccaaagccaatggagaaacctcagtgggcaccgtgcgcatttggaatgagactgtgagtaaccttactcttatggcactcgggtccagcgcccccgaaattttactcagtgtgatcgaagtctgtggacacaactttcaggcaggcgagctgggcccaggcaccatcgttggaagtgccgcttttaacatgttcgtggttattgccgtgtgtatctatgttatcccagccggcgagtctaggaagatcaaacacctgcgagttttcttcgtaactgcttcttggtccatttttgcctacgtgtggctgtacctcatcctagcggtcttcagtcctggtgttgtccaggtgtgggaagctttgctcaccctagttttttttcccgtctgtgtggtgtttgcctggatggctgataagcgcctgcttttctataagtatgtctacaagcgatatagaaccgatccccgctcaggcatcattatcggcgccgaaggcgatcctcccaagtcaattgaactcgacgggaccttcgtgggtgctgaagcacccggtgagctgggggggctggggcccgggcctgccgaagcgagagagcttgatgcgtcacgccgcgaagtgattcagatcttgaaagatcttaagcagaaacatcccgacaaggacctagagcaactggtggggattgcaaattactacgcactcctccatcagcagaagtccagggctttctaccggatccaggctacgaggctaatgacaggcgctgggaatgtgctgcgcaggcacgccgctgacgcttcccgacgtgcggcgcctgctgaaggagctggggaagacgaagatgatggcgcatctagaatcttttttgagccatccctgtaccattgcctggaaaactgtggttcagtccttctctcggtcacttgtcagggcggggagggcaacagcacattttacgtcgattacaggacagaggatgggtccgccaaagcagggtcggactacgagtactctgaaggtacacttgtgttcaaaccaggcgaaacacagaaggaactgaggattgggattatcgatgacgatatctttgaggaggacgagcacttcttcgtgagactgctcaatctccgggtaggggacgcccagggaatgttcgaacctgacggcggaggccgccccaagggcagattggtcgcaccactgttggctactgtgaccatactcgatgatgaccacgctggtatcttcagttttcaggatcgcctcctacatgtttccgaatgcatggggacggttgatgtgagggtcgtgagatctagcggcgcacgaggcactgtccgcctgccctatagaacagtggatggcacagcaagaggaggcggggtccactacgaggatgcctgcggcgagctggaattcggggatgacgaaacgatgaagacattgcaagtcaaaatcgtggacgatgaagaatatgaaaagaaagataatttcttcattgagttgggtcagcctcagtggctcaagagaggcatctccgctctcctccttaatcagggcgatggagataggaaactcacagccgaggaagaggaagcacggcggatcgcagaaatgggaaaaccagtgcttggcgagaattgccgactcgaggttatcatcgaagaaagctatgattttaaaaataccgtggacaagttaatcaagaaaacaaaccttgcactggtgatcgggacacactcatggcgggagcagtttctggaagcgataactgtctccgcaggcgacgaagaggaggaggaagacggcagccgagaggaacggctgccatcttgtttcgattatgtcatgcactttctgaccgtgttttggaaggttttatttgcatgcgtgcctcctacagaatattgtcatggatgggcatgtttcggagtctctatcctggtgatcggactcctgacagccctgattggggatctggcctcccattttggatgcacggtgggcttgaaggatagcgtgaacgctgttgttttcgttgcactggggacatcaatacccgatacatttgcctccaaagtggccgcattgcaggatcagtgcgcagacgcttccatcggcaacgtgacagggagcaacgcagtcaatgttttcttggggttaggagtggcctggagcgtggcagccgtgtactgggccgtgcagggcaggccttttgaagtgcgaacagggacacttgcattctctgtgactctgtttacagtctttgctttcgtggggatcgctgtgctgctgtaccgtaggcgccctcacataggcggagaactcgggggtcctagaggccccaagttagctactactgcgctatttctaggactgtggctactctatattctcttcgccagtctggaggcatattgccacattcgcggcttctag

SEQ ID NO: 184130 - DNA, 2478 bp, Artificial Sequence
  derived and/or modified sequence
atgttcgtcgtgattgctgtctgcatctatgttattcccgccggagaatccaggaagatcaagcatctcagagtcttctttgttaccgctagctggagtatctttgcctatgtgtggctgtacttgatactggcagtgttcagtcctggggtggtgcaggtgtgggaggctttgctgacactggtcttcttcccagtgtgcgtggtatttgcatggatggctgacaaaaggttactgttttacaagtacgtttacaagcggtaccgcactgaccccagatctggaatcatcataggtgctgaaggggaccccccaaaatcaatcgaattagatggaacctttgtaggtgcagaagcgcctggagaattaggaggcctcggtccgggacccgctgaagcaagggaactagatgcttcacgccgggaggttatccagatattgaaagacttgaaacaaaagcatcccgataaggaccttgagcagttagtgggcatcgcaaattactatgcactactgcatcagcagaagagcagggctttctaccgaatacaggccactaggctcatgactggcgccggaaacgtgctgcgccggcatgctgcggatgccagtcggagagctgcacctgccgagggcgcaggggaggacgaagatgatggtgcatcaagaattttctttgaaccttccctctatcattgcctggagaattgcggatcagtgctcttgtcagtgacatgccagggcggggagggaaacagcaccttttacgtcgattacaggacggaagacggctctgcgaaagctggcagtgactatgaatacagcgagggaactcttgtgttcaaacctggagagactcagaaagaactgcgcattggtataatcgacgatgatatcttcgaagaggatgaacatttcttcgtgaggctcctgaatctgagagtgggggatgcccaaggaatgttcgagcccgatggaggggggcgccccaaaggccggttggtcgcacccctcctcgctactgtgactatactcgacgatgaccatgccgggattttctcctttcaggacagacttcttcacgtgtccgaatgcatgggtactgtggacgttcgtgtggtccgcagcagtggtgcgcgcggtactgtgcgccttccctaccgcactgttgacggtaccgcacgggggggcggggtgcactacgaagacgcatgtggggaactggagtttggtgatgacgagacaatgaaaactttgcaggtgaagatcgtcgacgacgaggagtatgaaaaaaaggataatttctttatcgagttaggacagccccagtggctgaaacggggcatttctgccctgctccttaatcagggcgatggtgatcgcaagcttactgctgaggaagaggaggcccgtagaattgcagagatggggaagcctgtactgggggagaattgcaggttggaggtcattatcgaggagtcctacgatttcaagaacacggtggataagctaataaagaagacgaacctggcattggtcattgggacacatagttggcgggagcagtttctcgaggcaatcactgtgtctgcaggggatgaagaagaagaggaagacgggtctcgggaggagcgactccctagctgttttgactatgtgatgcactttctcactgtcttctggaaggtactgttcgcatgtgtgccgcctacggaatattgccatggatgggcttgctttggagtcagcatactagttattggccttctaactgctctgatcggagacttagcatcacacttcgggtgtactgtagggctgaaggatagcgtgaacgctgtggtttttgtggccctcggtacaagtatccctggtaacaccctcggagatttcggcggtgtgggatctcagatgagccaggccggggccacccaggacccagctaaaatgcggcatgtgcgacagcaaggcgggggggcagcggggccagtcagacgtcgcgtccacagacagagggaccgactacaacgcggcgaaagagtgccctggccaggcaggcggcttgtctgtggccggagagtgctgggcggagccgggcctccactgcggggagctcattggcatgcaggcctgttaagacacgccctccaccgactcagactacgtggacactgccgagccgccgttcccgcacccgctgctcacaggcggagagctggacgaccagcaagaacccaggctcggcaccacagggccttgccggggccattagcaccagttcatcctttgcgacagcccggcggggtgctgccacatccaggtctccttggtcctcgagctgagactagaccccataggcctcccggagccagggacagtgcagctccagcattaggcccttggagcccctttccaccaagactgggattgctttcatgggatagcgcaagcctgttgagaccgctcccctggctgtag

SEQ ID NO: 184131 - DNA, 1155 bp, Artificial Sequence
  derived and/or modified sequence
atgggcactgtcgacgtcagagtcgtgagaagctccggtgcacgggggacggtccgcctgccctacagaactgtcgatggaactgcccgggggggaggagttcattatgaggatgcttgcggcgagctggaatttggggacgacgagactatgaaaacattgcaggtgaagatagtggacgatgaggaatacgaaaaaaaggacaatttttttatagagctgggacagccacaatggctgaagcgagggatctcggctcttctgctgaaccaaggcgatggtgacaggaagctcaccgcggaagaagaggaggccagaaggattgctgagatgggcaagcccgtactcggcgagaattgcaggctcgaagttattattgaagagagttacgacttcaagaacacagtcgataaattaattaagaaaacaaacctcgcccttgtgatcggcactcatagctggcgggaacagttcctggaggctataacggtgagtgccggcgatgaggaagaagaggaagacggttcccgcgaggagcggctccccagttgtttcgactatgtgatgcatttcctgactgtgttttggaaggtcctgttcgcgtgtgttcctccaaccgaatactgtcatggatgggcatgctttggggtgagtatacttgtgatcggcttgctaaccgcattaatcggggacctcgcgtcccattttggatgtacagtaggcttaaaagattccgttaacgccgttgtgttcgttgccttagggacctcaatcccagacacatttgcctccaaggtggccgccctgcaggaccagtgcgccgatgcttccatcggcaacgtgaccggatccaatgccgtgaatgtctttctgggactgggcgttgcatggagcgtagcagcagtgtactgggccgtacagggacggccattcgaagttcgtaccggaacactggcctttagtgttacactgttcacagtcttcgccttcgtgggcatagcagtgctcctctatcggcgaaggcctcacattggaggagagcttggcgggccccggggccctaaactcgccaccactgccctgttcttgggactgtggctgctgtatatactgttcgcaagcctggaggcttactgccacatcaggggcttttag

SEQ ID NO: 184132 - DNA, 2034 bp, Artificial Sequence
  derived and/or modified sequence
atggcagataaaaggctgcttttttataaatatgtgtacaagaggtaccggaccgaccctcgttccggcatcatcattggtgctgagggggacccccctaagtcgatcgaattagatggtacgttcgtgggagcagaagcgcctggtgaacttgggggactcgggcccggccctgccgaagctagggaattggatgcgagcagacgggaagtgattcagatcctaaaagatttgaagcagaaacacccggataaggacctagaacagctggtgggtattgccaattactacgccctactgcaccagcagaagtcgagagccttttatcgcattcaggcaacacggcttatgacgggagctggcaacgtgttgagacgacacgctgctgatgcatcgagacgagccgcccctgccgagggggccggagaagacgaagatgatggggcctcccgcattttttttgaacccagtctctaccactgtctggagaattgtggaagtgtactgctttcagtcacgtgccagggcggggagggcaactctaccttttatgtcgactatcgcaccgaagacggaagcgccaaagccggaagtgactatgagtattccgaaggaactctggtatttaaacctggagagacacagaaagagctcaggataggcataatcgacgacgatatttttgaagaggatgagcactttttcgtgcgcctgttgaacctgcgcgttggggacgctcagggtatgttcgagcccgatggaggaggtagacctaaaggaaggttggtcgcacctctcctggctacggtgacaatcttagatgacgaccatgccggcattttctcatttcaagaccgtctactgcatgtgagcgagtgcatgggcaccgtggacgttcgcgtagtcagatcatctggtgcacgaggtacagtgagactgccatacaggacagttgacggaactgctcgcggcggtggtgtgcattacgaggatgcgtgcggcgaacttgagttcggcgacgacgagaccatgaagactctccaggtaaagattgtggacgacgaggagtatgaaaaaaaggacaatttcttcatcgagttagggcagcctcagtggttgaagagaggaattagcgccttgttgctaaaccagggggacggtgaccgtaaactgaccgcagaggaggaggaggccaggcggatagcagaaatgggcaagccagtgctgggtgagaactgccgacttgaagtgataattgaggagtcctacgatttcaaaaatacagtagacaagctcatcaagaagaccaatctagccctggtcattgggactcattcttggagggagcagttccttgaagcaatcacagtaagcgcaggagacgaagaagaagaggaagatgggtccagggaagaacggttgcccagttgtttcgactatgtgatgcactttctgacagtattctggaaggtgttatttgcctgcgtgcccccaactgagtattgtcacggatgggcgtgtttcggtgtgtctattctggtcatcggcctcttaacagctcttatcggggatctggcttcccactttggctgtaccgtggggctgaaggacagcgtgaatgcagtcgtttttgtggcacttggaactagcatccctgatacatttgcctcgaaagtcgcagcgctgcaagaccagtgtgccgacgcatctattggcaacgtcacaggttcgaatgcagtgaacgtatttctgggactaggcgtggcttggtcagtcgccgcggtatactgggctgtccagggccggccatttgaggtgagaaccggcacactggccttctccgttactttgttcaccgtgttcgctttcgtagggattgctgtcctactgtaccggagacggcctcacatcggtggcgagttgggtggaccaagagggcctaaactggccacaactgcactgttcctgggtctgtggctattgtatatcctcttcgcttccctagaggcttattgccatattcggggattttag

SEQ ID NO: 184133 - DNA, 2766 bp, Artificial Sequence
  derived and/or modified sequence
atggcccccctggccctggtgggcgtgaccctgctgctggccgccccaccctgcagcggggccgccacccccacccccagcctgcccccacctccagccaatgacagcgacaccagcactggaggctgccagggcagctaccgctgccagcccggggtgctgctgcctgtgtgggagccagatgaccccagcctgggggacaaggccgcccgggctgtggtgtactttgtggccatggtgtacatgttcctgggcgtgtccatcatcgctgaccgcttcatggccgccattgaagtcatcaccagcaaggagaaggagatcaccatcaccaaggccaatggagagacctctgtgggcaccgtgcgcatctggaatgaaacagtgagcaacctgaccctgatggccctgggcagcagcgcccctgagatcctgctgagcgtcatcgaggtgtgtggccacaacttccaggccggggagctgggccctggcaccatcgtgggcagcgctgccttcaacatgtttgtggtgattgctgtgtgcatctacgtgatcccagctggggagagcaggaagatcaagcacctgcgggtcttctttgtgacagcctcctggagcatctttgcctacgtgtggctgtacctgatcctggccgtgttcagccctggggtggtgcaggtgtgggaggccctgctgaccctggtgttcttccctgtgtgtgtggtgtttgcctggatggctgacaagaggctgctcttctacaagtatgtgtacaagcgctacagaacagaccccaggagcggcatcatcatcggggctgagggggacccccccaagagcattgagctggatggcacctttgtgggcgctgaggcccctggagagctgggcggcctgggccctggccctgctgaggcccgggagctggatgccagccggcgggaggtgatccagatcctgaaggacctgaagcagaagcacccagacaaggacctggagcagctggtgggcatcgccaactactatgccctgctgcaccagcagaagagccgggccttctaccgcatccaggccacccggctgatgaccggggctggaaatgtgctgcggagacatgctgctgatgccagcagaagagctgccccagctgagggcgctggagaagatgaagatgatggagccagccgcatcttctttgagcccagcctgtaccactgcctggagaactgtggctctgtgctgctgtctgtgacctgccagggcggggagggcaacagcaccttctacgtggactacagaacagaagatggcagcgccaaggccggcagtgactatgagtacagcgagggcaccctggtgttcaagccaggagagacccagaaggagctgcgcatcggcatcattgatgatgacatctttgaggaggatgagcacttctttgtgcggctgctgaacctgcgggtgggagatgcccagggcatgtttgagccagatggcggcggccggcccaagggccgcctggtggcccccctgctggccaccgtgaccatcctggatgatgaccacgccggcatcttctccttccaggaccggctgctgcacgtgtctgagtgcatgggcaccgtggatgtgcgggtggtgcgcagcagcggggcccggggcaccgtgcggctgccctacagaacagtggatggaacagcccggggcggcggcgtgcactatgaagatgcctgtggggagctggagtttggagatgatgagaccatgaagaccctgcaggtgaagatcgtggatgatgaggagtatgagaagaaggacaacttcttcatcgagctgggccagccccagtggctgaagaggggcatcagcgccctgctgctgaaccagggagatggagacaggaagctgacagctgaggaggaggaggccaggagaattgctgagatgggcaagcctgtgctgggggagaactgccgcctggaggtgatcatcgaggagagctatgacttcaagaacacagtggacaagctgatcaagaagaccaacctggccctggtgattggcacccacagctggagggagcagttcctggaggccatcaccgtgtctgctggagatgaggaggaggaggaggatggcagccgggaggagcggctgcccagctgctttgattatgtgatgcacttcctgaccgtcttctggaaggtgctgtttgcctgtgtgcccccaacagagtactgccacggctgggcctgcttcggcgtgtccatcctggtgattggcctgctgacagccctgattggagacctggccagccacttcggctgcaccgtgggcctgaaggacagcgtgaatgctgtggtgtttgtggccctgggcaccagcatcccagacacctttgccagcaaggtggccgccctgcaggaccagtgtgctgatgccagcattggaaatgtgacaggcagcaatgctgtgaatgtgttcctgggcctgggcgtggcctggagcgtggccgctgtgtactgggccgtgcagggccggccctttgaggtgaggacaggcaccctggccttctctgtgaccctcttcaccgtgtttgcctttgtgggcattgctgtgctgctgtacagaagaagaccccacatcggcggggagctgggcggcccccggggccccaagctggccaccacagccctcttcctgggcctgtggctgctgtacatcctgtttgccagcctggaggcctactgccacatccggggcttctag

SEQ ID NO: 184134 - DNA, 2478 bp, Artificial Sequence
  derived and/or modified sequence
atgtttgtggtgattgctgtgtgcatctacgtgatcccagctggggagagcaggaagatcaagcacctgcgggtcttctttgtgacagcctcctggagcatctttgcctacgtgtggctgtacctgatcctggccgtgttcagccctggggtggtgcaggtgtgggaggccctgctgaccctggtgttcttccctgtgtgtgtggtgtttgcctggatggctgacaagaggctgctcttctacaagtatgtgtacaagcgctacagaacagaccccaggagcggcatcatcatcggggctgagggggacccccccaagagcattgagctggatggcacctttgtgggcgctgaggcccctggagagctgggcggcctgggccctggccctgctgaggcccgggagctggatgccagccggcgggaggtgatccagatcctgaaggacctgaagcagaagcacccagacaaggacctggagcagctggtgggcatcgccaactactatgccctgctgcaccagcagaagagccgggccttctaccgcatccaggccacccggctgatgaccggggctggaaatgtgctgcggagacatgctgctgatgccagcagaagagctgccccagctgagggcgctggagaagatgaagatgatggagccagccgcatcttctttgagcccagcctgtaccactgcctggagaactgtggctctgtgctgctgtctgtgacctgccagggcggggagggcaacagcaccttctacgtggactacagaacagaagatggcagcgccaaggccggcagtgactatgagtacagcgagggcaccctggtgttcaagccaggagagacccagaaggagctgcgcatcggcatcattgatgatgacatctttgaggaggatgagcacttctttgtgcggctgctgaacctgcgggtgggagatgcccagggcatgtttgagccagatggcggcggccggcccaagggccgcctggtggcccccctgctggccaccgtgaccatcctggatgatgaccacgccggcatcttctccttccaggaccggctgctgcacgtgtctgagtgcatgggcaccgtggatgtgcgggtggtgcgcagcagcggggcccggggcaccgtgcggctgccctacagaacagtggatggaacagcccggggcggcggcgtgcactatgaagatgcctgtggggagctggagtttggagatgatgagaccatgaagaccctgcaggtgaagatcgtggatgatgaggagtatgagaagaaggacaacttcttcatcgagctgggccagccccagtggctgaagaggggcatcagcgccctgctgctgaaccagggagatggagacaggaagctgacagctgaggaggaggaggccaggagaattgctgagatgggcaagcctgtgctgggggagaactgccgcctggaggtgatcatcgaggagagctatgacttcaagaacacagtggacaagctgatcaagaagaccaacctggccctggtgattggcacccacagctggagggagcagttcctggaggccatcaccgtgtctgctggagatgaggaggaggaggaggatggcagccgggaggagcggctgcccagctgctttgattatgtgatgcacttcctgaccgtcttctggaaggtgctgtttgcctgtgtgcccccaacagagtactgccacggctgggcctgcttcggcgtgtccatcctggtgattggcctgctgacagccctgattggagacctggccagccacttcggctgcaccgtgggcctgaaggacagcgtgaatgctgtggtgtttgtggccctgggcaccagcatccctggcaacaccctgggggactttggaggagtgggcagccagatgagccaggccggggccacccaggaccctgccaagatgagacatgtgcggcagcagggcggcggcgctgctggccctgtgagaagaagagtgcaccggcagagggaccggctgcagagaggagagcgggtgccctggccaggccggcggctggtgtgtggccggcgggtgctgggcggggccggcccccccctgcggggggcccactggcatgctggcctgctgcggcatgccctgcaccggctgcggctgcggggccactgcagagctgctgtgcctgccccagctgcccacagaagaagagctggccggcctgcccggacccaggcccggcaccaccgggccctgcccggccccctggcccctgtgcaccccctgcggcagcccggcggcgtgctgccccaccctggcctgctgggccccagggctgagacccggccccacaggcctcctggggcccgggacagcgctgccccagccctgggcccctggagccccttccccccccggctgggcctgctgtcctgggacagcgccagcctgctgcggcccctgccctggctgtag

SEQ ID NO: 184135 - DNA, 1155 bp, Artificial Sequence
  derived and/or modified sequence
atgggcaccgtggatgtgcgggtggtgcgcagcagcggggcccggggcaccgtgcggctgccctacagaacagtggatggaacagcccggggcggcggcgtgcactatgaagatgcctgtggggagctggagtttggagatgatgagaccatgaagaccctgcaggtgaagatcgtggatgatgaggagtatgagaagaaggacaacttcttcatcgagctgggccagccccagtggctgaagaggggcatcagcgccctgctgctgaaccagggagatggagacaggaagctgacagctgaggaggaggaggccaggagaattgctgagatgggcaagcctgtgctgggggagaactgccgcctggaggtgatcatcgaggagagctatgacttcaagaacacagtggacaagctgatcaagaagaccaacctggccctggtgattggcacccacagctggagggagcagttcctggaggccatcaccgtgtctgctggagatgaggaggaggaggaggatggcagccgggaggagcggctgcccagctgctttgattatgtgatgcacttcctgactgtgttctggaaggtgctgtttgcctgtgtgcccccaacagagtactgccacggctgggcctgctttggagtgtccatcctggtgattggcctgctgacagccctgattggagacctggccagccacttcggctgcaccgtgggcctgaaggacagcgtgaatgctgtggtgtttgtggccctgggcaccagcatcccagacacctttgccagcaaggtggccgccctgcaggaccagtgtgctgatgccagcattggaaatgtgacaggcagcaatgctgtgaatgtgttcctgggcctgggcgtggcctggagcgtggccgctgtgtactgggccgtgcagggccggccctttgaggtgaggacaggcaccctggccttctctgtgaccctcttcaccgtgtttgcctttgtgggcattgctgtgctgctgtacagaagaagaccccacatcggcggggagctgggcggcccccggggccccaagctggccaccacagccctcttcctgggcctgtggctgctgtacatcctgtttgccagcctggaggcctactgccacatccggggcttctag

SEQ ID NO: 184136 - DNA, 2034 bp, Artificial Sequence
  derived and/or modified sequence
atggctgacaagaggctgctcttctacaagtatgtgtacaagcgctacagaacagaccccaggagcggcatcatcatcggggctgagggggacccccccaagagcattgagctggatggcacctttgtgggcgctgaggcccctggagagctgggcggcctgggccctggccctgctgaggcccgggagctggatgccagccggcgggaggtgatccagatcctgaaggacctgaagcagaagcacccagacaaggacctggagcagctggtgggcatcgccaactactatgccctgctgcaccagcagaagagccgggccttctaccgcatccaggccacccggctgatgaccggggctggaaatgtgctgcggagacatgctgctgatgccagcagaagagctgccccagctgagggcgctggagaagatgaagatgatggagccagccgcatcttctttgagcccagcctgtaccactgcctggagaactgtggctctgtgctgctgtctgtgacctgccagggcggggagggcaacagcaccttctacgtggactacagaacagaagatggcagcgccaaggccggcagtgactatgagtacagcgagggcaccctggtgttcaagccaggagagacccagaaggagctgcgcatcggcatcattgatgatgacatctttgaggaggatgagcacttctttgtgcggctgctgaacctgcgggtgggagatgcccagggcatgtttgagccagatggcggcggccggcccaagggccgcctggtggcccccctgctggccaccgtgaccatcctggatgatgaccacgccggcatcttctccttccaggaccggctgctgcacgtgtctgagtgcatgggcaccgtggatgtgcgggtggtgcgcagcagcggggcccggggcaccgtgcggctgccctacagaacagtggatggaacagcccggggcggcggcgtgcactatgaagatgcctgtggggagctggagtttggagatgatgagaccatgaagaccctgcaggtgaagatcgtggatgatgaggagtatgagaagaaggacaacttcttcatcgagctgggccagccccagtggctgaagaggggcatcagcgccctgctgctgaaccagggagatggagacaggaagctgacagctgaggaggaggaggccaggagaattgctgagatgggcaagcctgtgctgggggagaactgccgcctggaggtgatcatcgaggagagctatgacttcaagaacacagtggacaagctgatcaagaagaccaacctggccctggtgattggcacccacagctggagggagcagttcctggaggccatcaccgtgtctgctggagatgaggaggaggaggaggatggcagccgggaggagcggctgcccagctgctttgattatgtgatgcacttcctgaccgtcttctggaaggtgctgtttgcctgtgtgcccccaacagagtactgccacggctgggcctgcttcggcgtgtccatcctggtgattggcctgctgacagccctgattggagacctggccagccacttcggctgcaccgtgggcctgaaggacagcgtgaatgctgtggtgtttgtggccctgggcaccagcatcccagacacctttgccagcaaggtggccgccctgcaggaccagtgtgctgatgccagcattggaaatgtgacaggcagcaatgctgtgaatgtgttcctgggcctgggcgtggcctggagcgtggccgctgtgtactgggccgtgcagggccggccctttgaggtgaggacaggcaccctggccttctctgtgaccctcttcaccgtgtttgcctttgtgggcattgctgtgctgctgtacagaagaagaccccacatcggcggggagctgggcggcccccggggccccaagctggccaccacagccctcttcctgggcctgtggctgctgtacatcctgtttgccagcctggaggcctactgccacatccggggcttctag

SEQ ID NO: 184137 - DNA, 2766 bp, Artificial Sequence
  derived and/or modified sequence
atggcccccctggccctggtgggcgtgaccctgctgctggccgccccaccatgtagtggcgcagccacaccgacaccctcattaccaccaccacccgccaacgactccgatacttcgaccggagggtgtcaaggcagctatcgctgtcagcctggcgtactgcttcccgtgtgggaacccgacgatccctcgctcggagataaagccgcccgggctgtggtgtactttgtggctatggtctacatgttcctcggtgtgtccattatcgccgaccgatttatggcagcaattgaggttatcacctcaaaggaaaaggaaattactatcacaaaagcaaacggagagacaagcgttggaacagtgagaatctggaacgagacggtgtcgaacctgactctaatggctttggggagcagtgccccggaaattttgctgtccgtaattgaagtttgtgggcacaatttccaggcgggcgaattggggcctggcacaatcgtcgggagcgcagcgtttaacatgttcgtggtgatagccgtgtgtatctatgtgatcccagccggcgagagcaggaagataaaacatctgcgggtgtttttcgtaactgcgtcctggtccatcttcgcttatgtctggctctacctgattttggcagtttttagtcccggcgtggtgcaggtttgggaggccctcctgaccctggtgttcttccccgtttgtgttgtgtttgcctggatggcagacaagcggctgttgttctataagtacgtatacaagcggtaccggactgatccaagatctggtatcatcataggcgcagagggagatccaccaaagagcatagaacttgacggtacctttgtgggcgctgaagcacccggcgagctgggtggcctaggtcctggcccagcggaagcccgggaacttgatgcctcaaggagagaagttattcagattctcaaggatctgaaacaaaagcaccctgataaggatttggagcaactggtgggcatcgccaactactacgctctattacatcagcagaagtctcgagccttctaccgcatccaagctactcgcctcatgacaggcgcaggcaacgtgctgcgaagacacgccgcagatgcctctaggagagcagccccggccgagggtgccggggaagacgaagatgatggggcatcaagaattttcttcgagccatctttgtatcactgcctggagaattgtggtagcgtgctgctgtccgtgacctgccagggcggagaggggaacagcactttctatgttgactacaggaccgaggatggatcagcgaaggccggcagcgactatgaatattctgagggaacacttgtgtttaagcccggcgagacacagaaggaactaagaatcggtattatcgatgacgatatctttgaagaggatgagcatttttttgtcagactgcttaatctgcgcgtgggggacgcccaaggtatgttcgaacccgatggcggggggcgaccaaagggcaggctggtcgcccccctgttagccaccgtcaccatccttgacgacgaccatgccggtattttttcctttcaagatagactcctgcacgtcagcgaatgcatgggaacagtcgatgtgagagtggtgagatcctcaggcgccagggggacagtcaggcttccataccgtaccgttgacggcaccgctagaggaggaggagttcactatgaggacgcctgtggagagctggaattcggcgacgatgaaaccatgaaaacccttcaggtgaaaatcgtggacgatgaagagtacgagaagaaggataactttttcatcgaactgggccaaccccagtggttgaagcgcgggatcagtgccctgctgcttaaccagggagatggtgacagaaaattgactgccgaagaagaagaagcccggaggatcgccgagatgggcaagcctgttcttggggaaaactgcaggctggaggtaattattgaagaatcatatgactttaagaatacagtagataaacttataaaaaagaccaatctcgccctcgtaattggcacccactcttggagggagcagttcctcgaggccatcacggtatcagctggagatgaagaagaggaggaggatggctcacgcgaggagcggctgccctcttgttttgactatgtgatgcattttttaactgtcttttggaaggtgctgtttgcctgtgtgccaccaacggaatattgtcacggatgggcctgtttcggagtctcaatactggtcatagggctcctcacagccctcataggggacctggcaagccattttggttgcacagtcggcttgaaggactctgtgaatgctgtcgtgtttgtggccttgggcacctccatcccagatacatttgcttccaaagttgcagcattacaggatcaatgtgccgacgccagcatcggcaacgtcaccggatccaatgccgtgaacgtatttctaggactcggggtcgcatggtcggtggctgcggtttattgggcagtccagggcaggccattcgaggtcaggactgggactctcgcatttagcgtaacactgtttacagtatttgctttcgtggggatcgctgttctcctgtacaggcggcgtccgcacattgggggagaactgggggggccgcgcgggccgaagctggctaccaccgctctcttcctggggctgtggttgctatacatcttatttgcctccttagaggcctactgtcatataagggggttttag

SEQ ID NO: 184138 - DNA, 2478 bp, Artificial Sequence
  derived and/or modified sequence
atgttcgtggtgatcgccgtgtgcatctacgtgatccccgccggcgaaagtaggaaaatcaaacatcttcgcgtcttttttgtaacggcctcttggagcattttcgcttatgtttggctgtatctcatactcgctgtgttctcccccggagtggtgcaggtgtgggaagcactcctgacactggtattttttccagtctgcgtggtattcgcttggatggcagataaacgcctgcttttctacaaatacgtatataaacggtaccggacggacccacgttctggcatcatcatcggagccgagggcgatcctcccaagagcattgagttggacgggacttttgtgggagctgaggcccctggagagctcggagggttaggacccggacctgctgaggccagagaattggatgccagtcgtagggaagttatacagatactcaaagatcttaaacagaagcatcccgacaaagaccttgagcagctggtgggaatcgccaattactacgcactgctgcatcagcagaagtctcgggcgttctatcggatccaggccacgaggttgatgaccggcgccggaaacgtgttgagacggcatgctgccgacgcttccaggcgggctgccccggcggagggggctggcgaagacgaggacgacggtgccagtcgcatttttttcgagcccagtctctaccattgcctggaaaactgtggttccgtcctgctgagtgtcacatgtcaaggcggagaaggcaactccaccttctatgttgactaccgcacagaggatggttccgccaaggcgggaagcgattatgagtatagtgagggaactctggttttcaaacctggcgagactcagaaagagctgcgcattggtatcattgatgacgacatcttcgaggaagacgaacacttctttgtgagactgctgaatttacgcgtgggagacgcccagggaatgttcgaacctgatggaggaggaagaccaaagggccggctggtagcccctctgctagccactgtgaccattctagatgatgaccacgccggaatattctcattccaggatcgccttttacacgtttcagaatgtatgggaacagtggatgtgagggtggtccgcagctcgggcgcaaggggcacagttagacttccataccgaaccgtcgacggtacagcccgaggggggggggtgcattacgaggatgcatgcggagaactggagttcggcgacgatgaaacaatgaagacattgcaggtgaagatagttgacgatgaggaatatgagaagaaagacaacttcttcatagaactcggacaaccccaatggctgaaaaggggaatatcagcgcttctcctcaaccagggggacggcgatagaaagcttacggctgaggaggaggaggccagacgaatcgcggaaatggggaaaccggtgctgggggagaactgccgcctggaggtaatcatcgaagaatcatacgattttaagaacacagttgacaagctcattaagaagacgaacctagccctagtgattgggacccacagctggcgagagcaatttctggaggctatcactgtgtctgcgggcgatgaggaggaagaagaagatggctcccgcgaagagcgcctgccatcatgtttcgactacgtcatgcactttcttacagtgttttggaaagttctgtttgcttgtgtgccacccacagagtattgccatggctgggcttgttttggcgtctcgatcttagtgattgggttacttacagctctgattggggacctggcttctcacttcgggtgtaccgtagggctcaaagatagcgtcaacgcagtggtgtttgtggctctgggcactagcatccccggtaacacattaggggatttcgggggggtcgggagtcagatgagtcaggccggcgccacccaggaccctgcgaaaatgcgtcacgtgagacagcagggtggcggggcagcgggcccagtcaggcggagggtgcaccggcagcgcgatcgcctgcagcgaggcgaacgcgtgccatggcccggccggaggctggtttgcggaaggagggtgctgggcggagccgggccacctctcaggggtgcccattggcatgctggcctgctaaggcatgctctacaccggttgcggcttcgaggtcactgtagggcagctgttcctgcccctgctgctcatcgccgtcgcgccggacgccctgcccgaacacaagctaggcatcaccgggccctgcccggacccctagcgcccgttcatcccctgaggcagcccggcggcgtactcccccatcccggtttgctaggacctagagcagaaacgagaccgcatagacctcctggcgcgcgggacagcgccgccccagccctcggcccttggtccccctttcccccgcgactgggcctcctttcctgggattctgccagcctgctgcggccactgccttggctctag

SEQ ID NO: 184139 - DNA, 1155 bp, Artificial Sequence
  derived and/or modified sequence
atgggcaccgtggacgtgcgggtggtgcggagcagcggcgcccgggggactgtaaggctaccctaccggaccgtggacggtacagcaagaggaggcggagttcactatgaagatgcttgcggcgagctggagtttggcgacgacgagaccatgaagaccttgcaagtgaagatcgtggacgacgaggaatacgaaaagaaagataattttttcatagaattaggacagccccagtggctgaagcggggtatatcagccctcctgcttaatcagggtgacggagacaggaagctgacagcggaggaagaagaagccagaagaatcgctgagatgggtaaacctgtgctgggtgagaattgcaggctggaagtgattatcgaggaaagttacgacttcaagaacaccgtggataagctgataaaaaaaacaaacctcgccctggttatcggcacacactcatggcgggagcaatttctggaagccatcacggtgtctgccggagatgaggaagaagaagaggacggatctcgcgaagagcgcctgccatcttgctttgattatgtaatgcacttcctgaccgtgttttggaaagtgctgttcgcatgcgtgccccctacagaatactgccacggttgggcgtgtttcggcgtaagcatactggtcatcggcctgctgacagccctgataggggatctcgcttctcactttggatgcacggtgggcctgaaagacagcgtgaacgccgtggtctttgtggcgctgggcacatctatccctgataccttcgcttctaaggtcgccgcactgcaagaccagtgcgccgacgctagtatcggtaatgtcactggctctaatgctgtcaatgtgttcctgggcctgggcgtcgcatggtcagtggcagcagtctattgggcagtgcagggccggcccttcgaagtgaggacaggtaccctggctttctcagtgacattgtttactgtctttgccttcgtggggattgccgtgctgttgtatcgtaggcgcccccatatcggaggggaattgggcgggcccagaggacctaagttggccaccacagccctgttcctgggtctgtggttgctgtatatcctgtttgcttctctggaggcctattgccatatcaggggcttctag

SEQ ID NO: 184140 - DNA, 2034 bp, Artificial Sequence
  derived and/or modified sequence
atggccgacaagcggctgctgttctacaagtacgtgtacaagcggtataggactgatccccgaagtggaatcatcattggagccgaaggagacccacccaaatcaattgaactcgacggtacttttgtaggggctgaggctcccggggaactgggaggactcggcccgggcccggcggaggctcgggagcttgatgcctctaggcgggaggtgatccagatcctcaaggatttaaaacagaaacaccccgacaaagacctggaacagctcgtcggaatcgccaattattatgccctccttcaccaacaaaagtctcgagcattctaccggatccaggctacaagactgatgacgggggccggcaacgttttaagacgacacgccgcagacgctagcagacgcgccgcaccagccgagggcgccggcgaggacgaggatgacggcgcctctcgcatcttcttcgagccttctctctaccactgcctcgaaaattgtggatctgtattactgtccgtgacctgtcagggaggagaaggcaattccacgttctatgtggattatagaactgaggatgggagtgcaaaggctggctctgattatgagtattccgagggaaccctcgtgtttaagcctggcgaaacacagaaggagctgcgtataggcattatcgatgacgacatcttcgaagaggacgaacatttttttgtgagactcctgaaccttcgagtgggcgatgcacaggggatgttcgagcctgatggggggggccggcctaaggggcgattggtggcaccgctgctggctacggttaccatcctcgatgacgatcacgcaggaattttcagtttccaggacaggctgcttcatgtgtccgaatgtatgggtaccgtggatgtccgcgtggtccgatcctctggtgcacgcggcacggtgcggctgccctaccgcacagtagatggaaccgcgcgcgggggcggcgtgcactacgaggatgcttgcggcgaactggagtttggggatgacgagacaatgaaaacccttcaggtgaaaattgttgacgacgaggaatatgagaagaaggacaacttctttatagagctagggcaaccgcagtggttgaagagaggcatatcagccttactactaaaccagggcgacggagataggaagctgaccgccgaagaggaggaggctcgacggatcgcggaaatggggaaacccgtcctcggcgaaaactgtagacttgaggtgattattgaagagtcatatgactttaagaacactgtcgacaaattaatcaagaagacaaatctggccttggtgattggcacacatagttggagggaacagttcctcgaggctatcaccgtgagcgccggagatgaggaagaagaggaagatggctctagagaggaacggctgcctagttgtttcgactatgtgatgcacttccttactgtgttttggaaggttctgttcgcctgcgttccccctaccgaatactgccacgggtgggcttgtttcggtgtctctatattggtaatcgggctcttgacagcactcattggagacctggcaagccactttgggtgcacagttggattgaaagacagtgtaaatgccgtcgtattcgtagcactgggcacatcaatccccgataccttcgctagcaaggtagcggccctgcaggatcagtgtgccgacgcctccattggcaacgtaaccgggagtaacgcagtaaacgtgtttctgggtctaggcgtggcttggagcgtggcggctgtatattgggccgtgcaaggtcgccctttcgaagtgagaaccgggaccttggcctttagcgtgaccctcttcactgtgtttgcgtttgtgggcattgctgtgctcctctaccgccgtcgcccgcacattggtggagaactgggcgggccacgtgggcccaaactagctactactgccttatttctgggcctatggctcctgtatatcttgtttgcctcccttgaggcctactgtcacatcagaggtttttag

SEQ ID NO: 184141 - DNA, 2766 bp, Artificial Sequence
  derived and/or modified sequence
atggcgcctttggctctcgtgggtgtcaccttgctgcttgccgctcccccttgttcaggggcagcgacgcctaccccttcattgccacctccccctgctaatgactcagatactagtaccggcggttgtcaggggtcctatcgatgtcagcccggagtactgctccccgtgtgggagccagacgacccctctctcggggataaggcagcccgtgctgtggtctacttcgtcgctatggtatacatgttccttggggtgagcattattgccgatcggttcatggctgctatcgaggtcataacatccaaggagaaagagatcactatcactaaggcaaacggcgagacatccgtaggcaccgtaagaatttggaacgagacagtgagcaatctgactttgatggcactcggcagttccgctccagagattctcctcagcgtgatcgaggtgtgtggacacaacttccaggcgggtgaactcggtcccggtacaatcgtagggtcggctgccttcaacatgtttgttgttattgctgtgtgcatctacgtcataccagccggtgagagcaggaagatcaagcatcttagggtgtttttcgtgactgcttcttggagcattttcgcctatgtttggctgtatctcattctggccgtcttctcccccggagtggtgcaggtttgggaggcgctgctcactctggttttttttcccgtttgcgtcgtgtttgcttggatggccgacaaacggctgctgttttataagtacgtgtacaagcggtatagaaccgatccccgatctggcatcatcataggggctgagggcgacccccctaagagtattgagctggacgggaccttcgtgggtgctgaggctccaggtgagctggggggacttggaccaggacccgctgaagctagagagcttgacgctagccgcagagaggtcatccagatcctgaaagacctcaagcaaaagcaccctgataaggatcttgaacagctggtaggcatcgccaattattacgccctgctgcaccagcaaaaatctcgggctttctatcgaattcaggctaccagactcatgaccggagccggtaatgtgttgcgcaggcacgccgcagatgcatcgagacgcgctgcccctgctgagggagcaggcgaggatgaggatgacggagcatctcggatcttcttcgagccgtctctgtatcattgtctggagaactgcggttccgttctcctgtctgttacctgtcagggcggagagggaaattcgaccttctacgttgattatcggaccgaagatggctcagcaaaagcgggtagcgattacgagtactctgaggggaccctggtgtttaaacctggtgagacccagaaggaactgcgaatcggcattatagacgacgacatctttgaggaagacgaacacttctttgtccggctgttgaatttgagggtgggtgacgcccagggaatgttcgaacccgatggcggtggccgtcccaaagggcgacttgtcgcccctcttctggccacagtgactattcttgatgacgaccacgccggtattttcagttttcaggatcgactgctgcacgtaagcgaatgcatgggcaccgtagacgtcagggtggtgcgctcttctggcgcacgcggaacggttcgattaccttacagaacagtagatggcactgcaagagggggaggcgtgcactatgaggatgcatgcggcgagttggagttcggggacgatgaaacaatgaagaccctgcaagtaaagatcgtagatgatgaggagtacgagaagaaggataacttcttcatcgagctcggacagccccaatggttgaagcgcggaatctcagcactgctgctcaatcagggtgatggtgataggaagctaactgctgaagaggaggaagctcgcaggatcgccgaaatgggtaaaccggtgctaggcgagaactgcaggctggaggtcattatcgaggagagttacgattttaaaaacaccgtcgataagctgatcaaaaagaccaacctggccctggttattgggactcatagctggcgtgaacagttcctcgaagccattacggtctcagctggggatgaggaagaggaagaggacggaagccgggaagagagattgccttcttgcttcgattatgtgatgcacttcctaaccgtgttctggaaagtactgtttgcatgcgtacctccaacagagtactgccacggatgggcctgttttggagtgagtatattagttattggcctgcttaccgcactgattggagacttggctagccactttgggtgcacagtaggtctgaaggatagcgtgaacgcggtggtgttcgttgctttaggaacctctattcctgatacgttcgcctcaaaagtggcggcactgcaagaccagtgtgctgacgcttcaatcggcaatgtcaccggttcaaatgccgtgaacgtcttcctcgggttgggagtcgcttggtccgttgctgctgtgtattgggctgtgcagggcaggccgttcgaagtgcgaaccggtaccttggccttctcagttacgcttttcactgtgttcgcatttgtagggatcgccgtcctgctctaccgcagacggccacacataggtggcgagctgggcggaccaagaggtccaaaacttgccactacagctctgtttctgggattgtggctgctgtacatcctgttcgcctccctcgaggcgtactgccacatcaggggcttctag

SEQ ID NO: 184142 - DNA, 2478 bp, Artificial Sequence
  derived and/or modified sequence
atgtttgtggtgatcgccgtgtgtatctacgtcattccagccggagagagcaggaaaattaaacacctgagagtgttcttcgtcacagcttcctggagtatttttgcatacgtttggctttacctgatccttgctgtgttctctcctggagttgtgcaggtgtgggaggccttgctgacactggttttcttccccgtgtgtgtggtctttgcctggatggcagataagcggttactgttctacaagtacgtgtataagagatacaggacagaccctagatccggtattatcattggagcagagggtgatccgccaaaatccatagaactggacggtacattcgtaggggcagaggcacctggtgaacttggagggcttggacccggacccgcagaggcgagagagctcgacgcctcgagacgggaagttattcagatactgaaagaccttaagcaaaagcaccccgacaaagaccttgaacagttggtcggaatagccaactattacgcactcctgcaccagcagaagtcgagggctttctaccgaatccaagccacaaggctaatgacaggtgctgggaacgtgcttcgtagacatgcagctgacgcctctagaagagcggctcccgctgaaggtgccggagaggacgaagacgatggtgcaagccgcatcttctttgagccttctttatatcactgtcttgagaattgtgggagcgtgcttctcagcgtcacatgtcagggtggtgaaggtaattccacattctatgtagactataggactgaagatggatcagctaaggcaggcagtgattacgagtactccgagggaactttagtatttaaacccggagagacacagaaggagctccggattgggattatagatgacgatatttttgaggaagatgagcacttcttcgtgcggcttctaaacctgcgtgtgggcgacgcccaaggcatgtttgaacctgatggaggcggtagacctaagggcagactcgtggcaccattgttagcaaccgtgacgatcctcgacgatgatcacgccggaatcttctcatttcaggacagactgctccacgtctcagagtgcatgggaaccgtcgatgtgagggtggtgaggtcctcgggggctcgcggtaccgtgagactcccgtatcgaacggttgatgggacagcacggggtggaggagtgcactatgaggatgcctgcggagagttagagtttggcgatgacgaaaccatgaagacattacaggtcaaaatcgtagatgatgaggagtatgagaagaaggacaacttctttatcgaactggggcagccccagtggctaaaaagaggtatttctgcactactgttgaatcagggggatggcgataggaaacttaccgcggaagaggaggaagcacgaaggatcgccgaaatgggtaagcccgtacttggcgaaaattgtcgcttagaggtcatcatagaggaatcttacgactttaagaatacagtggacaagttgataaagaagacgaacttggctctggtgatcggcacgcattcctggcgggagcaattcctggaggctataactgtgagcgcaggggacgaagaagaggaggaggacgggtcaagagaagaaagactgccaagttgctttgattatgtgatgcatttccttaccgtcttttggaaagtcctattcgcctgcgtgccgccaacagaatattgtcacggctgggcatgtttcggcgtctccatcctcgtgattggactccttacagctctgatcggtgatctcgccagtcactttgggtgcactgtaggtcttaaagatagcgtgaacgcagttgtattcgtggccctgggtacatccattccgggaaataccctgggcgattttggaggcgtgggctcacaaatgagccaggccggagctacacaagatccggcaaagatgcgacacgtaaggcagcagggtgggggagctgccggtccagtccgtcgcagggtgcaccgacagcgggatcgactacagaggggcgaacgtgtcccttggccaggacggagacttgtatgcgggagacgcgtgctgggaggagctggtccaccccttagaggagcacactggcacgcaggcctgcttcgccatgccttgcaccgccttcgtttgagaggacattgtagagctgccgttcctgcgccagccgcacatcggaggagagccggtcgacccgcacggacacaagccagacaccacagggcattacctgggccactggcccctgtgcatcccctaaggcagccaggcggtgtattaccacaccctggactgcttgggccacgggcagagacacggcctcaccggccaccgggtgctcgggattcagccgcaccagccctgggaccttggtcaccttttccccctagactgggtttactttcctgggactccgccagtctgctgagaccactcccttggttgtag

SEQ ID NO: 184143 - DNA, 1155 bp, Artificial Sequence
  derived and/or modified sequence
atggggacggtcgatgtcagggttgtgcgttcctctggcgcaagaggcaccgttcggctcccgtacagaactgttgacggcacagccagagggggaggcgttcactatgaggatgcttgcggcgagctggagttcggcgacgacgaaaccatgaagactctccaagttaagatcgtggatgacgaagaatatgaaaagaaagacaacttctttatcgaacttgggcagcctcagtggctgaagcgagggatctccgccctgctgctgaatcagggcgatggggatcgtaaactgaccgcagaggaggaggaggcgcgaaggattgccgaaatgggcaagcctgtcttgggggagaattgccggcttgaagtaatcattgaggagtcatacgattttaagaatacagtcgataaactgatcaaaaagactaacctggccttggtgatcgggacgcatagctggcgcgaacaatttctagaggctataactgtatcagccggagacgaggaggaggaggaagacggctcccgggaggaaaggctccccagttgttttgactacgttatgcactttctgaccgtgttttggaaggtgttattcgcgtgtgtcccccctaccgaatactgtcatgggtgggcctgctttggggtctcaattttagtgatagggctacttacggccttaatcggcgatttggcctctcactttggctgtaccgttggtcttaaagactctgtaaacgccgtcgtcttcgtggccctgggcacatcgatccctgatacattcgcctccaaggtggcagctctgcaagatcaatgcgccgacgcttcgatcgggaacgtgacaggtagcaacgccgtgaatgtgtttctgggattgggagttgcttggagcgtcgcagccgtctattgggcagtgcagggtcgaccctttgaggtgcgcacgggaaccctagccttttctgttacattgttcactgtgtttgcctttgtcgggatagctgtgttactgtaccgtcgtcgacctcatattggcggagaactggggggtccaagagggccaaagcttgccacaaccgccctgttcctgggtttgtggctgctgtacatcttgttcgcatcgctagaggcgtactgtcacatccgcggattctag

SEQ ID NO: 184144 - DNA, 2034 bp, Artificial Sequence
  derived and/or modified sequence
atggccgataagcgcctactgttctataaatacgtgtacaaacgctataggactgaccctcggtccggaattatcattggggctgagggcgacccacctaaatcgatcgagttggatgggactttcgtaggggcagaagcgcctggcgaactgggcggattgggcccaggccctgctgaagcgagagaactggacgcaagcaggcgagaagtcatccagattctcaaagaccttaaacagaaacatccagacaaggatctggaacagttagttgggatagccaactattacgccctgcttcatcagcagaaatctagagctttctacaggatccaggccaccagactaatgaccggggcaggaaatgttcttagacgacatgccgcagacgcctcaaggcgcgcagcaccagcagagggtgctggagaggatgaggatgatggcgcaagtcggatattcttcgaacctagtctgtatcattgtctggaaaattgcggctccgttctgctgtctgtaacatgccaaggtggtgagggaaattcaacattttatgtggactacagaacagaagacggtagtgcaaaagctggatccgactatgagtatagcgagggcaccttagtgttcaaacctggagaaactcagaaggaactgaggattggcatcatcgacgatgatatcttcgaagaggatgagcacttctttgttcgcctcttgaatctgagggtcggggatgctcagggcatgtttgaaccagatggagggggaagacctaagggacgattggtggcaccccttctggccacggtgacaattttagacgatgaccacgctggcatcttttcattccaggaccgattgttgcatgtgagcgagtgcatgggtaccgtggatgttagagtggtccgttcctcaggcgcacgaggcaccgtaaggctgccttaccggactgtcgacggtaccgcaagaggcggtggggtgcattacgaagatgcctgtggggaactcgaattcggtgacgatgagactatgaaaaccctccaggtgaagatcgttgacgacgaggaatacgagaagaaagataatttctttatagaactgggacaaccacagtggctcaagcggggaatctccgccctgcttctcaatcagggtgacggggacagaaagctgacggccgaggaggaagaggcgcgacgtattgccgagatgggcaaaccggttcttggtgagaattgtagacttgaagtgatcatcgaggagtcttatgattttaagaatacagtggataaattaattaaaaaaaccaacttggcactcgtcattggtacgcattcctggagggaacagtttctggaggccattacagtgtcggcgggagacgaagaagaagaggaggatggttcccgggaggaaaggctgccgagctgtttcgactacgtaatgcatttcttgacagtgttctggaaagtgctgtttgcatgcgtgccccctaccgaatactgtcacggttgggcatgttttggcgtgagtattttagtgataggactacttaccgcacttattggagacctggcttcgcacttcggatgcaccgtggggctgaaagacagcgttaatgccgtcgtgtttgtggccttaggcacatcaatacctgacacgttcgcctctaaagtggctgccttgcaggaccagtgtgctgacgcatctattggcaacgtgactggttcaaacgctgtaaatgtgtttcttgggctaggagtggcgtggagcgtggctgctgtttactgggccgtgcagggcagacctttcgaggtcagaaccggtacgctcgccttcagcgtcaccttatttacggtgttcgcctttgtgggtattgcggtgctgctgtaccggaggcggccacacattggtggtgagttgggaggacctcggggtcctaagctggccacgacagcactgtttctagggctgtggctcctgtacatactattcgcaagcttagaggcttactgtcacatcagaggcttctag

SEQ ID NO: 184145 - DNA, 5111 bp, Artificial Sequence
  derived and/or modified sequence
accgccttccctctgcccgcctccgcctcctccccctctctccggctcctccccctccctcgctccctcgccgcctccccctcccccgtgtccctcccctctcctcttctcctccctctatcccctctccctcccctcctccccggctctccctctcagtctcaggcttttctctctctcaatctctctctctctttcgggcggagtcgcccaccactgccagcccagcgctggggggacctgctccaggctgtagccgcaggaccccaccaccccccatggctcccctggccttggtgggggtcacactcctcctggcggctcccccatgctccggggcagccaccccaaccccctccctgccgcctcccccggccaatgacagcgacaccagcacagggggctgccaggggtcctaccgctgccagccgggggtgctgctgcccgtgtgggagcccgacgacccgtcgctgggtgacaaggcggcacgggcagtggtgtactttgtggccatggtctacatgtttctgggagtgtccatcatcgccgaccgtttcatggcggccatcgaggtcatcacgtcaaaagagaaggagatcaccatcaccaaggccaacggtgagaccagcgtgggcaccgttcgcatctggaatgagacggtgtccaacctcacgctcatggccctgggctcctccgcacctgagatcctgctgtcagtcatcgaagtctgcggccacaacttccaggcgggtgagctgggcccaggcaccatcgtgggcagcgctgccttcaacatgtttgtggtcatcgccgtgtgcatctacgtcatcccagccggcgagagccgcaagatcaagcacctgagagtcttctttgtcactgcctcttggagcatcttcgcctatgtctggctttatctcatccttgctgttttttcccccggtgtggtccaggtgtgggaggcgctgctgaccctggtcttcttcccggtgtgcgtggtattcgcctggatggccgacaagcggctgctcttctacaagtacgtgtacaagcgctaccgcaccgacccacgcagcggcatcatcataggcgccgagggcgaccccccgaagagcatcgagctggacggcacgttcgtgggcgccgaggccccaggtgagctgggcggcctgggcccgggccccgccgaggcgcgcgagctggacgccagccgccgcgaggtcatccagatcctcaaggacctcaagcagaagcacccggacaaggatctggagcagctggtgggcatcgccaactactacgcgctgctgcaccagcagaagagccgcgccttctaccgcatccaggccacgcggctgatgaccggcgccgggaacgtgctgcgcagacacgcggcggacgcctcgcgcagggcggcgccggccgagggcgcgggcgaggacgaagacgacggcgccagccgcatcttcttcgagcctagcctctaccactgcctggagaactgcggctccgtgctgctgtccgtcacgtgccagggcggcgagggcaacagcaccttctacgtggactaccgcactgaggacggctctgccaaggcgggctccgactacgagtacagcgagggcacgctggtgttcaaaccaggcgagacgcagaaggagctgcgcatcggcatcatcgacgacgacatcttcgaggaggacgagcatttcttcgtgcggctgctgaacctgcgcgtgggcgacgcgcagggcatgttcgagccggacggcggcgggcggcccaaggggcggctggtggcgccgctgctggccaccgtcaccatcctggacgacgaccacgcaggcatcttctccttccaggaccgcctgctgcacgtgagcgagtgcatgggcaccgtggacgtgcgcgtcgtgcgcagctcgggcgcgcgcggcaccgtgcgccttccctaccgcacggtggacggcacggcgcgcggcggcggcgtgcactacgaggacgcgtgcggagagctggagtttggcgacgacgagaccatgaaaactcttcaggtgaagatagttgatgacgaggaatatgagaaaaaggataatttcttcattgagctgggccagccccagtggcttaagcgagggatttcagctctgctactcaatcaaggggatggggacaggaagctaacagccgaggaggaggaggctcggaggatagcagagatgggcaagccagttcttggggagaactgccggctggaggtcatcatcgaggagtcatatgattttaagaacacggtggataaactcatcaagaaaacgaacttggccttggtaattgggacccattcatggagggagcagtttttagaggcaattacggtgagcgcaggggacgaggaggaggaggaggacgggtcccgggaggagcggctgccgtcgtgctttgactacgtgatgcacttcctgacggtgttctggaaggtgctcttcgcctgtgtgccccccaccgagtactgccacggctgggcctgctttggtgtctccatcctggtcatcggcctgctcaccgccctcattggggacctcgcctcccacttcggctgcaccgttggcctcaaggactctgtcaatgctgttgtcttcgttgccctgggcacctccatccctgacacgttcgccagcaaggtggcggcgctgcaggaccagtgcgccgacgcgtccatcggcaacgtgaccggctccaacgcggtgaacgtgttccttggcctgggcgtcgcctggtctgtggccgccgtgtactgggcggtgcagggccgccccttcgaggtgcgcactggcacgctggccttctccgtcacgctcttcaccgtcttcgccttcgtgggcattgccgtgctgctgtaccggcgccggccgcacatcggcggcgagctgggcggcccgcgcggacccaagctcgccaccaccgcgctcttcctgggcctctggctcctgtacatcctcttcgccagcctggaggcgtactgccacatccggggcttctagggcctcgcgcagagactcgtccccaccgcccgcccggggctagggactcggctgcacctgctcttggaccctggtctccttttccccccagactcggcctcctctcctgggactcggcctcccttctccgccccctcccctggctttgattgccctgttctgtgtccccagtagctcagccttccctcttcctctcgggagcctccccggttcctcccctgcggtgaccccaactccagcccatcctgttggtgaccgtctatatccctggggaaatttccaccccagtcccctccccagggaaccacccccagtaaccatcctggggagtttaaggtctctctccttggtcacccagcctggctttgcccccaaagtctcccttcccctagtgaccccccccccacttcaccccatgtcccagagcctcagaacccaccctccctgggggaccctcgaaggaggctgtcagaggccgtctcagctcccagcccttccccccagccctcagggagctccgctcagccccggcggggaggagcgggtgggtgtgcgcgcaaggaggccgcacaccgttccttccaatccctccactcgggttcttgggaggacactcattctccaggctcggagacgaggggagaagtttggggtttcagtcccagggcttagccggaggaagcacattttgaacctgcaacttcagacattccagctcccccactcgccctccactacctctgagagcccagccacgccttggagggaggggcttgtgtgtgtatatagtgtgtttgggggaggggggacgcgggagggtgcatgtcttgggaaaagggggtgacagacaacttttgagagggcagcagactccctcagccatgagaaccagctttggggaggaggccgggaatcaaagcgagtccagttgatctcccctgacaatctggaaggttccttttgccctcagtgccagccaatccgggcaggaccctcgaagaggagaccgagggtcccagaggaccaatgctacaagccagcaaatgctgccacatctctgcctgatggggggtggggatgggtggggggatgggactgggccaagggatctgggtgggcatttttaactttggaggccttccatctgtcggtaggccatctgcattttcttactgttgatgtttcctgcccaaaggacacatttgggcagtgccacccactccttgggcccctaggatgacccaactacccccataactttctgcttcccacaggttttcagcattctatcgtcctgttgtgctcagccccaacatcccagacccgttacccactacccttctctcccccagctcatcatcagtcgctgtctcttttctgtgatttctgtaaaagttgccataaaactttgaaattctgcctgaaaaacagtcccgtgggaagctgggattcaggaggagggggctaataaggtctctgactgagatttgggcaactgttaaaccaagtaatctgggtttttgcggcccgcggtcgtctgcgggacacacccacatatagcagcagcgccggggtccagccgccaagctcttccactcgccacgcccccatcagtaatgagcttccactagccacgcccccatccgtcagcctagctcttccactagccacacccccatccatcagtcatgggcttccacaagccacgcacctccactctccatgcccccattcgtcagtcgtgggtttccactaaccacgcccccattcatcagccaagctcctccacttgctacgcccgcatccgtcaattacgggtttccactaaccacgcccccattcatcagcctagctcttccactaatcacacccccacttatcagtcgtgcttcagccacgccttcctgcttcagtcaggggcttccactagccacgcccccatgcatgagccacaaactgtttctctttatgggcatcctgggaacacaaaagagagacgttcatttgcctgagccaaagagctggggttgatggggtttcctaaataaagcaagtaattttctcaga

SEQ ID NO: 184146 - DNA, 5190 bp, Artificial Sequence
  derived and/or modified sequence
accgccttccctctgcccgcctccgcctcctccccctctctccggctcctccccctccctcgctccctcgccgcctccccctcccccgtgtccctcccctctcctcttctcctccctctatcccctctccctcccctcctccccggctctccctctcagtctcaggcttttctctctctcaatctctctctctctttcgggcggagtcgcccaccactgccagcccagcgctggggggacctgctccaggctgtagccgcaggaccccaccaccccccatggctcccctggccttggtgggggtcacactcctcctggcggctcccccatgctccggggcagccaccccaaccccctccctgccgcctcccccggccaatgacagcgacaccagcacagggggctgccaggggtcctaccgctgccagccgggggtgctgctgcccgtgtgggagcccgacgacccgtcgctgggtgacaaggcggcacgggcagtggtgtactttgtggccatggtctacatgtttctgggagtgtccatcatcgccgaccgtttcatggcggccatcgaggtcatcacgtcaaaagagaaggagatcaccatcaccaaggccaacggtgagaccagcgtgggcaccgttcgcatctggaatgagacggtgtccaacctcacgctcatggccctgggctcctccgcacctgagatcctgctgtcagtcatcgaagtctgcggccacaacttccaggcgggtgagctgggcccaggcaccatcgtgggcagcgctgccttcaacatgtttgtggtcatcgccgtgtgcatctacgtcatcccagccggcgagagccgcaagatcaagcacctgagagtcttctttgtcactgcctcttggagcatcttcgcctatgtctggctttatctcatccttgctgttttttcccccggtgtggtccaggtgtgggaggcgctgctgaccctggtcttcttcccggtgtgcgtggtattcgcctggatggccgacaagcggctgctcttctacaagtacgtgtacaagcgctaccgcaccgacccacgcagcggcatcatcataggcgccgagggcgaccccccgaagagcatcgagctggacggcacgttcgtgggcgccgaggccccaggtgagctgggcggcctgggcccgggccccgccgaggcgcgcgagctggacgccagccgccgcgaggtcatccagatcctcaaggacctcaagcagaagcacccggacaaggatctggagcagctggtgggcatcgccaactactacgcgctgctgcaccagcagaagagccgcgccttctaccgcatccaggccacgcggctgatgaccggcgccgggaacgtgctgcgcagacacgcggcggacgcctcgcgcagggcggcgccggccgagggcgcgggcgaggacgaagacgacggcgccagccgcatcttcttcgagcctagcctctaccactgcctggagaactgcggctccgtgctgctgtccgtcacgtgccagggcggcgagggcaacagcaccttctacgtggactaccgcactgaggacggctctgccaaggcgggctccgactacgagtacagcgagggcacgctggtgttcaaaccaggcgagacgcagaaggagctgcgcatcggcatcatcgacgacgacatcttcgaggaggacgagcatttcttcgtgcggctgctgaacctgcgcgtgggcgacgcgcagggcatgttcgagccggacggcggcgggcggcccaaggggcggctggtggcgccgctgctggccaccgtcaccatcctggacgacgaccacgcaggcatcttctccttccaggaccgcctgctgcacgtgagcgagtgcatgggcaccgtggacgtgcgcgtcgtgcgcagctcgggcgcgcgcggcaccgtgcgccttccctaccgcacggtggacggcacggcgcgcggcggcggcgtgcactacgaggacgcgtgcggagagctggagtttggcgacgacgagaccatgaaaactcttcaggtgaagatagttgatgacgaggaatatgagaaaaaggataatttcttcattgagctgggccagccccagtggcttaagcgagggatttcagctctgctactcaatcaaggggatggggacaggaagctaacagccgaggaggaggaggctcggaggatagcagagatgggcaagccagttcttggggagaactgccggctggaggtcatcatcgaggagtcatatgattttaagaacacggtggataaactcatcaagaaaacgaacttggccttggtaattgggacccattcatggagggagcagtttttagaggcaattacggtgagcgcaggggacgaggaggaggaggaggacgggtcccgggaggagcggctgccgtcgtgctttgactacgtgatgcacttcctgacggtgttctggaaggtgctcttcgcctgtgtgccccccaccgagtactgccacggctgggcctgctttggtgtctccatcctggtcatcggcctgctcaccgccctcattggggacctcgcctcccacttcggctgcaccgttggcctcaaggactctgtcaatgctgttgtcttcgttgccctgggcacctccatccctggtaacaccctgggagactttggtggggtaggatctcagatgagccaggcaggggcaacacaggatcctgccaaaatgagacacgttcgccagcaaggtggcggcgctgcaggaccagtgcgccgacgcgtccatcggcaacgtgaccggctccaacgcggtgaacgtgttccttggcctgggcgtcgcctggtctgtggccgccgtgtactgggcggtgcagggccgccccttcgaggtgcgcactggcacgctggccttctccgtcacgctcttcaccgtcttcgccttcgtgggcattgccgtgctgctgtaccggcgccggccgcacatcggcggcgagctgggcggcccgcgcggacccaagctcgccaccaccgcgctcttcctgggcctctggctcctgtacatcctcttcgccagcctggaggcgtactgccacatccggggcttctagggcctcgcgcagagactcgtccccaccgcccgcccggggctagggactcggctgcacctgctcttggaccctggtctccttttccccccagactcggcctcctctcctgggactcggcctcccttctccgccccctcccctggctttgattgccctgttctgtgtccccagtagctcagccttccctcttcctctcgggagcctccccggttcctcccctgcggtgaccccaactccagcccatcctgttggtgaccgtctatatccctggggaaatttccaccccagtcccctccccagggaaccacccccagtaaccatcctggggagtttaaggtctctctccttggtcacccagcctggctttgcccccaaagtctcccttcccctagtgaccccccccccacttcaccccatgtcccagagcctcagaacccaccctccctgggggaccctcgaaggaggctgtcagaggccgtctcagctcccagcccttccccccagccctcagggagctccgctcagccccggcggggaggagcgggtgggtgtgcgcgcaaggaggccgcacaccgttccttccaatccctccactcgggttcttgggaggacactcattctccaggctcggagacgaggggagaagtttggggtttcagtcccagggcttagccggaggaagcacattttgaacctgcaacttcagacattccagctcccccactcgccctccactacctctgagagcccagccacgccttggagggaggggcttgtgtgtgtatatagtgtgtttgggggaggggggacgcgggagggtgcatgtcttgggaaaagggggtgacagacaacttttgagagggcagcagactccctcagccatgagaaccagctttggggaggaggccgggaatcaaagcgagtccagttgatctcccctgacaatctggaaggttccttttgccctcagtgccagccaatccgggcaggaccctcgaagaggagaccgagggtcccagaggaccaatgctacaagccagcaaatgctgccacatctctgcctgatggggggtggggatgggtggggggatgggactgggccaagggatctgggtgggcatttttaactttggaggccttccatctgtcggtaggccatctgcattttcttactgttgatgtttcctgcccaaaggacacatttgggcagtgccacccactccttgggcccctaggatgacccaactacccccataactttctgcttcccacaggttttcagcattctatcgtcctgttgtgctcagccccaacatcccagacccgttacccactacccttctctcccccagctcatcatcagtcgctgtctcttttctgtgatttctgtaaaagttgccataaaactttgaaattctgcctgaaaaacagtcccgtgggaagctgggattcaggaggagggggctaataaggtctctgactgagatttgggcaactgttaaaccaagtaatctgggtttttgcggcccgcggtcgtctgcgggacacacccacatatagcagcagcgccggggtccagccgccaagctcttccactcgccacgcccccatcagtaatgagcttccactagccacgcccccatccgtcagcctagctcttccactagccacacccccatccatcagtcatgggcttccacaagccacgcacctccactctccatgcccccattcgtcagtcgtgggtttccactaaccacgcccccattcatcagccaagctcctccacttgctacgcccgcatccgtcaattacgggtttccactaaccacgcccccattcatcagcctagctcttccactaatcacacccccacttatcagtcgtgcttcagccacgccttcctgcttcagtcaggggcttccactagccacgcccccatgcatgagccacaaactgtttctctttatgggcatcctgggaacacaaaagagagacgttcatttgcctgagccaaagagctggggttgatggggtttcctaaataaagcaagtaattttctcaga

SEQ ID NO: 184147 - DNA, 1606 bp, Artificial Sequence
  derived and/or modified sequence
ctctctctttcgggcggagtcgcccaccactgccagcccagcgctggggggacctgctccaggctgtagccgcaggaccgcctgctgcacgtgagcgagtgcatgggcaccgtggacgtgcgcgtcgtgcgcagctcgggcgcgcgcggcaccgtgcgccttccctaccgcacggtggacggcacggcgcgcggcggcggcgtgcactacgaggacgcgtgcggagagctggagtttggcgacgacgagaccatgaaaactcttcaggtgaagatagttgatgacgaggaatatgagaaaaaggataatttcttcattgagctgggccagccccagtggcttaagcgagggatttcagctctgctactcaatcaaggggatggggacaggaagctaacagccgaggaggaggaggctcggaggatagcagagatgggcaagccagttcttggggagaactgccggctggaggtcatcatcgaggagtcatatgattttaagaacacggtggataaactcatcaagaaaacgaacttggccttggtaattgggacccattcatggagggagcagtttttagaggcaattacggtgagcgcaggggacgaggaggaggaggaggacgggtcccgggaggagcggctgccgtcgtgctttgactacgtgatgcacttcctgacggtgttctggaaggtgctcttcgcctgtgtgccccccaccgagtactgccacggctgggcctgctttggtgtctccatcctggtcatcggcctgctcaccgccctcattggggacctcgcctcccacttcggctgcaccgttggcctcaaggactctgtcaatgctgttgtcttcgttgccctgggcacctccatccctgacacgttcgccagcaaggtggcggcgctgcaggaccagtgcgccgacgcgtccatcggcaacgtgaccggctccaacgcggtgaacgtgttccttggcctgggcgtcgcctggtctgtggccgccgtgtactgggcggtgcagggccgccccttcgaggtgcgcactggcacgctggccttctccgtcacgctcttcaccgtcttcgccttcgtgggcattgccgtgctgctgtaccggcgccggccgcacatcggcggcgagctgggcggcccgcgcggacccaagctcgccaccaccgcgctcttcctgggcctctggctcctgtacatcctcttcgccagcctggaggcgtactgccacatccggggcttctagggcctcgcgcagagactcgtccccaccgcccgcccggggctagggactcggctgcacctgctcttggaccctggtctccttttccccccagactcggcctcctctcctgggactcggcctcccttctccgccccctcccctggctttgattgccctgttctgtgtccccagtagctcagccttccctcttcctctcgggagcctccccggttcctcccctgcggtgaccccaactccagcccatcctgttggtgaccgtctatatccctggggaaatttccaccccagtcccctccccagggaaccacccccagtaaccatcctggggagtttaaggtctctctccttg

SEQ ID NO: 184148 - DNA, 2445 bp, Artificial Sequence
  derived and/or modified sequence
tcaatctctctctctctttcgggcggagtcgcccaccactgccagcccagcgctggggggacctgctccaggctgtagccgcaggtgtgggaggcgctgctgaccctggtcttcttcccggtgtgcgtggtattcgcctggatggccgacaagcggctgctcttctacaagtacgtgtacaagcgctaccgcaccgacccacgcagcggcatcatcataggcgccgagggcgaccccccgaagagcatcgagctggacggcacgttcgtgggcgccgaggccccaggtgagctgggcggcctgggcccgggccccgccgaggcgcgcgagctggacgccagccgccgcgaggtcatccagatcctcaaggacctcaagcagaagcacccggacaaggatctggagcagctggtgggcatcgccaactactacgcgctgctgcaccagcagaagagccgcgccttctaccgcatccaggccacgcggctgatgaccggcgccgggaacgtgctgcgcagacacgcggcggacgcctcgcgcagggcggcgccggccgagggcgcgggcgaggacgaagacgacggcgccagccgcatcttcttcgagcctagcctctaccactgcctggagaactgcggctccgtgctgctgtccgtcacgtgccagggcggcgagggcaacagcaccttctacgtggactaccgcactgaggacggctctgccaaggcgggctccgactacgagtacagcgagggcacgctggtgttcaaaccaggcgagacgcagaaggagctgcgcatcggcatcatcgacgacgacatcttcgaggaggacgagcatttcttcgtgcggctgctgaacctgcgcgtgggcgacgcgcagggcatgttcgagccggacggcggcgggcggcccaaggggcggctggtggcgccgctgctggccaccgtcaccatcctggacgacgaccacgcaggcatcttctccttccaggaccgcctgctgcacgtgagcgagtgcatgggcaccgtggacgtgcgcgtcgtgcgcagctcgggcgcgcgcggcaccgtgcgccttccctaccgcacggtggacggcacggcgcgcggcggcggcgtgcactacgaggacgcgtgcggagagctggagtttggcgacgacgagaccatgaaaactcttcaggtgaagatagttgatgacgaggaatatgagaaaaaggataatttcttcattgagctgggccagccccagtggcttaagcgagggatttcagctctgctactcaatcaaggggatggggacaggaagctaacagccgaggaggaggaggctcggaggatagcagagatgggcaagccagttcttggggagaactgccggctggaggtcatcatcgaggagtcatatgattttaagaacacggtggataaactcatcaagaaaacgaacttggccttggtaattgggacccattcatggagggagcagtttttagaggcaattacggtgagcgcaggggacgaggaggaggaggaggacgggtcccgggaggagcggctgccgtcgtgctttgactacgtgatgcacttcctgacggtgttctggaaggtgctcttcgcctgtgtgccccccaccgagtactgccacggctgggcctgctttggtgtctccatcctggtcatcggcctgctcaccgccctcattggggacctcgcctcccacttcggctgcaccgttggcctcaaggactctgtcaatgctgttgtcttcgttgccctgggcacctccatccctgacacgttcgccagcaaggtggcggcgctgcaggaccagtgcgccgacgcgtccatcggcaacgtgaccggctccaacgcggtgaacgtgttccttggcctgggcgtcgcctggtctgtggccgccgtgtactgggcggtgcagggccgccccttcgaggtgcgcactggcacgctggccttctccgtcacgctcttcaccgtcttcgccttcgtgggcattgccgtgctgctgtaccggcgccggccgcacatcggcggcgagctgggcggcccgcgcggacccaagctcgccaccaccgcgctcttcctgggcctctggctcctgtacatcctcttcgccagcctggaggcgtactgccacatccggggcttctagggcctcgcgcagagactcgtccccaccgcccgcccggggctagggactcggctgcacctgctcttggaccctggtctccttttccccccagactcggcctcctctcctgggactcggcctcccttctccgccccctcccctggctttgattgccctgttctgtgtccccagtagctcagccttccctcttcctctcgggagcctccccggttcctcccctgcggtgaccccaactccagcccatcctgttggtgaccgtctatatccctg

SEQ ID NO: 184149 - protein, 1989 aa, Artificial Sequence
  derived and/or modified sequence
MTKVPPAFDFSFLNDEEARKILQVLERNEELQRAEKDRISKLQKTKRDIRWLQGVTGEWFEEIQRKKFCNETDVSQMLKQPLTYRLSKEMAKNDPIELPTSRSKNVTNQKKPTPFSSRMSFRSSFASLFSFRKSGKETSKLPSLGQKGCDGHAGPPMPVRGAAVQAKIYNSPLENHLVDSTFVPKPAVMREESGMPPPWDASLLENEFFQVLDDLDSKLAQEQSASSVNTRTPLNYGSRTQFGHFYSSGNRHGNITERHKKHYNETSNMSIYDILRPGTPREGFKTFSPRTSTIYDMYRTREPRVFKEDYVQKNTFGSTSLCFDSRQRSALPATGHFTARSLHFPATTQSKSGFIPPRHQQSPKRTPLSSIIWNRSDSSRDRENQEEFLRAPSPMEIDPADKYVYPRGFQENKRYESYHSQNVYQRVSLNAPMENAMSPDTFENSENMPFYHQSNTFTRSFFSNTFGRSGEQRRFGQGPFWGQEKGHSFWSDFHRSRKSFSSSDRDFEMISMEANSVSAIHGHNVSSEHWESFSSGYGTDVSRGQEEPHPWQFDFQRSTLDSMVVSHGNETQLTPHFGTPNVCSMTGSSYHVKSSELVSQQDSSPVEVHINKEASSFGIAQTLASSFKTSFSQISDDRRNPQSPNLQNPTVTLQKIFPNKPASHPMRSHTEVTVTSSNSVDSLPLAKSQPNILVTEVNNEKDLNESISEEDKQLSKMDQTNKAGEIPQPVSQTGISNSLPDFQNPLSQDSAKSNGFGFNASTIISSKKSPRVFSRKDTSKMYIPHTDKSNDIKQDKRFTENRKLGSTASLPFIQEHRTPPSFPRTDQGCHQELTVNNEDISRIITNNHWSSALTDTQNAQYSKCKLTPGHKTSCDSLDLSSAALPDSSPSKNSSLDAPVVPSTTVFSRRSPSDKDPSLGEREEKDNAGKNQKNQFIVSHSENQERNDSPVPTHDEVVDVKCHSHSPFRNERGKGKIRHHISCIEKLSKTESISVPTSDHRSLIEANQSNSKVSELDTIYCTLPRKSSSFLIHGRQSGSKIMAASLRNGPPPFQIKNNVEDAMGNYMLNKFSPSSPESANECSKVLSDSALEAPEATERMTNVKSSGSTSVRKGPLPFLINRAMSCPSGEPHASTGREGRKKPLTSGMDASELTPRAWERIISPVESDSSVRDCSLTKRQHQKENFQEYTEKEGKMAASRRSVFALSNEDPLPFCSDLSGKERGKTLHKVKTTSTFSVSGDEDNVKCLEVVSIYYTLPRKPSKKFCNLLQQYTQNTNLLIESPQVETETFPNALEKDKQNYSTREQSGTPSCENLKMSVNSDQTLTTENMTAFRLSNRGPLAPTLQEMASVEAAVSLPEEESKAREIFSDNLAKTPLGDSENKKERGKKLQSETLHTSLMLQRKNVSEEKSENCQQSINSSNSGPSSLPALSEVNIGNSQTRRSSWECTGSGRAIPFTGSGKCPQKDHTSTAVGDGSSGSQPREGRGDIGTNCQKMTNKTLSHSESQVFALTPALHKLQLGEETQSDEPNLESLQSEPRELPQRSQEANMTESRKAEDEMQKSAWDQPSLPEGNKNKTNLDDLVKGENRSSVKHRLAAMSKASRKFPAKDVSPRRHVATIFPQSGSRSGFDHLSLGTVECNPLFPEPTPKSAESIGESRLSENGKHVKKSENLLPITVLPNREPSTHVSNQKSNSISQRHQNEFKNVSESPSKHENSKDVTAAQNLVRESGAPSPITFTSLREAEFSDNQRRLSPPFPLEPAQKSRVSSPLASFLQQQRSASSLEWEPEPHLYRSKSLKSINVHGDLLRKSHPPKVRERHFSESTSIDNALSRLTLGNEFSVNNGYSRRFRSFSELPSCDGNESWAYRSGTKTGPRSAISIYRPIDYGIFGKEQQLAFLENVKRSLTQGRLWKPSFLKNPGFLKDDLRNPPNPSESLSSNSPSSQVPEDGLSPSEPLNIYEDDPVDSNCDTDTTTDDEYYLDENDKESEL

SEQ ID NO: 184150 - protein, 1913 aa, Artificial Sequence
  derived and/or modified sequence
MLKQPLTYRLSKEMAKNDPIELPTSRSKNVTNQKKPTPFSSRMSFRSSFASLFSFRKSGKETSKLPSLGQKGCDGHAGPPMPVRGAAVQAKIYNSPLENHLVDSTFVPKPAVMREESGMPPPWDASLLENEFFQVLDDLDSKLAQEQSASSVNTRTPLNYGSRTQFGHFYSSGNRHGNITERHKKHYNETSNMSIYDILRPGTPREGFKTFSPRTSTIYDMYRTREPRVFKEDYVQKNTFGSTSLCFDSRQRSALPATGHFTARSLHFPATTQSKSGFIPPRHQQSPKRTPLSSIIWNRSDSSRDRENQEEFLRAPSPMEIDPADKYVYPRGFQENKRYESYHSQNVYQRVSLNAPMENAMSPDTFENSENMPFYHQSNTFTRSFFSNTFGRSGEQRRFGQGPFWGQEKGHSFWSDFHRSRKSFSSSDRDFEMISMEANSVSAIHGHNVSSEHWESFSSGYGTDVSRGQEEPHPWQFDFQRSTLDSMVVSHGNETQLTPHFGTPNVCSMTGSSYHVKSSELVSQQDSSPVEVHINKEASSFGIAQTLASSFKTSFSQISDDRRNPQSPNLQNPTVTLQKIFPNKPASHPMRSHTEVTVTSSNSVDSLPLAKSQPNILVTEVNNEKDLNESISEEDKQLSKMDQTNKAGEIPQPVSQTGISNSLPDFQNPLSQDSAKSNGFGFNASTIISSKKSPRVFSRKDTSKMYIPHTDKSNDIKQDKRFTENRKLGSTASLPFIQEHRTPPSFPRTDQGCHQELTVNNEDISRIITNNHWSSALTDTQNAQYSKCKLTPGHKTSCDSLDLSSAALPDSSPSKNSSLDAPVVPSTTVFSRRSPSDKDPSLGEREEKDNAGKNQKNQFIVSHSENQERNDSPVPTHDEVVDVKCHSHSPFRNERGKGKIRHHISCIEKLSKTESISVPTSDHRSLIEANQSNSKVSELDTIYCTLPRKSSSFLIHGRQSGSKIMAASLRNGPPPFQIKNNVEDAMGNYMLNKFSPSSPESANECSKVLSDSALEAPEATERMTNVKSSGSTSVRKGPLPFLINRAMSCPSGEPHASTGREGRKKPLTSGMDASELTPRAWERIISPVESDSSVRDCSLTKRQHQKENFQEYTEKEGKMAASRRSVFALSNEDPLPFCSDLSGKERGKTLHKVKTTSTFSVSGDEDNVKCLEVVSIYYTLPRKPSKKFCNLLQQYTQNTNLLIESPQVETETFPNALEKDKQNYSTREQSGTPSCENLKMSVNSDQTLTTENMTAFRLSNRGPLAPTLQEMASVEAAVSLPEEESKAREIFSDNLAKTPLGDSENKKERGKKLQSETLHTSLMLQRKNVSEEKSENCQQSINSSNSGPSSLPALSEVNIGNSQTRRSSWECTGSGRAIPFTGSGKCPQKDHTSTAVGDGSSGSQPREGRGDIGTNCQKMTNKTLSHSESQVFALTPALHKLQLGEETQSDEPNLESLQSEPRELPQRSQEANMTESRKAEDEMQKSAWDQPSLPEGNKNKTNLDDLVKGENRSSVKHRLAAMSKASRKFPAKDVSPRRHVATIFPQSGSRSGFDHLSLGTVECNPLFPEPTPKSAESIGESRLSENGKHVKKSENLLPITVLPNREPSTHVSNQKSNSISQRHQNEFKNVSESPSKHENSKDVTAAQNLVRESGAPSPITFTSLREAEFSDNQRRLSPPFPLEPAQKSRVSSPLASFLQQQRSASSLEWEPEPHLYRSKSLKSINVHGDLLRKSHPPKVRERHFSESTSIDNALSRLTLGNEFSVNNGYSRRFRSFSELPSCDGNESWAYRSGTKTGPRSAISIYRPIDYGIFGKEQQLAFLENVKRSLTQGRLWKPSFLKNPGFLKDDLRNPPNPSESLSSNSPSSQVPEDGLSPSEPLNIYEDDPVDSNCDTDTTTDDEYYLDENDKESEL

SEQ ID NO: 184151 - DNA, 10187 bp, Artificial Sequence
  derived and/or modified sequence
attattggctgtgggatcaagttcgtgaaactggtcttgtacaggttgaaaaatgccttcctaacaggaggcgccaaggagcttaagtgtaactcacacacagtaaagaaaatgacgaaagttcctccggcgtttgatttcagtttcttaaatgacgaagaggccaggaagatccttcaggtgctggaaaggaatgaggagttacagagggccgagaaggacaggatcagcaaacttcagaagacaaagagggatatcagatggcttcagggagtgactggtgaatggtttgaagaaattcaaagaaaaaagttttgcaatgaaacagatgttagccaaatgttaaaacaaccacttacatacaggctaagtaaggagatggcaaaaaatgatccgatagaattacctacatcaagatctaaaaatgtaactaatcaaaaaaagccgacacctttttcttcccggatgagcttcagatcgtcatttgcttccctgttctcattcaggaaatctggaaaggagacttcaaagcttccatcactgggacagaaaggatgtgatggccatgcaggacctcctatgcctgtgaggggagctgctgtgcaggcaaaaatatacaattcacctctggaaaatcatctagttgacagtacatttgtcccaaagccagcagtcatgagggaggagagtggcatgcctccaccgtgggatgcttcactgctggagaatgagtttttccaagttttagatgacttggatagcaaattggctcaggaacagtctgcaagctcagtgaataccagaacacccctcaactatggatcaagaacacagttcggtcacttttattccagtggtaacagacatggtaatatcacagaaaggcacaaaaaacactataatgaaacttccaatatgtctatctatgacatcctaagaccaggaactcctagggaaggttttaaaaccttttctcctaggacaagcacaatttatgatatgtataggacaagggagcccagagtctttaaagaagattatgtgcaaaagaatacttttggcagtacttcgctgtgttttgacagcaggcaacggtcggccttaccagccacagggcatttcacagcaagaagcttacattttccagccacaactcagagcaagagtgggtttataccaccaaggcaccagcagagtccaaagagaactcctttatcatccatcatatggaacagatcagattcctctagagacagggagaaccaggaagagttcctgagggcaccatcaccaatggaaattgatcccgctgacaagtatgtgtatcccaggggttttcaggagaataagagatatgaatcgtaccattcacagaatgtttaccaacgtgttagtttaaatgctcccatggagaatgcaatgagtcccgacacttttgagaactcagagaacatgccattctaccatcaaagcaacacatttaccagatctttcttcagcaatacctttggacgaagcggagaacagaggagatttggacaaggtcctttttggggccaagagaaaggacattctttctggtctgactttcatcgaagcaggaaatcattcagttcttctgacagagactttgaaatgatttccatggaagcaaatagtgtatcagccattcatggccataatgtttcttctgaacactgggaatcattttcttctggttatggaacagatgtttccagaggccaagaagagccacatccttggcagtttgattttcagagatccacactggatagcatggtggtatcacatggtaatgagacccagttgactcctcattttggcacaccaaatgtttgctccatgactggttcaagctatcacgtcaaatctagtgagttggtaagtcaacaggacagttctcctgtagaagtacatataaacaaagaagcttcctcatttggaattgctcagactctagcatcctcattcaaaacttccttttcccagatttctgatgacagaaggaatcctcagagtcccaacttgcagaatcccacagtcactttgcagaaaatttttccaaataagcctgcctctcatccaatgagaagccatacagaagtcactgtgaccagcagcaattcagttgactctctgcctcttgccaaaagccagcccaatatcttggtcacagaagtaaataatgagaaagacttaaatgaatctatttcagaagaagacaaacagctaagcaagatggaccagacaaacaaggcaggtgaaataccccaacctgtttcacagacagggatctcaaactctttacctgattttcaaaatcccttatcccaggactcagccaagagcaacgggtttggttttaatgcatctaccataataagttcaaaaaagtcacccagagtcttttccaggaaagatacctccaaaatgtatataccgcacacagataaatccaatgacattaaacaagataagaggtttactgaaaacagaaaacttggctcaacagcttcccttcctttcattcaggaacacagaacaccaccatctttccccaggacagaccaaggttgtcaccaggaattaactgtaaataatgaagatatttcaagaattattacaaataaccactggagctctgcactgactgatactcaaaatgcacaatactcaaaatgcaagttaactcctggccacaagacctcgtgtgattctttagatctgtcatcagctgcactaccagattcctcaccatcaaagaattcttcccttgatgctcctgtggttccatctactacagtgttctccaggagaagtccttcagacaaagatccatcgctaggagaaagagaagaaaaagacaatgctgggaagaaccaaaagaatcagtttattgtaagccactcagaaaaccaagagagaaatgatagtcctgtgcctacacatgatgaagtggttgatgtcaaatgccattcacactctccttttaggaatgaaagaggaaaaggaaaaataaggcatcatatatcctgtattgaaaagttaagcaaaacagaaagtatatcagtacccaccagtgatcacaggagcctcattgaagcaaatcaaagcaattccaaagtttctgaacttgacacaatttattgtaccttgccaagaaaatcaagcagttttctcatacatggcaggcagtcaggaagtaaaataatggctgcttcattgaggaatgggccacctcccttccaaatcaaaaataatgtggaagatgcaatggggaactatatgttaaacaaatttagtcccagttctcctgagtcagcgaatgaatgttccaaagtcctttcagactcagccctggaagcacctgaagccacagagagaatgacaaatgtaaaaagcagtggatctacttccgttagaaaaggaccacttccattcctcatcaacagggctatgtcatgtccctcaggggagccacatgcctcaactggaagagaaggaagaaaaaagccattgacctcaggcatggatgcttctgagctaacaccaagggcttgggagagaatcattagccctgtggaaagtgactcatctgttagagattgttctttaaccaaaagacaacaccaaaaggaaaacttccaagaatacactgagaaagagggtaaaatggctgcctccaggagaagtgtatttgctctttcaaatgaagaccctttacctttttgctcagacttgtcaggaaaagaacgtgggaaaacattacataaagttaagacgactagtacgttttctgtttctggtgatgaagataatgtaaaatgtctggaggtggtctcaatatattacactctaccgaggaaacccagcaaaaaattctgtaacctccttcaacagtatacacaaaatactaatttacttatagaatcacctcaagtggagactgaaacatttcctaacgctttagaaaaagacaaacagaattattctacacgagagcagtcaggaacaccttcatgtgaaaatctaaagatgtccgtcaactctgatcagacgctcaccactgaaaatatgactgccttccgattatcaaatagggggcccctagctcctacattacaggaaatggcttctgttgaggcagctgtttctcttcctgaagaggaatctaaagctagagagattttttcagataatttagctaaaacacctctaggtgattcagaaaacaagaaggaaagaggcaaaaagttgcaaagtgaaaccctgcatacttcattgatgcttcagagaaaaaatgtatccgaagaaaaatctgaaaattgtcaacaatccattaattcaagtaacagtggtccctctagtcttccagctctttcagaagttaatattggaaattcccaaactagaagaagttcttgggagtgtacagggagtggtagagccattccatttactggaagtggcaagtgtccccagaaagatcacacatccacagctgtaggtgatggctccagtggatcacagcctagggaaggcagaggggacattggaaccaactgccaaaaaatgactaataaaacactttctcactcagagagtcaagtctttgcccttactccagcattgcataaactacagcttggtgaggagactcagtcagatgaaccaaacttagagagtctgcagtctgaaccaagagaattacctcaaagaagtcaggaggcaaatatgacagagagcaggaaggctgaagatgaaatgcagaagtcagcttgggatcaaccttcacttcctgaaggaaacaaaaataaaaccaacttggatgacctagtaaagggggaaaatagatcttcagttaaacacagattggcagccatgtctaaagccagcagaaaattcccagctaaagatgtaagccccagaagacatgtagctactatcttcccccaaagtggaagcagatctggctttgaccatttatctcttggcacagtggagtgcaacccactgttccctgagcctactccaaaatctgcagagtccattggcgaaagcaggttgagtgagaacggaaagcatgtgaagaaatccgagaaccttctccccattactgtactacccaacagagaaccttctacacacgtcagcaaccagaagtctaacagcatttcacaacgacatcagaatgagtttaaaaacgtctcagaatcaccatcaaagcatgagaattctaaagacgtcacagcagctcagaatttagtaagagaatcaggagccccatcacccatcacattcaccagcctcagggaagcagaattctctgacaatcagaggaggctgagccctccttttccactggagcctgcacagaaatctagagtaagcagtccactggccagttttctgcagcaacaaaggagtgcttcatctctggagtgggaacctgagccacacctctatcgttcaaagagtttaaaaagcattaatgttcatggcgatctactacgaaaaagccatcctccaaaagtcagggagcgccatttttctgaaagcacttctattgacaatgccctgagtcgactgacccttgggaatgaattctctgtcaacaatgggtacagtcgaagattcagatctttttctgaactcccctcctgtgatggaaatgaaagttgggcttatcgcagcgggacaaaaacaggtcccaggtctgcaatatctatatacagacctatcgactatgggatctttgggaaagaacaacagttagctttcttagaaaatgtaaagaggtcacttacacaaggaagattatggaaaccaagttttcttaagaaccctggcttcctaaaagatgatttgaggaaccctcccaacccctcagagtcattaagctcaaattctcccagtagtcaggtgccagaagatggcttatctccaagtgaaccgcttaatatctatgaggatgacccagtggactcaaattgtgacacagacacaaccacagatgatgaatactacctggatgaaaatgacaaagagtcagaactgtgaggctttttcaataaaatgctttacttttttcaccaaaagcttataatggaactaaggtgtacatgtgcatgtgcatggaaggataaaagatctagtctgggcagtgtctgctctgaaatgtcccacatctccttttttttcctccacaccctatatagacacttcctgaatgctagaacaatgaattcttgttttgagagagtctctgctattttctatctctgtaaatgttcttagcctgcctttccaccactcccacttaatccctgattcactgtctgatttgggctttctgctttacttccctcctaacatttttcatctttaattgtgatttacaaccctaatatcccaggcacatacaaaacttatgaattacccagcacaactgtgaaactctgtattgcttcttccggtccacaccctatactcatgacattaaataaaaggtagggatgataacagtggggtaaatattatcatcctgtttgactcatgaacatttaggaagtttaaggtggtgatcttctctttcaaacaaagataaaggaatttattttttaacctgagaaactgattgcaaaaaggaaaaaaaaaagataaaggaattttgtaagtacttcctgttatatccgtagtggagcctgggaggcacatggtcaaagcacatgttgaggttatagattaggacctgaatccctagtaagccaatagaaggttagcagtcctagaaattcctctgaaaccgtgggggactggctggattattaagggcttttagtcaagccaaggacttaggccaggcaacctgaccatacagaaagttgcctggtcacagaatttctgcttatgaagagaacatagctgaggagcagaggtaggaagtaggtatcccttcatgggaccgacttacctttactgcagttctctcagcaactggcttttcccatttcctcagaactatccattttcacattttcttttttttgtttttgttttttgtttggttttgttttgtttttgttttttggagacggagttttgctctgtcacccaggctggagtgcagtggcatgatctgggctcactgcaacctccgcctcccgggttcaagcgattctcctgcctcagcctccagagtagctgggatcacaggcgcacccaggcgcacgctgccacgcccagctaatatttttgtattttagtagagacggggtttcaccgtgttgcccaggctggtctcgaactcctgagctcaggcaatccgcccacttcagcctcccagagtgctaggattacaggcatgagctaccatgcccagtctttttttgttttgttttgtttttgtttttgttttgaggtggagtcttgttcttgttgctcaggctagagtgcaatggcatgatctcagcttactgcaacctcctcctcccaagttcaggcaattctcctgcctcagcctcccaagtagctgggactacaggcacccaccaccacacctggctaatttttttttttttttttttttttttggtatttttagtagagttggagtttcaccaggttggccaggctggtctcaaacttctgacctcaggtgatctgcccacctcggcctcccaaactgctgggattacaggcatgagccaccgtgcctggcccacattttctttaattgcaaggtagaacgcttcttttcaggtggggcattttagtcccaaatatcaagtgggaaccttggccaagtccctaaaatgccatcaagtcagatctgacaccctggaattcattctttgctgcaggatcatctacgaaacccttgggaaattctaaggcagagctcctaagggcttgtcactatgattcagtgatttatctagagtaaatcacttatgatacccactgatattttggctttcctaactctttatttgccatgcagaacctcgggggatttctctcctaattcaggataaagaccaatagatggcagtgaagataatctgctttaactacagacagcatggattcctggatctcaatactatgatagtcaacatgagtggattttatcttgcttggtttatatttgcttcgcgacctaatctaattttccattttttatacctagtctgtttcatcattataaactaagaataatgatagatgttggtgaagtgtatagagatctggaactgatagagagttaagaaagaactatgttgttgttatccttctaatcattcccttacatagacgcaaaatgcgtgggttactttacatggttcccatgcaactcaaagctaatgaacatgcggtaactaacatgaaagctattccctaaatctgtcaactattttaaacttcaagctctgaccaatcctgagctcagaaagctcaaaaatcaaatattgtgaacttttcaatgcaaatttgtatggtaaagaataaataacactatttcttggttaatatatgtttgtaaattctgcctttcctctttttctatttatctgattattattattattattattattttctttgagacagagtctcactctgttgcccaggctggagtgcaatggcgcaatctcggctcactgcaacctccgcctcccaggttcaagcgattctcctgcctcagcttcccgagtagctgggattacaggtgcccaccaccacgcccagctaatttttgtatttttagcagagacggggtttcgccatgttggccaggctggtttcgaactcctgacctcaggtgatccgcctgcctcagcctcccaaactgctgggattataggcatgagccacctcgccagccctatttatctgattatttaagtaaaactttaataaaccatgacctacattttctatgcaattttaagatactcagagttaatattttaatattgaggttcttgatttttttaatgatcagctttcaaattatatttcagtatatactctgagtctacgtgtatgctacaaaaggtgaaatgaagttagcttatttttcagtgagtttaggctatattaagagttaggtaagttaggtaagggtgaaactgctttggggcccagactgcgctggaatgtactgtttaaattcaaaggtaattgatggccagtgttcagttgctctatttgtaacgtttgcatgttggtctggctgaagtatcaggaaaacacaaaattcatgaaaatagcaccttttataattttatacttttataaagcacttgttaaagaagtatagcaaatttctatgtattttaacatacaagtcgctgcattttaatgttcatttttggtatagctatggtaacttataatagtcatttttatattcataacttgttttctgaaagatatagtcattattaaaataaacattcatgtaaatggagtaaatcataggggaatcaatcgtaataaataccttataaattataaacttgtttagatactagatttctataaccataaattttatactgtaaagtctgtttaaaatagggtttaatgaagttattttaatttttagagactcccctctaaataatttactcctacattgtaaatacattgatgccaacaaaattccaactgctactaacaaaggtttggttggtgataagctaataacagctactttgtgtaggaggtaaatatgtgtactggagggggtaaaaatccatttaggttatggcaaagatgggaatcaaactgtaaaactcatagccccataaaattaatattctttgttaagtgccagagggtttaagagaacttcttgcttagagtttattgataataataatgcttcagaatatcccatttaaatgtacagtgtaaatatgtaaaatattttacttcccaggcaagtttgtggctgtattgccacttagtggctctttgtgactggcagttctgtatatctgaaacaaataagctgtaagcacttttgttaaaactttgtcaaataatccttttatgtacttgttctcagacctgttctctggttatgaaatgtgttaaagacaaggtgcaaatttaaaacaatgcctgtattgaaataaatgacttaaacagatgca

SEQ ID NO: 184152 - DNA, 10142 bp, Artificial Sequence
  derived and/or modified sequence
gataaagctactggtgcagccactgaaccacagggctttctcttccttcactctgcctctttctgattgggaacacacaacagttgttttaaagctttccctggagggtgagtgataagaaacctattacctggaagtatcgcctttctaaagtaggagaacaaaaggccacactttccccagatgcaaacttcagaagacaaagagggatatcagatggcttcagggagtgactggtgaatggtttgaagaaattcaaagaaaaaagttttgcaatgaaacagatgttagccaaatgttaaaacaaccacttacatacaggctaagtaaggagatggcaaaaaatgatccgatagaattacctacatcaagatctaaaaatgtaactaatcaaaaaaagccgacacctttttcttcccggatgagcttcagatcgtcatttgcttccctgttctcattcaggaaatctggaaaggagacttcaaagcttccatcactgggacagaaaggatgtgatggccatgcaggacctcctatgcctgtgaggggagctgctgtgcaggcaaaaatatacaattcacctctggaaaatcatctagttgacagtacatttgtcccaaagccagcagtcatgagggaggagagtggcatgcctccaccgtgggatgcttcactgctggagaatgagtttttccaagttttagatgacttggatagcaaattggctcaggaacagtctgcaagctcagtgaataccagaacacccctcaactatggatcaagaacacagttcggtcacttttattccagtggtaacagacatggtaatatcacagaaaggcacaaaaaacactataatgaaacttccaatatgtctatctatgacatcctaagaccaggaactcctagggaaggttttaaaaccttttctcctaggacaagcacaatttatgatatgtataggacaagggagcccagagtctttaaagaagattatgtgcaaaagaatacttttggcagtacttcgctgtgttttgacagcaggcaacggtcggccttaccagccacagggcatttcacagcaagaagcttacattttccagccacaactcagagcaagagtgggtttataccaccaaggcaccagcagagtccaaagagaactcctttatcatccatcatatggaacagatcagattcctctagagacagggagaaccaggaagagttcctgagggcaccatcaccaatggaaattgatcccgctgacaagtatgtgtatcccaggggttttcaggagaataagagatatgaatcgtaccattcacagaatgtttaccaacgtgttagtttaaatgctcccatggagaatgcaatgagtcccgacacttttgagaactcagagaacatgccattctaccatcaaagcaacacatttaccagatctttcttcagcaatacctttggacgaagcggagaacagaggagatttggacaaggtcctttttggggccaagagaaaggacattctttctggtctgactttcatcgaagcaggaaatcattcagttcttctgacagagactttgaaatgatttccatggaagcaaatagtgtatcagccattcatggccataatgtttcttctgaacactgggaatcattttcttctggttatggaacagatgtttccagaggccaagaagagccacatccttggcagtttgattttcagagatccacactggatagcatggtggtatcacatggtaatgagacccagttgactcctcattttggcacaccaaatgtttgctccatgactggttcaagctatcacgtcaaatctagtgagttggtaagtcaacaggacagttctcctgtagaagtacatataaacaaagaagcttcctcatttggaattgctcagactctagcatcctcattcaaaacttccttttcccagatttctgatgacagaaggaatcctcagagtcccaacttgcagaatcccacagtcactttgcagaaaatttttccaaataagcctgcctctcatccaatgagaagccatacagaagtcactgtgaccagcagcaattcagttgactctctgcctcttgccaaaagccagcccaatatcttggtcacagaagtaaataatgagaaagacttaaatgaatctatttcagaagaagacaaacagctaagcaagatggaccagacaaacaaggcaggtgaaataccccaacctgtttcacagacagggatctcaaactctttacctgattttcaaaatcccttatcccaggactcagccaagagcaacgggtttggttttaatgcatctaccataataagttcaaaaaagtcacccagagtcttttccaggaaagatacctccaaaatgtatataccgcacacagataaatccaatgacattaaacaagataagaggtttactgaaaacagaaaacttggctcaacagcttcccttcctttcattcaggaacacagaacaccaccatctttccccaggacagaccaaggttgtcaccaggaattaactgtaaataatgaagatatttcaagaattattacaaataaccactggagctctgcactgactgatactcaaaatgcacaatactcaaaatgcaagttaactcctggccacaagacctcgtgtgattctttagatctgtcatcagctgcactaccagattcctcaccatcaaagaattcttcccttgatgctcctgtggttccatctactacagtgttctccaggagaagtccttcagacaaagatccatcgctaggagaaagagaagaaaaagacaatgctgggaagaaccaaaagaatcagtttattgtaagccactcagaaaaccaagagagaaatgatagtcctgtgcctacacatgatgaagtggttgatgtcaaatgccattcacactctccttttaggaatgaaagaggaaaaggaaaaataaggcatcatatatcctgtattgaaaagttaagcaaaacagaaagtatatcagtacccaccagtgatcacaggagcctcattgaagcaaatcaaagcaattccaaagtttctgaacttgacacaatttattgtaccttgccaagaaaatcaagcagttttctcatacatggcaggcagtcaggaagtaaaataatggctgcttcattgaggaatgggccacctcccttccaaatcaaaaataatgtggaagatgcaatggggaactatatgttaaacaaatttagtcccagttctcctgagtcagcgaatgaatgttccaaagtcctttcagactcagccctggaagcacctgaagccacagagagaatgacaaatgtaaaaagcagtggatctacttccgttagaaaaggaccacttccattcctcatcaacagggctatgtcatgtccctcaggggagccacatgcctcaactggaagagaaggaagaaaaaagccattgacctcaggcatggatgcttctgagctaacaccaagggcttgggagagaatcattagccctgtggaaagtgactcatctgttagagattgttctttaaccaaaagacaacaccaaaaggaaaacttccaagaatacactgagaaagagggtaaaatggctgcctccaggagaagtgtatttgctctttcaaatgaagaccctttacctttttgctcagacttgtcaggaaaagaacgtgggaaaacattacataaagttaagacgactagtacgttttctgtttctggtgatgaagataatgtaaaatgtctggaggtggtctcaatatattacactctaccgaggaaacccagcaaaaaattctgtaacctccttcaacagtatacacaaaatactaatttacttatagaatcacctcaagtggagactgaaacatttcctaacgctttagaaaaagacaaacagaattattctacacgagagcagtcaggaacaccttcatgtgaaaatctaaagatgtccgtcaactctgatcagacgctcaccactgaaaatatgactgccttccgattatcaaatagggggcccctagctcctacattacaggaaatggcttctgttgaggcagctgtttctcttcctgaagaggaatctaaagctagagagattttttcagataatttagctaaaacacctctaggtgattcagaaaacaagaaggaaagaggcaaaaagttgcaaagtgaaaccctgcatacttcattgatgcttcagagaaaaaatgtatccgaagaaaaatctgaaaattgtcaacaatccattaattcaagtaacagtggtccctctagtcttccagctctttcagaagttaatattggaaattcccaaactagaagaagttcttgggagtgtacagggagtggtagagccattccatttactggaagtggcaagtgtccccagaaagatcacacatccacagctgtaggtgatggctccagtggatcacagcctagggaaggcagaggggacattggaaccaactgccaaaaaatgactaataaaacactttctcactcagagagtcaagtctttgcccttactccagcattgcataaactacagcttggtgaggagactcagtcagatgaaccaaacttagagagtctgcagtctgaaccaagagaattacctcaaagaagtcaggaggcaaatatgacagagagcaggaaggctgaagatgaaatgcagaagtcagcttgggatcaaccttcacttcctgaaggaaacaaaaataaaaccaacttggatgacctagtaaagggggaaaatagatcttcagttaaacacagattggcagccatgtctaaagccagcagaaaattcccagctaaagatgtaagccccagaagacatgtagctactatcttcccccaaagtggaagcagatctggctttgaccatttatctcttggcacagtggagtgcaacccactgttccctgagcctactccaaaatctgcagagtccattggcgaaagcaggttgagtgagaacggaaagcatgtgaagaaatccgagaaccttctccccattactgtactacccaacagagaaccttctacacacgtcagcaaccagaagtctaacagcatttcacaacgacatcagaatgagtttaaaaacgtctcagaatcaccatcaaagcatgagaattctaaagacgtcacagcagctcagaatttagtaagagaatcaggagccccatcacccatcacattcaccagcctcagggaagcagaattctctgacaatcagaggaggctgagccctccttttccactggagcctgcacagaaatctagagtaagcagtccactggccagttttctgcagcaacaaaggagtgcttcatctctggagtgggaacctgagccacacctctatcgttcaaagagtttaaaaagcattaatgttcatggcgatctactacgaaaaagccatcctccaaaagtcagggagcgccatttttctgaaagcacttctattgacaatgccctgagtcgactgacccttgggaatgaattctctgtcaacaatgggtacagtcgaagattcagatctttttctgaactcccctcctgtgatggaaatgaaagttgggcttatcgcagcgggacaaaaacaggtcccaggtctgcaatatctatatacagacctatcgactatgggatctttgggaaagaacaacagttagctttcttagaaaatgtaaagaggtcacttacacaaggaagattatggaaaccaagttttcttaagaaccctggcttcctaaaagatgatttgaggaaccctcccaacccctcagagtcattaagctcaaattctcccagtagtcaggtgccagaagatggcttatctccaagtgaaccgcttaatatctatgaggatgacccagtggactcaaattgtgacacagacacaaccacagatgatgaatactacctggatgaaaatgacaaagagtcagaactgtgaggctttttcaataaaatgctttacttttttcaccaaaagcttataatggaactaaggtgtacatgtgcatgtgcatggaaggataaaagatctagtctgggcagtgtctgctctgaaatgtcccacatctccttttttttcctccacaccctatatagacacttcctgaatgctagaacaatgaattcttgttttgagagagtctctgctattttctatctctgtaaatgttcttagcctgcctttccaccactcccacttaatccctgattcactgtctgatttgggctttctgctttacttccctcctaacatttttcatctttaattgtgatttacaaccctaatatcccaggcacatacaaaacttatgaattacccagcacaactgtgaaactctgtattgcttcttccggtccacaccctatactcatgacattaaataaaaggtagggatgataacagtggggtaaatattatcatcctgtttgactcatgaacatttaggaagtttaaggtggtgatcttctctttcaaacaaagataaaggaatttattttttaacctgagaaactgattgcaaaaaggaaaaaaaaaagataaaggaattttgtaagtacttcctgttatatccgtagtggagcctgggaggcacatggtcaaagcacatgttgaggttatagattaggacctgaatccctagtaagccaatagaaggttagcagtcctagaaattcctctgaaaccgtgggggactggctggattattaagggcttttagtcaagccaaggacttaggccaggcaacctgaccatacagaaagttgcctggtcacagaatttctgcttatgaagagaacatagctgaggagcagaggtaggaagtaggtatcccttcatgggaccgacttacctttactgcagttctctcagcaactggcttttcccatttcctcagaactatccattttcacattttcttttttttgtttttgttttttgtttggttttgttttgtttttgttttttggagacggagttttgctctgtcacccaggctggagtgcagtggcatgatctgggctcactgcaacctccgcctcccgggttcaagcgattctcctgcctcagcctccagagtagctgggatcacaggcgcacccaggcgcacgctgccacgcccagctaatatttttgtattttagtagagacggggtttcaccgtgttgcccaggctggtctcgaactcctgagctcaggcaatccgcccacttcagcctcccagagtgctaggattacaggcatgagctaccatgcccagtctttttttgttttgttttgtttttgtttttgttttgaggtggagtcttgttcttgttgctcaggctagagtgcaatggcatgatctcagcttactgcaacctcctcctcccaagttcaggcaattctcctgcctcagcctcccaagtagctgggactacaggcacccaccaccacacctggctaatttttttttttttttttttttttttggtatttttagtagagttggagtttcaccaggttggccaggctggtctcaaacttctgacctcaggtgatctgcccacctcggcctcccaaactgctgggattacaggcatgagccaccgtgcctggcccacattttctttaattgcaaggtagaacgcttcttttcaggtggggcattttagtcccaaatatcaagtgggaaccttggccaagtccctaaaatgccatcaagtcagatctgacaccctggaattcattctttgctgcaggatcatctacgaaacccttgggaaattctaaggcagagctcctaagggcttgtcactatgattcagtgatttatctagagtaaatcacttatgatacccactgatattttggctttcctaactctttatttgccatgcagaacctcgggggatttctctcctaattcaggataaagaccaatagatggcagtgaagataatctgctttaactacagacagcatggattcctggatctcaatactatgatagtcaacatgagtggattttatcttgcttggtttatatttgcttcgcgacctaatctaattttccattttttatacctagtctgtttcatcattataaactaagaataatgatagatgttggtgaagtgtatagagatctggaactgatagagagttaagaaagaactatgttgttgttatccttctaatcattcccttacatagacgcaaaatgcgtgggttactttacatggttcccatgcaactcaaagctaatgaacatgcggtaactaacatgaaagctattccctaaatctgtcaactattttaaacttcaagctctgaccaatcctgagctcagaaagctcaaaaatcaaatattgtgaacttttcaatgcaaatttgtatggtaaagaataaataacactatttcttggttaatatatgtttgtaaattctgcctttcctctttttctatttatctgattattattattattattattattttctttgagacagagtctcactctgttgcccaggctggagtgcaatggcgcaatctcggctcactgcaacctccgcctcccaggttcaagcgattctcctgcctcagcttcccgagtagctgggattacaggtgcccaccaccacgcccagctaatttttgtatttttagcagagacggggtttcgccatgttggccaggctggtttcgaactcctgacctcaggtgatccgcctgcctcagcctcccaaactgctgggattataggcatgagccacctcgccagccctatttatctgattatttaagtaaaactttaataaaccatgacctacattttctatgcaattttaagatactcagagttaatattttaatattgaggttcttgatttttttaatgatcagctttcaaattatatttcagtatatactctgagtctacgtgtatgctacaaaaggtgaaatgaagttagcttatttttcagtgagtttaggctatattaagagttaggtaagttaggtaagggtgaaactgctttggggcccagactgcgctggaatgtactgtttaaattcaaaggtaattgatggccagtgttcagttgctctatttgtaacgtttgcatgttggtctggctgaagtatcaggaaaacacaaaattcatgaaaatagcaccttttataattttatacttttataaagcacttgttaaagaagtatagcaaatttctatgtattttaacatacaagtcgctgcattttaatgttcatttttggtatagctatggtaacttataatagtcatttttatattcataacttgttttctgaaagatatagtcattattaaaataaacattcatgtaaatggagtaaatcataggggaatcaatcgtaataaataccttataaattataaacttgtttagatactagatttctataaccataaattttatactgtaaagtctgtttaaaatagggtttaatgaagttattttaatttttagagactcccctctaaataatttactcctacattgtaaatacattgatgccaacaaaattccaactgctactaacaaaggtttggttggtgataagctaataacagctactttgtgtaggaggtaaatatgtgtactggagggggtaaaaatccatttaggttatggcaaagatgggaatcaaactgtaaaactcatagccccataaaattaatattctttgttaagtgccagagggtttaagagaacttcttgcttagagtttattgataataataatgcttcagaatatcccatttaaatgtacagtgtaaatatgtaaaatattttacttcccaggcaagtttgtggctgtattgccacttagtggctctttgtgactggcagttctgtatatctgaaacaaataagctgtaagcacttttgttaaaactttgtcaaataatccttttatgtacttgttctcagacctgttctctggttatgaaatgtgttaaagacaaggtgcaaatttaaaacaatgcctgtattgaaataaatgacttaaacagatgc

SEQ ID NO: 184153 - DNA, 5970 bp, Artificial Sequence
  derived and/or modified sequence
atgacaaaagtcccccctgccttcgacttctctttcctcaatgacgaagaggctcgcaagatactgcaggttttagagcggaatgaggaactgcagcgagccgaaaaggatcgaatcagtaaactgcagaaaactaagcgcgatatacgctggttgcagggcgtgacaggtgagtggttcgaggaaatccagaggaagaaattttgtaatgagacagacgtgagccagatgcttaagcaaccccttacctatagactgtctaaggaaatggcgaaaaatgacccgattgagctgcccacatcgagaagcaagaatgtgacaaaccagaaaaaaccaacgcccttttcatcaagaatgtccttccgaagttccttcgccagtctgttcagtttccggaaatccgggaaggagacaagcaaattacccagcctggggcaaaaagggtgcgacggtcatgctggtcctccaatgcccgtccgcggcgcagcagtgcaagctaagatctacaacagtcctctcgaaaaccacttggtcgatagcaccttcgtccccaagcccgccgtgatgcgcgaggaatctggcatgccccccccctgggacgcatctctgctagaaaacgagtttttccaagtcttggacgacctcgattcaaagcttgcccaggagcaatcagcaagctccgtgaatacacgcacaccccttaattacggtagtaggacccagttcggccacttttattcatctggcaaccggcacggcaatatcacagaacggcacaagaagcactacaatgagacatctaacatgagtatttacgacatcctgcggcctggtactccgagagaaggtttcaaaaccttctccccgcgtacttcaaccatctacgacatgtatcggacacgcgaacccagggtgttcaaggaggactatgttcagaaaaatacctttggttctacatccttgtgcttcgattctcgacagaggtctgctctccccgcaactgggcactttaccgctagatccctgcatttccctgccacaacgcaatccaagtctgggtttatcccccctcgccaccagcaatcaccaaaacggacccccctgagtagtattatttggaacaggtccgatagctcccgcgatagagaaaatcaagaagagtttcttcgagccccctccccgatggagatagatccagcagacaagtacgtgtatcctcgcggttttcaggagaataaacgttacgaaagctaccactcccagaacgtataccagcgggtatcactaaacgcacccatggagaacgccatgagtccagacacatttgagaattctgaaaatatgcccttctaccatcaatcaaatacctttacccggtcgtttttctctaatacatttggtcgatccggcgaacaacgtagattcggccaaggtccattctgggggcaggaaaaaggtcatagcttctggtctgatttccataggtctaggaagtcgttctcctcctccgacagggacttcgagatgatatcaatggaggccaacagcgtctcagcgatccatggacacaatgtttcttccgagcattgggagagtttcagcagtggctatgggactgacgtttctcgagggcaggaggagcctcacccttggcagttcgattttcagcggtctactctggatagcatggttgtgagtcacggtaatgagacacaattgacaccccacttcggcacgcctaatgtctgcagcatgacgggcagttcttatcacgtcaagtccagcgaactggtgagtcagcaagattcctccccagtagaggtgcacataaacaaagaggcttccagctttggcatcgcacagacccttgcgtcatcatttaagacttctttttcccagatctcagacgacagaaggaaccctcaatctccgaatctccagaatcctaccgtcacactccagaaaatctttccaaataagcccgctagtcatccgatgcgaagccacacggaagtgaccgtaacctccagcaactccgtggactccttgcctctcgccaagtcgcagccaaacatattagtgactgaggtgaataacgagaaggatctgaatgaaagcatatcagaagaagacaagcagctcagtaagatggatcagacaaataaagcaggagaaatccctcagccagtgagccagaccggtatcagtaattctctgcccgactttcagaatcccctgtctcaggattccgcaaaaagcaacggcttcggttttaatgcgagtacaattatctcgagcaaaaaatccccccgagtttttagcaggaaagacacctccaagatgtacataccacacacagacaaatccaacgacatcaagcaggacaagcgtttcacagagaacagaaagctcggctccaccgcctcattgccattcatacaggaacatcggacgccaccgagcttcccccggaccgaccagggatgtcaccaagagctgacggtcaacaacgaggatataagccggatcattactaacaaccactggtctagcgccctcacagatacacagaacgcccagtattccaagtgcaagctgactcccgggcataaaactagttgcgattcgctggatctgtcctcagcggctcttcccgacagctcaccctccaagaattctagtttggatgcaccggtggtcccttctaccaccgttttttcgcggaggtcacctagcgacaaggacccttccctgggagagcgcgaggaaaaggacaatgccggaaaaaaccagaagaaccaatttatcgtgtcccatagcgaaaatcaggagcgtaatgacagcccagtgcccacgcacgatgaagtggtggacgtgaagtgccacagccattcccccttcaggaacgagagagggaagggtaagattcggcatcatatatcatgcatcgaaaaactctcaaagactgaaagtatctccgtgcctacctccgatcataggagcctgatagaagccaaccagtctaattctaaggtaagtgagctcgatactatttattgtaccctgcctcgaaagtcttctagctttctgattcatggaaggcagagcggatcgaagataatggcagcttcactacgaaacgggccaccccccttccaaattaaaaacaacgttgaagacgccatgggcaactacatgttaaacaagtttagcccctcgtctcccgagagtgctaatgagtgcagtaaggtcctgtctgattccgcactggaggcaccagaagctaccgagcgtatgactaatgtaaaatcttccggatctaccagcgtgcggaagggacccttgccttttttaattaatagggcgatgtcgtgccctagtggcgagcctcacgccagcactggaagggagggccgcaagaaaccacttacctccggtatggatgcgtcagaactgacccccagagcctgggaacgcataatttcccctgtggagagtgactcctctgtgcgcgattgttcgctgactaaacgccagcaccaaaaagagaattttcaggagtatacagaaaaggaagggaagatggcagcgtcgaggagatcggtgtttgccctaagcaacgaggaccctttaccgttctgctctgacctgtccggcaaagagaggggtaaaactctgcacaaagtgaagaccacgtcaactttctcagtttctggcgatgaggacaacgtcaaatgcctggaagtcgtatccatctactatactcttccaagaaagcctagcaaaaaattttgtaacttgcttcagcagtacacacagaatacgaatttgttaatcgaaagcccccaggtcgagaccgagacatttcccaacgccctagaaaaggataagcagaactacagcacaagagagcaatcaggcacacccagttgcgaaaatctgaaaatgagtgtaaactccgaccagaccctgaccacagaaaatatgacagccttccggctaagtaaccggggtccactggcccctaccctgcaggaaatggcatcagtcgaggccgcagtgtctctgccagaggaggaatcaaaggcgcgggagatctttagtgataatctggctaagactcccctgggagattctgagaacaaaaaagagcgcggcaaaaagcttcagtcggagactctgcacaccagtctgatgttgcagaggaaaaatgtgtcagaggagaagtcggaaaactgtcagcagagcatcaactcctccaattccgggcctagctccttgccagccctgagcgaggtgaatatcggtaattctcaaacacgtaggagctcctgggagtgcaccggatccgggcgagccatccccttcaccgggtccggaaaatgccctcagaaggatcacacgtcgacggccgtgggcgatggatcatcaggaagtcagccccgggaagggaggggcgacatcggaactaactgtcagaaaatgacaaacaaaacgctcagccactctgagagccaggtgttcgctctcacccctgcactgcataaactgcagcttggagaggagacccagtcggatgaacctaacttggaatccctccaatccgagccccgcgagttgcctcaaagatctcaggaggcgaatatgactgagtcccggaaggcggaagatgagatgcaaaaatccgcgtgggatcagccttctttgccagaggggaacaaaaataagaccaatttggatgatttggtgaagggcgaaaaccgcagttcagttaagcacagattagctgccatgtcaaaggccagccgcaaatttcctgccaaggatgtgagtccaagaagacatgttgccacaatctttccccagtccggaagccgatctggcttcgaccatctgagcttaggaaccgtggaatgtaatcctctcttcccagagccaacccccaagtcagcagagagcattggtgagagccgtctgtcggagaatggcaagcatgtgaaaaagagcgagaatctcctgcccataaccgtgttgccaaaccgggaaccttccacccacgtatcaaatcagaagtctaacagcatcagtcaacgccaccagaacgaatttaaaaacgtgtccgaaagcccatccaaacacgaaaacagcaaggatgtaacagccgcacaaaacctggtgagggaaagcggtgctcccagtcccatcacattcacctccttgcgagaggctgagttctcagacaatcaacgcaggttgtcaccacctttccctctagaaccggctcaaaaatcacgggtttcttcaccgcttgcgagctttctgcagcagcaacgctcagcctccagtctggaatgggaacctgaacctcacctctacaggagcaagagcctgaaaagtattaacgtgcacggggacctgctgagaaagtcacatccgccgaaggtcagagaaaggcacttcagcgagtccacctcaattgacaacgccctgagccggttaacacttggaaatgagttctccgtaaataatgggtacagccggcgcttccggagtttttcagagcttcccagctgtgacggcaacgaatcatgggcctataggtccggcaccaagaccgggccacgtagtgccataagcatttaccggcccattgactacggaattttcggcaaggagcagcagttggctttcctagaaaacgtcaagcggagcctgacacaaggtagactgtggaaaccgtcattcttgaagaaccccgggtttctcaaggacgatctgagaaacccgcccaatccatcagagtcattatcttcaaattccccatctagtcaggtccccgaggacggcctctctccaagtgaacccctgaacatttatgaagatgatcctgtcgactcaaactgcgacaccgacaccacaacagatgatgagtactacctggacgaaaacgacaaagagtcagaactttag

SEQ ID NO: 184154 - DNA, 5970 bp, Artificial Sequence
  derived and/or modified sequence
atgaccaaggtgcccccagcctttgacttctccttcctgaatgatgaggaggccaggaagatcctgcaggtgctggagagaaatgaggagctgcagagagctgagaaggaccgcatcagcaagctgcagaagaccaagagggacatccgctggctgcagggcgtgactggagagtggtttgaggagatccagaggaagaagttctgcaatgaaacagatgtgtcccagatgctgaagcagcccctgacctaccgcctgagcaaggagatggccaagaatgaccccatcgagctgcccaccagccgcagcaagaatgtgaccaaccagaagaagcccacccccttcagcagcaggatgtccttccgcagcagctttgccagcctcttctccttcaggaagagcggcaaggagaccagcaagctgcccagcctgggccagaagggctgtgatggccatgctggcccccccatgcctgtgagaggagctgctgtgcaggccaagatctacaacagccccctggagaaccacctggtggacagcacctttgtgcccaagccagctgtgatgagggaggagagcggcatgcccccaccctgggatgccagcctgctggagaatgagttcttccaggtgctggatgacctggacagcaagctggcccaggagcagagcgccagctctgtgaacaccaggacccccctgaactacggcagcaggacccagtttggccacttctacagcagcggcaacagacatggcaacatcacagagcggcacaagaagcactacaatgagaccagcaacatgagcatctatgacatcctgcggcccggcaccccccgggagggcttcaagaccttcagccccaggaccagcaccatctatgacatgtaccgcacccgggagcccagggtcttcaaggaggactatgtgcagaagaacaccttcggcagcaccagcctgtgctttgacagccggcagaggtctgccctgcctgccaccggccacttcaccgcccggagcctgcacttccctgccaccacccagagcaagagcggcttcatcccccccaggcaccagcagagccccaagaggacccccctgagcagcatcatctggaacagaagtgacagcagccgggaccgggagaaccaggaggagttcctgcgggcccccagccccatggagattgatcctgctgacaagtatgtgtacccccggggcttccaggagaacaagagatatgagagctaccacagccagaatgtgtaccagagggtgtccctgaatgcccccatggagaatgccatgagcccagacacctttgaaaattctgagaacatgcccttctaccaccagagcaacaccttcaccaggagcttcttcagcaacaccttcggccgctctggagagcagaggagatttggccagggccccttctggggccaggagaagggccacagcttctggagcgacttccacaggagcaggaagagcttcagcagcagtgaccgggactttgagatgatctccatggaggccaacagcgtgtctgccatccacggccacaacgtgtcctctgagcactgggagagcttcagcagcggctatggaacagatgtgtcccggggccaggaggagccccacccctggcagtttgacttccagaggagcaccctggacagcatggtggtgtcccatggaaatgagacccagctgaccccccacttcggcaccccaaatgtgtgcagcatgacaggcagcagctaccacgtgaagagcagcgagctggtgtcccagcaggacagcagccctgtggaggtgcacatcaacaaggaggccagcagctttggaattgcccagaccctggccagcagcttcaagaccagcttcagccagatcagtgatgacagaagaaacccccagagccccaacctgcagaaccccaccgtgaccctgcagaagatcttccccaacaagccagccagccaccccatgaggagccacacagaggtgacagtgaccagcagcaacagcgtggacagcctgcccctggccaagagccagcccaacatcctggtgacagaggtgaacaatgagaaggacctgaatgaaagcatcagcgaggaggacaagcagctgagcaagatggaccagaccaacaaggccggggagatcccccagcctgtgtcccagacaggcatcagcaacagcctgcctgacttccagaaccccctgagccaggacagcgccaagagcaatggcttcggcttcaatgccagcaccatcatcagcagcaagaagagccccagggtcttcagcaggaaggacaccagcaagatgtacatcccccacacagacaagagcaatgacatcaagcaggacaagcgcttcacagagaacaggaagctgggcagcacagccagcctgcccttcatccaggagcacaggaccccacccagcttccccaggacagaccagggctgccaccaggagctgactgtgaacaatgaagacatcagccgcatcatcaccaacaaccactggagcagcgccctgacagacacccagaatgcccagtacagcaagtgcaagctgaccccaggccacaagaccagctgtgacagcctggacctgagcagcgctgccctgcctgacagcagccccagcaagaacagcagcctggatgcccctgtggtgcccagcaccaccgtcttcagccgccgcagccccagcgacaaggaccccagcctgggggagcgggaggagaaggacaatgccggcaagaaccagaagaaccagttcatcgtgagccacagcgagaaccaggagagaaatgacagccctgtgcccacccatgatgaggtggtggatgtgaagtgccacagccacagccccttcagaaatgaaagaggcaagggcaagatccgccaccacatcagctgcatcgagaagctgagcaagacagagagcatctctgtgcccaccagtgaccacaggagcctgattgaggccaaccagagcaacagcaaggtgtctgagctggacaccatctactgcaccctgcccaggaagagcagcagcttcctgatccacggccggcagagcggcagcaagatcatggccgccagcctgagaaatggacctccacccttccagatcaagaacaacgtggaggatgccatgggcaactacatgctgaacaagttcagccccagcagccctgagagcgccaatgaatgttccaaggtgctgagtgacagcgccctggaggcccctgaggccacagagaggatgaccaacgtgaagagcagcggcagcacctctgtgaggaagggccccctgcccttcctgatcaacagagccatgagctgccccagcggggagccccacgccagcacaggccgggagggcaggaagaagcccctgaccagcggcatggatgccagcgagctgaccccccgggcctgggagcgcatcatcagccctgtggagagtgacagctctgtgcgggactgcagcctgaccaagaggcagcaccagaaggagaacttccaggagtacacagagaaggagggcaagatggccgccagcagaagatctgtgtttgccctgagcaatgaagaccccctgcccttctgcagcgacctgagcggcaaggagcggggcaagaccctgcacaaggtgaagaccaccagcaccttctctgtgtctggagatgaagataatgtgaagtgcctggaggtggtgtccatctactacaccctgcccaggaagcccagcaagaagttctgcaacctgctgcagcagtacacccagaacaccaacctgctgattgagagcccccaggtggagacagagaccttccccaatgccctggagaaggacaagcagaactacagcacccgggagcagagcggcacccccagctgtgagaacctgaagatgtctgtgaacagcgaccagaccctgaccacagagaacatgacagccttccggctgagcaacagaggccccctggcccccaccctgcaggagatggcctctgtggaggccgctgtgtccctgcctgaggaggagagcaaggcccgggagatcttcagtgacaacctggccaagacccccctgggggacagcgagaacaagaaggagcggggcaagaagctgcagagcgagaccctgcacaccagcctgatgctgcagaggaagaatgtgtctgaggagaagtctgagaactgccagcagagcatcaacagcagcaacagcggccccagcagcctgcctgccctgtctgaggtgaacatcggcaacagccagaccaggaggagctcctgggagtgcaccggcagcggccgggccatccccttcaccggcagcgggaaatgtccccagaaggaccacaccagcacagctgtgggagatggcagcagcggcagccagccccgggagggccgcggggacatcggcaccaactgccagaagatgaccaacaagaccctgagccacagcgagagccaggtgtttgccctgaccccagccctgcacaagctgcagctgggggaggagacccagagtgatgagcccaacctggagagcctgcagagcgagccccgggagctgccccagaggagccaggaggccaacatgacagagagcaggaaggccgaggatgagatgcagaagagcgcctgggaccagcccagcctgcctgagggcaacaagaacaagaccaacctggatgacctggtgaagggggagaacagaagctctgtgaagcaccggctggccgccatgagcaaggccagcaggaagtttcctgccaaggatgtgagccccaggagacatgtggccaccatcttcccccagagcggcagccgcagcggctttgaccacctgagcctgggcaccgtggagtgcaaccccctcttccctgagcccacccccaagtctgctgagagcatcggggagagccggctgtctgaaaatggcaagcacgtgaagaagtctgagaacctgctgcccatcaccgtgctgcccaaccgggagcccagcacccacgtgagcaaccagaagagcaacagcatcagccagaggcaccagaatgagttcaagaatgtgtctgagagccccagcaagcatgagaacagcaaggatgtgacagctgcccagaacctggtgcgggagagcggggcccccagccccatcaccttcaccagcctgcgggaggccgagttcagtgacaaccagaggcggctgagcccccccttccccctggagcccgcccagaagagccgggtgagcagccccctggccagcttcctgcagcagcagaggtctgccagcagcctggagtgggagcctgagccccacctgtaccgcagcaagagcctgaagagcatcaacgtgcatggagacctgctgaggaagagccacccccccaaggtgcgggagcggcacttcagcgagagcaccagcattgacaatgccctgagccggctgaccctgggcaatgagttctctgtgaacaacggctacagccgccgcttccgctccttcagcgagctgcccagctgtgatggaaatgaatcctgggcctaccgcagcggcaccaagacaggccccaggtctgccatcagcatctaccggcccatcgactatggcatctttgggaaggagcagcagctggccttcctggagaatgtgaagaggagcctgacccagggccgcctgtggaagcccagcttcctgaagaaccctggcttcctgaaggatgacctgagaaatccacccaaccccagcgagagcctgagcagcaacagccccagcagccaggtgcctgaagatggcctgagccccagcgagcccctgaacatctatgaagatgatcctgtggacagcaactgtgacacagacaccaccacagatgatgagtactacctggatgaaaatgacaaggagagcgagctgtag

SEQ ID NO: 184155 - DNA, 5970 bp, Artificial Sequence
  derived and/or modified sequence
atgaccaaggtgccccccgccttcgacttcagcttcctgaacgacgaagaggctaggaaaattctgcaggtgctagagcggaacgaggagctgcagcgtgctgagaaagaccggatcagcaaactacagaagactaagagagatataaggtggctgcagggcgtgacaggagaatggtttgaggaaatccaacggaagaagttctgtaatgaaaccgacgtgtctcagatgctgaaacaacctctcacatatcgcctgtctaaagagatggcgaaaaacgatcccatcgagctccccacaagccgaagcaagaatgtcaccaatcaaaaaaagcccacacctttcagtagccgtatgagcttcagatccagcttcgctagtctgttcagctttaggaagagcggaaaggagacatccaaactgccttctcttggccaaaagggctgcgacggccacgcagggccccccatgccggtgcgcggggccgccgtgcaggctaaaatttataattcaccactggaaaaccatctggtggactctaccttcgtgccaaaaccggcagtgatgcgcgaagaaagcggaatgccaccaccctgggacgcatccctgttggaaaacgagtttttccaggtgctggatgacctggacagcaaactggcccaagagcagagtgccagctcagtcaacactcggactccacttaattatggctctcgcacacagtttggccacttttacagtagtgggaaccgccacgggaacatcactgaaaggcataaaaaacattataatgagacgtccaatatgtctatctacgatattttaagacccgggactccccgagagggttttaagaccttcagccccagaactagcaccatttatgacatgtaccgaaccagggaaccgagagtatttaaagaggactatgtgcagaagaatacctttggaagcacatctctctgttttgacagccgacagagaagcgctctgccagccactggccatttcaccgccaggagcttacactttcccgcaactacccagtctaaaagcgggttcatcccccccaggcaccagcagagccccaaaagaacacctctgagttctattatatggaataggagtgactcaagtagagatcgcgagaatcaggaagagttcttgagagccccttcgccaatggaaattgaccccgcagacaagtacgtgtatccccgaggcttccaggaaaacaagcggtatgagagctatcattctcaaaacgtgtatcagcgcgtgtccctgaatgcacctatggaaaatgccatgagcccagacacattcgaaaactcagagaacatgcctttttaccatcagagtaatacatttaccaggagttttttttccaacacattcggccgatcaggtgagcagaggagattcgggcaagggccattttgggggcaggaaaagggacatagtttttggagcgactttcatcgctctcgcaagtctttctcctcctcagatcgtgacttcgagatgatttccatggaggctaattctgtgtcggcaatccacggtcacaatgtctcctccgagcactgggagtcatttagttcaggctacggcactgacgtctccagaggtcaagaggagccccatccgtggcaattcgactttcagagatctaccctggatagcatggtggtgagccacggaaatgaaacccaattgacaccccacttcggaaccccaaacgtctgcagcatgaccggttctagctaccatgtgaagtcatcagaacttgtctcccagcaggacagttccccggtggaggtgcacatcaacaaagaagcctcttcattcgggattgcccaaacacttgcttcgtccttcaaaacctcctttagccaaatctcagacgatcgacgcaatcctcagagtcccaacctgcagaatcccactgtgacgctgcaaaagattttccctaataaaccagcaagccaccctatgcggagtcacaccgaggtaaccgtgacaagcagtaacagcgtcgactctctgcctttggctaaaagccaaccgaacattctggtcaccgaggtcaataatgaaaaagatcttaatgaatcaatttctgaggaagataagcagttatccaaaatggaccagacaaacaaagcaggcgaaataccacagcctgtctctcaaacgggcatttcaaattcactgcctgatttccagaatcctctgtcccaggacagcgctaaaagtaacgggtttggctttaatgcttctactataattagctccaagaaatctccacgtgtttttagccgcaaggatacttccaaaatgtacataccacataccgataagtcaaacgacattaaacaggataaacgtttcactgagaaccggaagcttggctcaactgctagcctgcctttcatccaagaacatagaacccctcccagttttccaaggaccgatcaagggtgccatcaggaattgactgtgaacaacgaggatataagtcgaattataaccaacaatcactggtcatccgccctgacggacacccagaatgctcagtattcgaaatgcaaactgacacctggacataaaacgtcctgcgatagcctagatctgagtagcgccgccctgccagattccagcccatcaaagaattcttcactcgacgctcctgtggtgccatccaccacggtgttctccagaaggagccccagtgataaagatccctccttgggggaacgcgaagagaaggataatgccggcaagaatcagaaaaaccagttcattgtttcccacagcgagaaccaggagaggaacgactcccccgtacctacacacgacgaggttgtggacgtaaagtgccatagccattcccccttccggaacgaaagaggaaaaggcaagatccggcatcacatctcctgcatcgagaagctttcaaaaacagagtccatctccgtgcctacaagtgatcaccgatctctcatagaagctaaccagagtaactccaaagtatccgaactggataccatatattgcactctgccgcgcaaaagttctagctttctgatacatggcagacaatcggggtccaagatcatggccgcgtcacttagaaacggaccaccaccttttcaaataaaaaacaatgttgaggatgcgatgggcaactatatgctgaataaattttcgcctagctctcctgagtcagctaacgagtgttcaaaggttctctcggattccgcattagaggccccagaagcaaccgagcggatgaccaatgtgaagtcctctgggagcacatccgtgagaaagggaccactgccatttcttattaaccgcgcaatgagctgcccgtctggggaaccccacgcctccactggcagggaaggacgtaaaaaacccctcacaagtgggatggatgcgtctgagctgacgccacgggcctgggaacgcattatcagtcctgttgagtctgatagcagtgtacgagattgctctctcactaagcggcagcatcaaaaggagaattttcaggaatacaccgaaaaggaaggaaagatggcagcttcaaggaggtcggtctttgcgctgagtaacgaggacccgcttcctttctgctctgacttgagcggcaaggaacggggcaagaccttacacaaggtgaagaccacaagcaccttcagtgtgtcaggcgacgaggataacgtaaagtgcttggaagtcgtgtctatctactacaccctgcctaggaagccctcaaaaaaattttgcaacttgctgcagcagtatacgcaaaataccaacttgctcatagagtcacctcaggttgagacggaaacttttcctaacgccctcgaaaaggataaacaaaattattctactcgcgaacagtctgggacaccttcttgcgagaacctgaagatgtccgtcaacagcgaccaaacacttacaacagagaatatgacagctttcaggctgtcaaatagaggtcccttggcgccgacattacaggagatggccagtgtcgaggctgccgtgagcctgccagaggaagaaagcaaggcccgcgaaatcttcagcgacaatctggcaaaaacaccactcggcgattcagagaacaagaaggagcggggaaagaaactgcagagcgaaacgctgcataccagtcttatgctccagaggaagaacgttagtgaggaaaagtctgagaactgtcagcaaagtatcaacagttcaaactctggcccctcatcactcccggcactgagcgaagttaatataggcaatagtcagacacgccggtcctcttgggagtgtactggtagcggccgagctatccccttcaccggcagtggtaagtgtcctcaaaaggatcatacaagcactgccgtgggggacggcagtagtggctctcagccccgggagggaaggggagacattggcacaaactgtcagaaaatgaccaacaagacactctctcacagcgaatcccaagttttcgccctcacgcccgcacttcacaaattacagctcggtgaagaaacacagagtgatgaaccaaacctcgagtcgctgcagagcgagccacgcgaattaccccaaaggtcacaggaagcaaatatgactgagagccgaaaagcggaggacgagatgcagaaatccgcttgggaccaaccctctctgccggaagggaataaaaacaaaactaatttggacgacctggtgaaaggcgaaaaccgcagcagcgtgaaacatcggctggctgccatgtccaaggccagcaggaagtttcccgcgaaagatgtgagccctaggcggcatgtggcaacgattttccctcagagcggatctaggagcgggttcgatcatctctccctgggcacagtagagtgcaatcctctgtttcccgaacccactcccaagagtgctgaaagcatcggggagtcacggttgtcggaaaatggcaagcacgtaaaaaagtcagaaaatctgttgcccattactgttctgcccaaccgggagccctcaacacacgtgagtaatcagaagtctaattcaattagccagagacatcaaaacgagttcaaaaacgtgagtgaatctccctctaaacacgagaactctaaagacgttaccgccgcccagaatctggtccgcgagtctggagccccatctcccatcacatttacgtccctccgggaggccgagtttagtgacaaccagaggaggctcagccccccttttccgttagagcctgctcagaagagtagggtaagctccccactggcaagtttccttcagcagcagcgctccgcatccagcctcgaatgggagcccgaaccacacttgtacaggtcaaaaagcctcaaaagcatcaacgtacatggggacctgttgagaaagagccacccaccaaaggtgcgggagcggcatttttctgagagcacctccatcgacaacgccctgagtaggcttactctgggaaacgagtttagcgtgaataacggctacagccggcgcttccgctcgttcagcgagctgccttcgtgcgacggcaacgagagctgggcctacagatccggtaccaagaccggaccacggtccgccataagcatctacagacctattgactacggaatcttcggcaaggaacagcagctcgcatttttggaaaacgtcaaacggagcctcactcaaggaagattgtggaagccctcctttctgaagaacccgggattcctgaaagacgatctccggaatcctcccaatccctcggaatcactgagttcaaactcaccatcctcccaagtgcctgaggacggcctgagccctagtgaaccgctaaatatctacgaggacgatccggtcgattcaaattgtgacacagacactactacggacgacgagtactatttggatgagaatgacaaggagagtgagctctag

SEQ ID NO: 184156 - DNA, 5970 bp, Artificial Sequence
  derived and/or modified sequence
atgacgaaggtgcctcccgcattcgatttcagcttcctaaatgacgaggaggccaggaagatactgcaggtgctggaacgtaacgaggagttgcagcgggctgagaaggatcggattagcaagctccaaaagaccaaaagggacattcggtggctacagggagttaccggggagtggttcgaggagatacagaggaaaaagttttgcaacgaaactgatgtgtcccagatgctgaagcagccacttacctatcggctctctaaagagatggccaaaaacgaccccatcgaactccccacatccagatccaagaatgtgactaatcaaaaaaagcctactcctttctcctcacggatgagttttaggagcagcttcgcctccttattcagctttcgaaaaagtggcaaagagactagtaaactgccatcccttggacagaagggctgcgatggccatgcaggaccaccaatgccggttcgaggtgcagcggtccaggctaagatttataacagtccactagaaaatcacttagtggatagtaccttcgtgccgaagcctgcagtgatgcgcgaggaaagcggaatgccccctccgtgggacgcttctcttttggaaaatgagttcttccaggtcttggacgatttagattcaaaacttgctcaagagcaatcagcgagctcagtgaatacacgaactccactgaactacggctctaggactcagttcggtcacttttattcgtcaggcaaccgacacggcaatatcaccgagcgtcacaagaagcactataacgagacatcaaatatgtccatttatgacattctgcgtcccggaacccctcgggaagggttcaagacattcagtccacgaacttctacgatatatgacatgtacaggacccgcgagcccagagtgtttaaggaagattacgtgcagaagaatactttcgggagcacctcgctttgcttcgacagtaggcagcgtagcgcgcttcctgccacaggccattttactgcgcgatcactccatttccctgctaccacccaaagcaagagtggtttcatccccccaaggcaccagcaaagccccaaaagaacgccgctcagtagcataatctggaatcgctccgactcctccagggatagggaaaaccaagaagagttcctgcgagctcccagtccgatggaaattgaccctgcagacaagtacgtatatccaagaggttttcaggaaaacaagaggtatgagtcatatcattctcagaatgtttatcagcgagtgagcctaaacgccccaatggagaatgcgatgtcacctgacacttttgaaaattctgagaacatgcctttctaccaccaaagcaatacgtttacccggtctttcttttcgaacacctttggaaggtcaggtgaacagcggagatttggacagggaccgttttgggggcaagagaaaggacatagcttctggtctgacttccaccgttcaaggaaaagcttttcctcaagtgatcgggatttcgagatgataagcatggaggctaactctgttagcgccatccatggacacaacgtctcctccgaacactgggaaagcttcagcagtgggtacggcactgatgtcagtcggggtcaggaagagccccacccttggcaattcgactttcaacgatcaaccttagacagtatggtcgtgtcccacggaaatgagactcaactgacaccccattttggcaccccaaacgtgtgttctatgacgggaagttcctaccacgtgaaatcctctgagttggtgtcccagcaagattcctcgcccgtagaagtccatatcaataaagaggcttcatccttcggtatagcacagactctggcctcctccttcaagacctcgtttagccagatctccgacgaccgcaggaatccccagtcacccaatctgcagaaccccacagttacacttcagaaaatttttccaaacaaacctgcttcccacccgatgcgctcacataccgaagttactgtaacttcatccaatagcgtggactccctgcctcttgctaagagccagcccaatatcctggtcacagaggtcaataatgaaaaggacctcaacgagagcatctcggaggaagataaacagctctctaagatggatcagactaacaaggccggagagatcccccagcctgtcagccagacgggcatttccaactccttaccagactttcaaaaccctctgagccaggattccgctaagtctaacggctttggtttcaatgcctctacgattatttcttcaaagaaatcaccgcgtgtgttctctagaaaagatacgagcaaaatgtacatcccacataccgataaatctaacgacatcaaacaggacaagaggttcactgaaaatagaaagttaggttccactgcttcacttccgtttatccaggagcaccgtacaccgcctagtttcccccgtacggatcagggttgccaccaggaattaaccgtcaacaacgaagacatctctcgtattattacaaataaccattggtcatccgccctcactgatactcagaatgcccagtatagtaaatgtaaactcacacccggtcataagacctcatgcgactccctggatctcagtagcgctgctcttccagatagcagccccagtaaaaactctagtcttgatgcccctgtcgtgccatcaacgacagtgttctcgcgtagatccccctcagataaggatccttccctaggggaacgcgaggaaaaggacaatgcaggcaagaaccagaaaaaccaatttatcgtctctcactccgaaaaccaggaaaggaacgacagccctgtacctacccatgatgaggtagtggacgtcaagtgccactcacatagtcccttccgcaatgaacggggtaagggcaagataaggcaccacatttcttgtatagagaagctctccaagactgagtctattagtgtgccaaccagcgaccatcgatctctgattgaggccaatcagtccaattccaaggtctctgaactggacacgatctattgcactctgccccgaaaatccagctcttttctgatacatgggagacaaagtggctccaagataatggccgcatctctacggaacggtcccccacctttccagatcaagaacaatgtggaggacgccatggggaactatatgctgaataaattttcaccaagctctcccgaaagcgctaacgagtgctccaaagtgttgtcagactccgctttggaagctccggaggccactgagaggatgacaaatgtgaagagcagcggcagcactagcgtaaggaaaggaccactgccatttctgatcaacagagccatgagctgccctagtggcgagcctcatgcgtccaccgggagggaaggacgaaagaagccactgacctccggcatggatgctagcgaactgacacccagggcctgggagagaattatttcaccagttgagagcgattccagtgtccgggactgcagtttgactaagagacagcaccaaaaggagaattttcaggaatatactgaaaaagagggcaaaatggcggcatcacgccgatctgtatttgctttgagcaatgaggaccccctccccttctgctccgatctctctggcaaggagcggggaaaaacactccataaagttaaaaccacctcaacgttctccgtttcaggagacgaagacaacgtgaaatgcttggaggtggtgtcgatctactacaccctgccacggaagccttcaaaaaagttctgcaacttgctccagcagtatacccagaacacgaacctactcatagaaagtccccaggtcgaaactgagacattccctaacgcgctcgagaaggacaagcagaactactccacgcgcgagcagagcggcactcccagctgcgaaaacctgaaaatgtccgtgaattccgatcagacactaacaaccgagaatatgacagctttccggctatccaatagaggccctctggctcctaccctccaagagatggcgtccgtggaggccgcagtttccttgcctgaagaagagtctaaagctcgggagattttcagcgacaacctggctaagactcccctgggggactctgaaaacaagaaggagcgtggtaagaaactacagagcgagaccctgcacacatctctgatgctgcaacgaaagaatgtgagtgaggagaaaagcgaaaattgtcagcagagcatcaacagctcaaactctggcccaagctcgcttccagcgctatccgaagtgaacattggaaacagtcagaccaggagatcaagctgggaatgtaccggttcaggcagagccattccattcacagggagcgggaaatgccctcagaaggaccacacatcaacggcagtgggggatggatcatcaggaagccagcctagggagggcaggggtgacattggaaccaattgtcagaagatgaccaataagaccctgtcccactccgaatcccaggtttttgccctcaccccggcactccacaagctgcagctgggggaggagacccaatccgatgaaccaaacttggagtccctccagtcagagccgagagaactgcctcaacggtcacaggaggctaacatgaccgaatcacgaaaagcagaggacgagatgcagaagtcagcttgggatcaaccctcccttcctgagggtaacaaaaataagactaaccttgatgacctcgtcaagggtgagaaccgtagctctgtgaaacatcggttagctgcgatgtccaaggcctcaaggaagttcccggcaaaggacgtgtcaccaaggagacacgtagctacaatctttccacaaagtggtagccggagcggatttgaccatttaagcctaggcacggttgagtgtaacccactctttcctgagccgactccaaaatccgcagaatctattggcgagtctcgattaagcgaaaacgggaagcacgtgaagaagagcgagaacttgttgccgattactgtgctgcctaatagggagccctcaactcatgtgagcaaccagaagtccaactccatctcccaaaggcaccagaatgaattcaagaatgtttcagaaagcccaagcaagcacgagaattcgaaggacgtgaccgcggcacagaacctagtgcgggagagtggcgcaccgagccctatcacattcacaagcttgcgtgaggcagaattctctgacaaccagagacgcctgtccccgccattccctctggaaccggcacagaagtccagagtgtctagccccctggcttcattcctgcagcagcagcgaagcgcctctagtctcgagtgggagcccgaaccacatctgtatcgttctaaatcattgaagtccatcaatgtccatggagacctactgcgcaaatctcacccaccaaaggtgagagaacggcacttcagtgaatcaactagcattgataatgcactaagtcggctcaccttgggtaatgagttttcagtcaacaacggttacagtaggaggtttcggtctttttctgaactcccgtcctgcgacggcaacgaatcctgggcgtacagatccgggaccaagaccggccctaggagcgcaatctccatctacagacctatcgattacgggatattcggaaaggagcaacagctcgccttcctggaaaacgtcaaacgatcactcacacaaggccgactatggaagcccagctttctgaagaatcctggctttctgaaggatgacctgcgaaacccacccaatccctccgagtccctttcttcaaattctcctagtagccaagtgcctgaggacgggctgagtccaagcgagccactgaacatatacgaggacgacccggtagatagtaactgcgatactgacacaacgactgatgatgagtactatcttgacgagaacgataaagaatcagaactttag

SEQ ID NO: 184157 - DNA, 5970 bp, Artificial Sequence
  derived and/or modified sequence
atgaccaaggtgccccccgccttcgacttcagcttcctgaacgacgaggaggccagaaagatcctgcaggtgctggagagaaacgaggagctgcagagagccgagaaggacagaatcagcaagctgcagaagaccaagagagacatcagatggctgcagggcgtgaccggcgagtggttcgaggagatccagagaaagaagttctgcaacgagaccgacgtgagccagatgctgaagcagcccctgacctacagactgagcaaggagatggccaagaacgaccccatcgagctgcccaccagcagaagcaagaacgtgaccaaccagaagaagcccacccccttcagcagcagaatgagcttcagaagcagcttcgccagcctgttcagcttcagaaagagcggcaaggagaccagcaagctgcccagcctgggccagaagggctgcgacggccacgccggcccccccatgcccgtgagaggcgccgccgtgcaggccaagatctacaacagccccctggagaaccacctggtggacagcaccttcgtgcccaagcccgccgtgatgagagaggagagcggcatgccccccccctgggacgccagcctgctggagaacgagttcttccaggtgctggacgacctggacagcaagctggcccaggagcagagcgccagcagcgtgaacaccagaacccccctgaactacggcagcagaacccagttcggccacttctacagcagcggcaacagacacggcaacatcaccgagagacacaagaagcactacaacgagaccagcaacatgagcatctacgacatcctgagacccggcacccccagagagggcttcaagaccttcagccccagaaccagcaccatctacgacatgtacagaaccagagagcccagagtgttcaaggaggactacgtgcagaagaacaccttcggcagcaccagcctgtgcttcgacagcagacagagaagcgccctgcccgccaccggccacttcaccgccagaagcctgcacttccccgccaccacccagagcaagagcggcttcatcccccccagacaccagcagagccccaagagaacccccctgagcagcatcatctggaacagaagcgacagcagcagagacagagagaaccaggaggagttcctgagagcccccagccccatggagatcgaccccgccgacaagtacgtgtaccccagaggcttccaggagaacaagagatacgagagctaccacagccagaacgtgtaccagagagtgagcctgaacgcccccatggagaacgccatgagccccgacaccttcgagaacagcgagaacatgcccttctaccaccagagcaacaccttcaccagaagcttcttcagcaacaccttcggcagaagcggcgagcagagaagattcggccagggccccttctggggccaggagaagggccacagcttctggagcgacttccacagaagcagaaagagcttcagcagcagcgacagagacttcgagatgatcagcatggaggccaacagcgtgagcgccatccacggccacaacgtgagcagcgagcactgggagagcttcagcagcggctacggcaccgacgtgagcagaggccaggaggagccccacccctggcagttcgacttccagagaagcaccctggacagcatggtggtgagccacggcaacgagacccagctgaccccccacttcggcacccccaacgtgtgcagcatgaccggcagcagctaccacgtgaagagcagcgagctggtgagccagcaggacagcagccccgtggaggtgcacatcaacaaggaggccagcagcttcggcatcgcccagaccctggccagcagcttcaagaccagcttcagccagatcagcgacgacagaagaaacccccagagccccaacctgcagaaccccaccgtgaccctgcagaagatcttccccaacaagcccgccagccaccccatgagaagccacaccgaggtgaccgtgaccagcagcaacagcgtggacagcctgcccctggccaagagccagcccaacatcctggtgaccgaggtgaacaacgagaaggacctgaacgagagcatcagcgaggaggacaagcagctgagcaagatggaccagaccaacaaggccggcgagatcccccagcccgtgagccagaccggcatcagcaacagcctgcccgacttccagaaccccctgagccaggacagcgccaagagcaacggcttcggcttcaacgccagcaccatcatcagcagcaagaagagccccagagtgttcagcagaaaggacaccagcaagatgtacatcccccacaccgacaagagcaacgacatcaagcaggacaagagattcaccgagaacagaaagctgggcagcaccgccagcctgcccttcatccaggagcacagaaccccccccagcttccccagaaccgaccagggctgccaccaggagctgaccgtgaacaacgaggacatcagcagaatcatcaccaacaaccactggagcagcgccctgaccgacacccagaacgcccagtacagcaagtgcaagctgacccccggccacaagaccagctgcgacagcctggacctgagcagcgccgccctgcccgacagcagccccagcaagaacagcagcctggacgcccccgtggtgcccagcaccaccgtgttcagcagaagaagccccagcgacaaggaccccagcctgggcgagagagaggagaaggacaacgccggcaagaaccagaagaaccagttcatcgtgagccacagcgagaaccaggagagaaacgacagccccgtgcccacccacgacgaggtggtggacgtgaagtgccacagccacagccccttcagaaacgagagaggcaagggcaagatcagacaccacatcagctgcatcgagaagctgagcaagaccgagagcatcagcgtgcccaccagcgaccacagaagcctgatcgaggccaaccagagcaacagcaaggtgagcgagctggacaccatctactgcaccctgcccagaaagagcagcagcttcctgatccacggcagacagagcggcagcaagatcatggccgccagcctgagaaacggccccccccccttccagatcaagaacaacgtggaggacgccatgggcaactacatgctgaacaagttcagccccagcagccccgagagcgccaacgagtgcagcaaggtgctgagcgacagcgccctggaggcccccgaggccaccgagagaatgaccaacgtgaagagcagcggcagcaccagcgtgagaaagggccccctgcccttcctgatcaacagagccatgagctgccccagcggcgagccccacgccagcaccggcagagagggcagaaagaagcccctgaccagcggcatggacgccagcgagctgacccccagagcctgggagagaatcatcagccccgtggagagcgacagcagcgtgagagactgcagcctgaccaagagacagcaccagaaggagaacttccaggagtacaccgagaaggagggcaagatggccgccagcagaagaagcgtgttcgccctgagcaacgaggaccccctgcccttctgcagcgacctgagcggcaaggagagaggcaagaccctgcacaaggtgaagaccaccagcaccttcagcgtgagcggcgacgaggacaacgtgaagtgcctggaggtggtgagcatctactacaccctgcccagaaagcccagcaagaagttctgcaacctgctgcagcagtacacccagaacaccaacctgctgatcgagagcccccaggtggagaccgagaccttccccaacgccctggagaaggacaagcagaactacagcaccagagagcagagcggcacccccagctgcgagaacctgaagatgagcgtgaacagcgaccagaccctgaccaccgagaacatgaccgccttcagactgagcaacagaggccccctggcccccaccctgcaggagatggccagcgtggaggccgccgtgagcctgcccgaggaggagagcaaggccagagagatcttcagcgacaacctggccaagacccccctgggcgacagcgagaacaagaaggagagaggcaagaagctgcagagcgagaccctgcacaccagcctgatgctgcagagaaagaacgtgagcgaggagaagagcgagaactgccagcagagcatcaacagcagcaacagcggccccagcagcctgcccgccctgagcgaggtgaacatcggcaacagccagaccagaagaagcagctgggagtgcaccggcagcggcagagccatccccttcaccggcagcggcaagtgcccccagaaggaccacaccagcaccgccgtgggcgacggcagcagcggcagccagcccagagagggcagaggcgacatcggcaccaactgccagaagatgaccaacaagaccctgagccacagcgagagccaggtgttcgccctgacccccgccctgcacaagctgcagctgggcgaggagacccagagcgacgagcccaacctggagagcctgcagagcgagcccagagagctgccccagagaagccaggaggccaacatgaccgagagcagaaaggccgaggacgagatgcagaagagcgcctgggaccagcccagcctgcccgagggcaacaagaacaagaccaacctggacgacctggtgaagggcgagaacagaagcagcgtgaagcacagactggccgccatgagcaaggccagcagaaagttccccgccaaggacgtgagccccagaagacacgtggccaccatcttcccccagagcggcagcagaagcggcttcgaccacctgagcctgggcaccgtggagtgcaaccccctgttccccgagcccacccccaagagcgccgagagcatcggcgagagcagactgagcgagaacggcaagcacgtgaagaagagcgagaacctgctgcccatcaccgtgctgcccaacagagagcccagcacccacgtgagcaaccagaagagcaacagcatcagccagagacaccagaacgagttcaagaacgtgagcgagagccccagcaagcacgagaacagcaaggacgtgaccgccgcccagaacctggtgagagagagcggcgcccccagccccatcaccttcaccagcctgagagaggccgagttcagcgacaaccagagaagactgagcccccccttccccctggagcccgcccagaagagcagagtgagcagccccctggccagcttcctgcagcagcagagaagcgccagcagcctggagtgggagcccgagccccacctgtacagaagcaagagcctgaagagcatcaacgtgcacggcgacctgctgagaaagagccacccccccaaggtgagagagagacacttcagcgagagcaccagcatcgacaacgccctgagcagactgaccctgggcaacgagttcagcgtgaacaacggctacagcagaagattcagaagcttcagcgagctgcccagctgcgacggcaacgagagctgggcctacagaagcggcaccaagaccggccccagaagcgccatcagcatctacagacccatcgactacggcatcttcggcaaggagcagcagctggccttcctggagaacgtgaagagaagcctgacccagggcagactgtggaagcccagcttcctgaagaaccccggcttcctgaaggacgacctgagaaacccccccaaccccagcgagagcctgagcagcaacagccccagcagccaggtgcccgaggacggcctgagccccagcgagcccctgaacatctacgaggacgaccccgtggacagcaactgcgacaccgacaccaccaccgacgacgagtactacctggacgagaacgacaaggagagcgagctgtag

SEQ ID NO: 184158 - protein, 1284 aa, Artificial Sequence
  derived and/or modified sequence
MHKKRVEEGEASDFSLAWDSSVTAAGGLEGEPECDQKTSRALEDRNSVTSQEERNEDDEDMEDESIYTCDHCQQDFESLADLTDHRAHRCPGDGDDDPQLSWVASSPSSKDVASPTQMIGDGCDLGLGEEEGGTGLPYPCQFCDKSFIRLSYLKRHEQIHSDKLPFKCTYCSRLFKHKRSRDRHIKLHTGDKKYHCHECEAAFSRSDHLKIHLKTHSSSKPFKCTVCKRGFSSTSSLQSHMQAHKKNKEHLAKSEKEAKKDDFMCDYCEDTFSQTEELEKHVLTRHPQLSEKADLQCIHCPEVFVDENTLLAHIHQAHANQKHKCPMCPEQFSSVEGVYCHLDSHRQPDSSNHSVSPDPVLGSVASMSSATPDSSASVERGSTPDSTLKPLRGQKKMRDDGQGWTKVVYSCPYCSKRDFNSLAVLEIHLKTIHADKPQQSHTCQICLDSMPTLYNLNEHVRKLHKNHAYPVMQFGNISAFHCNYCPEMFADINSLQEHIRVSHCGPNANPSDGNNAFFCNQCSMGFLTESSLTEHIQQAHCSVGSAKLESPVVQPTQSFMEVYSCPYCTNSPIFGSILKLTKHIKENHKNIPLAHSKKSKAEQSPVSSDVEVSSPKRQRLSASANSISNGEYPCNQCDLKFSNFESFQTHLKLHLELLLRKQACPQCKEDFDSQESLLQHLTVHYMTTSTHYVCESCDKQFSSVDDLQKHLLDMHTFVLYHCTLCQEVFDSKVSIQVHLAVKHSNEKKMYRCTACNWDFRKEADLQVHVKHSHLGNPAKAHKCIFCGETFSTEVELQCHITTHSKKYNCKFCSKAFHAIILLEKHLREKHCVFDAATENGTANGVPPMATKKAEPADLQGMLLKNPEAPNSHEASEDDVDASEPMYGCDICGAAYTMEVLLQNHRLRDHNIRPGEDDGSRKKAEFIKGSHKCNVCSRTFFSENGLREHLQTHRGPAKHYMCPICGERFPSLLTLTEHKVTHSKSLDTGTCRICKMPLQSEEEFIEHCQMHPDLRNSLTGFRCVVCMQTVTSTLELKIHGTFHMQKLAGSSAASSPNGQGLQKLYKCALCLKEFRSKQDLVKLDVNGLPYGLCAGCMARSANGQVGGLAPPEPADRPCAGLRCPECSVKFESAEDLESHMQVDHRDLTPETSGPRKGTQTSPVPRKKTYQCIKCQMTFENEREIQIHVANHMIEEGINHECKLCNQMFDSPAKLLCHLIEHSFEGMGGTFKCPVCFTVFVQANKLQQHIFAVHGQEDKIYDCSQCPQKFFFQTELQNHTMSQHAQ

SEQ ID NO: 184159 - DNA, 3855 bp, Artificial Sequence
  derived and/or modified sequence
atgcacaagaagagagtggaggagggcgaggccagcgacttcagcctggcctgggacagcagcgtgaccgccgccggcggcctggagggcgagcccgagtgcgaccagaagaccagcagagccctggaggacagaaacagcgtgaccagccaggaggagagaaacgaggacgacgaggacatggaggacgagagcatctacacctgcgaccactgccagcaggacttcgagagcctggccgacctgaccgaccacagagcccacagatgccccggcgacggcgacgacgacccccagctgagctgggtggccagcagccccagcagcaaggacgtggccagccccacccagatgatcggcgacggctgcgacctgggcctgggcgaggaggagggcggcaccggcctgccctacccctgccagttctgcgacaagagcttcatcagactgagctacctgaagagacacgagcagatccacagcgacaagctgcccttcaagtgcacctactgcagcagactgttcaagcacaagagaagcagagacagacacatcaagctgcacaccggcgacaagaagtaccactgccacgagtgcgaggccgccttcagcagaagcgaccacctgaagatccacctgaagacccacagcagcagcaagcccttcaagtgcaccgtgtgcaagagaggcttcagcagcaccagcagcctgcagagccacatgcaggcccacaagaagaacaaggagcacctggccaagagcgagaaggaggccaagaaggacgacttcatgtgcgactactgcgaggacaccttcagccagaccgaggagctggagaagcacgtgctgaccagacacccccagctgagcgagaaggccgacctgcagtgcatccactgccccgaggtgttcgtggacgagaacaccctgctggcccacatccaccaggcccacgccaaccagaagcacaagtgccccatgtgccccgagcagttcagcagcgtggagggcgtgtactgccacctggacagccacagacagcccgacagcagcaaccacagcgtgagccccgaccccgtgctgggcagcgtggccagcatgagcagcgccacccccgacagcagcgccagcgtggagagaggcagcacccccgacagcaccctgaagcccctgagaggccagaagaagatgagagacgacggccagggctggaccaaggtggtgtacagctgcccctactgcagcaagagagacttcaacagcctggccgtgctggagatccacctgaagaccatccacgccgacaagccccagcagagccacacctgccagatctgcctggacagcatgcccaccctgtacaacctgaacgagcacgtgagaaagctgcacaagaaccacgcctaccccgtgatgcagttcggcaacatcagcgccttccactgcaactactgccccgagatgttcgccgacatcaacagcctgcaggagcacatcagagtgagccactgcggccccaacgccaaccccagcgacggcaacaacgccttcttctgcaaccagtgcagcatgggcttcctgaccgagagcagcctgaccgagcacatccagcaggcccactgcagcgtgggcagcgccaagctggagagccccgtggtgcagcccacccagagcttcatggaggtgtacagctgcccctactgcaccaacagccccatcttcggcagcatcctgaagctgaccaagcacatcaaggagaaccacaagaacatccccctggcccacagcaagaagagcaaggccgagcagagccccgtgagcagcgacgtggaggtgagcagccccaagagacagagactgagcgccagcgccaacagcatcagcaacggcgagtacccctgcaaccagtgcgacctgaagttcagcaacttcgagagcttccagacccacctgaagctgcacctggagctgctgctgagaaagcaggcctgcccccagtgcaaggaggacttcgacagccaggagagcctgctgcagcacctgaccgtgcactacatgaccaccagcacccactacgtgtgcgagagctgcgacaagcagttcagcagcgtggacgacctgcagaagcacctgctggacatgcacaccttcgtgctgtaccactgcaccctgtgccaggaggtgttcgacagcaaggtgagcatccaggtgcacctggccgtgaagcacagcaacgagaagaagatgtacagatgcaccgcctgcaactgggacttcagaaaggaggccgacctgcaggtgcacgtgaagcacagccacctgggcaaccccgccaaggcccacaagtgcatcttctgcggcgagaccttcagcaccgaggtggagctgcagtgccacatcaccacccacagcaagaagtacaactgcaagttctgcagcaaggccttccacgccatcatcctgctggagaagcacctgagagagaagcactgcgtgttcgacgccgccaccgagaacggcaccgccaacggcgtgccccccatggccaccaagaaggccgagcccgccgacctgcagggcatgctgctgaagaaccccgaggcccccaacagccacgaggccagcgaggacgacgtggacgccagcgagcccatgtacggctgcgacatctgcggcgccgcctacaccatggaggtgctgctgcagaaccacagactgagagaccacaacatcagacccggcgaggacgacggcagcagaaagaaggccgagttcatcaagggcagccacaagtgcaacgtgtgcagcagaaccttcttcagcgagaacggcctgagagagcacctgcagacccacagaggccccgccaagcactacatgtgccccatctgcggcgagagattccccagcctgctgaccctgaccgagcacaaggtgacccacagcaagagcctggacaccggcacctgcagaatctgcaagatgcccctgcagagcgaggaggagttcatcgagcactgccagatgcaccccgacctgagaaacagcctgaccggcttcagatgcgtggtgtgcatgcagaccgtgaccagcaccctggagctgaagatccacggcaccttccacatgcagaagctggccggcagcagcgccgccagcagccccaacggccagggcctgcagaagctgtacaagtgcgccctgtgcctgaaggagttcagaagcaagcaggacctggtgaagctggacgtgaacggcctgccctacggcctgtgcgccggctgcatggccagaagcgccaacggccaggtgggcggcctggccccccccgagcccgccgacagaccctgcgccggcctgagatgccccgagtgcagcgtgaagttcgagagcgccgaggacctggagagccacatgcaggtggaccacagagacctgacccccgagaccagcggccccagaaagggcacccagaccagccccgtgcccagaaagaagacctaccagtgcatcaagtgccagatgaccttcgagaacgagagagagatccagatccacgtggccaaccacatgatcgaggagggcatcaaccacgagtgcaagctgtgcaaccagatgttcgacagccccgccaagctgctgtgccacctgatcgagcacagcttcgagggcatgggcggcaccttcaagtgccccgtgtgcttcaccgtgttcgtgcaggccaacaagctgcagcagcacatcttcgccgtgcacggccaggaggacaagatctacgactgcagccagtgcccccagaagttcttcttccagaccgagctgcagaaccacaccatgagccagcacgcccagtag

SEQ ID NO: 184160 - DNA, 3855 bp, Artificial Sequence
  derived and/or modified sequence
atgcacaagaagcgggtggaagaaggcgaggcatcggacttctcactggcctgggatagtagcgtgactgccgccgggggtctggaaggtgaacctgagtgtgatcagaaaacatccagggcccttgaagacaggaattctgttactagccaagaagaacggaacgaggacgatgaggacatggaagacgagtccatctatacatgcgaccactgccagcaggattttgagagtctcgccgacttaacagatcacagggcccaccggtgtcctggtgatggcgatgatgatccccagctgtcttgggtggcaagttccccatcaagcaaggacgtcgcttccccaacacagatgataggtgacggatgtgatctgggtctaggcgaggaggagggtggcaccgggcttccttatccctgccagttttgtgacaagagtttcatccggctatcatacctgaagcgccacgaacagattcattccgataagctaccgtttaagtgtacttattgctcacgactgttcaagcataagagaagccgtgaccgtcacatcaagcttcatacaggagacaagaaatatcattgccatgaatgcgaagcagcttttagccgctctgatcatttaaagatccacttaaagacccactctagctctaagccattcaaatgtaccgtgtgtaaacgcggattctcctccacttcctccctgcagagccatatgcaggctcacaaaaagaacaaagagcacctcgctaagtcagagaaggaagcaaagaaagatgactttatgtgcgactattgtgaagatacattctctcagaccgaagaactcgagaaacacgtcctgacaagacacccgcaactcagcgagaaggcagatctgcagtgcattcactgccctgaggtttttgtggatgagaatacgttactggctcatattcatcaagcacacgctaatcagaaacacaagtgccctatgtgtcccgaacagttctcttccgtggagggggtttactgccacctcgactctcatcgacaaccagacagcagcaaccatagcgtcagtcccgaccccgttctgggcagcgtggcgtctatgagcagtgcaacacccgattcaagtgccagcgtggagagaggctccacccccgattcaaccctgaagcccttgcgagggcagaagaaaatgcgcgatgacggccagggctggaccaaggtggtgtacagttgtccctattgttccaaaagggattttaattcccttgcagtgttggaaatccaccttaagactatccatgcagacaaaccacagcagagtcatacctgccagatctgcctggacagtatgccgaccctgtataatctgaatgagcatgtgaggaaattgcacaaaaaccacgcataccctgtgatgcagttcggaaacatttccgcttttcattgcaattattgtcccgaaatgttcgctgatattaactcactccaggagcatatcagagtctcacactgtggaccgaacgcaaacccctcagacggtaacaatgcattcttctgtaatcaatgctctatgggcttcttgactgagtctagcttgactgagcatatccagcaggctcactgctctgtaggctcagctaagctcgaatcccccgtggttcagcccactcagagttttatggaggtctactcgtgcccatactgtactaactcccccatattcggatctatcttgaagttaaccaagcatatcaaggagaatcataaaaatatccccctggcccacagtaagaaatcgaaggccgaacagtccccagtgtcctccgacgttgaagttagctcacctaaacggcagcggctcagcgcatccgcaaactccataagcaacggtgagtatccctgcaaccaatgcgacctaaaattctctaattttgagtcattccagacacacttaaaactccatctggagctgttgctccgaaagcaagcatgtccacagtgcaaggaagacttcgatagtcaggagagcttgctgcagcatttgacggtccattatatgaccacatcgacacactacgtctgtgaaagttgcgacaaacaattcagtagcgttgatgatctgcagaagcacttgttggacatgcacaccttcgtcctttatcattgcacactgtgccaggaagtttttgatagcaaggtgtccattcaggtacacctggccgtgaaacacagcaatgaaaaaaagatgtatcggtgtaccgcctgcaattgggatttccgtaaggaggccgacttgcaggtgcacgtaaagcacagccacttgggaaatccagctaaagcacataagtgcattttttgcggggagacctttagcacagaggtggagctgcagtgccacatcacgactcacagcaagaagtataactgcaaattctgcagcaaggccttccacgcgataattcttctggagaaacatttacgggaaaagcactgtgtattcgacgccgccactgaaaatggaaccgcgaacggtgtgcccccgatggcgacgaaaaaggccgaacctgctgatctgcagggcatgctgctgaagaatcctgaagcacctaactctcatgaggcttcagaggacgatgtggatgcctcggagcccatgtatggttgtgacatctgcggagctgcctacacaatggaggttttgctccagaaccatcgacttagagaccataacattaggccgggggaagacgatgggtcccgtaaaaaagccgagttcataaaaggcagtcataaatgtaacgtgtgtagcagaactttcttttccgaaaacggattgagagagcaccttcaaacacatcgcggacctgcgaagcactacatgtgcccaatttgtggtgagcgttttccaagtttattgacattgacggaacacaaagtcacccattcaaaatctctggacacaggaacctgcaggatttgcaagatgccactccaatccgaagaagagttcattgagcattgtcagatgcaccccgatctgcggaattccctcaccggcttccggtgtgttgtttgtatgcagaccgtcacctccacactagagctcaagatacacggtacgttccatatgcagaagctggcaggatcttctgctgcctcatcccctaatggccaggggcttcaaaaactctacaaatgtgcactttgcttgaaggagttcagatctaagcaggacctggttaagttggacgtgaacggactgccctacggcctgtgtgccgggtgcatggcccggagcgcaaacgggcaggtcggaggtctggcgcccccagagcccgccgacagaccatgtgccggcctcagatgcccagaatgtagcgttaagtttgagtctgccgaggacctcgagagccacatgcaggtggaccacagagatttgacccctgaaacatcaggccctcggaaaggcactcagacctcacctgtaccgaggaagaaaacctaccaatgcattaagtgtcagatgaccttcgagaatgaaagggaaattcagatacacgtggctaaccacatgatcgaggagggtatcaaccacgaatgtaaactgtgtaaccaaatgttcgattcaccggctaaactcctctgtcacttaatagagcattccttcgaaggcatggggggcacattcaaatgtcctgtctgttttacagtgtttgtgcaggctaataaattacagcagcacatatttgcggtgcacggccaagaggacaaaatttatgattgcagccaatgtcctcagaagttttttttccagacggagttacaaaaccacactatgtcacagcacgcccagtag

SEQ ID NO: 184161 - DNA, 3855 bp, Artificial Sequence
  derived and/or modified sequence
atgcacaaaaaacgggtggaagagggcgaagcttcagacttcagcctggcctgggattccagcgtgacggcagccgggggcttagagggggagcctgagtgtgatcaaaagacctcccgggccctggaggatcggaactctgtcacctcccaggaagagagaaatgaagatgacgaagacatggaggatgagtccatttacacatgtgatcattgccagcaagactttgaatcccttgcggacctgactgatcatcgcgcccacaggtgtccgggtgatggtgatgacgaccctcagctgtcttgggtggcttcttccccttcgagcaaagacgtggcctcgccgactcagatgataggggacggatgtgacctgggcctcggggaggaagaaggtgggaccggtctgccttacccttgccagttctgcgataaatctttcatcagactgagctatttgaaaagacacgagcagattcacagtgacaaactgcccttcaagtgcacttactgctcacggctctttaagcataagcgtagtcgtgacagacacatcaagcttcacacaggagataaaaagtatcattgtcatgagtgtgaggccgctttttctcgcagcgaccatctgaagatccacctcaaaacacacagtagttccaagccctttaaatgcactgtttgtaaaaggggcttctcctcaaccagcagccttcaatcacacatgcaggcccacaaaaagaataaggaacacctggccaagtcagagaaagaagcaaaaaaagacgacttcatgtgtgactattgtgaagacacattttcgcaaaccgaagagctggaaaagcacgtgctcaccaggcatcctcagctgagcgaaaaagccgatctgcaatgtattcattgccctgaggtgttcgtggacgagaacaccctgttggcccatattcaccaggctcacgccaatcagaaacacaagtgtcccatgtgtcctgagcaatttagttccgtagagggagtctattgtcaccttgacagccacagacagcccgactcatccaaccactctgtaagccctgatcccgtgcttgggagtgtagcctcaatgtcctccgccacgcctgatagctccgcgtcagtcgaacgtggttcaacacccgactccactctgaagccactccgtggtcagaagaagatgcgcgacgacggacagggttggactaaagttgtctactcatgcccttattgtagcaagcgtgattttaattcactcgccgtgctggagattcacctgaagaccattcatgccgataaaccacagcaaagccatacctgccagatctgccttgactcaatgcccacactgtacaacctgaacgagcacgtgagaaagctgcacaagaatcacgcatatcctgtaatgcagtttgggaacatttctgcgttccattgcaactattgtccagagatgtttgcagacatcaactccctgcaagaacacatacgcgtatcacattgcgggccgaacgccaaccccagtgacggcaataatgccttcttctgtaaccagtgcagcatggggttcctgactgaaagtagcctgactgagcacattcaacaggcacactgctcagttggctcagccaagctggagagccccgttgtgcaacctacccagtcctttatggaggtctatagctgcccttactgcacgaatagcccaattttcggcagcattctgaagctgacaaaacacatcaaagaaaatcacaaaaatatccccttggcccactcgaaaaaatccaaggccgagcaatcccccgtctcatcagacgtggaagtatctagtccgaagagacagcgactgtctgccagtgcaaactcaatttccaatggcgagtatccctgcaaccagtgcgacctcaaattttccaacttcgaaagcttccagacccatctcaagttacacctggaactcttgttacgcaaacaggcttgcccccagtgcaaggaagactttgactctcaagagtctctgcttcaacacctaacagttcactacatgactacttccacacattatgtgtgtgagtcatgtgataaacagttttcaagcgtcgatgacttacaaaagcacctgttggatatgcatacattcgtgctttaccattgtacgctatgccaggaggtattcgacagtaaagtcagcattcaggtgcacctggccgtaaagcacagcaatgagaaaaagatgtatcggtgcacagcctgtaattgggactttcgcaaagaagccgatctgcaggtacacgtgaagcattcccatttgggcaatcctgccaaggcacacaagtgcattttctgcggcgagaccttctcaacagaagtggagctccagtgccacatcacaacacatagtaaaaagtacaattgtaaattttgttcaaaggccttccacgctatcatcctgctcgagaaacatctcagagaaaagcactgcgtgtttgacgccgcgactgaaaacggaactgctaatggggtacctccaatggcaacaaagaaggctgagcccgctgacttacagggcatgttgctgaagaatcccgaggcccctaattcccatgaagcttcagaggacgacgtggacgctagcgagccaatgtatgggtgtgatatttgcggtgccgcttacactatggaggtgctgctacagaatcacagactgcgggaccacaatatccgccccggggaggatgacggcagccgtaagaaggccgaattcattaaagggtcccataagtgcaatgtgtgcagtcggaccttcttcagtgaaaatggtttgcgggagcatctccaaacacacaggggccccgcgaagcactacatgtgcccaatctgtggggaacggttccccagtctgcttaccctgactgagcacaaggtaactcacagtaagtctcttgataccggcacctgccgaatctgcaagatgcccctgcaatccgaggaggagttcattgagcattgtcagatgcatcctgaccttaggaatagtctgaccggcttccggtgcgtggtctgcatgcagaccgtgacaagtactctggagctgaaaatccatggcaccttccatatgcagaagctggctggctcatccgcagcctcatcccccaatggacagggacttcaaaaactatacaagtgtgcgctttgtctaaaggaattcagaagcaagcaagacttggtcaagctggacgtcaatgggctcccctatgggctatgcgctggatgcatggctagatctgcaaacgggcaggttggggggttagcacctcccgagcccgccgaccgtccttgcgcaggccttcggtgtccagagtgttcggtgaaattcgagtccgcggaagatctggaatctcatatgcaggtcgaccatcgggatcttacaccagagactagcggtccccgcaaaggtacgcagacatctcccgtgccccgtaaaaagacctatcagtgtatcaaatgccagatgactttcgaaaatgaaagggaaatccagatccacgtggccaatcacatgatcgaggagggaattaaccacgaatgcaagctgtgcaaccagatgttcgactcacccgcaaagctgctatgccacctgattgagcactcctttgagggaatgggtggaactttcaagtgtcccgtctgttttaccgtgtttgtgcaggccaacaaactgcagcaacacattttcgcagtgcacggacaggaggacaagatttatgactgctcgcaatgtcctcagaaattcttctttcagactgagctccaaaatcatacgatgtctcagcacgcccaatag

SEQ ID NO: 184162 - DNA, 3855 bp, Artificial Sequence
  derived and/or modified sequence
atgcacaagaagagggtggaggagggggaggccagtgacttcagcctggcctgggacagctctgtgacagctgctgggggcctggagggggagccagaatgtgaccagaagaccagccgggccctggaggacagaaattctgtgaccagccaggaggagagaaatgaagatgatgaggacatggaggatgagagcatctacacctgtgaccactgccagcaggactttgagagcctggccgacctgacagaccaccgggcccaccgctgccctggagatggagatgatgacccccagctgtcctgggtggccagcagccccagcagcaaggatgtggccagccccacccagatgattggagatggctgtgacctgggcctgggggaggaggagggcggcaccggcctgccctacccctgccagttctgtgacaagagcttcatccggctgagctacctgaagagacatgagcagatccacagcgacaagctgcccttcaagtgcacctactgcagccgcctcttcaagcacaagaggagccgggacagacacatcaagctgcacactggagacaagaagtaccactgccatgaatgtgaggccgccttcagcagaagtgaccacctgaagatccacctgaagacccacagcagcagcaagcccttcaagtgcaccgtgtgcaagaggggcttcagcagcaccagcagcctgcagagccacatgcaggcccacaagaagaacaaggagcacctggccaagtctgagaaggaggccaagaaggatgacttcatgtgtgactactgtgaggacaccttcagccagacagaggagctggagaagcacgtgctgaccaggcacccccagctgtctgagaaggctgacctgcagtgcatccactgcccagaggtgtttgtggatgagaacaccctgctggcccacatccaccaggcccacgccaaccagaagcacaagtgccccatgtgcccagagcagttcagctctgtggagggcgtgtactgccacctggacagccaccggcagcctgacagcagcaaccacagcgtgtccccagaccctgtgctgggctctgtggcctccatgagcagcgccaccccagacagcagcgcctctgtggagcggggcagcaccccagacagcaccctgaagcccctgcggggccagaagaagatgagagatgatggccagggctggaccaaggtggtgtacagctgcccctactgcagcaagagggacttcaacagcctggccgtgctggagatccacctgaagaccatccacgccgacaagccccagcagagccacacctgccagatctgcctggacagcatgcccaccctgtacaacctgaatgaacatgtgaggaagctgcacaagaaccacgcctaccctgtgatgcagtttggaaacatcagcgccttccactgcaactactgcccagagatgtttgctgacatcaacagcctgcaggagcacatccgggtgagccactgcggccccaatgccaaccccagtgatggcaacaatgccttcttctgcaaccagtgcagcatgggcttcctgacagagagcagcctgacagagcacatccagcaggcccactgcagcgtgggcagcgccaagctggagagccctgtggtgcagcccacccagagcttcatggaggtgtacagctgcccctactgcaccaacagccccatcttcggcagcatcctgaagctgaccaagcacatcaaggagaaccacaagaacatccccctggcccacagcaagaagagcaaggccgagcagagccctgtgtccagtgatgtggaggtgagcagccccaagaggcagaggctgagcgccagcgccaacagcatcagcaatggagagtacccctgcaaccagtgtgacctgaagttcagcaactttgagagcttccagacccacctgaagctgcacctggagctgctgctgaggaagcaggcctgcccccagtgcaaggaggactttgacagccaggagagcctgctgcagcacctgactgtgcactacatgaccaccagcacccactacgtgtgtgagagctgtgacaagcagttcagctctgtggatgacctgcagaagcacctgctggacatgcacacctttgtgctgtaccactgcaccctgtgccaggaggtgtttgacagcaaggtgtccatccaggtgcacctggccgtgaagcacagcaatgagaagaagatgtaccgctgcacagcctgcaactgggacttcaggaaggaggccgacctgcaggtgcacgtgaagcacagccacctgggcaacccagccaaggcccacaagtgcatcttctgtggggagaccttcagcacagaggtggagctgcagtgccacatcaccacccacagcaagaagtacaactgcaagttctgcagcaaggccttccacgccatcatcctgctggagaagcacctgcgggagaagcactgtgtgtttgatgctgccacagaaaatggaacagccaatggagtgccccccatggccaccaagaaggccgagcctgctgacctgcagggcatgctgctgaagaaccctgaggcccccaacagccatgaggcctctgaagatgatgtggatgccagcgagcccatgtatggctgtgacatctgtggggccgcctacaccatggaggtgctgctgcagaaccaccggctgcgggaccacaacatccggcctggagaagatgatggcagcaggaagaaggccgagttcatcaagggcagccacaagtgcaatgtgtgcagcaggaccttcttctctgaaaatggcctgcgggagcacctgcagacccaccggggccctgccaagcactacatgtgccccatctgtggggagcgcttccccagcctgctgaccctgacagagcacaaggtgacccacagcaagagcctggacaccggcacctgccgcatctgcaagatgcccctgcagagcgaggaggagttcatcgagcactgccagatgcacccagacctgaggaacagcctgaccggcttccgctgtgtggtgtgcatgcagacagtgaccagcaccctggagctgaagatccacggcaccttccacatgcagaagctggccggcagcagcgctgccagcagccccaacggccagggcctgcagaagctgtacaagtgtgccctgtgcctgaaggagttccgcagcaagcaggacctggtgaagctggatgtgaatggcctgccctacggcctgtgtgccggctgcatggcccggagcgccaacggccaggtgggcggcctggcccctcctgagcctgctgaccggccctgtgccggcctgcgctgcccagagtgcagcgtgaagtttgaatctgctgaggacctggagagccacatgcaggtggaccaccgggacctgaccccagagaccagcggccccaggaagggcacccagaccagccctgtgcccaggaagaagacctaccagtgcatcaagtgccagatgacctttgaaaatgaaagagagatccagatccacgtggccaaccacatgattgaggagggcatcaaccacgagtgcaagctgtgcaaccagatgtttgacagccctgccaagctgctgtgccacctgattgagcacagctttgagggcatgggcggcaccttcaagtgccctgtgtgcttcaccgtgtttgtgcaggccaacaagctgcagcagcacatctttgctgtgcacggccaggaggacaagatctatgactgcagccagtgcccccagaagttcttcttccagacagagctgcagaaccacaccatgagccagcacgcccagtag

SEQ ID NO: 184163 - DNA, 3855 bp, Artificial Sequence
  derived and/or modified sequence
atgcacaagaagcgggtggaggagggcgaggccagcgacttcagccttgcctgggattcgagcgtgacggccgccgggggtctagaaggcgagccggaatgtgatcagaagacttcccgagccttggaggatcgcaacagcgtaaccagccaggaggaacggaatgaagacgacgaagacatggaggacgaaagtatatatacatgcgaccattgccaacaggactttgaatcactggcagacttgactgaccatagggctcatcgttgccccggagacggtgatgacgatccgcaactttcttgggtcgccagtagtccaagctctaaagacgtggccagccctactcagatgatcggggatggatgcgacctgggcctcggtgaggaggaggggggaacaggcctaccgtatccttgtcagttctgcgataagtcatttatccggctctcttatctcaagagacatgagcagatccactccgacaaactcccctttaaatgtacctactgcagcaggttatttaaacataagcggtcgcgggacagacacatcaagcttcacactggagataaaaagtaccactgtcacgaatgtgaggctgctttttcacgtagcgaccaccttaaaatccacctcaagactcactcatccagcaagccgttcaaatgtacagtctgtaaacgaggatttagctcaacctcttcactacagagtcatatgcaagcccacaagaaaaataaagagcatctggccaagtccgagaaggaggcaaagaaagacgactttatgtgtgactattgcgaagatacattttcccagacggaagagctggaaaaacacgtgttgacccgtcacccccaactctctgaaaaggcagacctgcagtgcatccactgtccagaagtctttgttgacgaaaacaccctgttagcccacatacaccaggcccatgcaaatcagaagcacaaatgtccaatgtgtcccgaacagttttcctcagtggaaggcgtttactgccatttagacagtcatcgccagcctgatagttccaaccattcagtatcgccagaccccgtgcttgggagcgtcgcgagcatgtcctctgctactcctgatagcagcgcatcagtggagagggggagcacgccggattctactctcaagcctctgcgcgggcagaagaagatgcgcgatgacgggcaagggtggaccaaggttgtgtattcctgcccttattgctcgaagcgcgacttcaatagcctcgccgttctggaaatacatcttaagaccatccatgcggacaaacctcagcagagccacacttgccagatttgcttagattcaatgcccactttatacaatttgaacgaacacgttagaaagctccataagaaccacgcgtaccctgtcatgcagttcggcaacatttcagcttttcactgcaattactgccccgaaatgttcgcagatatcaattccctacaggagcacataagagtcagccactgcggcccaaatgctaatccatccgacggcaataatgctttcttctgcaaccaatgtagtatgggcttcctgaccgagtcttcactgaccgagcatatccagcaggcccattgctccgtcgggtcagctaagctggaatcacccgtggtacagcccactcagtcgttcatggaagtttacagttgtccgtattgcaccaacagtcccatctttggctctatcctgaaattgactaaacacattaaggagaatcataaaaacatacccctggctcactccaaaaagtccaaagccgagcaaagccccgtgagcagtgacgtcgaggtctcttcacccaagaggcaaaggttatctgcaagtgctaattcaatttcaaatggagagtacccttgtaaccaatgcgatcttaagttcagcaactttgaaagtttccaaacacatttaaaactccacctcgaactcctcctgcgcaaacaggcctgtccccagtgcaaagaagatttcgattcccaagagtccctgctgcagcatttgaccgttcattatatgaccacatcaacacactacgtgtgtgaatcatgcgacaaacagttctccagtgtcgacgatctgcagaagcacctgcttgatatgcacacgtttgtattataccattgcaccctgtgtcaggaagtctttgacagcaaagttagcatacaggttcacctggccgtgaagcatagcaacgaaaaaaagatgtatcggtgtaccgcgtgcaattgggactttcgcaaagaagccgacctgcaggtgcacgtgaaacacagccacctggggaatccagccaaagcccacaagtgtatcttttgtggggaaaccttcagcactgaggtagaacttcaatgtcacattaccacccattctaaaaagtataattgcaagttctgctccaaagcgtttcatgcaatcatcctgttagaaaagcacctgagagagaaacactgcgttttcgacgccgccacagagaacggaaccgccaacggggtgccacccatggctacaaaaaaagccgagccagctgacttgcagggcatgctcttgaaaaacccagaggcccccaacagtcacgaggccagtgaagacgacgtggacgcttctgagccaatgtacggctgtgacatttgtggagctgcatataccatggaggtactgctccaaaatcaccgcctacgggaccataatatcaggcccggcgaggatgacggatcccgtaagaaagctgagtttataaaagggtcacacaagtgcaatgtgtgttctaggacctttttttccgaaaacggcttgcgcgaacatcttcagacacatcggggcccagccaaacattacatgtgtcccatctgcggagaaaggtttcctagtctcctcacactgacagaacataaggttacccattctaaatctcttgacaccggaacgtgcagaatctgcaagatgcctctgcagtccgaagaagagttcatcgagcactgtcagatgcatcccgatctccgcaactcactcaccggttttcggtgtgtggtgtgtatgcagaccgtgactagcacccttgaacttaaaattcatggtactttccatatgcagaaactggccggctcttccgctgcttcaagtcctaatgggcagggcttacaaaagctgtataagtgcgccctctgcttaaaggagtttagaagcaaacaagacttggttaagttagatgtaaatggactgccttacggcctgtgtgctggatgcatggcgagatctgctaacggccaggtggggggcctcgctcccccggaacctgccgatcggccctgcgcaggcctgcggtgtcccgaatgcagcgttaaatttgaatcagcagaggaccttgaatctcatatgcaagtggaccatagagacctgacaccggagacaagtggccccaggaagggcacccagacttcgcctgtccctcggaagaagacatatcagtgcatcaagtgccagatgacctttgaaaatgaaagggagatccaaattcatgttgccaaccacatgatcgaggaagggattaaccacgagtgtaaattatgtaatcagatgttcgactccccagccaaactcctgtgtcatcttattgagcactccttcgagggaatgggaggcaccttcaagtgccccgtttgttttactgtgtttgtccaggctaataagcttcagcagcacattttcgccgtacacggacaagaggacaagatctatgattgcagccagtgcccacagaagtttttctttcagacagaattgcagaatcatactatgagtcagcatgcccagtag

SEQ ID NO: 184164 - DNA, 3855 bp, Artificial Sequence
  derived and/or modified sequence
atgcacaagaagcgggtggaggagggcgaggccagcgacttcagcttagcctgggactcaagcgtgacagcagccggtggccttgagggagaacccgagtgcgaccaaaaaaccagtagagcactggaggatcgcaatagcgtcacatctcaggaagagaggaatgaggatgatgaggatatggaggatgaaagtatctacacatgcgaccattgccagcaggatttcgaatcactggcagatctgaccgatcatcgggcacatcgatgtcctggggatggcgatgacgacccacagctgtcctgggtagcctcgagtccaagcagtaaggatgtggcctccccaacccagatgatcggggacggctgcgaccttggcctcggcgaggaggagggcggcacagggctgccgtacccttgccagttttgcgacaaatctttcattagactgagttacctcaaaaggcatgaacagatccactcagataaactgccttttaagtgcacatactgttctaggctgtttaagcataaacggtctagagatcggcatatcaagctacacacgggcgacaagaaataccattgtcacgagtgcgaagccgcattttcccgatcggatcatctgaagatccatttgaagacacattcctctagcaaaccatttaaatgtaccgtctgcaagcggggcttttcctctacctcttccctgcagtcacacatgcaggcccacaaaaagaataaggaacatctcgcaaagtccgaaaaggaggctaaaaaggatgacttcatgtgtgactattgtgaagataccttcagccagaccgaagaactggagaagcacgtactgacgaggcatccccagctgtcagagaaagcggatctgcaatgtattcactgccccgaagtgttcgttgacgaaaacaccctattggcccatatacaccaggcacatgcaaaccagaagcacaaatgtcctatgtgtcctgaacagttttccagtgtggagggggtctattgccatctggatagtcataggcagcctgactctagcaatcattccgtgtctcctgaccccgtcttaggatctgtcgccagcatgagttccgccactcccgacagttcggcgtctgtcgaaagagggtccacgcctgactcaaccctgaaaccccttcgggggcagaagaaaatgcgggacgacggccagggttggacaaaggtcgtgtactcctgtccatactgtagcaaacgagatttcaacagtcttgcagtacttgaaatccacctcaaaaccatacacgccgacaagcctcaacaatcccacacttgccagatatgtctcgacagcatgcccacactgtacaaccttaatgaacatgtgcgcaagttgcataaaaatcacgcctatccagtgatgcagtttggcaatatttcggccttccactgcaactattgtcccgaaatgttcgcagacattaattctctgcaggagcacataagagtcagccattgtggcccaaacgccaacccaagcgacggtaacaacgcttttttttgcaaccagtgtagcatgggatttctgacagaatcttcactcacggaacacatccagcaggcccactgctcagtaggatcagcaaagctggagtcacccgtcgtgcagcctactcagtcttttatggaggtgtatagctgtccctattgcactaattccccaatcttcggcagtatactcaaactcacaaagcacatcaaagagaaccacaaaaacatccccctggctcattcgaagaagagcaaggcagaacagagccctgtatcctcagatgtggaggtgtccagcccaaagcgtcagcgcctctctgcttctgccaactcaatctcaaatggtgaatatccctgcaatcagtgcgacttgaaattcagcaatttcgagagcttccagacgcatctcaaactccatttagagctcctgctcaggaagcaggcatgtcctcagtgtaaggaggattttgactcacaggagagcctcctccagcatttgactgtacactatatgacaactagcactcactacgtctgcgaatcatgcgacaagcaattcagcagcgtggatgatctacagaaacatctgctggacatgcatacctttgtcttataccattgcacattgtgccaggaggtgtttgattctaaggtgagcatacaagtgcacttggccgtgaaacactctaacgaaaaaaagatgtaccgctgtaccgcatgtaattgggactttagaaaagaagccgatcttcaggtgcatgttaagcactcccatctgggcaatccggcaaaggcacacaaatgcatcttctgcggcgaaactttcagcaccgaagtggagctgcagtgccatatcacaacccacagcaagaaatataactgtaagttttgctccaaggcattccacgctattatactactcgagaagcacctgagggagaaacactgcgtctttgacgctgccactgaaaacggcacggctaacggtgtccctcccatggccactaagaaggctgaacctgcggacctgcagggaatgttactcaaaaatcctgaggcaccgaattctcatgaggcctccgaagacgacgtggatgcgtctgaacccatgtacgggtgtgacatatgcggagccgcttatacaatggaggtgttacttcagaatcaccgccttcgtgatcacaatatacgcccaggagaggatgacggctctcgtaaaaaggccgaatttattaagggctcccataaatgcaatgtctgctctcgcaccttcttctctgagaacggtctgcgagaacacctgcaaacacacaggggccccgcgaagcattatatgtgtccaatttgtggggagaggttcccttcactcctgaccttgactgagcataaagtgacccactcaaagtctctcgacacaggaacgtgccgaatctgcaaaatgcctctgcagtcggaagaggagtttattgaacactgtcaaatgcatcctgacctccgaaattctcttactggcttcagatgcgtggtttgtatgcagaccgtgaccagtacactggaactcaagatccatggaacattccacatgcagaagctcgctggatcatccgccgcatccagtcccaacggccaaggcctgcaaaagctgtacaagtgtgctctgtgcttgaaagagttccggtcgaaacaagacctcgtgaagctcgacgttaacggcctgccttacggcctctgtgcaggatgcatggcccgtagcgcgaatggtcaggtcgggggcctggcgccgccagagccggctgatcgaccatgcgcaggtctcagatgtcccgagtgttcagtcaaatttgaaagcgccgaggatctcgagtcacatatgcaagtcgaccatcgcgaccttactcctgagaccagcgggcctcgcaagggaacacagactagtcccgtgccaagaaaaaaaacttatcagtgcatcaagtgccagatgacgtttgagaatgagagagagatccaaatccacgtggccaaccatatgattgaagagggtatcaatcacgagtgtaagctttgcaatcagatgttcgacagtcctgctaagttgctctgccatctgatcgaacactcctttgaagggatgggtggtacctttaagtgccccgtgtgtttcacagtctttgtgcaggccaacaaattgcagcagcacattttcgctgtgcacgggcaggaggacaaaatctatgattgttcccagtgcccccaaaagttctttttccagactgagctccagaatcataccatgagtcaacacgcccaatag

SEQ ID NO: 184165 - DNA, 3855 bp, Artificial Sequence
  derived and/or modified sequence
atgcacaagaaacgcgtggaagagggcgaagccagcgatttctctctggcgtgggacagctcagtgactgctgccggtggcctggagggggaacctgagtgcgaccagaaaacatctcgcgctctcgaggatcgcaactcagtgacgagccaggaggagaggaatgaggacgatgaggacatggaagacgaatctatttatacttgtgaccactgccaacaggatttcgagtccctggctgatctgaccgaccacagagcccaccgctgtcctggtgacggggacgatgacccccaattatcctgggtggctagctccccctcttccaaggatgtggcctctcccacccaaatgattggtgatggctgcgatctcggtctgggcgaggaggaaggcggaacaggactgccctatccctgccagttctgcgacaagtcttttatccgcttgtcttacctaaagaggcatgagcaaatccattccgacaaactgccgttcaaatgcacctactgctccagactcttcaagcataagaggtcaagagaccgtcacattaaattacatactggcgacaaaaagtaccactgccatgaatgcgaagcagccttttcccggagcgatcatcttaaaatccatctcaagacccattccagttctaagccctttaaatgtactgtctgcaagagaggattctcttcaacatctagcttgcagagccatatgcaggctcataagaaaaacaaggaacacctggccaaatccgaaaaggaggcaaagaaagacgactttatgtgcgactattgcgaagataccttcagtcagacagaagagttggagaaacatgttctgactcggcatccccagttgtccgagaaggccgacctgcaatgcattcattgccctgaagtgtttgtggacgaaaatacccttctggcacacatccaccaggctcatgcaaaccagaagcataagtgtccaatgtgtccggagcaattcagctcagtggaaggcgtgtattgtcacctagattcccaccgacagcccgactcctccaaccatagcgtcagccccgaccctgtgctcggatcggtcgcatcaatgtcttcagccacacctgactcctcagcatcggtcgaacgcggatccaccccagacagtactttgaaacccctgcgtggtcaaaagaaaatgcgcgacgacggccagggttggaccaaggttgtgtacagctgcccctattgctctaagcgcgactttaatagtttagctgtgcttgagatccacttgaagactatccacgcagacaaaccccaacagagtcatacctgccagatctgtctggatagtatgcctacactctacaacctgaatgaacacgtcaggaaactgcataaaaaccatgcgtatcctgttatgcagttcggcaacattagcgcttttcactgcaattactgtccggagatgttcgccgatatcaacagcctgcaggagcacatcagagtgtcccactgcggtcccaacgctaatcccagcgatgggaacaatgcatttttctgcaaccagtgctcgatgggcttcttgacagagtcttcactaaccgaacatatacaacaggcccattgtagtgttggcagcgccaagttagagtctccagttgtgcagcccacacaaagcttcatggaggtgtatagctgcccctactgtaccaatagccctattttcggcagcatcctcaagctcaccaagcacataaaggaaaatcacaaaaatatacctctcgcccacagcaaaaagagcaaagctgagcagtcccccgtatcctccgatgtcgaagtgagctctcccaaacgccagagactgtcagcctcggccaattctatctcaaacggtgagtatccatgcaaccagtgtgacctcaaattttctaactttgagagcttccagacacaccttaaattgcatttagagttgctgctgcggaaacaggcatgcccacagtgcaaggaagacttcgactcccaggaatcactactccagcatcttacagttcactacatgactacttccacacattatgtctgtgaaagctgtgacaaacagttttcctcagtcgacgatttgcagaaacatttgctggatatgcatacctttgtcttgtatcattgtaccttgtgccaagaagtattcgactccaaagtttctatccaggttcatttggcagtgaagcatagcaacgagaagaaaatgtatagatgcaccgcttgtaactgggactttcggaaagaggcggacctgcaagtgcacgtgaaacactcacacctaggcaatccggcaaaggcacataagtgtatattttgtggtgagacattttctaccgaagtggagttacagtgccatatcacaacacattccaaaaagtataactgtaagttttgcagcaaggcatttcacgcaattattcttctggaaaagcatctccgggagaagcactgcgtgtttgacgccgctaccgagaatggaactgccaacggtgttccccctatggctactaagaaagccgagccagcagacctgcaggggatgctgctgaagaatccggaggctccaaatagtcacgaagcttctgaggatgatgtggatgccagcgagcccatgtacgggtgtgacatctgtggggctgcgtatacaatggaagttctcttgcaaaaccaccggctcagagaccacaacattcgtcccggtgaggatgacggctctcggaaaaaggccgaatttataaagggcagtcataagtgcaacgtgtgtagtagaacctttttttctgagaatgggttaagagagcacctgcaaacacacagaggtcccgctaagcactacatgtgcccaatctgtggggagcggttcccttcccttctcaccttgactgaacacaaggtgactcattcaaaaagccttgacaccggaacctgtagaatatgcaagatgccccttcaaagcgaagaagagtttatagaacattgccaaatgcatccagacctacggaattccctaaccggttttaggtgtgttgtctgcatgcaaacagtcacctctacactggagctgaagattcacgggacattccacatgcagaagctggctggcagttccgcagcctcttcaccaaacggccaggggttacaaaagctatacaagtgcgcactgtgtctcaaagagtttcgatccaagcaggatcttgtgaagctagatgtgaacgggctgccatatggcctctgtgctgggtgcatggcgcgtagcgccaacggacaggtggggggtctagcccctccagagcccgctgatcggccttgtgcaggacttaggtgccctgaatgctccgtgaaatttgagtctgcggaagatctggagtcgcatatgcaggtggaccaccgggacctgacaccagagaccagcgggccaaggaaaggaacacagactagtccagttcctcggaagaaaacctaccagtgcatcaaatgccagatgacgtttgaaaacgagcgggagatccagatacatgtcgccaatcacatgatcgaggagggtataaaccacgaatgcaagctctgcaaccagatgttcgactctcccgcaaagctgctgtgccaccttatcgagcactcctttgagggcatggggggtacttttaagtgtccagtgtgttttaccgtgtttgtgcaggccaataaactgcagcagcacatcttcgctgtgcatggtcaggaggacaagatttacgactgctcccaatgcccccagaaatttttcttccaaactgagttacaaaaccacaccatgagccagcatgcacagtag

SEQ ID NO: 184166 - DNA, 3855 bp, Artificial Sequence
  derived and/or modified sequence
atgcataagaaaagggtggaggaaggcgaggcctctgacttttctttggcttgggattcctccgttaccgccgcagggggtctggagggcgagccggaatgcgatcagaagacatctcgagccctggaggataggaacagcgtgacctcccaagaggagcggaatgaggacgatgaggatatggaagacgagtctatttatacatgcgaccattgccaacaggactttgagagcctggcagacttgaccgaccatcgcgctcatcgctgcccgggtgacggagatgatgacccccagctaagttgggtcgcttcctcccctagctctaaggatgtggccagccccacacagatgattggagatggctgcgatctgggtctgggagaggaagaaggagggaccgggctaccctacccttgccagttttgtgacaaaagttttatcagattatcctacctgaagcgacacgagcagatccactccgacaaactcccctttaagtgtacctactgcagcagactgttcaagcacaaaaggtccagagataggcacatcaagttgcacacgggggacaagaagtaccattgtcacgagtgtgaggccgcattcagcaggagcgaccacctgaaaatacaccttaaaacacactcctcctcgaagccttttaagtgcaccgtgtgcaagcggggtttttcaagcactagctccttacagtcccatatgcaagcacataagaagaacaaggaacacttggcgaagagtgagaaagaggctaagaaagacgactttatgtgcgactactgcgaggacacattttcacagacagaagagctcgagaagcacgtccttacaagacacccccaactttctgaaaaggccgatctgcagtgtattcattgccctgaggtattcgtggacgaaaacaccttgctggctcatatccaccaggcacatgcaaaccagaaacacaaatgcccgatgtgtcccgaacagttcagctcagtcgaaggcgtctactgccaccttgatagccataggcaaccggatagcagtaaccattctgtgtcccctgaccccgttcttgggtcagtcgccagcatgagttctgctacacctgactcgtctgccagcgttgaacggggatctacgccggattccactttaaagcctctcagaggccaaaaaaaaatgagagatgatggtcagggctggaccaaggtagtctactcctgcccttactgcagcaaacgggatttcaattcactggcagtgctggaaatccacctgaagaccatccatgctgataagccccagcagagccacacctgtcagatctgcctggactccatgccaacactgtataatcttaatgaacatgtgcgcaagttacacaagaatcacgcgtatcctgtgatgcagttcggcaatatttctgcattccattgtaactattgtcctgagatgttcgctgatataaactccttgcaggaacacatccgtgtctctcactgcgggcctaatgcaaacccttcagacggtaataatgcttttttctgcaaccagtgttccatgggatttctgacagaatcatcccttaccgagcatatccaacaggctcactgttcggtagggtccgccaagttagaatcgcctgtggtgcagcctacacagtcgtttatggaggtgtattcatgtccgtactgcacaaactctcccatttttgggtccatcctgaaacttacgaaacacattaaggaaaatcacaaaaatattccccttgctcactctaagaagagcaaagcagaacagtcaccagtgtcaagtgacgtcgaagtgtctagcccaaagagacaacggttaagtgcttctgctaactccatctccaatggcgaatacccttgcaatcaatgcgacctcaagttctcgaatttcgagtctttccaaacacaccttaaactgcacctcgaacttctgttgcgcaagcaggcctgccctcaatgtaaggaggactttgacagccaagagagcctcctgcagcatctgactgtgcattacatgaccaccagcacccactatgtctgtgagagttgtgataagcagttctctagcgtagacgacctgcagaagcacttgctggatatgcacaccttcgttctgtaccattgcaccctgtgtcaggaggtgttcgattccaaggttagtatccaggtgcacctcgcggtgaaacactctaacgaaaagaagatgtacaggtgcacagcatgcaattgggacttcagaaaggaagccgacctgcaagtgcacgtgaagcattcacacctggggaaccccgctaaagcccacaagtgcatattttgcggagagactttcagtactgaggtcgagctgcagtgtcacatcaccacacattcgaagaaatacaattgcaaattttgtagtaaggcattccatgccatcattctgctagaaaaacatttacgtgagaaacattgcgtgtttgatgccgctaccgaaaacggaacggcaaacggagtgccacccatggccacaaaaaaagccgaacctgccgatctgcagggcatgctcctgaagaacccagaggcaccaaactcccacgaggcatccgaggacgacgtagatgcatcagaaccaatgtacgggtgtgacatctgtggggctgcgtacacaatggaagtgctcctccagaatcatcgcctgcgggatcacaacattcggcctggggaggatgacggctccaggaagaaggccgagttcataaagggctcccacaagtgcaacgtctgcagccggacttttttctcggagaacggcctgcgcgaacacctgcaaacccatcggggtccagccaagcactacatgtgtccgatttgtggtgaaaggtttcctagtctgttgacgttgaccgaacacaaggtcacacactcaaagagccttgacacagggacctgccggatatgcaaaatgcccctccaatccgaggaggaattcatcgaacactgccagatgcatccagacttaaggaactccttgaccggcttcaggtgcgttgtttgcatgcagaccgtcacgtctactctagaactgaagattcatggaacattccacatgcagaaactggctggaagttcagcggcatccagtccaaacggccagggtctgcagaagctctacaagtgcgccttgtgcttgaaagaattcagaagtaagcaagatctggtaaagctggacgtcaatgggcttccttatggcctgtgcgctggctgcatggccaggtccgccaatgggcaggtgggagggctggcccctcctgagcctgcagatcgaccttgcgccggactgcgctgtccagagtgctctgttaagttcgagagcgcagaagacctggaatcccacatgcaggtggaccaccgggatctgactcctgaaacgtctggacctcgcaaaggcacacagacgtccccagtgcctcgcaagaaaacatatcaatgtatcaagtgccagatgacctttgagaatgagagggaaatacaaatccacgtcgccaatcacatgatcgaagagggcattaatcacgagtgcaagctctgcaaccagatgtttgacagcccagctaagctattatgtcacctgatcgaacacagttttgaaggcatgggagggacattcaagtgcccagtgtgtttcacagtcttcgtccaggccaacaaactgcagcagcacatcttcgcagtgcatggccaagaagacaagatttatgactgttctcagtgccctcaaaaattctttttccagactgagctacagaaccacacaatgagccagcacgctcagtag

SEQ ID NO: 184167 - protein, 814 aa, Artificial Sequence
  derived and/or modified sequence
MGLPALEFSDCCLDSPHFRETLKSHEAELDKTNKFIKELIKDGKSLISALKNLSSAKRKFADSLNEFKFQCIGDAETDDEMCIARSLQEFATVLRNLEDERIRMIENASEVLITPLEKFRKEQIGAAKEAKKKYDKETEKYCGILEKHLNLSSKKKESQLQEADSQVDLVRQHFYEVSLEYVFKVQEVQERKMFEFVEPLLAFLQGLFTFYHHGYELAKDFGDFKTQLTISIQNTRNRFEGTRSEVESLMKKMKENPLEHKTISPYTMEGYLYVQEKRHFGTSWVKHYCTYQRDSKQITMVPFDQKSGGKGGEDESVILKSCTRRKTDSIEKRFCFDVEAVDRPGVITMQALSEEDRRLWMEAMDGREPVYNSNKDSQSEGTAQLDSIGFSIIRKCIHAVETRGINEQGLYRIVGVNSRVQKLLSVLMDPKTASETETDICAEWEIKTITSALKTYLRMLPGPLMMYQFQRSFIKAAKLENQESRVSEIHSLVHRLPEKNRQMLQLLMNHLANVANNHKQNLMTVANLGVVFGPTLLRPQEETVAAIMDIKFQNIVIEILIENHEKIFNTVPDMPLTNAQLHLSRKKSSDSKPPSCSERPLTLFHTVQSTEKQEQRNSIINSSLESVSSNPNSILNSSSSLQPNMNSSDPDLAVVKPTRPNSLPPNPSPTSPLSPSWPMFSAPSSPMPTSSTSSDSSPVRSVAGFVWFSVAAVVLSLARSSLHAVFSLLVNFVPCHPNLHLLFDRPEEAVHEDSSTPFRKAKALYACKAEHDSELSFTAGTVFDNVHPSQEPGWLEGTLNGKTGLIPENYVEFL

SEQ ID NO: 184168 - protein, 388 aa, Artificial Sequence
  derived and/or modified sequence
  misc_feature (1)..(1): Xaa can be any naturally occurring amino acid
XAQLDSIGFSIIRKCIHAVETRGINEQGLYRIVGVNSRVQKLLSVLMDPKTASETETDICAEWEIKTITSALKTYLRMLPGPLMMYQFQRSFIKAAKLENQESRVSEIHSLVHRLPEKNRQMLQLLMNHLANVANNHKQNLMTVANLGVVFGPTLLRPQEETVAAIMDIKFQNIVIEILIENHEKIFNTVPDMPLTNAQLHLSRKKSSDSKPPSCSERPLTLFHTVQSTEKQEQRNSIINSSLESVSSNPNSILNSSSSLQPNMNSSDPDLAVVKPTRPNSLPPNPSPTSPLSPSWPMFSAPSSPMPTSSTSSDSSPVRPEEAVHEDSSTPFRKAKALYACKAEHDSELSFTAGTVFDNVHPSQEPGWLEGTLNGKTGLIPENYVEFL

SEQ ID NO: 184169 - DNA, 2445 bp, Artificial Sequence
  derived and/or modified sequence
atggggttgcctgccttggaattcagtgactgctgtctggatagcccacacttccgggagaccctgaaatcgcacgaagctgagcttgacaaaaccaacaagtttatcaaggaactcataaaagacggaaagtctcttatatctgctcttaagaacctcagctcggccaaacgcaaattcgctgactcgttgaacgaatttaagtttcagtgcattggagatgctgaaactgatgacgagatgtgcatcgctaggtcactgcaagaatttgcgacagtactcaggaacctggaagatgagcgaattagaatgattgaaaatgcctccgaggtcctgattactccactagaaaaattccggaaggagcagataggggccgccaaagaagcaaagaagaaatacgacaaggaaactgaaaaatattgtggtatcttagagaagcacttgaacctaagctctaagaaaaaggagtcacagctgcaggaggcagactcacaggtcgaccttgttcggcagcatttttacgaagttagcctggagtacgtgttcaaagtgcaggaagttcaggaacggaaaatgtttgaattcgttgaaccactactggcttttctccaggggctgttcaccttttatcaccacggctacgaattggcgaaagattttggagactttaagacccaactcaccattagcattcaaaacaccagaaaccgcttcgagggaacccgctcagaagtggagtccctgatgaagaaaatgaaagaaaacccactggagcacaaaaccatttcgccctacaccatggaaggttatctgtatgtccaggagaagcggcacttcgggacatcatgggtcaagcattattgcacttaccaaagagactccaagcagattacgatggtcccgtttgaccagaagtctggtggaaaggggggcgaagacgagtccgtgatcttgaagtcatgtacgcgtcgtaagaccgactcaatcgagaaacggttctgcttcgatgtcgaggccgttgaccgccccggcgtcataacaatgcaagccctgagcgaggaggaccgcagactgtggatggaagctatggatggccgcgaaccggtgtataattcaaataaagactctcagagcgaggggacagctcagctggacagcataggtttctccattataagaaagtgcatacacgctgtggagaccaggggcataaacgaacaagggctatataggattgtgggtgtgaactctcgagtccagaagttgttgagcgtcctgatggacccaaaaactgcctctgagaccgagactgatatctgcgctgagtgggaaattaaaactatcacatctgctttgaaaacctacttaaggatgttgcccggacctctcatgatgtatcagttccagagatcctttattaaagcagctaagctagaaaaccaagagtcaagagtgtctgagattcatagtctggttcaccgattgccagaaaaaaatcggcaaatgctgcagctcctgatgaatcacttagccaatgtcgccaacaatcataagcaaaacttgatgaccgttgccaacctgggcgtcgtattcggtccgactctgttgcggccacaggaggagacagtagcagccattatggacattaaattccaaaatatcgtgattgaaattctgattgagaatcacgagaagatattcaatacggtgccagatatgccactgacgaacgcccagctacacctttctcgtaagaaatccagtgactcgaagcctccttcctgcagcgagcggccgctgaccttgttccatacagtacagtctacggagaagcaggaacagaggaattctatcatcaactccagcctcgaaagtgtcagttccaaccctaactctatactgaattccagttctagcctgcaacctaatatgaactcaagcgaccccgacctcgccgtggtaaagcctacaagaccaaacagcctgcccccaaacccgtctcctacgtcccccctgtccccttcttggcccatgtttagcgccccttccagtccaatgcctaccagctcgacgtcatctgatagctcccccgtgcggagcgtcgcaggtttcgtatggttctccgttgccgcagtggttctaagtttggcacgatcaagcctgcatgctgtattctctctgctcgttaacttcgttccctgtcaccccaaccttcacctgctgttcgatcgacctgaggaggctgtgcatgaagactcaagcacgccctttcgcaaggccaaagcactttacgcttgcaaggcagagcatgactctgaactgtcttttaccgccggaacagtgttcgacaacgtccatccctcacaggagccaggttggctggagggcacgttgaatgggaagaccggcctgattccagaaaactatgttgagttcctgtag

SEQ ID NO: 184170 - DNA, 2445 bp, Artificial Sequence
  derived and/or modified sequence
atgggcctgcctgccctggagttcagtgactgctgcctggacagcccccacttccgggagaccctgaagagccatgaagctgagctggacaagaccaacaagttcatcaaggagctgatcaaggatggcaagagcctcatcagcgccctgaagaacctgagcagcgccaagaggaagtttgctgacagcctgaatgagttcaagttccagtgcattggagatgctgagacagatgatgagatgtgcatcgcccggagcctgcaggagtttgccaccgtgctgaggaacctggaggatgagcgcatccgcatgattgaaaatgccagcgaggtgctgatcacccccctggagaagttcaggaaggagcagatcggggccgccaaggaggccaagaagaagtatgacaaggagacagagaagtactgcggcatcctggagaagcacctgaacctgagcagcaagaagaaggagagccagctgcaggaggccgacagccaggtggacctggtgcggcagcacttctatgaggtgtccctggagtatgtgttcaaggtgcaggaggtgcaggagaggaagatgtttgaatttgtggagcccctgctggccttcctgcagggcctcttcaccttctaccaccacggctatgagctggccaaggactttggagacttcaagacccagctgaccatcagcatccagaacaccaggaacagatttgagggcaccaggtctgaggtggagagcctgatgaagaagatgaaggagaaccccctggagcacaagaccatcagcccctacaccatggagggctacctgtatgtgcaggagaagaggcacttcggcacctcctgggtgaagcactactgcacctaccagagggacagcaagcagatcaccatggtgccctttgaccagaagagcggcggcaaaggaggagaagatgagagcgtcatcctgaagagctgcaccaggaggaagacagacagcattgagaagcgcttctgctttgatgtggaggccgtggacaggcctggggtcatcaccatgcaggccctgtctgaagaagatagaaggctgtggatggaggccatggatggccgggagcctgtgtacaacagcaacaaggacagccagagcgagggcacagcccagctggacagcatcggcttcagcatcatcaggaagtgcatccatgctgtggagacccggggcatcaatgagcagggcctgtacagaattgtgggcgtgaacagccgggtgcagaagctgctgtctgtgctgatggaccccaagacagccagcgagacagaaacagacatctgtgccgagtgggagatcaagaccatcaccagcgccctgaagacctacctgaggatgctgcccggccccctgatgatgtaccagttccagaggagcttcatcaaggccgccaagctggagaaccaggagagccgggtgtctgagatccacagcctggtgcaccggctgcctgagaagaaccggcagatgctgcagctgctgatgaaccacctggccaacgtggccaacaaccacaagcagaacctgatgacagtggccaacctgggcgtggtgtttggccccaccctgctgcggccccaggaggagaccgtggccgccatcatggacatcaagttccagaacatcgtgattgagatcctgattgagaaccacgagaagatcttcaacacagtgcctgacatgcccctgaccaatgcccagctgcacctgagcaggaagaagagcagtgacagcaagccacccagctgcagcgagcggcccctgaccctcttccacacagtgcagagcacagagaagcaggagcagaggaacagcatcatcaacagcagcctggagagcgtgagcagcaaccccaacagcatcctgaacagcagcagcagcctgcagcccaacatgaacagcagtgaccctgacctggccgtggtgaagcccacccggcccaacagcctgccccccaaccccagccccaccagccccctgagccccagctggcccatgttttctgcccccagcagccccatgcccaccagcagcaccagcagtgacagcagccctgtgcgctctgtggccggctttgtgtggttctctgtggccgctgtggtgctgagcctggcccggagcagcctgcatgctgtgttcagcctgctggtgaactttgtgccctgccaccccaacctgcacctgctgtttgacaggcctgaggaggccgtgcatgaggacagcagcacccccttcaggaaggccaaggccctgtatgcctgcaaggccgagcatgattctgagctgtccttcaccgctggcaccgtgtttgacaacgtgcaccccagccaggagcccggctggctggagggcaccctgaatggcaagacaggcctcatccctgagaactacgtggagttcctgtag

SEQ ID NO: 184171 - DNA, 2445 bp, Artificial Sequence
  derived and/or modified sequence
atgggcctgcccgccctggagttcagcgactgctgcctggacagcccccacttccgagagacattgaaatcccacgaggccgaattagataagacgaataaatttattaaggaactgatcaaagacggcaagagtctgataagtgccctgaagaacctgagctctgctaagagaaagttcgctgatagtttgaacgagttcaagttccaatgcatcggagatgccgaaacagatgacgaaatgtgcatcgccagaagcctgcaggagtttgctaccgttctccgaaaccttgaggacgagcggatccgaatgattgagaacgcgtcagaggtccttattacacctttagagaaatttaggaaagaacagataggtgccgctaaggaggccaagaagaaatatgacaaagagaccgagaaatactgcggaatacttgagaaacacctgaatttaagcagcaagaagaaggaatctcagctgcaagaggcagatagccaggtggacctcgttcgacagcacttctatgaggtatccctagagtacgtcttcaaggtccaggaagtccaggagcggaagatgttcgagttcgtcgagccattactggcttttctgcagggcctgtttacattttatcatcacgggtacgagctcgcaaaagatttcggggatttcaagactcagctgaccattagtattcagaacacccggaacaggttcgagggcacacgatccgaggtcgagtcgctgatgaaaaagatgaaggagaatccccttgagcataagacaatttccccatatacgatggagggttacctatacgttcaagagaagcggcatttcggaacttcttgggtaaagcactactgcacctatcagcgtgatagtaagcagatcaccatggtgccattcgatcagaagtcaggaggcaaaggcggggaggacgaatccgtcatccttaaatcttgtactcggagaaagacggactccatcgagaaaaggttctgcttcgatgtggaggcggtggatcgaccaggggttatcaccatgcaagctctgtcagaggaggataggagactgtggatggaggcaatggatggaagagagcccgtttacaattctaacaaggatagccaatcggagggcaccgcacagctcgatagcattgggttttcaattatcagaaaatgtattcacgctgttgagacacggggtataaacgaacaaggattgtacagaatagtcggtgtgaatagcagggtgcaaaaactgctgtccgtcctgatggacccaaagactgcctccgagaccgaaaccgacatttgtgctgagtgggagattaaaacaatcacctctgcattaaaaacatatctgagaatgctgcctgggccgcttatgatgtaccaatttcagagatctttcatcaaggcggctaagctcgagaatcaagagtcccgggtaagcgagattcactctttggtgcatcgcctcccagagaaaaataggcagatgcttcagctgctgatgaaccacctggccaatgtagccaataatcacaaacagaacttaatgacagtcgcaaacttgggcgtcgtcttcggtcctactctgttgcgccctcaagaagagacagtcgccgctattatggacattaagtttcaaaacattgtgatagagattcttatcgaaaaccatgagaagatctttaacacagttccggacatgcccttgacgaacgcccagctgcacctcagccgtaagaagagtagtgattcaaagcccccatcctgttcagagcgacctttgaccttatttcataccgtgcagtccacagagaaacaggaacagaggaactctatcattaactctagccttgaaagcgtgtcttcaaaccctaacagcatcctgaatagtagtagcagcctgcaaccgaatatgaactcaagcgacccagatctggcagtggtaaagcctaccagacctaactctcttcctccaaacccctcaccaacaagcccactcagcccaagttggcccatgttctcagccccgagttctccgatgcccactagcagtacgtctagcgatagctccccagtcaggtctgttgccggctttgtttggtttagcgttgccgcagtggtcttaagcttagcccgctccagtctacacgctgtcttcagcctactggtcaacttcgttccatgccacccaaaccttcacctgctgttcgatagacctgaagaggctgtccatgaagacagctcaactccgtttcggaaagctaaggcgctgtatgcttgtaaagccgagcatgattctgaactcagcttcaccgcaggaaccgtgttcgacaacgtccatcccagccaggagcccggatggctggaaggaaccctgaacggaaaaaccgggctaattcccgagaactatgtggagtttctgtag

SEQ ID NO: 184172 - DNA, 2445 bp, Artificial Sequence
  derived and/or modified sequence
atgggcttaccggctctggagtttagtgattgttgccttgattctccccactttagagaaacccttaagagccacgaagcagaacttgacaaaaccaataagttcatcaaggagttgatcaaagatggtaaatcactcatctcagcactgaagaatctatcatccgctaaaaggaagttcgccgatagccttaacgaattcaaatttcagtgcatcggtgatgccgagaccgacgacgagatgtgtatcgcgaggtctctgcaagagtttgctacagtcctcagaaacttggaggacgagcgaatccgcatgattgagaacgcaagcgaggtgctcataaccccattggagaagtttcggaaggagcagatcggtgcggctaaggaagccaagaagaaatatgacaaagagactgagaaatactgcggtatactggaaaagcaccttaatctgagcagcaagaaaaaagaatctcagcttcaggaagcagattcacaggtggacctcgttcggcagcacttctacgaggtgagcctggagtatgtatttaaagtgcaggaagtccaggagagaaagatgtttgaattcgttgaacccctgctcgccttcttacaaggcctgttcactttctatcaccacggatatgagctggcaaaggatttcggcgacttcaagacgcagctgaccatctctattcaaaacaccaggaatcggttcgaaggcacccggtcagaggttgagtcattgatgaagaaaatgaaagaaaatccactcgagcacaaaacgatctcaccttatactatggagggatatctgtatgtgcaggaaaagagacattttggtacatcatgggtgaagcactactgtacctaccagcgggattcaaaacagatcaccatggtcccatttgaccaaaagtctggcggaaaagggggagaggatgagtcggtgattttgaaatcttgcacccgcagaaagacagacagcatcgaaaagcgtttctgttttgatgtcgaggccgtagataggcccggtgtgataacaatgcaggcattgtcagaggaagaccggcgtctttggatggaagcaatggatggtagggagcccgtctataatagcaacaaggactcccagtccgaaggtacagcccaactggactccatcggattttcaattattaggaagtgcattcatgcagtggaaacccgcggaatcaatgagcaaggcctgtaccggatcgtgggagtgaatagccgcgtgcaaaaactgttgtccgtgctgatggatcccaaaaccgcctccgaaacggagaccgacatatgtgcagaatgggagattaagaccatcacgagcgctcttaaaacttacctgaggatgcttcctggcccattgatgatgtatcagtttcaacggtctttcatcaaggcagcgaagctggaaaaccaggaaagcagggtgtcggagatacacagcctggttcatcggctccccgaaaaaaatagacagatgctacaactcctcatgaatcaccttgcgaacgttgccaataaccacaaacagaatttaatgacagtggctaatttgggcgtcgtcttcgggccaacgctgcttaggcctcaggaagagacagtggcagccattatggacatcaagtttcaaaacatcgtcatagagatactcatagagaatcatgagaagatttttaatacagtgcccgacatgcccttgaccaacgcccagctacatttatcgcgaaaaaagtcgagcgactcgaagcccccatcctgctccgaacgtccccttactctcttccacacggtgcaaagcactgagaagcaggagcagcggaacagcatcattaactcttcgctcgagagtgtgtcctcaaatcctaatagtattctcaacagctcctcctcactacaacctaacatgaattcgagcgatcctgatcttgctgtggtaaaacctacacgccctaacagtcttccacccaatcctagtccaacgtctcccctgtcaccgagctggccaatgtttagtgctccctcatcaccaatgcctacttcatccacctcaagtgatagcagtcctgtccggtcagtcgccggattcgtctggttctctgtcgctgcggtggtcttgtccctggcgagatccagtctgcacgcggtcttttccctgctggtcaactttgtgccatgccaccccaacttgcatctgctgtttgatagaccggaagaggcagtgcacgaggatagctccacaccctttagaaaggctaaggccctttatgcatgtaaagctgaacatgattctgagctaagcttcactgccggtacggtctttgacaacgtacatccctcgcaggaacccggttggctggaaggaacactaaacggcaagaccggactgatccccgagaattacgtggagtttctgtag

SEQ ID NO: 184173 - DNA, 6862 bp, Artificial Sequence
  derived and/or modified sequence
ggcggggcggccgaggctgctgtgagagggcgctcgaggctgccgagagctagctagcgaaggaggcggggaggcggcgtctgcactcgctcgcccgctcgctcgcttcccggcgccgctgcgggtccgcgctgcgtttcctgctcgcgatccgctccgttgcccgcgcccggaacagcagcacctcggccgggtccgagctcggttcgggagtcttgcgcgccggcggacaccgcgcgcggagtgagccagcgccacacctgtggagccggcggccgtcgggggagccggccggggtcccgccgcgtgagtgctctgggcggcgggcggcccgggccccggcggaggcgcgccccccggctgggcgccgcgcgcaccatggggctcccagcgctcgagttcagcgactgctgcctcgatagtccgcacttccgagagacgctcaagtcgcacgaagcagagctggacaagaccaacaaattcatcaaggagctcatcaaggacgggaagtcactcataagcgcgctcaagaatttgtcttcagcgaagcggaagtttgcagattccttaaatgaatttaaatttcagtgcataggagatgcagaaacagatgatgagatgtgtatagcaagatctttgcaggagtttgccactgtcctcaggaatcttgaagatgaacggatacggatgattgagaatgccagcgaggtgctcatcactcccttggagaagtttcgaaaggaacagatcggggctgccaaggaagccaaaaagaagtatgacaaagagacagaaaagtattgtggcatcttagaaaaacacttgaatttgtcttccaaaaagaaagaatctcagcttcaggaggcagacagccaagtggacctggtccggcagcatttctatgaagtatccctggaatatgtcttcaaggtgcaggaagtccaagagagaaagatgtttgagtttgtggagcctctgctggccttcctgcaaggactcttcactttctatcaccatggttacgaactggccaaggatttcggggacttcaagacacagttaaccattagcatacagaacacaagaaatcgctttgaaggcactagatcagaagtggaatcactgatgaaaaagatgaaggagaatccccttgagcacaagaccatcagtccctacaccatggagggatacctctacgtgcaggagaaacgtcactttggaacttcttgggtgaagcactactgtacatatcaacgggattccaaacaaatcaccatggtaccatttgaccaaaagtcaggaggaaaagggggagaagatgaatcagttatcctcaaatcctgcacacggcggaaaacagactccattgagaagaggttttgctttgatgtggaagcagtagacaggccaggggttatcaccatgcaagctttgtcggaagaggaccggaggctctggatggaagccatggatggccgggaacctgtctacaactcgaacaaagacagccagagtgaagggactgcgcagttggacagcattggcttcagcataatcaggaaatgcatccatgctgtggaaaccagagggatcaacgagcaagggctgtatcgaattgtgggtgtcaactccagagtgcagaagttgctgagtgtcctgatggaccccaagactgcttctgagacagaaacagatatctgtgctgaatgggagataaagaccatcactagtgctctgaagacctacctaagaatgcttccaggaccactcatgatgtaccagtttcaaagaagtttcatcaaagcagcaaaactggagaaccaggagtctcgggtctctgaaatccacagccttgttcatcggctcccagagaaaaatcggcagatgttacagctgctcatgaaccacttggcaaatgttgctaacaaccacaagcagaatttgatgacggtggcaaaccttggtgtggtgtttggacccactctgctgaggcctcaggaagaaacagtagcagccatcatggacatcaaatttcagaacattgtcattgagatcctaatagaaaaccacgaaaagatatttaacaccgtgcccgatatgcctctcaccaatgcccagctgcacctgtctcggaagaagagcagtgactccaagcccccgtcctgcagcgagaggcccctgacgctcttccacaccgttcagtcaacagagaaacaggaacaaaggaacagcatcatcaactccagtttggaatctgtctcatcaaatccaaacagcatccttaattccagcagcagcttacagcccaacatgaactccagtgacccagacctggctgtggtcaaacccacccggcccaactcactccccccgaatccaagcccaacttcacccctctcgccatcttggcccatgttctcggcgccatccagccctatgcccacctcatccacgtccagcgactcatcccccgtcaggtctgttgcagggtttgtttggttttctgttgctgccgttgttctctcattggctcggtcctctcttcatgcagtgttcagcctcctcgtcaactttgttccctgccatccaaacctgcacttgctttttgacaggccagaagaagcggtacatgaagactccagcacaccgttccggaaggcaaaagccttgtatgcctgcaaagctgaacatgactcagaactttcgttcacagcaggcacggtcttcgataacgttcacccatctcaggagcctggctggttggaggggactctgaacggaaagactggcctcatccctgagaattacgtggagttcctctaaccgtgggccccagcagaactgctgagctttacatggtatccatgacaactgctgattccagtgtcgaggccatttctctttgccactgagaaatgcagcgtgactgactctgttgctacctgtcaacatgaatgtttctgtgagctctggtgtcactcatctccatgatcatctcagccaacatgcatcagtactgcaagaaaagaagtcaatcagcagaggagagcatttgataactaagaggaagacttgcaaagccgttttctcatgagtaccctgaatagggggcactcattttgtttcaacggtccaaacgcccaaccttcagaaagaggaagtcagatagaaatagtccctgagagcacactgtgtagctaagcctgctggggctgggtgaagaaattggcgctgagatccaggctggatccattgcttttgtttacaataggcactctctctaccccacctctcagtacttgagacttaaagtgctacaggcagctggatctgtttgcatgcaggatgaagagggttaaaacactgtttatataagatccaatctctcaccatctctaaagcagccgttggcctgtcatcagtgagatacaatccagtcttctcatgcacgggaacacacacaccctgcgtttctccctcccaggctaggaacctctctgccaccaagggctgccatccatcgcctagtaaccacggcaacccaacctactctaaaaccaaaccaaaaaaataaaataacacatcctctttgcatgacacattttttttctcccctttttggtacactttttttgaatggttttctaacaacttgaagcacaggatcaaggaattagggtggtctacttgaggcagatgggatagtagctgggaactgttccctttctgattaatttcagcagcatcggaatatatttggagcacaccctagtaacctcttgagattaaattacatagtcttaatatttctgttcctccatgcaactgatgtttgttttttaaagggtaagatgctgcctcccaatgggtgatgccatctgactggtttccccatgtcctcccattcacccatctctgctcccacccttgcctgcctctaacccaccactggccagcccccttgccctactctgggctgctgaacactggtgctgtggtggttttcaaggttaattcctaggctaaccgtatggcctatagtttaaaagcacatctatgttcactgccactctgaaaaagggaattatttctcagtctttcaaggcttgagactaatataggccattgtgattcaggaagaaacccaaggttggagggtgggatgagtaccctctgaaaaagggaatttgctggtgaaaagaggctggatcttgtggaagactgtcttggatggggaagtactacctggagatttcaaattcacttggcctgcaaacaacagagttatccgtatcttccacatgtgaatgtcattgcaagggtgactctagacaaactacaaaccgatggaccgtcaagctccccaggagccccttggatggcagcgttgcttcagagtgtttcctgtttctggaattccttgttagggaactttaaagaagaaaagaaaaacttgaattgtgttgaattactgtatcttttacttttttttttttgaaaagataaacttgtaaatagagtgatttgaaatactatatggcaaagttttatatttgatattctttaagttagttgctcacacacttaggctttgattgctgaagaagtatgtttaagagggagagaggggaggcaaagctgaagagagtcaaggtcactgtccccgcttcggcctgaaggaaagagaagacatttctatggccttgctctctgctgtcctgttggtgggcacgacacatcagtggtgttcagtctttatgtgtttttaagcatcccttgggctttggatttggagatgggaagagcatctccaggcaatgagtttttcaaagaatgcctacttagtagtaagatgaagctcaggatttaaataagtggggtcaggcattcgagtttttgtctttcttctcaggtgtatttcttggtacccccaagatatcaggccagaaagagatgagtcagttgctgtgctctttacttctttttctccacatcttctgaggctttagaaatgtggacaagctagttttcaaattttgtgtgcgtctgtaagttcttaaagaaccagcttcttagaatgttcagttctcaatgtgctgctgctttcccttctcctaaacattttaaaactcttccctttcacctccaattcccgtgatcccaaaagaagaggaagactccaggaggggtatagattgtgccgtcatagctttacaggtggttttaaagttaacaggggtttgtcatggtgattcactactcagtttatcagctcaaggattatacagctcttttccgggaactcacccaggagcaagcgagacactaccattgaatcagggaatgagaattaagaatggacaggaccaagacagaactcaagaaagccactggggaaaactcgagaagaaagggagtatactagtaggttagatctgtgaacctgaggacaagaagaccttgggaaatggaggcctcaggggatgtgcattcacatactattacgcttctcaaagagagaccaacatcatgcttttaacacatttgatgaggttttttatttgtgtttttgtttgttttttgagatggagtctcactctgtggcccaggctggagtgcagtggcgcaatcttggctcactgcaacctccacctcccaggttcaagtgattctcctgtctcagcctcccaagtagctgggactacaggcatgagccatcacacccagctagttttttgtatttttagtaaagatggggttttgccatgtttgccaggctgatctcgaactcctgacctcaagtgatctgcccacttcagacccccaaagtgctgggattccaggtgtgagccgctgcggccgaccacatttgatgtttgaagttgtaatctgtcccatcataaacttacctggagctcatgtggaggaacagaaggccaagatccttgctttgggggtgcctcacgaagcatccctgtagacatttggccccagcttcactgcttggaagcatgtccctccctcttgagttggctctgatttgaaatcgggagaaacagagctgctgccaatgggatcttttaggtaactccctccctagcttccgtgtgtctgtgcagtgcccatgagctgctgccaatgggatctttcaggtaccccctccccagcttccctgtggctgtgcggtgcccttgacagatggcttctctgtttccctttgcccagccaggctcccctccttcctattagctacaaaactggataaacttcagaatatgagccaatgagtaggaaggaacttgaagactaaagattttactctctcccctatccatgccccctacctctgactctctctgtgtgaacaggaaactttagggcagatgaggagaatgaattggttatcagagtggaagaccatggcccaggatccctgagctttcccagtagcctccagtttcctttgtaagacccagggatcacttagccatagcctgaatcttttaggggtattaaggtcagcctctcactcttccttcaggttactaacaaaatttcgtagctaaagaatgccatggccgggtgcagtggctcacgcctataatcccagcactttgggaggccgaggcgggcggatcacgaggtcaggagattgagaccatcctggctacgacggtgaaaccccgtctctactaaaaatacaaaaaattagccgggtgtggtggcgggcgcctgtagtcccagctactctggaggctgaggcaggagaatggcatgaacccaggaggcagagattgcagtgagccaagatcacgcccctgcactccagcctgggtgacagagccagactccgtctcaaagg

SEQ ID NO: 184174 - DNA, 2445 bp, Artificial Sequence
  derived and/or modified sequence
atgggcctgcccgccctggagttcagcgactgctgcctggacagcccccacttcagagagaccctgaagagccacgaggccgagctggacaagaccaacaagttcatcaaggagctgatcaaggacggcaagagcctgatcagcgccctgaagaacctgagcagcgccaagagaaagttcgccgacagcctgaacgagttcaagttccagtgcatcggcgacgccgagaccgacgacgagatgtgcatcgccagaagcctgcaggagttcgccaccgtgctgagaaacctggaggacgagagaatcagaatgatcgagaacgccagcgaggtgctgatcacccccctggagaagttcagaaaggagcagatcggcgccgccaaggaggccaagaagaagtacgacaaggagaccgagaagtactgcggcatcctggagaagcacctgaacctgagcagcaagaagaaggagagccagctgcaggaggccgacagccaggtggacctggtgagacagcacttctacgaggtgagcctggagtacgtgttcaaggtgcaggaggtgcaggagagaaagatgttcgagttcgtggagcccctgctggccttcctgcagggcctgttcaccttctaccaccacggctacgagctggccaaggacttcggcgacttcaagacccagctgaccatcagcatccagaacaccagaaacagattcgagggcaccagaagcgaggtggagagcctgatgaagaagatgaaggagaaccccctggagcacaagaccatcagcccctacaccatggagggctacctgtacgtgcaggagaagagacacttcggcaccagctgggtgaagcactactgcacctaccagagagacagcaagcagatcaccatggtgcccttcgaccagaagagcggcggcaagggcggcgaggacgagagcgtgatcctgaagagctgcaccagaagaaagaccgacagcatcgagaagagattctgcttcgacgtggaggccgtggacagacccggcgtgatcaccatgcaggccctgagcgaggaggacagaagactgtggatggaggccatggacggcagagagcccgtgtacaacagcaacaaggacagccagagcgagggcaccgcccagctggacagcatcggcttcagcatcatcagaaagtgcatccacgccgtggagaccagaggcatcaacgagcagggcctgtacagaatcgtgggcgtgaacagcagagtgcagaagctgctgagcgtgctgatggaccccaagaccgccagcgagaccgagaccgacatctgcgccgagtgggagatcaagaccatcaccagcgccctgaagacctacctgagaatgctgcccggccccctgatgatgtaccagttccagagaagcttcatcaaggccgccaagctggagaaccaggagagcagagtgagcgagatccacagcctggtgcacagactgcccgagaagaacagacagatgctgcagctgctgatgaaccacctggccaacgtggccaacaaccacaagcagaacctgatgaccgtggccaacctgggcgtggtgttcggccccaccctgctgagaccccaggaggagaccgtggccgccatcatggacatcaagttccagaacatcgtgatcgagatcctgatcgagaaccacgagaagatcttcaacaccgtgcccgacatgcccctgaccaacgcccagctgcacctgagcagaaagaagagcagcgacagcaagccccccagctgcagcgagagacccctgaccctgttccacaccgtgcagagcaccgagaagcaggagcagagaaacagcatcatcaacagcagcctggagagcgtgagcagcaaccccaacagcatcctgaacagcagcagcagcctgcagcccaacatgaacagcagcgaccccgacctggccgtggtgaagcccaccagacccaacagcctgccccccaaccccagccccaccagccccctgagccccagctggcccatgttcagcgcccccagcagccccatgcccaccagcagcaccagcagcgacagcagccccgtgagaagcgtggccggcttcgtgtggttcagcgtggccgccgtggtgctgagcctggccagaagcagcctgcacgccgtgttcagcctgctggtgaacttcgtgccctgccaccccaacctgcacctgctgttcgacagacccgaggaggccgtgcacgaggacagcagcacccccttcagaaaggccaaggccctgtacgcctgcaaggccgagcacgacagcgagctgagcttcaccgccggcaccgtgttcgacaacgtgcaccccagccaggagcccggctggctggagggcaccctgaacggcaagaccggcctgatccccgagaactacgtggagttcctgtag

SEQ ID NO: 184175 - protein, 355 aa, Artificial Sequence
  derived and/or modified sequence
MPHQPTILLNTVSASASPCLHPGAQNIPSPTGLPRCRSGSHTIGPFSSFQSAAHIYSQKLSRPSSAKAAGSCYLNKHHSGIAKTQKEGEDASLYSKRYNQSMVTAELQRLAEKQAARQYSPSSHINLLTQQVTNLNLATGIINRSSASAPPTLRPIISPSGPTWSTQSDPQAPENHSSSPGSRSLQTGGFAWEGEVENNVYSQATGVVPQHKYHPTAGSYQLQFALQQLEQQKLQSRQLLDQSRARHQAIFGSQTLPNSNLWTMNNGAGCRISSATASGQKPTTLPQKVVPPPSSCASLVPKPPPNHEQVLRRATSQKASKGSSAEGQLNGLQSSLNPAAFVPITSSTVNSHTAL

SEQ ID NO: 184176 - protein, 1281 aa, Artificial Sequence
  derived and/or modified sequence
MPIVMARDLEETASSSEDEEVISQEDHPCIMWTGGCRRIPVLVFHADAILTKDNNIRVIGERYHLSYKIVRTDSRLVRSILTAHGFHEVHPSSTDYNLMWTGSHLKPFLLRTLSEAQKVNHFPRSYELTRKDRLYKNIIRMQHTHGFKAFHILPQTFLLPAEYAEFCNSYSKDRGPWIVKPVASSRGRGVYLINNPNQISLEENILVSRYINNPLLIDDFKFDVRLYVLVTSYDPLVIYLYEEGLARFATVRYDQGAKNIRNQFMHLTNYSVNKKSGDYVSCDDPEVEDYGNKWSMSAMLRYLKQEGRDTTALMAHVEDLIIKTIISAELAIATACKTFVPHRSSCFELYGFDVLIDSTLKPWLLEVNLSPSLACDAPLDLKIKASMISDMFTVVGFVCQDPAQRASTRPIYPTFESSRRNPFQKPQRCRPLSASDAEMKNLVGSAREKGPGKLGGSVLGLSMEEIKVLRRVKEENDRRGGFIRIFPTSETWEIYGSYLEHKTSMNYMLATRLFQDRMTADGAPELKIESLNSKAKLHAALYERKLLSLEVRKRRRRSSRLRAMRPKYPVITQPAEMNVKTETESEEEEEVALDNEDEEQEASQEESAGFLRENQAKYTPSLTALVENTPKENSMKVREWNNKGGHCCKLETQELEPKFNLMQILQDNGNLSKMQARIAFSAYLQHVQIRLMKDSGGQTFSASWAAKEDEQMELVVRFLKRASNNLQHSLRMVLPSRRLALLERRRILAHQLGDFIIVYNKETEQMAEKKSKKKVEEEEEDGVNMENFQEFIRQASEAELEEVLTFYTQKNKSASVFLGTHSKISKNNNNYSDSGAKGDHPETIMEEVKIKPPKQQQTTEIHSDKLSRFTTSAEKEAKLVYSNSSSGPTATLQKIPNTHLSSVTTSDLSPGPCHHSSLSQIPSAIPSMPHQPTILLNTVSASASPCLHPGAQNIPSPTGLPRCRSGSHTIGPFSSFQSAAHIYSQKLSRPSSAKAGSCYLNKHHSGIAKTQKEGEDASLYSKRYNQSMVTAELQRLAEKQAARQYSPSSHINLLTQQVTNLNLATGIINRSSASAPPTLRPIISPSGPTWSTQSDPQAPENHSSSPGSRSLQTGGFAWEGEVENNVYSQATGVVPQHKYHPTAGSYQLQFALQQLEQQKLQSRQLLDQSRARHQAIFGSQTLPNSNLWTMNNGAGCRISSATASGQKPTTLPQKVVPPPSSCASLVPKPPPNHEQVLRRATSQKASKGSSAEGQLNGLQSSLNPAAFVPITSSTDPAHTKI

SEQ ID NO: 184177 - protein, 817 aa, Artificial Sequence
  derived and/or modified sequence
MKEIKVLRRVKEENDRRGGFIRIFPTSETWEIYGSYLEHKTSMNYMLATRLFQDRGNPRRSLLTGRTRMTADGAPELKIESLNSKAKLHAALYERKLLSLEVRKRRRRSSRLRAMRPKYPVITQPAEMNVKTETESEEEEEVALDNEDEEQEASQEESAGFLRENQAKYTPSLTALVENTPKENSMKVREWNNKGGHCCKLETQELEPKFNLMQILQDNGNLSKMQARIAFSAYLQHVQIRLMKDSGGQTFSASWAAKEDEQMELVVRFLKRASNNLQHSLRMVLPSRRLALLERRRILAHQLGDFIIVYNKETEQMAEKKSKKKVEEEEEDGVNMENFQEFIRQASEAELEEVLTFYTQKNKSASVFLGTHSKISKNNNNYSDSGAKGDHPETIMEEVKIKPPKQQQTTEIHSDKLSRFTTSAEKEAKLVYSNSSSGPTATLQKIPNTHLSSVTTSDLSPGPCHHSSLSQIPSAIPSMPHQPTILLNTVSASASPCLHPGAQNIPSPTGLPRCRSGSHTIGPFSSFQSAAHIYSQKLSRPSSAKAGSCYLNKHHSGIAKTQKEGEDASLYSKRYNQSMVTAELQRLAEKQAARQYSPSSHINLLTQQVTNLNLATGIINRSSASAPPTLRPIISPSGPTWSTQSDPQAPENHSSSPGSRSLQTGGFAWEGEVENNVYSQATGVVPQHKYHPTAGSYQLQFALQQLEQQKLQSRQLLDQSRARHQAIFGSQTLPNSNLWTMNNGAGCRISSATASGQKPTTLPQKVVPPPSSCASLVPKPPPNHEQVLRRATSQKASNTRFRSSFQNYLWYFFQAVS

SEQ ID NO: 184178 - protein, 778 aa, Artificial Sequence
  derived and/or modified sequence
MAHVEDLIIKTIISAELAIATACKTFVPHRSSCFELYGFDVLIDSTLKPWLLEVNLSPSLACDAPLDLKIKASMISDMFTVVGFVCQDPAQRASTRPIYPTFESSRRNPFQKPQRCRPLSASDAEMKNLVGSAREKGPGKLGGSVLGLSMEEIKVLRRVKEENDRRGGFIRIFPTSETWEIYGSYLEHKTSMNYMLATRLFQDRMTADGAPELKIESLNSKAKLHAALYERKLLSLEVRKRRRRSSRLRAMRPKYPVITQPAEMNVKTETESEEEEEVALDNEDEEQEASQEESAGFLRENQAKYTPSLTALVENTPKENSMKVREWNNKGGHCCKLETQELEPKFNLMQILQDNGNLSKMQARIAFSAYLQHVQIRLMKDSGGQTFSASWAAKEDEQMELVVRFLKRASNNLQHSLRMVLPSRRLALLERRRILAHQLGDFIIVYNKETEQMAEKKSKKKVEEEEEDGVNMENFQEFIRQASEAELEEVLTFYTQKNKSASVFLGTHSKISKNNNNYSDSGAKGDHPETIMEEVKIKPPKQQQTTEIHSDKLSRFTTSAEKEAKLVYSNSSSGPTATLQKIPNTHLSSVTTSDLSPGPCHHSSLSQIPSAIPSMPHQPTILLNTVSASASPCLHPGAQNIPSPTGLPRCRSGSHTIGPFSSFQSAAHIYSQKLSRPSSAKAGSCYLNKHHSGIAKTQKEGEDASLYSKRYNQSMVTAELQRLAEKQAARQYSPSSHTDPWKYDRSIRMCSPLNILEPEFKKYLMGIYSPHSSKKKKK

SEQ ID NO: 184179 - DNA, 1068 bp, Artificial Sequence
  derived and/or modified sequence
atgccccaccagcccaccatcctgctgaacaccgtgagcgccagcgccagcccctgcctgcaccccggcgcccagaacatccccagccccaccggcctgcccagatgcagaagcggcagccacaccatcggccccttcagcagcttccagagcgccgcccacatctacagccagaagctgagcagacccagcagcgccaaggccgccggcagctgctacctgaacaagcaccacagcggcatcgccaagacccagaaggagggcgaggacgccagcctgtacagcaagagatacaaccagagcatggtgaccgccgagctgcagagactggccgagaagcaggccgccagacagtacagccccagcagccacatcaacctgctgacccagcaggtgaccaacctgaacctggccaccggcatcatcaacagaagcagcgccagcgccccccccaccctgagacccatcatcagccccagcggccccacctggagcacccagagcgacccccaggcccccgagaaccacagcagcagccccggcagcagaagcctgcagaccggcggcttcgcctgggagggcgaggtggagaacaacgtgtacagccaggccaccggcgtggtgccccagcacaagtaccaccccaccgccggcagctaccagctgcagttcgccctgcagcagctggagcagcagaagctgcagagcagacagctgctggaccagagcagagccagacaccaggccatcttcggcagccagaccctgcccaacagcaacctgtggaccatgaacaacggcgccggctgcagaatcagcagcgccaccgccagcggccagaagcccaccaccctgccccagaaggtggtgcccccccccagcagctgcgccagcctggtgcccaagcccccccccaaccacgagcaggtgctgagaagagccaccagccagaaggccagcaagggcagcagcgccgagggccagctgaacggcctgcagagcagcctgaaccccgccgccttcgtgcccatcaccagcagcaccgtgaacagccacaccgccctgtag

SEQ ID NO: 184180 - DNA, 3846 bp, Artificial Sequence
  derived and/or modified sequence
atgcccatcgtgatggccagagacctggaggagaccgccagcagcagcgaggacgaggaggtgatcagccaggaggaccacccctgcatcatgtggaccggcggctgcagaagaatccccgtgctggtgttccacgccgacgccatcctgaccaaggacaacaacatcagagtgatcggcgagagataccacctgagctacaagatcgtgagaaccgacagcagactggtgagaagcatcctgaccgcccacggcttccacgaggtgcaccccagcagcaccgactacaacctgatgtggaccggcagccacctgaagcccttcctgctgagaaccctgagcgaggcccagaaggtgaaccacttccccagaagctacgagctgaccagaaaggacagactgtacaagaacatcatcagaatgcagcacacccacggcttcaaggccttccacatcctgccccagaccttcctgctgcccgccgagtacgccgagttctgcaacagctacagcaaggacagaggcccctggatcgtgaagcccgtggccagcagcagaggcagaggcgtgtacctgatcaacaaccccaaccagatcagcctggaggagaacatcctggtgagcagatacatcaacaaccccctgctgatcgacgacttcaagttcgacgtgagactgtacgtgctggtgaccagctacgaccccctggtgatctacctgtacgaggagggcctggccagattcgccaccgtgagatacgaccagggcgccaagaacatcagaaaccagttcatgcacctgaccaactacagcgtgaacaagaagagcggcgactacgtgagctgcgacgaccccgaggtggaggactacggcaacaagtggagcatgagcgccatgctgagatacctgaagcaggagggcagagacaccaccgccctgatggcccacgtggaggacctgatcatcaagaccatcatcagcgccgagctggccatcgccaccgcctgcaagaccttcgtgccccacagaagcagctgcttcgagctgtacggcttcgacgtgctgatcgacagcaccctgaagccctggctgctggaggtgaacctgagccccagcctggcctgcgacgcccccctggacctgaagatcaaggccagcatgatcagcgacatgttcaccgtggtgggcttcgtgtgccaggaccccgcccagagagccagcaccagacccatctaccccaccttcgagagcagcagaagaaaccccttccagaagccccagagatgcagacccctgagcgccagcgacgccgagatgaagaacctggtgggcagcgccagagagaagggccccggcaagctgggcggcagcgtgctgggcctgagcatggaggagatcaaggtgctgagaagagtgaaggaggagaacgacagaagaggcggcttcatcagaatcttccccaccagcgagacctgggagatctacggcagctacctggagcacaagaccagcatgaactacatgctggccaccagactgttccaggacagaatgaccgccgacggcgcccccgagctgaagatcgagagcctgaacagcaaggccaagctgcacgccgccctgtacgagagaaagctgctgagcctggaggtgagaaagagaagaagaagaagcagcagactgagagccatgagacccaagtaccccgtgatcacccagcccgccgagatgaacgtgaagaccgagaccgagagcgaggaggaggaggaggtggccctggacaacgaggacgaggagcaggaggccagccaggaggagagcgccggcttcctgagagagaaccaggccaagtacacccccagcctgaccgccctggtggagaacacccccaaggagaacagcatgaaggtgagagagtggaacaacaagggcggccactgctgcaagctggagacccaggagctggagcccaagttcaacctgatgcagatcctgcaggacaacggcaacctgagcaagatgcaggccagaatcgccttcagcgcctacctgcagcacgtgcagatcagactgatgaaggacagcggcggccagaccttcagcgccagctgggccgccaaggaggacgagcagatggagctggtggtgagattcctgaagagagccagcaacaacctgcagcacagcctgagaatggtgctgcccagcagaagactggccctgctggagagaagaagaatcctggcccaccagctgggcgacttcatcatcgtgtacaacaaggagaccgagcagatggccgagaagaagagcaagaagaaggtggaggaggaggaggaggacggcgtgaacatggagaacttccaggagttcatcagacaggccagcgaggccgagctggaggaggtgctgaccttctacacccagaagaacaagagcgccagcgtgttcctgggcacccacagcaagatcagcaagaacaacaacaactacagcgacagcggcgccaagggcgaccaccccgagaccatcatggaggaggtgaagatcaagccccccaagcagcagcagaccaccgagatccacagcgacaagctgagcagattcaccaccagcgccgagaaggaggccaagctggtgtacagcaacagcagcagcggccccaccgccaccctgcagaagatccccaacacccacctgagcagcgtgaccaccagcgacctgagccccggcccctgccaccacagcagcctgagccagatccccagcgccatccccagcatgccccaccagcccaccatcctgctgaacaccgtgagcgccagcgccagcccctgcctgcaccccggcgcccagaacatccccagccccaccggcctgcccagatgcagaagcggcagccacaccatcggccccttcagcagcttccagagcgccgcccacatctacagccagaagctgagcagacccagcagcgccaaggccggcagctgctacctgaacaagcaccacagcggcatcgccaagacccagaaggagggcgaggacgccagcctgtacagcaagagatacaaccagagcatggtgaccgccgagctgcagagactggccgagaagcaggccgccagacagtacagccccagcagccacatcaacctgctgacccagcaggtgaccaacctgaacctggccaccggcatcatcaacagaagcagcgccagcgccccccccaccctgagacccatcatcagccccagcggccccacctggagcacccagagcgacccccaggcccccgagaaccacagcagcagccccggcagcagaagcctgcagaccggcggcttcgcctgggagggcgaggtggagaacaacgtgtacagccaggccaccggcgtggtgccccagcacaagtaccaccccaccgccggcagctaccagctgcagttcgccctgcagcagctggagcagcagaagctgcagagcagacagctgctggaccagagcagagccagacaccaggccatcttcggcagccagaccctgcccaacagcaacctgtggaccatgaacaacggcgccggctgcagaatcagcagcgccaccgccagcggccagaagcccaccaccctgccccagaaggtggtgcccccccccagcagctgcgccagcctggtgcccaagcccccccccaaccacgagcaggtgctgagaagagccaccagccagaaggccagcaagggcagcagcgccgagggccagctgaacggcctgcagagcagcctgaaccccgccgccttcgtgcccatcaccagcagcaccgaccccgcccacaccaagatctag

SEQ ID NO: 184181 - DNA, 2454 bp, Artificial Sequence
  derived and/or modified sequence
atgaaggagatcaaggtgctgagaagagtgaaggaggagaacgacagaagaggcggcttcatcagaatcttccccaccagcgagacctgggagatctacggcagctacctggagcacaagaccagcatgaactacatgctggccaccagactgttccaggacagaggcaaccccagaagaagcctgctgaccggcagaaccagaatgaccgccgacggcgcccccgagctgaagatcgagagcctgaacagcaaggccaagctgcacgccgccctgtacgagagaaagctgctgagcctggaggtgagaaagagaagaagaagaagcagcagactgagagccatgagacccaagtaccccgtgatcacccagcccgccgagatgaacgtgaagaccgagaccgagagcgaggaggaggaggaggtggccctggacaacgaggacgaggagcaggaggccagccaggaggagagcgccggcttcctgagagagaaccaggccaagtacacccccagcctgaccgccctggtggagaacacccccaaggagaacagcatgaaggtgagagagtggaacaacaagggcggccactgctgcaagctggagacccaggagctggagcccaagttcaacctgatgcagatcctgcaggacaacggcaacctgagcaagatgcaggccagaatcgccttcagcgcctacctgcagcacgtgcagatcagactgatgaaggacagcggcggccagaccttcagcgccagctgggccgccaaggaggacgagcagatggagctggtggtgagattcctgaagagagccagcaacaacctgcagcacagcctgagaatggtgctgcccagcagaagactggccctgctggagagaagaagaatcctggcccaccagctgggcgacttcatcatcgtgtacaacaaggagaccgagcagatggccgagaagaagagcaagaagaaggtggaggaggaggaggaggacggcgtgaacatggagaacttccaggagttcatcagacaggccagcgaggccgagctggaggaggtgctgaccttctacacccagaagaacaagagcgccagcgtgttcctgggcacccacagcaagatcagcaagaacaacaacaactacagcgacagcggcgccaagggcgaccaccccgagaccatcatggaggaggtgaagatcaagccccccaagcagcagcagaccaccgagatccacagcgacaagctgagcagattcaccaccagcgccgagaaggaggccaagctggtgtacagcaacagcagcagcggccccaccgccaccctgcagaagatccccaacacccacctgagcagcgtgaccaccagcgacctgagccccggcccctgccaccacagcagcctgagccagatccccagcgccatccccagcatgccccaccagcccaccatcctgctgaacaccgtgagcgccagcgccagcccctgcctgcaccccggcgcccagaacatccccagccccaccggcctgcccagatgcagaagcggcagccacaccatcggccccttcagcagcttccagagcgccgcccacatctacagccagaagctgagcagacccagcagcgccaaggccggcagctgctacctgaacaagcaccacagcggcatcgccaagacccagaaggagggcgaggacgccagcctgtacagcaagagatacaaccagagcatggtgaccgccgagctgcagagactggccgagaagcaggccgccagacagtacagccccagcagccacatcaacctgctgacccagcaggtgaccaacctgaacctggccaccggcatcatcaacagaagcagcgccagcgccccccccaccctgagacccatcatcagccccagcggccccacctggagcacccagagcgacccccaggcccccgagaaccacagcagcagccccggcagcagaagcctgcagaccggcggcttcgcctgggagggcgaggtggagaacaacgtgtacagccaggccaccggcgtggtgccccagcacaagtaccaccccaccgccggcagctaccagctgcagttcgccctgcagcagctggagcagcagaagctgcagagcagacagctgctggaccagagcagagccagacaccaggccatcttcggcagccagaccctgcccaacagcaacctgtggaccatgaacaacggcgccggctgcagaatcagcagcgccaccgccagcggccagaagcccaccaccctgccccagaaggtggtgcccccccccagcagctgcgccagcctggtgcccaagcccccccccaaccacgagcaggtgctgagaagagccaccagccagaaggccagcaacaccagattcagaagcagcttccagaactacctgtggtacttcttccaggccgtgagctag

SEQ ID NO: 184182 - DNA, 2337 bp, Artificial Sequence
  derived and/or modified sequence
atggcccacgtggaggacctgatcatcaagaccatcatcagcgccgagctggccatcgccaccgcctgcaagaccttcgtgccccacagaagcagctgcttcgagctgtacggcttcgacgtgctgatcgacagcaccctgaagccctggctgctggaggtgaacctgagccccagcctggcctgcgacgcccccctggacctgaagatcaaggccagcatgatcagcgacatgttcaccgtggtgggcttcgtgtgccaggaccccgcccagagagccagcaccagacccatctaccccaccttcgagagcagcagaagaaaccccttccagaagccccagagatgcagacccctgagcgccagcgacgccgagatgaagaacctggtgggcagcgccagagagaagggccccggcaagctgggcggcagcgtgctgggcctgagcatggaggagatcaaggtgctgagaagagtgaaggaggagaacgacagaagaggcggcttcatcagaatcttccccaccagcgagacctgggagatctacggcagctacctggagcacaagaccagcatgaactacatgctggccaccagactgttccaggacagaatgaccgccgacggcgcccccgagctgaagatcgagagcctgaacagcaaggccaagctgcacgccgccctgtacgagagaaagctgctgagcctggaggtgagaaagagaagaagaagaagcagcagactgagagccatgagacccaagtaccccgtgatcacccagcccgccgagatgaacgtgaagaccgagaccgagagcgaggaggaggaggaggtggccctggacaacgaggacgaggagcaggaggccagccaggaggagagcgccggcttcctgagagagaaccaggccaagtacacccccagcctgaccgccctggtggagaacacccccaaggagaacagcatgaaggtgagagagtggaacaacaagggcggccactgctgcaagctggagacccaggagctggagcccaagttcaacctgatgcagatcctgcaggacaacggcaacctgagcaagatgcaggccagaatcgccttcagcgcctacctgcagcacgtgcagatcagactgatgaaggacagcggcggccagaccttcagcgccagctgggccgccaaggaggacgagcagatggagctggtggtgagattcctgaagagagccagcaacaacctgcagcacagcctgagaatggtgctgcccagcagaagactggccctgctggagagaagaagaatcctggcccaccagctgggcgacttcatcatcgtgtacaacaaggagaccgagcagatggccgagaagaagagcaagaagaaggtggaggaggaggaggaggacggcgtgaacatggagaacttccaggagttcatcagacaggccagcgaggccgagctggaggaggtgctgaccttctacacccagaagaacaagagcgccagcgtgttcctgggcacccacagcaagatcagcaagaacaacaacaactacagcgacagcggcgccaagggcgaccaccccgagaccatcatggaggaggtgaagatcaagccccccaagcagcagcagaccaccgagatccacagcgacaagctgagcagattcaccaccagcgccgagaaggaggccaagctggtgtacagcaacagcagcagcggccccaccgccaccctgcagaagatccccaacacccacctgagcagcgtgaccaccagcgacctgagccccggcccctgccaccacagcagcctgagccagatccccagcgccatccccagcatgccccaccagcccaccatcctgctgaacaccgtgagcgccagcgccagcccctgcctgcaccccggcgcccagaacatccccagccccaccggcctgcccagatgcagaagcggcagccacaccatcggccccttcagcagcttccagagcgccgcccacatctacagccagaagctgagcagacccagcagcgccaaggccggcagctgctacctgaacaagcaccacagcggcatcgccaagacccagaaggagggcgaggacgccagcctgtacagcaagagatacaaccagagcatggtgaccgccgagctgcagagactggccgagaagcaggccgccagacagtacagccccagcagccacaccgacccctggaagtacgacagaagcatcagaatgtgcagccccctgaacatcctggagcccgagttcaagaagtacctgatgggcatctacagcccccacagcagcaagaagaagaagaagtag

SEQ ID NO: 184183 - DNA, 1068 bp, Artificial Sequence
  derived and/or modified sequence
atgcctcaccagcccaccatcctcctgaacacagtgagtgcatcagcatccccctgtttacatccaggtgctcaaaatattccttccccaaccgggctccctaggtgccgttctggttcccacacaatcggaccgttctcgtctttccagtcagctgcccacatctatagtcaaaaactcagtcggccaagctcggcaaaggctgccggtagctgttatcttaataaacaccattccggcattgccaagactcaaaaagaaggggaagacgctagtctgtatagcaaaaggtacaaccagagcatggtcaccgccgagctgcagcgccttgctgagaagcaggccgcgaggcagtattcaccaagtagccatatcaatctcctcactcagcaggttaccaatcttaacctggctacagggattattaatcgcagctctgcaagcgctccccctaccttgagaccgattatctctcccagcggccccacgtggtcaacacagtctgaccctcaggctccagaaaaccatagctccagccccggctctagatcacttcaaacaggcgggtttgcgtgggaaggcgaggtggaaaataatgtgtattcacaagctacaggtgtggtgcctcagcacaaatatcacccgaccgcgggatcttaccagctgcagtttgccctgcaacagctggaacagcagaagctacaatccagacaactactcgaccagtccagggcacggcaccaggctatttttggctcccagactctgccaaattcaaatctctggaccatgaataatggagctggctgcaggatctcatctgctaccgctagcggtcaaaagccaactacgctgccccagaaggttgttccgcccccaagttcatgcgcttccttagtgcccaagccgcctcctaaccacgagcaagttctgcgcagagctacatcacagaaggcctctaaaggcagttcagccgaaggccagctcaacgggcttcagagctctctgaatccagctgccttcgtgcctataacgtcctccacagtaaacagtcacacagcactgtag

SEQ ID NO: 184184 - DNA, 3846 bp, Artificial Sequence
  derived and/or modified sequence
atgcctatagtcatggccagggatttagaggagactgccagcagttccgaggacgaagaggtgataagccaggaggatcatccttgcatcatgtggaccgggggatgtagacgtattccagtgctagtctttcacgccgacgcaatactcacgaaagataataacattagggtaatcggtgaaaggtaccatttgtcgtacaagattgtccgtacagattccaggctggtgaggtccatcctgaccgcccatgggtttcatgaagtgcacccctcaagcactgactacaacttaatgtggaccgggagtcatttgaagccctttctcctgcggaccctgagtgaagcccagaaggtgaatcactttccaaggagctacgaactcacacggaaggacaggctgtacaaaaatatcattcgaatgcagcacacacacggtttcaaagcttttcacattcttccacaaacatttctccttccagctgagtatgctgagttctgtaattcttacagtaaagaccgcgggccctggatagtgaaaccggtcgcctcgtcgaggggtcgcggcgtgtaccttataaacaacccgaaccagatcagcctggaggagaacattctcgtctcccgttacataaataacccactgttgatcgacgacttcaagttcgacgttcgactttatgtcctggtgacatcttacgaccccctcgtgatttacctatacgaggagggcttagccagattcgctacagttagatacgatcagggcgctaaaaacattcgaaaccagtttatgcacctaaccaactactcagtcaataaaaagagcggtgactatgtgtcctgcgatgacccagaagtggaagactatggcaataagtggtccatgagcgccatgctccgctaccttaagcaggagggccgggacaccactgccctcatggcacatgtggaggatttgattattaaaactataatatctgccgagcttgccatcgccactgcttgtaagacatttgtgccacatcgatcaagttgctttgaactctacggtttcgacgtcctaatagacagcactctcaagccatggctgcttgaggtcaatctgagccctagtttggcctgcgatgctcctttggatctgaaaatcaaagccagtatgatctccgatatgttcacagttgtggggtttgtctgtcaggatccagctcagagggcgtccacccgcccaatctacccaacctttgagtcgagccggcgcaatccctttcagaaaccccagcgctgccgtccattgagcgcctcagatgcagaaatgaagaacttagttggcagtgctagagagaaggggcccgggaagctgggagggtcagtcctgggattaagcatggaagagattaaagtactccggcgggtaaaagaggagaatgatcgcaggggaggtttcatccggattttccctacaagtgagacgtgggagatctatggttcctatctggaacataagacttccatgaattacatgttggccacacgtctcttccaggacagaatgacagctgacggcgctcctgagcttaagattgaaagtcttaattctaaggccaagctgcatgctgccctgtacgaacggaagctgctgtcccttgaagtgcggaaaaggaggcgacggtctagcagactgagggccatgaggccgaaatatccagtgataactcagccggccgagatgaatgtgaagactgaaaccgaatctgaggaggaagaggaagtcgcactggataacgaagatgaagagcaggaggcctcacaggaagaatcagccgggttcctcagggagaatcaggcaaagtatacccctagcctcacagctctcgtagaaaacaccccaaaagaaaatagcatgaaggtgagagaatggaacaacaagggggggcactgctgcaaacttgagactcaagagttggaaccaaagtttaatctgatgcaaatattacaagataatggcaacctaagcaaaatgcaagctcgaatagcctttagtgcctacctgcagcacgtgcaaatcagactcatgaaagatagtggggggcagaccttttcagcaagctgggccgctaaagaagatgagcaaatggaactcgtggtgagattccttaagcgcgccagcaataacttgcagcattctctcaggatggtgttgccttctagaaggctcgccctgctggaacggaggcggattttagcccatcagctaggggatttcattatcgtatacaacaaagagactgagcagatggccgaaaaaaaatccaagaagaaagtggaggaagaagaggaagatggagtaaatatggaaaacttccaagagttcatccggcaggcctcagaggccgaactggaagaggtactcaccttttacactcagaagaacaagtccgctagtgtcttcctgggaacccactcaaagatatcaaaaaataacaataactacagtgactccggcgcaaaaggcgaccaccccgagaccatcatggaggaggttaagattaaaccccccaagcagcagcagacaaccgagatacactcggataagctctccagattcaccacgtcagccgagaaggaggccaaactcgtttactcgaattcctctagcggtcctacagcgacattgcagaaaatccctaacactcaccttagcagcgtgacaacaagtgacctgagccccggcccctgtcaccacagctcccttagccagatcccgtccgcaattccgagtatgcctcatcagcctaccatcctcctgaacactgtgtctgcatccgcttcaccatgtctgcatccaggcgctcagaatataccaagtcctacaggcctaccccggtgtcggtctggatcacacaccatcggtccattcagcagctttcagtctgcagcccacatttacagtcaaaaattgtccaggcccagctctgcaaaggccggaagctgttatctgaacaagcatcattccggaatcgctaaaactcaaaaagagggcgaagatgcatcgttgtatagtaaaagatacaatcagagcatggtcacggcagaattacagagattagccgagaaacaggccgcaaggcagtatagtccctcatcgcacataaatctgctgacccaacaggtgactaatttgaatctggcaacaggtataattaaccggtcgagcgcctcagcgccccctaccttacggccgatcatttctcccagtggtccaacatggagcacccagtctgacccacaagctcctgagaatcacagcagctcacctggatcaagatcactgcagaccggtggatttgcgtgggaaggagaggtcgagaacaacgtgtactcccaggcaaccggagtggtgccccagcataagtatcaccccaccgctggaagttaccagctccaattcgccctccaacagcttgagcagcaaaagttgcagtcccggcagctgctcgatcagtctcgcgccaggcaccaggcaatattcggtagtcaaaccctgccgaactcaaatttatggaccatgaacaatggggccgggtgtcgcatctcatcagccacagcgagcggccaaaaacctacaaccttaccacagaaagttgttccacccccttccagctgcgcatccctggtgccgaagcccccacccaatcatgagcaagttttgagacgggctacctcccagaaagcttctaaaggctcctcggcagagggccagctgaacgggctccagagcagtctgaatcccgcagcgtttgtgcccatcacaagcagcactgatccggcccacactaagatctag

SEQ ID NO: 184185 - DNA, 2454 bp, Artificial Sequence
  derived and/or modified sequence
atgaaggagatcaaggttctacggcgtgtcaaggaagagaacgaccgaaggggtggctttatcaggatctttccaaccagtgagacatgggaaatttacggctcttatctggaacacaagacttctatgaattacatgttggcgacaagactgtttcaagatcggggaaatcctcggcgctccctcctaacaggccggacaaggatgacagccgacggcgcacctgagcttaaaatcgaatctcttaactccaaagctaagttgcatgctgccctgtatgaacgaaagcttctgtcactggaagtgaggaaaaggaggaggaggtctagcaggctgagagccatgcggccgaagtaccctgttatcactcagcccgctgagatgaatgtcaagaccgaaacggagagcgaggaagaggaagaggtcgcgctcgacaatgaagatgaggagcaggaagcctcccaggaagaaagcgcgggtttccttagggagaatcaggctaaatatacaccttcattgaccgcactggttgaaaatactccaaaagagaatagtatgaaagtgagagaatggaataataaggggggccactgctgtaagctggagacccaggagctggagccaaaatttaatctgatgcagattctccaggacaacgggaacctgtcaaaaatgcaggcgcgaattgcgtttagtgcctatctgcagcacgtgcagatacggttgatgaaggactcaggggggcagactttctcagcatcatgggccgccaaggaggatgaacaaatggagctagttgttagattcttaaagcgggcctcaaataatttgcagcatagcctaagaatggtattaccaagcaggagacttgccctgctggaaaggcgtcggatattagcccaccagttgggagacttcatcatcgtgtacaataaggagactgagcagatggcggagaaaaaatcaaaaaagaaggtagaggaggaggaagaagatggtgtgaacatggaaaacttccaggaattcatccgtcaggcttccgaggccgaactcgaagaggtgctaacgttctacactcaaaaaaataaatcagcatcagtgtttcttgggacacactcaaagattagtaagaacaataataactattcagactcgggcgcaaaaggtgaccaccctgagaccattatggaggaagtcaaaatcaagccccctaagcagcaacagaccactgagatccacagcgacaaactgagcagattcacaacatctgccgagaaagaagcgaaactggtctatagtaacagttcaagcggacctaccgccaccctccagaaaatcccaaacactcacctgagtagtgtgactaccagtgacctgtcaccagggccatgccaccattcatccctgtcacagattccctctgccattccaagtatgccccaccagccaaccattctgctgaatactgttagcgcatccgcgtcgccttgtctgcacccgggggcacagaatattcccagccctaccgggctgcctcgttgccgctctgggagtcacacaatcggccctttctcttcttttcagtcagcagcccatatttattcacagaagctgagtagaccctccagcgcgaaggcggggtcctgttacttgaacaagcaccattccggcattgcaaagacccagaaagagggagaagatgcaagcttatattccaaacgttacaatcagagcatggtcacggcagagctgcagagactggcagaaaagcaagctgcgagacaatacagtcccagttctcatattaatctccttacgcaacaagtgaccaatttgaatctagccaccggcatcattaaccggagctccgccagcgccccccctaccttacgtccaattatcagcccttcgggacctacctggagcactcagtccgaccctcaggcaccagaaaaccactcgtcaagccctgggagccggtccctccagacagggggatttgcttgggagggagaggtggaaaataacgtctattcccaggccaccggggtggtcccccagcataagtatcacccaaccgccggcagctaccagctgcagtttgcactccagcagctggaacagcagaagttgcagagccgccagctcctggaccaaagccgggcgcggcaccaggccatctttgggtctcaaacccttcccaattccaacctatggacaatgaacaatggtgccggatgcaggatttctagcgcaaccgcatctggacagaagccaacaacccttccacagaaagttgtgccaccacccagctcctgtgcctcgctggtacccaaacccccacccaaccacgagcaggtgctacggcgtgccaccagtcagaaggcctccaacaccagattccggagctcattccagaactacctgtggtacttcttccaagctgtgtcgtag

SEQ ID NO: 184186 - DNA, 2337 bp, Artificial Sequence
  derived and/or modified sequence
atggctcatgtcgaggatctgatcatcaagaccatcatttcagctgagttagctatagcgacagcctgtaagacatttgtccctcacaggtcgtcttgtttcgaactgtatggatttgacgtgctgatcgactcaacccttaaaccctggctgctggaagtgaacttaagcccttcactagcttgtgacgcaccgctggacttgaagattaaagccagcatgataagtgatatgtttacggtggtcggttttgtttgccaggatcctgcacagagggcatcaaccagacctatctatcctacttttgaatctagccgacgaaaccctttccagaagccacaaaggtgcagaccactgagtgcttcagacgctgagatgaaaaaccttgtcggtagcgcccgggagaagggaccaggcaagctgggaggcagtgttttgggtctttcaatggaagaaatcaaggttttacggcgggtgaaagaggagaatgacagaaggggcggcttcatacgaatttttcctacatcagagacctgggagatctatggaagctatctcgagcacaaaaccagtatgaactatatgctagcgactagactctttcaggacaggatgaccgctgatggcgcaccagagctgaagatcgaatcgctcaattctaaggcaaagctccatgccgccttatatgagcgaaaattgctctctctcgaggtgagaaaaagaaggagacgcagcagcagactcagggccatgagaccaaagtaccctgtcatcactcaacctgcagagatgaacgttaagacagagaccgagtcggaagaggaagaggaggtggccctcgataacgaagacgaagagcaggaggccagccaggaagagtccgccgggttcttgcgcgagaatcaggccaaatacacaccatcattaacggctctcgtggagaacacaccgaaggagaattctatgaaggtgagggaatggaacaataaaggcggacactgttgtaagcttgaaacacaggaactcgaacccaagtttaacctgatgcagatccttcaggacaatgggaatttgtccaaaatgcaggctaggatagcattctcagcttatttacagcacgtgcaaatccggctcatgaaagactctggagggcagacgttcagtgcttcctgggcggctaaggaagacgagcagatggagctggtggtgagatttctgaaaagggcgagcaacaacctccagcactctctgcgaatggtcttgccgagccgtcgactggctctgctagagcgcagacgcatactcgcacaccagctcggagatttcataatcgtctataacaaggagaccgagcaaatggccgaaaaaaaaagtaagaaaaaggtggaggaagaggaagaagacggagtgaacatggagaattttcaggagttcattcggcaagcctccgaggccgagttagaagaggtgctcaccttttatacgcagaagaataaaagcgcaagtgtattcttggggactcattcgaagatatctaagaacaataacaactactccgattctggcgctaaaggcgaccatcccgaaacaattatggaagaggtaaagattaaacctccaaaacagcaacagactactgagatccatagtgacaagctgagtcgctttacgacatcagcagaaaaggaggctaaattggtatattccaacagttctagtggcccaaccgcgactttacagaagattcctaacactcacctgagctcagttactactagcgatctgtcacctggtccatgtcaccatagctctctgtctcaaatcccaagcgccatacctagcatgcctcaccaacccactattctcttgaacacagttagtgctagtgcaagcccatgtctccaccccggcgcccagaatatccccagcccaactggcttgcctagatgcagatctgggagccatacaatcgggccatttagctcttttcagagcgcggctcacatctactcccagaaactgtcgagaccttcgtcggccaaagctgggtcatgttacctgaacaaacaccacagtggcatcgcaaaaacgcaaaaagagggagaggatgcatccctgtactccaaaaggtataaccagtctatggtcactgcagaattgcaacgcttggcggagaaacaggccgcacgtcaatattcaccaagttctcacaccgatccttggaaatacgaccgaagtattagaatgtgttcaccgctcaatatcctcgaaccagaatttaaaaagtacctgatgggcatctatagccctcatagcagcaagaagaaaaagaaatag

SEQ ID NO: 184187 - DNA, 1068 bp, Artificial Sequence
  derived and/or modified sequence
atgccccaccagcccaccatcctgctgaacacagtgtctgccagcgccagcccctgcctgcaccctggggcccagaacatccccagccccaccggcctgccccgctgccgcagcggcagccacaccatcggccccttcagcagcttccagagcgctgcccacatctacagccagaagctgagccggcccagcagcgccaaggctgctggcagctgctacctgaacaagcaccacagcggcatcgccaagacccagaaggagggagaagatgccagcctgtacagcaagcgctacaaccagagcatggtgacagctgagctgcagaggctggccgagaagcaggccgcccggcagtacagccccagcagccacatcaacctgctgacccagcaggtgaccaacctgaacctggccaccggcatcatcaacagaagcagcgccagcgccccacccaccctgcggcccatcatcagccccagcggccccacctggagcacccagagcgacccccaggcccctgagaaccacagcagcagccctggcagccgcagcctgcagacaggaggctttgcctgggagggggaggtggagaacaacgtgtacagccaggccactggagtggtgccccagcacaagtaccaccccacagctggcagctaccagctgcagtttgccctgcagcagctggagcagcagaagctgcagagccggcagctgctggaccagagccgggcccggcaccaggccatcttcggcagccagaccctgcccaacagcaacctgtggaccatgaacaacggggccggctgccgcatcagcagcgccacagccagcggccagaagcccaccaccctgccccagaaggtggtgcccccacccagcagctgtgccagcctggtgcccaagcccccacccaaccacgagcaggtgctgcggcgggccaccagccagaaggccagcaagggcagcagcgctgagggccagctgaatggcctgcagagcagcctgaacccagctgcctttgtgcccatcaccagcagcacagtgaacagccacacagccctgtag

SEQ ID NO: 184188 - DNA, 3846 bp, Artificial Sequence
  derived and/or modified sequence
atgcccatcgtgatggcccgggacctggaggagacagccagcagcagtgaagatgaggaggtgatcagccaggaggaccacccctgcatcatgtggacaggaggctgccgccgcatccctgtgctggtgttccacgcagatgccatcctgaccaaggacaacaacatccgggtgattggagagcgctaccacctgagctacaagatcgtgaggacagacagccggctggtgcgcagcatcctgacagcccacggcttccacgaggtgcaccccagcagcacagactacaacctgatgtggacaggcagccacctgaagcccttcctgctgcggaccctgtctgaggcccagaaggtgaaccacttccccaggagctatgagctgaccaggaaggaccggctgtacaagaacatcatccgcatgcagcacacccacggcttcaaggccttccacatcctgccccagaccttcctgctgcctgcagaatatgcagagttctgcaacagctacagcaaggaccggggcccctggatcgtgaagcctgtggccagcagccggggccggggcgtgtacctgatcaacaaccccaaccagatcagcctggaggagaacatcctggtgagccgctacatcaacaaccccctgctgattgatgacttcaagtttgatgtgcggctgtatgtgctggtgaccagctatgaccccctggtgatctacctgtatgaggagggcctggccaggtttgccaccgtgcgctatgaccagggcgccaagaacatccggaaccagttcatgcacctgaccaactacagcgtgaacaagaagagcggggactatgtgtcctgtgatgatcctgaggtggaggactatggcaacaagtggagcatgtctgccatgctgcgctacctgaagcaggagggccgggacaccacagccctgatggcccacgtggaggacctgatcatcaagaccatcatctctgctgagctggccatcgccacagcctgcaagacctttgtgccccacaggagcagctgctttgagctgtatggctttgatgtgctgattgacagcaccctgaagccctggctgctggaggtgaacctgagccccagcctggcctgtgatgcccccctggacctgaagatcaaggcctccatgatcagtgacatgttcaccgtggtgggctttgtgtgccaggaccctgcccagagggccagcacccggcccatctaccccacctttgagagcagcagaagaaaccccttccagaagccccagcgctgccggcccctgagcgccagtgatgctgagatgaagaacctggtgggcagcgcccgggagaagggccctgggaagctgggcggctctgtgctgggcctgtccatggaggagatcaaggtgctgcggcgggtgaaggaggagaatgaccggcggggcggcttcatccgcatcttccccaccagcgagacctgggagatctacggcagctacctggagcacaagacctccatgaactacatgctggccaccaggctcttccaggacaggatgacagcagatggagcccctgagctgaagattgagagcctgaacagcaaggccaagctgcatgctgccctgtatgaaaggaagctgctgagcctggaggtgaggaagagaagaagaagaagcagccggctgcgggccatgaggcccaagtaccctgtgatcacccagcctgctgagatgaatgtgaagacagaaacagaaagtgaggaggaggaggaggtggccctggacaatgaagatgaggagcaggaggccagccaggaggagagcgctggcttcctgcgggagaaccaggccaagtacacccccagcctgacagccctggtggagaacacccccaaggagaacagcatgaaggtgcgggagtggaacaacaagggcggccactgctgcaagctggagacccaggagctggagcccaagttcaacctgatgcagatcctgcaggacaatggaaacctgagcaagatgcaggcccgcatcgccttcagcgcctacctgcagcacgtgcagatccggctgatgaaggacagcggcggccagaccttcagcgcctcctgggccgccaaggaggatgagcagatggagctggtggtgcgcttcctgaagagggccagcaacaacctgcagcacagcctgaggatggtgctgcccagccggcggctggccctgctggagcggcggcgcatcctggcccaccagctgggggacttcatcatcgtgtacaacaaggagacagagcagatggccgagaagaagagcaagaagaaggtggaggaggaggaggaggatggagtgaacatggagaacttccaggagttcatccggcaggccagcgaggccgagctggaggaggtgctgaccttctacacccagaagaacaagagcgcctctgtgttcctgggcacccacagcaagatcagcaagaacaacaacaactacagcgacagcggggccaagggggaccaccctgagaccatcatggaggaggtgaagatcaagccacccaagcagcagcagaccacagagatccacagcgacaagctgagccgcttcaccaccagcgctgagaaggaggccaagctggtgtacagcaacagcagcagcggccccacagccaccctgcagaagatccccaacacccacctgagctctgtgaccaccagtgacctgagccctggcccctgccaccacagcagcctgagccagatccccagcgccatccccagcatgccccaccagcccaccatcctgctgaacacagtgtctgccagcgccagcccctgcctgcaccctggggcccagaacatccccagccccaccggcctgccccgctgccgcagcggcagccacaccatcggccccttcagcagcttccagagcgctgcccacatctacagccagaagctgagccggcccagcagcgccaaggccggcagctgctacctgaacaagcaccacagcggcatcgccaagacccagaaggagggagaagatgccagcctgtacagcaagcgctacaaccagagcatggtgacagctgagctgcagaggctggccgagaagcaggccgcccggcagtacagccccagcagccacatcaacctgctgacccagcaggtgaccaacctgaacctggccaccggcatcatcaacagaagcagcgccagcgccccacccaccctgcggcccatcatcagccccagcggccccacctggagcacccagagcgacccccaggcccctgagaaccacagcagcagccctggcagccgcagcctgcagacaggaggctttgcctgggagggggaggtggagaacaacgtgtacagccaggccactggagtggtgccccagcacaagtaccaccccacagctggcagctaccagctgcagtttgccctgcagcagctggagcagcagaagctgcagagccggcagctgctggaccagagccgggcccggcaccaggccatcttcggcagccagaccctgcccaacagcaacctgtggaccatgaacaacggggccggctgccgcatcagcagcgccacagccagcggccagaagcccaccaccctgccccagaaggtggtgcccccacccagcagctgtgccagcctggtgcccaagcccccacccaaccacgagcaggtgctgcggcgggccaccagccagaaggccagcaagggcagcagcgctgagggccagctgaatggcctgcagagcagcctgaacccagctgcctttgtgcccatcaccagcagcacagatcctgcccacaccaagatctag

SEQ ID NO: 184189 - DNA, 2454 bp, Artificial Sequence
  derived and/or modified sequence
atgaaggagatcaaggtgctgcggcgggtgaaggaggagaatgaccggcggggcggcttcatccgcatcttccccaccagcgagacctgggagatctacggcagctacctggagcacaagacctccatgaactacatgctggccaccaggctcttccaggaccggggcaaccccaggaggagcctgctgaccggccgcaccaggatgacagcagatggagcccctgagctgaagattgagagcctgaacagcaaggccaagctgcacgccgccctgtatgaaaggaagctgctgagcctggaggtgaggaagagaagaagaagaagcagccggctgcgggccatgaggcccaagtaccctgtgatcacccagcctgctgagatgaatgtgaagacagaaacagagagcgaggaggaggaggaggtggccctggacaatgaagatgaggagcaggaggccagccaggaggagagcgctggcttcctgcgggagaaccaggccaagtacacccccagcctgacagccctggtggagaacacccccaaggaaaattccatgaaggtgcgggagtggaacaacaagggcggccactgctgcaagctggagacccaggagctggagcccaagttcaacctgatgcagatcctgcaggacaatggaaacctgagcaagatgcaggccagaattgccttcagcgcctacctgcagcacgtgcagatccggctgatgaaggacagcggcggccagaccttcagcgcctcctgggccgccaaggaggatgagcagatggagctggtggtgcgcttcctgaagagggccagcaacaacctgcagcacagcctgaggatggtgctgcccagccggcggctggccctgctggagcggcggcgcatcctggcccaccagctgggggacttcatcatcgtgtacaacaaggagacagagcagatggccgagaagaagagcaagaagaaggtggaggaggaggaggaggatggagtgaacatggagaacttccaggagttcatccggcaggccagcgaggccgagctggaggaggtgctgaccttctacacccagaagaacaagagcgccagcgtcttcctgggcacccacagcaagatcagcaagaacaacaacaactacagcgacagcggggccaagggggaccaccctgagaccatcatggaggaggtgaagatcaagccacccaagcagcagcagaccacagagatccacagcgacaagctgagccgcttcaccaccagcgctgagaaggaggccaagctggtgtacagcaacagcagcagcggccccacagccaccctgcagaagatccccaacacccacctgagctctgtgaccaccagtgacctgagccctggcccctgccaccacagcagcctgagccagatccccagcgccatccccagcatgccccaccagcccaccatcctgctgaacacagtgtctgccagcgccagcccctgcctgcaccctggggcccagaacatccccagccccaccggcctgccccgctgccgcagcggcagccacaccatcggccccttcagcagcttccagagcgctgcccacatctacagccagaagctgagccggcccagcagcgccaaggccggcagctgctacctgaacaagcaccacagcggcatcgccaagacccagaaggagggggaggatgccagcctgtacagcaagcgctacaaccagagcatggtgacagctgagctgcagaggctggccgagaagcaggccgcccggcagtacagccccagcagccacatcaacctgctgacccagcaggtgaccaacctgaacctggccaccggcatcatcaacagaagcagcgccagcgccccacccaccctgcggcccatcatcagccccagcggccccacctggagcacccagagcgacccccaggcccctgagaaccacagcagcagccctggcagccgcagcctgcagacaggaggctttgcctgggagggggaggtggagaacaacgtgtacagccaggccaccggggtggtgccccagcacaagtaccaccccacagctggcagctaccagctgcagtttgccctgcagcagctggagcagcagaagctgcagagccggcagctgctggaccagagccgggcccggcaccaggccatcttcggcagccagaccctgcccaacagcaacctgtggaccatgaacaatggagctggctgccgcatcagcagcgccacagccagcggccagaagcccaccaccctgccccagaaggtggtgcccccacccagcagctgtgccagcctggtgcccaagcccccacccaaccacgagcaggtgctgcggcgggccaccagccagaaggccagcaacacccgcttccgcagcagcttccagaactacctgtggtacttcttccaggccgtgtcctag

SEQ ID NO: 184190 - DNA, 2337 bp, Artificial Sequence
  derived and/or modified sequence
atggcccacgtggaggacctgatcatcaagaccatcatctctgctgagctggccatcgccacagcctgcaagacctttgtgccccacaggagcagctgctttgagctgtatggctttgatgtgctgattgacagcaccctgaagccctggctgctggaggtgaacctgagccccagcctggcctgtgatgcccccctggacctgaagatcaaggcctccatgatcagtgacatgttcaccgtggtgggctttgtgtgccaggaccctgcccagagggccagcacccggcccatctaccccacctttgagagcagcagaagaaaccccttccagaagccccagcgctgccggcccctgagcgccagtgatgctgagatgaagaacctggtgggcagcgcccgggagaagggccctgggaagctgggcggctctgtgctgggcctgtccatggaggagatcaaggtgctgcggcgggtgaaggaggagaatgacagaagaggaggcttcatccgcatcttccccaccagcgagacctgggagatctacggcagctacctggagcacaagacctccatgaactacatgctggccaccaggctcttccaggacaggatgacagcagatggagcccctgagctgaagattgagagcctgaacagcaaggccaagctgcacgccgccctgtatgaaaggaagctgctgagcctggaggtgaggaagagaagaagaagaagcagccggctgcgggccatgaggcccaagtaccctgtgatcacccagcctgctgagatgaatgtgaagacagaaacagagagcgaggaggaggaggaggtggccctggacaatgaagatgaggagcaggaggccagccaggaggagagcgctggcttcctgcgggagaaccaggccaagtacacccccagcctgacagccctggtggagaacacccccaaggaaaattccatgaaggtgcgggagtggaacaacaagggcggccactgctgcaagctggagacccaggagctggagcccaagttcaacctgatgcagatcctgcaggacaatggaaacctgagcaagatgcaggccagaattgccttcagcgcctacctgcagcacgtgcagatccggctgatgaaggacagcggcggccagaccttcagcgcctcctgggccgccaaggaggatgagcagatggagctggtggtgcgcttcctgaagagggccagcaacaacctgcagcacagcctgaggatggtgctgcccagccggcggctggccctgctggagcggcggcgcatcctggcccaccagctgggggacttcatcatcgtgtacaacaaggagacagagcagatggccgagaagaagagcaagaagaaggtggaggaggaggaggaggatggagtgaacatggagaacttccaggagttcatccggcaggccagcgaggccgagctggaggaggtgctgaccttctacacccagaagaacaagagcgccagcgtcttcctgggcacccacagcaagatcagcaagaacaacaacaactacagcgacagcggggccaagggggaccaccctgagaccatcatggaggaggtgaagatcaagccacccaagcagcagcagaccacagagatccacagcgacaagctgagccgcttcaccaccagcgctgagaaggaggccaagctggtgtacagcaacagcagcagcggccccacagccaccctgcagaagatccccaacacccacctgagctctgtgaccaccagtgacctgagccctggcccctgccaccacagcagcctgagccagatccccagcgccatccccagcatgccccaccagcccaccatcctgctgaacacagtgtctgccagcgccagcccctgcctgcaccctggggcccagaacatccccagccccaccggcctgccccgctgccgcagcggcagccacaccatcggccccttcagcagcttccagagcgctgcccacatctacagccagaagctgagccggcccagcagcgccaaggccggcagctgctacctgaacaagcaccacagcggcatcgccaagacccagaaggagggggaggatgccagcctgtacagcaagcgctacaaccagagcatggtgacagctgagctgcagaggctggccgagaagcaggccgcccggcagtacagccccagcagccacacagacccctggaagtatgacaggagcatccgcatgtgcagccccctgaacatcctggagcctgagttcaagaagtacctgatgggcatctacagcccccacagcagcaagaagaagaagaagtag

SEQ ID NO: 184191 - DNA, 1068 bp, Artificial Sequence
  derived and/or modified sequence
atgccccaccagcccaccatcctgctgaacaccgtgagcgccagcgcatccccatgtttgcaccccggagcccaaaacatccctagtcccacgggcttgcctaggtgtaggtcaggttctcacacaattggcccctttagtagctttcagagtgcagctcatatctactcccaaaagctgtccagaccaagcagcgctaaggccgccggaagttgctacctgaataagcatcattcgggcatcgccaaaacgcagaaagagggtgaggacgcaagtttatattcaaagcgatataaccaatcgatggtgaccgcagagcttcagcgactagcagaaaagcaggccgcccggcagtatagccccagctctcacataaacctcctgacccagcaagtcacaaatttgaacctcgccacaggaataattaacaggtcgagcgcctctgccccacctaccctccgaccaattatcagtccaagtgggccaacttggagcacacagagtgacccacaggcccccgaaaatcacagcagtagtccaggttctcgcagcttacaaactgggggctttgcgtgggagggggaggtggagaacaatgtctactcgcaggctaccggcgtggtgccccagcacaagtatcatcccacagctggatcgtatcagctgcaatttgccctgcagcagttggagcaacaaaagcttcaatcccgccagctactggatcagtctcgggctagacatcaggccatttttggcagtcagacccttcccaattctaatctgtggaccatgaataatggagctgggtgcagaatttcttccgccacagcaagcgggcagaagccgaccaccctgcctcagaaagtcgttccccccccaagctcttgcgcctccctggtgcctaaaccaccccccaaccatgagcaggtgttgcggagagctacaagccagaaggcctcaaagggcagttcagccgagggacagttgaacggtttgcagtcctccctcaatcctgctgcctttgtccccatcactagttcgacagtgaactctcataccgccctgtag

SEQ ID NO: 184192 - DNA, 3846 bp, Artificial Sequence
  derived and/or modified sequence
atgcccatcgtgatggcccgggacctggaggagaccgccagcagctcagaggatgaagaagtaatctcccaggaagaccacccctgcattatgtggaccgggggctgccgcaggatccccgtactggtctttcatgccgatgccattcttaccaaagataacaacattcgcgtcattggggagagataccacctttcctataaaattgtgcggaccgattcaaggttggtgaggtcgatccttactgcccacggttttcacgaggtccatcctagctctaccgattataatctgatgtggactggtagccatctgaaaccattcctgctacggaccctttctgaggcccaaaaagtgaatcatttcccgcggtcctatgaacttacacgcaaggatagactgtataagaacattattaggatgcagcacacccacggcttcaaagcttttcatattctgcctcaaacgttccttctgcccgccgagtacgccgagttctgtaatagttattctaaggatagggggccttggatcgtaaagcctgtggccagcagcaggggccggggcgtgtacttaatcaacaacccaaatcagatctctttggaggaaaatatcttggtatctcgatacattaacaaccctctgcttattgatgatttcaagttcgatgtccggttgtatgtgctggtgacctcctatgatccactggttatctatctttatgaggaaggactggcccgatttgcaaccgttcggtacgaccagggcgctaagaatatccgaaatcagttcatgcatctgacaaactatagtgtcaataagaaatctggcgactatgtttcatgtgacgaccctgaagtcgaagattatggtaacaagtggagcatgtccgctatgttacgctatctaaagcaggaaggacgggacacgactgcccttatggcccatgttgaggatttgattatcaagaccatcattagcgcagaactggccatcgctaccgcctgcaaaacctttgttcctcataggagttcctgcttcgagttgtacgggttcgacgtcttgatcgacagtaccttgaaaccttggctgcttgaagtaaatctgagcccctcactcgcatgcgacgcccccctggatctgaaaatcaaggcaagcatgatctctgatatgttcaccgtggtcgggttcgtgtgccaagaccccgcccagcgcgcgtctacacggcccatttaccccaccttcgagtccagcaggcgaaacccgttccagaaaccccagaggtgccggcccctgagcgcctcagacgccgaaatgaagaacctggtcggatctgctagggaaaaaggaccagggaaactaggaggttccgtgttaggcctatccatggaagagattaaggtcctccgtcgggtcaaggaggagaacgaccgacggggcggattcattagaatcttcccgaccagcgaaacatgggaaatttacggctcatatctcgagcacaagacctccatgaattatatgctggccactaggcttttccaggatcgcatgacggccgatggtgcccctgagctgaagatcgagtcactgaattctaaagcaaagctgcacgcggctttgtatgagcgtaagctgttgagtctggaggtccgaaaacgccgaagacgctcttctagactgcgtgctatgcggccaaagtatcccgtgattacacaaccagccgagatgaacgtcaagaccgagactgagtctgaggaagaggaagaagtggctctggataatgaggatgaggaacaggaagcctcccaagaagagtctgctgggttcctgagagagaatcaagcaaaatacacccccagcttaaccgcactcgtggagaatactcctaaggaaaactcaatgaaagtgagggaatggaacaacaaagggggccactgttgtaagctggagactcaagaattggagcccaagtttaacttaatgcaaattctccaagacaatgggaaccttagcaagatgcaggctagaatcgcttttagcgcctacttgcaacacgttcagatccgactcatgaaggacagtggagggcagacgttttccgcgtcttgggcagccaaggaagacgaacagatggagttggtggtgcgttttttaaagcgtgcttcaaacaacctgcagcacagtctcagaatggtgctgccctcacgacgcttagcattgctggaacggcggcggattctggcccaccaacttggagattttatcattgtgtacaacaaggaaacggagcaaatggccgagaaaaaaagcaagaaaaaggtagaagaagaggaggaggatggagttaatatggagaattttcaggagttcattagacaggcatctgaggcggagctggaggaggttctgactttttatacccagaagaataaatccgccagcgtgttcctcggcacgcactccaaaatttctaaaaataataacaactactcagactcaggcgccaaaggcgaccacccggagactataatggaggaggtgaagataaagccacctaaacagcagcagaccaccgaaattcacagcgacaaactctcaaggtttacaacctccgccgaaaaagaagccaaactagtgtacagcaatagttcttctgggcccaccgccaccctgcagaaaattcccaatactcacctgagctctgtgaccacctccgatctctcacccggaccgtgccaccactccagcctgtcccagattccgtccgccataccgagtatgccacaccaacccacgatacttctcaacaccgtttcagcaagcgcatccccttgcctccaccccggtgctcagaatataccctcccccaccgggctcccgcggtgcaggagcgggtcacacaccattggccccttcagctcattccagtcagccgctcacatctattcccagaagctctccaggccttcctctgccaaagccggtagctgttacctcaataaacatcactctgggattgctaaaacacagaaggagggcgaggacgccagtttgtactcaaaacgttataaccaaagtatggtgaccgccgaactgcagcggttggcagagaagcaggccgcgcggcagtattcacccagcagccatattaacctgctgacccagcaagtgactaaccttaatctcgccacagggatcatcaaccgcagtagtgctagcgcacctccaacactcagaccaatcatcagccctagcggacccacatggtccacacaatcggaccctcaggcacctgagaatcattccagcagcccgggctccaggtcactacagactggcggattcgcatgggaaggggaagttgaaaacaatgtgtattcccaagcaaccggcgtggtacctcagcataaataccacccaactgcaggtagctatcagctgcagtttgccctccaacagctggagcaacagaagttgcaaagccgccagctgcttgaccaatcccgggccagacatcaagctattttcggcagccaaaccctgcctaactccaacctgtggactatgaacaatggggccgggtgccgcatttcttctgctaccgcgtccggccagaagcctactacactgccccagaaggtcgtgcctccccctagcagttgtgcgtcactggtgccgaagcccccaccaaatcacgagcaggtacttcgccgcgcaacatctcagaaggccagcaaaggttctagtgcggagggacagctgaatgggttgcagagctctcttaacccggcagcatttgtcccaatcacatcatcgacagacccagcacataccaagatatag

SEQ ID NO: 184193 - DNA, 2454 bp, Artificial Sequence
  derived and/or modified sequence
atgaaggagatcaaggtgctgcggcgggtgaaggaggagaacgaccgccgaggcggattcatcaggattttccctacgtctgaaacctgggaaatttacggatcctacctcgagcataaaacatcaatgaactacatgctggcaacccgcctcttccaggacagggggaaccctagacgcagcctgctgacagggcggaccagaatgacagccgatggtgctcctgaactgaagatagaatcactgaattctaaggcgaaattgcatgcagccctgtatgagagaaagttgctcagtttggaagttcgaaagcggcgccgacgcagctccaggcttcgcgcgatgcgtcccaagtatcccgtcattactcagcccgccgaaatgaatgtgaagaccgagaccgaaagcgaggaagaagaggaggtcgccctggataacgaggacgaagagcaggaagcatcccaggaagagtctgccgggtttctgcgggagaaccaggccaagtatactcccagcctgacagctctagtggagaatactccgaaggagaatagtatgaaagtacgcgagtggaacaacaagggcggtcattgctgtaagctggagactcaggaactggagcccaagtttaatctcatgcagattttacaggataacgggaacctctctaagatgcaggcccgcatcgcattttccgcatacctgcagcacgtgcagatccggctgatgaaggacagtggcggacagacattttcggcaagctgggccgcaaaggaagacgagcaaatggaattagtagtgcggttcttgaagagagcaagtaacaatttacagcatagtttgaggatggtgttgccatccaggagattagcacttctggaaagaaggaggatactggcacaccagttgggcgattttatcattgtgtataataaagagaccgaacagatggccgagaaaaagtctaagaaaaaggtggaggaggaggaggaggacggcgtgaatatggaaaatttccaggagttcattaggcaagcatctgaggcggaactggaagaggtcctcaccttttatacacagaaaaacaagagcgccagcgtctttctggggacccacagcaagatcagtaaaaacaacaataattattctgactctggtgcaaaaggtgaccaccccgagacaattatggaggaagttaagatcaaacctcctaagcagcaacagacaaccgagattcacagcgacaagttatcccgctttactactagcgccgagaaagaagcgaagctggtctattcaaattctagctctggacccactgctacacttcaaaagatccccaatactcacctgtcttcagtgacgacgtctgacctctcacctgggccatgccatcattcttcgttgtcacagattccctcggcaattcccagcatgccacaccaacctactattcttctcaacaccgtgagtgctagcgcttcaccatgcctccatccaggcgctcagaatatccccagtccaaccggccttcctcgctgcaggtctgggagccacactattggaccgttttcttcattccagagcgcagcacacatatattcccagaagctgtctcgcccatcatcagccaaggctgggtcctgctacttaaacaagcaccattcaggcattgccaaaacacaaaaagagggggaagacgcgagtctctacagtaaacggtataatcagtcaatggtaaccgcagaacttcagcggctggctgagaaacaggccgcaaggcagtattcaccttctagccatattaacctccttacacaacaggtcacaaatctcaaccttgcaaccggaattattaatagatccagcgctagcgcaccgcctactttgcggcctattatcagtccttcaggacctacttggtccactcagagcgacccccaggcccccgagaaccactccagcagccccggaagtaggtcgttgcagaccggcggatttgcctgggaaggcgaagtcgaaaataacgtgtactcccaggctaccggcgtggtacctcagcataagtaccacccaactgctgggagttatcaacttcaatttgccctccaacagcttgagcaacagaaactgcagtctaggcagctgcttgatcaatcacgtgccagacatcaagccatattcggatcccagaccctcccaaacagtaacctctggacaatgaacaatggcgctggctgcagaatttcttctgccactgcttcaggccagaaaccaacaacattaccgcaaaaagtcgtgcccccacctagtagttgtgcctcgttggttccaaagcctcctccaaatcacgagcaagtattaaggagggcaactagtcagaaggcctccaacactagatttcggtcaagcttccagaattatctgtggtatttcttccaagccgtgtcctag

SEQ ID NO: 184194 - DNA, 2337 bp, Artificial Sequence
  derived and/or modified sequence
atggcccacgtggaggacctgatcatcaagaccatcatcagcgccgaactggccatcgccacagcatgcaagacctttgttcctcaccgctctagctgctttgagctctacgggttcgacgtgctcattgactcaactctcaaaccctggcttttagaggtgaatttaagcccatctttagcctgcgatgcaccattggatcttaagatcaaggcctctatgattagtgatatgttcacggtggtgggcttcgtgtgccaggacccagcccaaagggctagcacccggccaatctaccctaccttcgagagctctcgacgaaatcctttccagaaaccccaacggtgcaggccactcagcgcatctgatgcggagatgaaaaacttagtgggttcagcacgagagaaggggccagggaagctgggaggaagcgtcctgggactgtcaatggaggagattaaggtgctcaggcgagtaaaggaggagaacgaccgacggggcggattcattagaatctttcctactagcgaaacttgggagatctatggttcgtaccttgaacacaaaacaagtatgaactacatgttggcaacaaggctattccaagatcggatgactgctgacggcgccccagagctaaaaattgaaagtctgaatagtaaagccaaactccacgccgccctctatgaaagaaaactcctgtctctcgaagtaagaaagagacggcggcggtcaagtcgccttagggccatgcgaccaaaatatcccgtgataactcagcccgcagaaatgaatgtgaagaccgagaccgaatctgaagaggaggaagaagtggcattagacaacgaagacgaggaacaagaggcatcccaggaggagtctgccggattcctcagggagaatcaggccaaatatacgccaagcctaaccgcgttggtggaaaacacgcctaaggaaaacagcatgaaagtgcgagaatggaataacaagggtggtcattgctgcaaactggagactcaggagctggaaccaaagttcaatctgatgcaaattctccaggacaacggcaatctctctaaaatgcaggctcggattgccttcagcgcctacctgcagcatgtgcaaatcaggctcatgaaggacagcgggggacagacgttcagcgctagctgggcggcaaaggaagatgagcagatggaactggtagtgcggttcctcaagcgcgctagtaacaatttgcagcattcattgcggatggtcctgccctccagacggctggctttgctcgagaggagacgtatcttggctcatcaattgggtgactttattatcgtctacaacaaggagactgaacagatggccgagaaaaagtctaagaagaaggtggaggaagaggaagaggatggggtgaatatggaaaactttcaggaattcatccggcaggcgtccgaagctgaactcgaggaagttctgactttctacacccagaagaataaaagcgcttcagtctttttgggaactcacagcaagatttcaaaaaataacaataactatagcgactcaggcgcgaagggggatcatcctgagacgattatggaggaggtaaaaatcaagcctccgaaacagcagcagaccaccgagatccacagcgacaagctgtctcgctttacaacttccgccgagaaggaagctaagttggtatactccaacagcagttcaggccctacagctaccctacagaaaatccccaatactcacctgtcctcggtgacaactagtgatctgtcccccggtccctgccaccactcaagcctgtctcagataccctccgcaatcccaagtatgccccatcaaccaaccatcttgctcaacaccgtttccgcctctgcctctccatgcctgcaccctggcgcccagaacattccctcacccacggggctcccaaggtgtcgcagcggatcgcacacaattggaccctttagttctttccagtctgccgcgcacatctacagtcaaaaattatctcgcccgtcttccgcaaaggctggttcatgctacctcaacaaacatcactccgggatagcaaagactcagaaggaaggcgaggatgcgagcctctacagtaagaggtacaatcagtctatggtgacggccgagttacagcgtctcgctgaaaaacaggccgctcgccagtattccccttcgagccataccgacccctggaaatatgaccgctccatccgcatgtgctcaccgttgaatattctcgaacccgaatttaaaaaataccttatgggcatctattcaccgcactcatctaaaaagaagaagaaatag

SEQ ID NO: 184195 - DNA, 1068 bp, Artificial Sequence
  derived and/or modified sequence
atgccacatcagcccactatcttgctgaatacagtttcggccagcgcttctccatgcctgcaccccggtgcacagaacattccctcacccaccgggctgcctcggtgccggtctggcagtcacaccattggaccctttagttcgttccagtccgccgcacatatttactcacaaaagctgtccagaccctctagtgcgaaagctgccggatcttgctatctgaataaacaccatagtggtattgctaaaacacagaaggagggcgaagatgcttccctctactcgaagagatataatcagagtatggtcaccgcagaattacagagactggctgagaaacaggccgctcgacagtattcacctagctctcatataaaccttctgacccagcaggtgacgaacctgaatctagccacgggcataatcaatcgctcttccgcctctgcgccaccgacactgaggcccatcatctcaccgtcaggcccaacgtggagcactcagagcgacccacaggcaccagagaatcacagctccagccccggatcacgtagcctgcagacggggggatttgcctgggagggggaagtagaaaacaacgtgtactcccaagcaacaggagtagtccctcagcacaagtatcatccaaccgccggtagttaccagcttcagtttgcccttcagcagctcgaacagcaaaagttacagagtcggcaactgctggaccagagccgagctaggcaccaggctatattcggtagccagaccctgcccaattccaatttgtggaccatgaacaacggagcaggctgtcgcatttccagtgcaactgcatcggggcagaaacccaccacacttccgcagaaagttgtgcctcctccatcctcctgcgcatctctggtgcccaagccaccacccaaccatgagcaggtccttcgcagagctacatctcagaaagcttccaaaggtagctctgctgaagggcagctgaacggcttgcaatcttctctgaaccccgcagcatttgtcccaattacctcgtccaccgtgaattcccataccgcattgtag

SEQ ID NO: 184196 - DNA, 3846 bp, Artificial Sequence
  derived and/or modified sequence
atgccgatcgtcatggcgagggacttggaggaaaccgcctcctccagcgaggatgaagaggtaatcagccaggaggatcatccatgcatcatgtggaccggcggatgccgcaggattcccgttctcgtctttcacgccgacgcaattttaactaaggataataatataagggtaatcggtgagcggtaccacctgagctacaagatcgtcaggaccgattctcggcttgtgcgctcgatcttgactgcgcacggttttcatgaagtacaccctagcagcactgattataacctaatgtggaccggcagccacctcaaaccctttcttcttcggacactctctgaggcccagaaggtgaaccatttcccgagaagctacgaactgacccggaaagaccgcctctataagaacatcattagaatgcaacacacacatggctttaaagcctttcatatactgcctcaaacgttcctgttgccagcagagtatgctgaattttgtaactcgtactctaaggatcggggaccctggatcgtaaaacctgttgccagctcccggggaaggggtgtctatttgataaataacccaaaccagataagcctggaagaaaatattctggttagccggtacatcaacaacccgctcctcattgacgacttcaagttcgatgttcgcctttacgttctggtgacctcatacgaccccctggtgatatacctctacgaagagggcctcgctcgatttgctactgtacggtacgaccagggcgctaaaaatattcggaatcaattcatgcacctgaccaattatagtgtcaataaaaagagcggcgactacgtgagttgcgatgaccccgaagttgaagactacggaaacaagtggtccatgtcagctatgctgcgttatctcaagcaggaggggagggataccacagccctgatggcacacgtagaagatttgataatcaaaactataatttcagctgagctcgccatagctacggcttgtaagacatttgtgcctcatcgatctagctgctttgaactgtatggctttgacgtgctgattgactccacgctaaagccatggctgttagaagtgaatttgtctccctctctggcctgcgatgcaccgttggatctaaaaattaaagcttccatgatatcagacatgtttactgtggttggtttcgtgtgccaggatcccgctcaaagggcctccacgagacccatctaccctacattcgaaagctctagacggaacccttttcaaaagccgcaacgatgtcgacccctgagcgcttccgacgccgagatgaagaatctggttgggtctgctcgggagaaggggcctggtaaactcggcggttctgttctggggttgtcaatggaggagatcaaggttttgagacgggttaaggaggagaacgacaggaggggcggttttatccgaatctttcccactagcgaaacttgggagatctatggcagctacctagagcataaaacaagcatgaattatatgcttgccacacggcttttccaggacaggatgactgctgatggtgctcctgagttgaaaatcgagagcctgaattccaaggctaagctacatgccgctctgtatgagcggaagctgttgagtctggaggtgcgtaaacggaggagaagatcgagccgcctcagggccatgcgcccaaagtacccagtgatcacacaaccagccgaaatgaacgttaaaaccgagaccgagtcagaggaggaggaggaagtggccttagacaatgaggatgaggaacaggaagcttcccaagaggagtcagcagggtttctgagagagaatcaagcaaaatatacccccagcctgactgcactcgtcgaaaatactccgaaggagaactcaatgaaggtacgtgaatggaataacaaaggcggacattgctgcaagctggaaacccaggagctggagccaaaatttaacctgatgcagatcctgcaggataatggaaacctctccaaaatgcaggccaggatcgccttctctgcctatttgcaacatgtgcagatccgccttatgaaggattctggaggtcagacattctccgctagttgggcggctaaagaagatgagcagatggagctggtggtgagattcctgaaacgggcttccaacaaccttcagcacagtctgagaatggtgctgcctagcagaaggttagccctgctagaacggaggaggattctagcccaccagctcggagactttattatcgtctataacaaagagacagagcagatggcagaaaagaagtctaagaagaaggttgaggaggaggaagaggacggtgtcaacatggagaacttccaagagttcattcggcaggcgtccgaggctgagcttgaggaagtactgactttttatacacaaaagaataaatctgcctccgtcttcctgggaacgcactccaagatttccaagaacaacaacaactatagcgacagtggagccaaaggggatcaccccgagacaatcatggaagaagtgaaaatcaaacccccaaagcagcagcagactactgagatccactccgacaaactgtctcgcttcacgactagtgctgagaaggaggctaagctggtttattcaaactcctctagtgggcctactgctaccctccaaaagattccgaacacacatctgagctcggtaaccacatctgatcttagccctggcccttgccatcattcttccctgtctcagatcccgtcagcaattccttccatgccgcatcaaccaaccattcttctgaacacggtgagcgcttcagcatcaccttgtctgcaccccggagctcagaacattccttcacccactggcctgccgcgatgtagatcggggagccacacaatcgggccattttcaagttttcagtctgcggcacacatctacagtcagaaactgtccaggcccagcagcgccaaggccggttcttgttacctgaacaaacaccacagcggaatcgcaaagacacagaaggaaggggaggacgcctccttgtacagtaagcgctataaccagagtatggtgaccgccgaactgcagaggctcgccgaaaagcaggcagccagacagtactcgccttccagccacatcaatcttctgactcaacaggtcaccaatctcaacttggccactggcatcattaatcgctcttcagcaagcgccccaccaaccctcaggccaattatatccccaagcggacccacatggtccacacagtcagatccccaggcccctgagaaccatagttcatcacccggttctcgtagcctccagacagggggtttcgcttgggaaggcgaagttgaaaataatgtctattcccaggccacaggagtcgtgccacagcataaatatcaccccacagctgggagttatcaactccagtttgctttgcagcagctggagcagcagaagctgcagagccggcaattgcttgaccaatcccgcgctaggcaccaggctatctttgggtcccagacactgccaaatagtaatctgtggactatgaacaatggagcagggtgtcgaattagttcagctactgcatccggacagaaacctacgactttgccacaaaaggtggtgccccctccttcctcttgtgctagtctggtacctaaacctccgccaaaccatgaacaagttctgcgcagagctacctcacagaaagcttctaagggctcctccgctgagggacagcttaatggtttgcaatcctcactcaatccggcagcctttgtgccaatcactagcagcacagatcctgcacacaccaaaatctag

SEQ ID NO: 184197 - DNA, 2454 bp, Artificial Sequence
  derived and/or modified sequence
atgaaagagatcaaggttttgcgtagggtcaaagaagaaaacgatcgcagagggggttttatacgcatttttcccacttccgaaacatgggaaatctacggatcatacctcgagcacaaaacctctatgaattacatgctggccaccaggctgttccaagacagggggaatcctcgcagaagcttacttactgggaggacgaggatgacagcagatggtgcacctgaactcaaaatcgagagcctgaacagtaaggccaagctgcatgcagccctctacgagagaaagctactgtctctagaggtccgcaagcgcagacgccgatcctccagactgcgggctatgaggcctaagtacccggtaattacacagcctgctgagatgaacgtcaagactgagaccgagtcagaggaagaagaggaagttgcactggacaacgaggatgaggagcaagaagccagccaggaggagtctgccggattcctcagggaaaaccaggctaagtatacaccaagtttaacggcactcgtggaaaatacccctaaggaaaatagcatgaaagtaagggagtggaacaataaagggggacattgttgtaagctcgagactcaggaattggagcctaaatttaacctgatgcagattctgcaggacaatggcaacctatctaaaatgcaagctcgcattgcattcagcgcctacctgcagcatgtccagatccgtttgatgaaggatagcggaggacaaacattttcagcttcatgggccgctaaggaggacgagcagatggaactggtggtgcggtttttgaagcgcgcatccaataacctccagcactccttaaggatggtccttccctcgaggcgcctcgcactcctggaaaggcgacggattctggcgcaccaactaggggattttattattgtatataataaggagaccgaacagatggccgagaagaaatcaaaaaaaaaagttgaggaggaggaagaagatggtgtcaacatggagaattttcaggaatttatccggcaggcatcagaggctgagctcgaagaggtgcttacgttctatacgcaaaaaaacaaatccgcttctgtctttctgggcacacatagcaagatctccaaaaacaataacaactactctgacagcggcgcaaaaggtgaccatcctgaaacaataatggaagaggttaagatcaagcctccaaaacagcagcagaccacagaaattcactcggacaagctcagcagatttaccacgtcggctgagaaagaagcaaagctagtgtactcaaatagttcgtctggcccaaccgccacactgcagaaaatccccaacactcaccttagcagcgtgactacgagtgatctgtctcctgggccttgccaccactcctctcttagccagatcccttccgctatcccatccatgccacaccagcctacaattttgttaaataccgtctctgcctcagcttctccatgcctgcatcccggagcacagaatattccttcccccacgggcttacctagatgcagatcaggctctcacacaatcgggccattttcttccttccagtcagccgctcatatttacagtcagaagctctctagaccgtcttctgcaaaggctggcagttgctatttgaacaagcatcatagcggcatcgcaaagacccagaaagagggcgaggatgccagtctatactccaagagatataatcagagcatggtgacagcagagctccaacggttggcagaaaagcaggcagcaagacagtatagcccgagctcccatatcaatctcctgactcagcaggtgactaatctgaaccttgcaacaggtattatcaatcgcagcagcgccagcgccccacccaccttgcgacctatcatatctcctagcggcccaacctggagcacgcagtctgaccctcaggctccagagaaccattctagttcacccggttcacgctctctccagacaggcggatttgcctgggaaggcgaggtggagaataacgtgtatagccaggcgactggggtggtacctcagcataagtatcatccgacagctggcagctatcagctacagtttgcactccaacagttagagcagcagaagctgcagagcaggcaactcctcgatcagtcccgggcacgtcatcaagccatctttgggagtcaaaccctgccgaactccaacctgtggacaatgaataatggcgctggatgtaggatcagctcagccacagcgtcgggccagaagcctactactttgccccagaaggtggtgccaccgcctagcagctgcgccagcttagttcccaaaccaccgccaaatcacgagcaggtgcttagaagggcaacatcacagaaggcttccaacaccagatttcgctccagttttcagaactacctttggtatttcttccaggccgtatcttag

SEQ ID NO: 184198 - DNA, 2337 bp, Artificial Sequence
  derived and/or modified sequence
atggcccacgtagaagacctgattattaagactatcatcagcgccgagcttgccattgctaccgcctgtaagacctttgtgccccataggtcttcgtgttttgagctatacgggttcgacgtgctgatcgattcaacgctgaaaccctggttgctggaggtgaacctcagccccagtcttgcctgcgacgcccctcttgacttaaaaatcaaagcctctatgatcagtgacatgttcacagtggttggctttgtgtgtcaagatcccgctcagcgggcaagcacacgtcctatctatcccacattcgaaagctcccggagaaacccattccagaaaccacaaagatgcagacctctcagtgcttcagatgctgagatgaagaacctggttgggtccgccagagagaagggacccggtaagctgggcggttctgttttaggtctttccatggaagaaattaaggtgctgcgccgagttaaggaggaaaacgataggaggggcggattcatcaggatctttcccaccagcgagacgtgggaaatttacggaagctaccttgaacacaagacatcaatgaattatatgctggccacccggctgttccaagaccgcatgaccgcggacggagcccctgagctgaagatcgagtcactcaattccaaggcaaagttgcatgctgccttatacgagcgaaaactcctttccctggaagtccgcaagcgtaggcggcgatcaagtcggctgagagccatgcggcctaagtacccagtgataacccagcccgcagaaatgaacgtcaaaactgaaacagagagcgaggaggaagaagaggtcgctttggacaatgaagacgaagaacaagaggcaagtcaggaggaaagtgccggatttctccgagagaatcaagcaaagtatactccttcactgacagccctggttgagaatacccctaaagagaactctatgaaggtgcgggagtggaataacaaaggagggcactgttgcaagctcgagactcaggaactggaacctaaatttaatctgatgcagatcttgcaggataatggaaacctgtctaaaatgcaggcacgaattgccttcagcgcttaccttcaacatgtgcagataagactgatgaaggattctgggggacagactttcagtgcctcgtgggctgccaaggaagacgagcagatggaactggtagtcaggttcctgaagagagcgtcaaacaatctccaacactcacttcgcatggtgctgccatcacgcagactggcacttctggaaaggcgccgaatcttagcacatcagctgggcgattttattattgtctataacaaagagaccgaacaaatggcagagaagaagtcaaaaaagaaggtcgaggaggaagaggaagatggggtaaacatggaaaacttccaagagttcattagacaggccagcgaggcagaactggaagaagtgcttactttctatacacaaaagaataaaagcgcgtccgtgtttttgggaactcatagtaagatctccaagaataacaacaactatagcgatagcggagcaaaaggtgaccacccagaaactattatggaagaagtgaaaataaaacctccaaagcagcagcaaactaccgaaatccatagtgacaagttatcccggttcacaactagcgcagaaaaggaagcaaaattggtctatagcaatagtagcagtggtccaaccgccacattacagaaaattcctaacacccatctgtcctcagtgacaactagcgacctttccccaggcccatgccatcactcgtcccttagtcagattcccagcgcaataccgtccatgcctcatcagcccactatactgttgaataccgttagtgccagcgctagcccctgtctgcacccgggagcccaaaacattccatctcccacaggattgccgagatgtcggagcgggagtcacacaattggtcccttctctagtttccaaagcgccgctcacatctatagtcagaagctgagtaggccatcctctgccaaggccggtagctgttacctgaacaaacatcattccggcatcgccaagacacagaaggaaggagaggacgcgtctctctactcgaagcgctacaatcagagtatggtgaccgccgaattgcagcgcctcgctgaaaagcaggctgccagacagtattccccatcctctcataccgatccctggaagtacgaccgatccatcaggatgtgcagccccctgaacatcctggaaccagagtttaagaaatacctgatgggaatttatagcccgcacagctcgaaaaaaaagaagaagtag

SEQ ID NO: 184199 - DNA, 4124 bp, Artificial Sequence
  derived and/or modified sequence
agctgagcgttatgagcgcctgcgcagtggctccgagcgggcggttgcttgttggttgttgtagtaaccggggaagcagccgtcggcggctgccctgagccttcctggggaaggaggagggaggtaggcgcagagcgcggtccacgcctgctcgccccgaaccatgggaagatgagacaggaatctgtgccatccaaattgcttgatccagtgaatctgctaggaaaggtctctgaggcccccgtctgctgactgcatgacaaaccctaaaggaaatgccaatcgtgatggcccgggacctggaggaaacagcatcatcctcagaggatgaggaggtcataagtcaagaggatcatccatgcatcatgtggactggaggctgcaggagaattccagttttggtattccatgccgacgctattcttacaaaggacaacaatattagagtaattggagaacgttatcatttgtcttataagattgtacgaacggacagtcgcctagtacgcagcattctgacagcccatggatttcatgaagttcacccaagcagcactgactataacctaatgtggacaggatcccacctgaagcccttcttactgcgcaccctctctgaagcacaaaaagttaatcactttcccaggtcttatgaacttacccggaaggaccgactgtacaaaaacattattcgaatgcagcatacacatggattcaaggcttttcacatcctcccccagaccttcctcctgccagctgagtacgcggaattttgtaattcatattcgaaggaccggggaccttggatagtaaaaccagtggcatcttcaagggggcggggcgtctacctgatcaacaatccaaaccagatctccctggaagagaacattttggtctcccgttacattaacaaccccctgctcatagatgatttcaagtttgacgtgcgcctctatgtgctcgtgacttcctatgatcctcttgtcatctatctctatgaagaaggattggctaggtttgcaactgtgcgatatgatcaaggagccaagaacattcggaaccagttcatgcatctgacaaactacagtgtcaacaagaaaagtggagattacgtcagttgtgacgatccagaagtggaggattatggaaacaaatggagcatgagtgctatgcttaggtacctgaaacaagaaggcagagatacaaccgcattgatggcccatgtagaagacctgatcattaagactataatctctgctgaactagctattgctactgcctgtaaaacctttgttcctcatcgcagcagttgttttgaactctatggctttgacgtgctcatagattctactctgaagccatggttgttggaagtgaatctctctccttctttggcctgtgatgcgcctctggacctaaagattaaagccagtatgatttcagatatgttcactgttgtaggatttgtgtgccaagatcctgcccagcgggcatcaactcggccaatttatcccacctttgagtcttccaggcgaaaccctttccagaaacctcagcgttgccgtccactctctgccagtgatgcggaaatgaaaaacctcgtgggctcagcccgggagaaagggccagggaagttgggtggttctgtgcttggtctgtcaatggaggagatcaaagttttacgaagggtgaaggaggagaatgatcggcgaggtggatttattcgcatatttcctacatctgagacatgggaaatatatgggtcctacctcgagcataagacctcaatgaactatatgctggcaacacgcctcttccaggacagaatgactgctgatggagcgccagaattgaagatagagagtctgaattcaaaggccaagctgcatgctgcactttacgagaggaagctcctgtctctggaggtgcgaaaacgtagacgacggagtagcagattgagggcaatgaggccaaaatacccagtgattacccaaccagctgaaatgaatgttaaaactgagacagagagtgaagaggaggaagaagtcgcattagataatgaagatgaagaacaggaggcttcccaggaggagtctgcaggatttcttagagaaaatcaagccaaatatacaccctcattgacagctttggtagaaaatacacccaaagaaaattccatgaaagttcgtgaatggaataataaaggtggacactgctgcaaacttgagactcaggagctagagcctaaatttaacctgatgcagattcttcaagataatggcaatcttagcaaaatgcaggcccgaatagcattctctgcctatctccagcatgttcaaattcgcctgatgaaagacagtggcggtcagacgttcagtgccagttgggctgccaaagaggatgaacagatggagctggttgttcgtttcctcaagcgagcatcaaataacctccagcattcactgaggatggtattacccagtcgacgattggcacttctggaacgcagaagaatcctggcccaccagctgggtgactttatcattgtatacaacaaggaaacagaacaaatggctgaaaagaaatcaaagaagaaagttgaggaagaagaggaagatggggtgaatatggaaaactttcaggagttcatcagacaagcaagtgaggctgaactggaggaggtgttgactttttatacccaaaagaacaagtctgctagtgtcttcctggggactcactctaaaatttctaagaacaacaacaattattctgatagtggggcaaaaggtgatcaccctgagactataatggaagaagtgaaaataaagccacctaaacagcaacagacgacagaaattcattctgataaattatctcgatttaccacttcagcagaaaaagaggcaaaattagtttatagcaattcctcctctggtcctactgctactctgcagaaaattcccaacacccatttgtcatctgttacaacctctgacctctctccagggccttgccaccattcttctttatctcaaattccttcagctatccccagcatgcctcaccagccaacaattttactgaacacagtctctgccagtgcttctccctgcctacatcccggggcacagaacatcccaagccctactggcctgccacgctgtcgatcaggaagtcacaccattggtcccttttcttccttccaaagtgctgcacacatctatagccagaaactgtctcgtccctcttcagcaaaggcagcaggatcgtgctatctaaacaagcatcattcaggaatagccaaaacacaaaaagagggagaagatgcttctttatatagcaaacggtacaaccaaagtatggttacagctgaacttcagcggctagctgagaagcaggcagcgagacagtattctccatccagccacatcaacctcctcacccaacaggtaacaaacctgaatttggcaactggcatcataaacagaagcagtgcttcagctcccccaaccctccgacccatcatcagtcctagtggcccgacatggtctacacagtcagacccccaagctcccgagaatcactccagctctcctggaagcaggagcctgcagacagggggatttgcctgggaaggagaagtagaaaacaacgtgtacagccaggctacaggggtggtcccccagcacaagtatcaccccacagcaggcagctatcagcttcaatttgccctgcagcaacttgaacaacaaaaacttcagtcccggcagctcctggaccagagtcgagcccggcaccaggcaatctttggcagccagacactacctaactccaatttatggacaatgaataatggtgcaggttgtagaatttccagtgccacagctagtggccagaagccaaccactctgccacaaaaagtggtaccacctccaagttcttgcgcctccctggttcccaaacccccacccaaccacgaacaagtgctcagaagggcaacatcccagaaagcttccaaagggtcctccgcggaagggcagctgaatggactccagagcagccttaaccctgcagcctttgtgcccatcaccagctctacagttaattctcacacagccctgtga

SEQ ID NO: 184200 - DNA, 4683 bp, Artificial Sequence
  derived and/or modified sequence
gggaagcagccgtcggcggctgccctgagccttcctggggaaggaggagggaggtaggcgcagagcgcggtccacgcctgctcgccccgaaccatgggaagatgagacaggaatctgtgccatccaaattgcttgatccagtgaatctgctaggaaaggtctctgaggcccccgtctgctgactgcatgacaaaccctaaaggaaatgccaatcgtgatggcccgggacctggaggaaacagcatcatcctcagaggatgaggaggtcataagtcaagaggatcatccatgcatcatgtggactggaggctgcaggagaattccagttttggtattccatgccgacgctattcttacaaaggacaacaatattagagtaattggagaacgttatcatttgtcttataagattgtacgaacggacagtcgcctagtacgcagcattctgacagcccatggatttcatgaagttcacccaagcagcactgactataacctaatgtggacaggatcccacctgaagcccttcttactgcgcaccctctctgaagcacaaaaagttaatcactttcccaggtcttatgaacttacccggaaggaccgactgtacaaaaacattattcgaatgcagcatacacatggattcaaggcttttcacatcctcccccagaccttcctcctgccagctgagtacgcggaattttgtaattcatattcgaaggaccggggaccttggatagtaaaaccagtggcatcttcaagggggcggggcgtctacctgatcaacaatccaaaccagatctccctggaagagaacattttggtctcccgttacattaacaaccccctgctcatagatgatttcaagtttgacgtgcgcctctatgtgctcgtgacttcctatgatcctcttgtcatctatctctatgaagaaggattggctaggtttgcaactgtgcgatatgatcaaggagccaagaacattcggaaccagttcatgcatctgacaaactacagtgtcaacaagaaaagtggagattacgtcagttgtgacgatccagaagtggaggattatggaaacaaatggagcatgagtgctatgcttaggtacctgaaacaagaaggcagagatacaaccgcattgatggcccatgtagaagacctgatcattaagactataatctctgctgaactagctattgctactgcctgtaaaacctttgttcctcatcgcagcagttgttttgaactctatggctttgacgtgctcatagattctactctgaagccatggttgttggaagtgaatctctctccttctttggcctgtgatgcgcctctggacctaaagattaaagccagtatgatttcagatatgttcactgttgtaggatttgtgtgccaagatcctgcccagcgggcatcaactcggccaatttatcccacctttgagtcttccaggcgaaaccctttccagaaacctcagcgttgccgtccactctctgccagtgatgcggaaatgaaaaacctcgtgggctcagcccgggagaaagggccagggaagttgggtggttctgtgcttggtctgtcaatggaggagatcaaagttttacgaagggtgaaggaggagaatgatcggcgaggtggatttattcgcatatttcctacatctgagacatgggaaatatatgggtcctacctcgagcataagacctcaatgaactatatgctggcaacacgcctcttccaggacagaatgactgctgatggagcgccagaattgaagatagagagtctgaattcaaaggccaagctgcatgctgcactttacgagaggaagctcctgtctctggaggtgcgaaaacgtagacgacggagtagcagattgagggcaatgaggccaaaatacccagtgattacccaaccagctgaaatgaatgttaaaactgagacagagagtgaagaggaggaagaagtcgcattagataatgaagatgaagaacaggaggcttcccaggaggagtctgcaggatttcttagagaaaatcaagccaaatatacaccctcattgacagctttggtagaaaatacacccaaagaaaattccatgaaagttcgtgaatggaataataaaggtggacactgctgcaaacttgagactcaggagctagagcctaaatttaacctgatgcagattcttcaagataatggcaatcttagcaaaatgcaggcccgaatagcattctctgcctatctccagcatgttcaaattcgcctgatgaaagacagtggcggtcagacgttcagtgccagttgggctgccaaagaggatgaacagatggagctggttgttcgtttcctcaagcgagcatcaaataacctccagcattcactgaggatggtattacccagtcgacgattggcacttctggaacgcagaagaatcctggcccaccagctgggtgactttatcattgtatacaacaaggaaacagaacaaatggctgaaaagaaatcaaagaagaaagttgaggaagaagaggaagatggggtgaatatggaaaactttcaggagttcatcagacaagcaagtgaggctgaactggaggaggtgttgactttttatacccaaaagaacaagtctgctagtgtcttcctggggactcactctaaaatttctaagaacaacaacaattattctgatagtggggcaaaaggtgatcaccctgagactataatggaagaagtgaaaataaagccacctaaacagcaacagacgacagaaattcattctgataaattatctcgatttaccacttcagcagaaaaagaggcaaaattagtttatagcaattcctcctctggtcctactgctactctgcagaaaattcccaacacccatttgtcatctgttacaacctctgacctctctccagggccttgccaccattcttctttatctcaaattccttcagctatccccagcatgcctcaccagccaacaattttactgaacacagtctctgccagtgcttctccctgcctacatcccggggcacagaacatcccaagccctactggcctgccacgctgtcgatcaggaagtcacaccattggtcccttttcttccttccaaagtgctgcacacatctatagccagaaactgtctcgtccctcttcagcaaaggcaggatcgtgctatctaaacaagcatcattcaggaatagccaaaacacaaaaagagggagaagatgcttctttatatagcaaacggtacaaccaaagtatggttacagctgaacttcagcggctagctgagaagcaggcagcgagacagtattctccatccagccacatcaacctcctcacccaacaggtaacaaacctgaatttggcaactggcatcataaacagaagcagtgcttcagctcccccaaccctccgacccatcatcagtcctagtggcccgacatggtctacacagtcagacccccaagctcccgagaatcactccagctctcctggaagcaggagcctgcagacagggggatttgcctgggaaggagaagtagaaaacaacgtgtacagccaggctacaggggtggtcccccagcacaagtatcaccccacagcaggcagctatcagcttcaatttgccctgcagcaacttgaacaacaaaaacttcagtcccggcagctcctggaccagagtcgagcccggcaccaggcaatctttggcagccagacactacctaactccaatttatggacaatgaataatggtgcaggttgtagaatttccagtgccacagctagtggccagaagccaaccactctgccacaaaaagtggtaccacctccaagttcttgcgcctccctggttcccaaacccccacccaaccacgaacaagtgctcagaagggcaacatcccagaaagcttccaaagggtcctccgcggaagggcagctgaatggactccagagcagccttaaccctgcagcctttgtgcccatcaccagctctacagatcctgctcacactaaaatatgaaccacaaacacacagagaaacaacctgttcaccactcctgggtgcatgattgagggtgaagcatccaccagcacttcaaggggtccatagtatttttttttttgctgcctcaaagtccccaaagccttcgagcagaagtggcagtagatggttgccaatcagccaatgcagactttcactgggacaacaagaaagcagatcttctgggttttgatggaacttggcagtggggacattcagctgatgcattatataccccgtcagagcacacttgtatcttttaccttccctttgccccatgcccccaaactgcttaggtcttctctgtccctttactgctgctgcacagagatgatataaaagaggctctttggctatttgcattttgcttcctcttcttttccagattacagtatgaagctttattttctttgtacaagcttaaaatttcaacatcatcatccgccaaagttgttcctcccttttcggaggatctagggggaaagaggagcattcatcacaagtttcctagagagaggagacaaatcggtgtgccattgacaacatgagccagggtaaaggcaccctttggaattactgatttcaaagattaataaagtaattctattttt

SEQ ID NO: 184201 - DNA, 2561 bp, Artificial Sequence
  derived and/or modified sequence
atgaaagaaatcaaagttttacgaagggtgaaggaggagaatgatcggcgaggtggatttattcgcatatttcctacatctgagacatgggaaatatatgggtcctacctcgagcataagacctcaatgaactatatgctggcaacacgcctcttccaggacaggggaaacccaagaagaagcttattgacaggaagaacacgaatgactgctgatggagcgccagaattgaagatagagagtctgaattcaaaggccaagctgcatgctgcactttacgagaggaagctcctgtctctggaggtgcgaaaacgtagacgacggagtagcagattgagggcaatgaggccaaaatacccagtgattacccaaccagctgaaatgaatgttaaaactgagacagagagtgaagaggaggaagaagtcgcattagataatgaagatgaagaacaggaggcttcccaggaggagtctgcaggatttcttagagaaaatcaagccaaatatacaccctcattgacagctttggtagaaaatacacccaaagaaaattccatgaaagttcgtgaatggaataataaaggtggacactgctgcaaacttgagactcaggagctagagcctaaatttaacctgatgcagattcttcaagataatggcaatcttagcaaaatgcaggcccgaatagcattctctgcctatctccagcatgttcaaattcgcctgatgaaagacagtggcggtcagacgttcagtgccagttgggctgccaaagaggatgaacagatggagctggttgttcgtttcctcaagcgagcatcaaataacctccagcattcactgaggatggtattacccagtcgacgattggcacttctggaacgcagaagaatcctggcccaccagctgggtgactttatcattgtatacaacaaggaaacagaacaaatggctgaaaagaaatcaaagaagaaagttgaggaagaagaggaagatggggtgaatatggaaaactttcaggagttcatcagacaagcaagtgaggctgaactggaggaggtgttgactttttatacccaaaagaacaagtctgctagtgtcttcctggggactcactctaaaatttctaagaacaacaacaattattctgatagtggggcaaaaggtgatcaccctgagactataatggaagaagtgaaaataaagccacctaaacagcaacagacgacagaaattcattctgataaattatctcgatttaccacttcagcagaaaaagaggcaaaattagtttatagcaattcctcctctggtcctactgctactctgcagaaaattcccaacacccatttgtcatctgttacaacctctgacctctctccagggccttgccaccattcttctttatctcaaattccttcagctatccccagcatgcctcaccagccaacaattttactgaacacagtctctgccagtgcttctccctgcctacatcccggggcacagaacatcccaagccctactggcctgccacgctgtcgatcaggaagtcacaccattggtcccttttcttccttccaaagtgctgcacacatctatagccagaaactgtctcgtccctcttcagcaaaggcaggatcgtgctatctaaacaagcatcattcaggaatagccaaaacacaaaaagagggagaagatgcttctttatatagcaaacggtacaaccaaagtatggttacagctgaacttcagcggctagctgagaagcaggcagcgagacagtattctccatccagccacatcaacctcctcacccaacaggtaacaaacctgaatttggcaactggcatcataaacagaagcagtgcttcagctcccccaaccctccgacccatcatcagtcctagtggcccgacatggtctacacagtcagacccccaagctcccgagaatcactccagctctcctggaagcaggagcctgcagacagggggatttgcctgggaaggagaagtagaaaacaacgtgtacagccaggctacaggggtggtcccccagcacaagtatcaccccacagcaggcagctatcagcttcaatttgccctgcagcaacttgaacaacaaaaacttcagtcccggcagctcctggaccagagtcgagcccggcaccaggcaatctttggcagccagacactacctaactccaatttatggacaatgaataatggtgcaggttgtagaatttccagtgccacagctagtggccagaagccaaccactctgccacaaaaagtggtaccacctccaagttcttgcgcctccctggttcccaaacccccacccaaccacgaacaagtgctcagaagggcaacatcccagaaagcttccaatacccgcttcagatcctcctttcaaaactatttgtggtatttcttccaagcagtcagctgaactgaggacgacagcctacaaacaactacatgcatctgaactgtctcttgtaaatgagcttttttcagagccagaatcatactctccaggaaatatggagaaagaaa

SEQ ID NO: 184202 - DNA, 3548 bp, Artificial Sequence
  derived and/or modified sequence
agctgagcgttatgagcgcctgcgcagtggctccgagcgggcggttgcttgttggttgttgtagtaaccggggaagcagccgtcggcggctgccctgagccttcctggggaaggaggagggaggtaggcgcagagcgcggtccacgcctgctcgccccgaaccatgggaagatgagacaggaatctgtgccatccaaattgcttgatccagtgaatctgctaggaaaggtctctgaggcccccgtctgctgactgcatgacaaaccctaaaggaaatgccaatcgtgatggcccgggacctggaggaaacagcatcatcctcagaggatgaggaggtcataagtcaagaggatcatccatgcatcatgtggactggaggctgcaggagaattccagttttggtattccatgccgacgctattcttacaaaggacaacaatattagagtaattggagaacgttatcatttgtcttataagattgtacgaacggacagtcgcctagtacgcagcattctgacagcccatggatttcatgaagttcacccaagcagcactgactataacctaatgtggacaggatcccacctgaagcccttcttactgcgcaccctctctgaagcacaaaaagttaatcactttcccaggtcttatgaacttacccggaaggaccgactgtacaaaaacattattcgaatgcagcatacacatggattcaaggcttttcacatcctcccccagaccttcctcctgccagctgagtacgcggaattttgtaattcatattcgaaggaccggggaccttggatagtaaaaccagtggcatcttcaagggggcggggcgtctacctgatcaacaatccaaaccagatctccctggaagagaacattttggtctcccgttacattaacaaccccctgctcatagatgatttcaagtttgacgtgcgcctctatgtgctcgtgacttcctatgatcctcttgtcatctatctctatgaagaaggattggctaggtttgcaactgtgcgatatgatcaaggagccaagaacattcggaaccagttcatgcatctgacaaactacagtgtcaacaagaaaagtggagattacgtcagttgtgacgatccagaagtggaggattatggaaacaaatggagcatgagtgctatgcttaggtacctgaaacaagaaggcagagatacaaccgcattgatggcccatgtagaagacctgatcattaagactataatctctgctgaactagctattgctactgcctgtaaaacctttgttcctcatcgcagcagttgttttgaactctatggctttgacgtgctcatagattctactctgaagccatggttgttggaagtgaatctctctccttctttggcctgtgatgcgcctctggacctaaagattaaagccagtatgatttcagatatgttcactgttgtaggatttgtgtgccaagatcctgcccagcgggcatcaactcggccaatttatcccacctttgagtcttccaggcgaaaccctttccagaaacctcagcgttgccgtccactctctgccagtgatgcggaaatgaaaaacctcgtgggctcagcccgggagaaagggccagggaagttgggtggttctgtgcttggtctgtcaatggaggagatcaaagttttacgaagggtgaaggaggagaatgatcggcgaggtggatttattcgcatatttcctacatctgagacatgggaaatatatgggtcctacctcgagcataagacctcaatgaactatatgctggcaacacgcctcttccaggacagaatgactgctgatggagcgccagaattgaagatagagagtctgaattcaaaggccaagctgcatgctgcactttacgagaggaagctcctgtctctggaggtgcgaaaacgtagacgacggagtagcagattgagggcaatgaggccaaaatacccagtgattacccaaccagctgaaatgaatgttaaaactgagacagagagtgaagaggaggaagaagtcgcattagataatgaagatgaagaacaggaggcttcccaggaggagtctgcaggatttcttagagaaaatcaagccaaatatacaccctcattgacagctttggtagaaaatacacccaaagaaaattccatgaaagttcgtgaatggaataataaaggtggacactgctgcaaacttgagactcaggagctagagcctaaatttaacctgatgcagattcttcaagataatggcaatcttagcaaaatgcaggcccgaatagcattctctgcctatctccagcatgttcaaattcgcctgatgaaagacagtggcggtcagacgttcagtgccagttgggctgccaaagaggatgaacagatggagctggttgttcgtttcctcaagcgagcatcaaataacctccagcattcactgaggatggtattacccagtcgacgattggcacttctggaacgcagaagaatcctggcccaccagctgggtgactttatcattgtatacaacaaggaaacagaacaaatggctgaaaagaaatcaaagaagaaagttgaggaagaagaggaagatggggtgaatatggaaaactttcaggagttcatcagacaagcaagtgaggctgaactggaggaggtgttgactttttatacccaaaagaacaagtctgctagtgtcttcctggggactcactctaaaatttctaagaacaacaacaattattctgatagtggggcaaaaggtgatcaccctgagactataatggaagaagtgaaaataaagccacctaaacagcaacagacgacagaaattcattctgataaattatctcgatttaccacttcagcagaaaaagaggcaaaattagtttatagcaattcctcctctggtcctactgctactctgcagaaaattcccaacacccatttgtcatctgttacaacctctgacctctctccagggccttgccaccattcttctttatctcaaattccttcagctatccccagcatgcctcaccagccaacaattttactgaacacagtctctgccagtgcttctccctgcctacatcccggggcacagaacatcccaagccctactggcctgccacgctgtcgatcaggaagtcacaccattggtcccttttcttccttccaaagtgctgcacacatctatagccagaaactgtctcgtccctcttcagcaaaggcaggatcgtgctatctaaacaagcatcattcaggaatagccaaaacacaaaaagagggagaagatgcttctttatatagcaaacggtacaaccaaagtatggttacagctgaacttcagcggctagctgagaagcaggcagcgagacagtattctccatccagccacactgatccatggaagtatgataggagtataaggatgtgttctccactgaacattttagaacctgaattcaagaaatacttgatgggtatctattcacctcactcctccaaaaaaaaaaaaaag

SEQ ID NO: 184203 - protein, 1781 aa, Artificial Sequence
  derived and/or modified sequence
MTTYRAIPSDGVDLAASCGARVGDVLPGPHTGDYAPLGFWAQNGSMSQPLGESPATATATATATTRPSPTTPAMPKMGVRARVADWPPKREALREHSNPSPSQDTDGTKATKMAHSMRSIQNGQPPTSTPASSGSKAFHRLSRRRSKDVEFQDGWPRSPGRAFLPLRHRSSSEITLSECDAEDAGEPRGARHTGALPLFREYGSTSSIDVQGMPEQSFFDILNEFRSEQPDARGCQALTELLRADPGPHLMGGGGGAKGDSHNGQPAKDSLLPLQPTKEKEKARKKPARGLGGGDTVDSSIFRKLRSSKPEGEAGRSPGEADEGRSPPEASRPWVCQKSFAHFDVQSMLFDLNEAAANRVSVSQRRNTTTGASAASAASAMASLTASRAHSLGGLDPAFTSTEDLNCKENLEQDLGDDNSNDLLLSCPHFRNEIGGECERNVSFSRASVGSPSSGEGHLAEPALSAYRTNASISVLEVPKEQQRTQSRPRQYSIEHVDLGARYYQDYFVGKEHANYFGVDEKLGPVAVSIKREKLEDHKEHGPQYQYRIIFRTRELITLRGSILEDATPTATKHGTGRGLPLKDALEYVIPELNIHCLRLALNTPKVTEQLLKLDEQGLCRKHKVGILYCKAGQSSEEEMYNNEEAGPAFEEFLSLIGEKVCLKGFTKYAAQLDVKTDSTGTHSLYTMYQDYEIMFHVSTLLPYTPNNRQQLLRKRHIGNDIVTIIFQEPGALPFTPKNIRSHFQHVFIIVRVHNPCTDNVCYSMAVTRSKDAPPFGPPIPSGTTFRKSDVFRDFLLAKVINAENAAHKSDKFHTMATRTRQEYLKDLAENCVSNTPIDSTGKFNLISLTSKKKEKTKARAGAEQHSAGAIAWRVVAQDYAQGVEIDCILGISNEFVVLLDLRTKEVVFNCYCGDVIGWTPDSSTLKIFYGRGDHIFLQATEGSVEDIREIVQRLKVMTSGWETVDMTLRRNGLGQLGFHVKYDGTVAEVEDYGFAWQAGLRQGSRLVEICKVAVVTLTHDQMIDLLRTSVTVKVVIIPPFEDGTPRRGWPETYDMNTSEPKTEQESITPGGRPPYRSNAPWQWSGPASHNSLPASKWATPTTPGHAQSLSRPLKQTPIVPFRESQPLHSKRPVSFPETPYTVSPAGADRVPPYRQPSGSFSTPGSATYVRYKPSPERYTAAPHPLLSLDPHFSHDGTSSGDSSSGGLTSQESTMERQKPEPLWHVPAQARLSAIAGSSGNKHPSRQDAAGKDSPNRHSKGEPQYSSHSSSNTLSSNASSSHSDDRWFDPLDPLEPEQDPLSKGGSSDSGIDTTLYTSSPSCMSLAKAPRPAKPHKPPGSMGLCGGGREAAGRSHHADRRREVSPAPAVAGQSKGYRPKLYSSGSSTPTGLAGGSRDPPRQPSDMGSRVGYPAQVYKTASAETPRPSQLAQPSPFQLSASVPKSFFSKQPVRNKHPTGWKRTEEPPPRPLPFSDPKKQVDTNTKNVFGQPRLRASLRDLRSPRKNYKSTIEDDLKKLIIMDNLGPEQERDTGQSPQKGLQRTLSDESLCSGRREPSFASPAGLEPGLPSDVLFTSTCAFPSSTLPARRQHQHPHPPVGPGATPAAGSGFPEKKSTISASELSLADGRDRPLRRLDPGLMPLPDTAAGLEWSSLVNAAKAYEVQRAVSLFSLNDPALSPDIPPAHSPVHSHLSLERGPPTPRTTPTMSEEPPLDLTGKVYQLEVMLKQLHTDLQKEKQDKVVLQSEVASLRQNNQRLQEESQAASEQLRKFAEIFCREKKEL

SEQ ID NO: 184204 - DNA, 5346 bp, Artificial Sequence
  derived and/or modified sequence
atgaccacctacagagccatccccagcgacggcgtggacctggccgccagctgcggcgccagagtgggcgacgtgctgcccggcccccacaccggcgactacgcccccctgggcttctgggcccagaacggcagcatgagccagcccctgggcgagagccccgccaccgccaccgccaccgccaccgccaccaccagacccagccccaccacccccgccatgcccaagatgggcgtgagagccagagtggccgactggccccccaagagagaggccctgagagagcacagcaaccccagccccagccaggacaccgacggcaccaaggccaccaagatggcccacagcatgagaagcatccagaacggccagccccccaccagcacccccgccagcagcggcagcaaggccttccacagactgagcagaagaagaagcaaggacgtggagttccaggacggctggcccagaagccccggcagagccttcctgcccctgagacacagaagcagcagcgagatcaccctgagcgagtgcgacgccgaggacgccggcgagcccagaggcgccagacacaccggcgccctgcccctgttcagagagtacggcagcaccagcagcatcgacgtgcagggcatgcccgagcagagcttcttcgacatcctgaacgagttcagaagcgagcagcccgacgccagaggctgccaggccctgaccgagctgctgagagccgaccccggcccccacctgatgggcggcggcggcggcgccaagggcgacagccacaacggccagcccgccaaggacagcctgctgcccctgcagcccaccaaggagaaggagaaggccagaaagaagcccgccagaggcctgggcggcggcgacaccgtggacagcagcatcttcagaaagctgagaagcagcaagcccgagggcgaggccggcagaagccccggcgaggccgacgagggcagaagcccccccgaggccagcagaccctgggtgtgccagaagagcttcgcccacttcgacgtgcagagcatgctgttcgacctgaacgaggccgccgccaacagagtgagcgtgagccagagaagaaacaccaccaccggcgccagcgccgccagcgccgccagcgccatggccagcctgaccgccagcagagcccacagcctgggcggcctggaccccgccttcaccagcaccgaggacctgaactgcaaggagaacctggagcaggacctgggcgacgacaacagcaacgacctgctgctgagctgcccccacttcagaaacgagatcggcggcgagtgcgagagaaacgtgagcttcagcagagccagcgtgggcagccccagcagcggcgagggccacctggccgagcccgccctgagcgcctacagaaccaacgccagcatcagcgtgctggaggtgcccaaggagcagcagagaacccagagcagacccagacagtacagcatcgagcacgtggacctgggcgccagatactaccaggactacttcgtgggcaaggagcacgccaactacttcggcgtggacgagaagctgggccccgtggccgtgagcatcaagagagagaagctggaggaccacaaggagcacggcccccagtaccagtacagaatcatcttcagaaccagagagctgatcaccctgagaggcagcatcctggaggacgccacccccaccgccaccaagcacggcaccggcagaggcctgcccctgaaggacgccctggagtacgtgatccccgagctgaacatccactgcctgagactggccctgaacacccccaaggtgaccgagcagctgctgaagctggacgagcagggcctgtgcagaaagcacaaggtgggcatcctgtactgcaaggccggccagagcagcgaggaggagatgtacaacaacgaggaggccggccccgccttcgaggagttcctgagcctgatcggcgagaaggtgtgcctgaagggcttcaccaagtacgccgcccagctggacgtgaagaccgacagcaccggcacccacagcctgtacaccatgtaccaggactacgagatcatgttccacgtgagcaccctgctgccctacacccccaacaacagacagcagctgctgagaaagagacacatcggcaacgacatcgtgaccatcatcttccaggagcccggcgccctgcccttcacccccaagaacatcagaagccacttccagcacgtgttcatcatcgtgagagtgcacaacccctgcaccgacaacgtgtgctacagcatggccgtgaccagaagcaaggacgccccccccttcggcccccccatccccagcggcaccaccttcagaaagagcgacgtgttcagagacttcctgctggccaaggtgatcaacgccgagaacgccgcccacaagagcgacaagttccacaccatggccaccagaaccagacaggagtacctgaaggacctggccgagaactgcgtgagcaacacccccatcgacagcaccggcaagttcaacctgatcagcctgaccagcaagaagaaggagaagaccaaggccagagccggcgccgagcagcacagcgccggcgccatcgcctggagagtggtggcccaggactacgcccagggcgtggagatcgactgcatcctgggcatcagcaacgagttcgtggtgctgctggacctgagaaccaaggaggtggtgttcaactgctactgcggcgacgtgatcggctggacccccgacagcagcaccctgaagatcttctacggcagaggcgaccacatcttcctgcaggccaccgagggcagcgtggaggacatcagagagatcgtgcagagactgaaggtgatgaccagcggctgggagaccgtggacatgaccctgagaagaaacggcctgggccagctgggcttccacgtgaagtacgacggcaccgtggccgaggtggaggactacggcttcgcctggcaggccggcctgagacagggcagcagactggtggagatctgcaaggtggccgtggtgaccctgacccacgaccagatgatcgacctgctgagaaccagcgtgaccgtgaaggtggtgatcatcccccccttcgaggacggcacccccagaagaggctggcccgagacctacgacatgaacaccagcgagcccaagaccgagcaggagagcatcacccccggcggcagacccccctacagaagcaacgccccctggcagtggagcggccccgccagccacaacagcctgcccgccagcaagtgggccacccccaccacccccggccacgcccagagcctgagcagacccctgaagcagacccccatcgtgcccttcagagagagccagcccctgcacagcaagagacccgtgagcttccccgagaccccctacaccgtgagccccgccggcgccgacagagtgcccccctacagacagcccagcggcagcttcagcacccccggcagcgccacctacgtgagatacaagcccagccccgagagatacaccgccgccccccaccccctgctgagcctggacccccacttcagccacgacggcaccagcagcggcgacagcagcagcggcggcctgaccagccaggagagcaccatggagagacagaagcccgagcccctgtggcacgtgcccgcccaggccagactgagcgccatcgccggcagcagcggcaacaagcaccccagcagacaggacgccgccggcaaggacagccccaacagacacagcaagggcgagccccagtacagcagccacagcagcagcaacaccctgagcagcaacgccagcagcagccacagcgacgacagatggttcgaccccctggaccccctggagcccgagcaggaccccctgagcaagggcggcagcagcgacagcggcatcgacaccaccctgtacaccagcagccccagctgcatgagcctggccaaggcccccagacccgccaagccccacaagccccccggcagcatgggcctgtgcggcggcggcagagaggccgccggcagaagccaccacgccgacagaagaagagaggtgagccccgcccccgccgtggccggccagagcaagggctacagacccaagctgtacagcagcggcagcagcacccccaccggcctggccggcggcagcagagacccccccagacagcccagcgacatgggcagcagagtgggctaccccgcccaggtgtacaagaccgccagcgccgagacccccagacccagccagctggcccagcccagccccttccagctgagcgccagcgtgcccaagagcttcttcagcaagcagcccgtgagaaacaagcaccccaccggctggaagagaaccgaggagcccccccccagacccctgcccttcagcgaccccaagaagcaggtggacaccaacaccaagaacgtgttcggccagcccagactgagagccagcctgagagacctgagaagccccagaaagaactacaagagcaccatcgaggacgacctgaagaagctgatcatcatggacaacctgggccccgagcaggagagagacaccggccagagcccccagaagggcctgcagagaaccctgagcgacgagagcctgtgcagcggcagaagagagcccagcttcgccagccccgccggcctggagcccggcctgcccagcgacgtgctgttcaccagcacctgcgccttccccagcagcaccctgcccgccagaagacagcaccagcacccccacccccccgtgggccccggcgccacccccgccgccggcagcggcttccccgagaagaagagcaccatcagcgccagcgagctgagcctggccgacggcagagacagacccctgagaagactggaccccggcctgatgcccctgcccgacaccgccgccggcctggagtggagcagcctggtgaacgccgccaaggcctacgaggtgcagagagccgtgagcctgttcagcctgaacgaccccgccctgagccccgacatcccccccgcccacagccccgtgcacagccacctgagcctggagagaggcccccccacccccagaaccacccccaccatgagcgaggagccccccctggacctgaccggcaaggtgtaccagctggaggtgatgctgaagcagctgcacaccgacctgcagaaggagaagcaggacaaggtggtgctgcagagcgaggtggccagcctgagacagaacaaccagagactgcaggaggagagccaggccgccagcgagcagctgagaaagttcgccgagatcttctgcagagagaagaaggagctgtag

SEQ ID NO: 184205 - DNA, 5346 bp, Artificial Sequence
  derived and/or modified sequence
atgaccacctatcgcgcaatcccatcggatggggtcgatctggctgcatcttgtggagctcgggttggggacgttttacccggacctcacacaggcgactacgcacccctgggattttgggcccagaacggctctatgtctcagcccttgggcgaaagcccagccaccgccacagcaactgcaactgccaccaccaggccgtctcccacgactcctgcaatgccgaagatgggcgtgcgggcgagagtggccgattggccgccaaagagagaggccctgcgtgagcactctaatccttcgccaagtcaggatactgacggtacgaaagctacgaaaatggcccactcaatgaggtctatccagaatggacagccccccaccagcacacctgccagtagcggatccaaagcattccatagattgagcaggaggcgatccaaggacgtcgagtttcaggacggctggccaaggtcacctggtagggcctttctgcctctgcggcatagaagtagttccgagataacactgtctgagtgcgacgcggaggacgctggggagccacgcggagctaggcacacaggggccctacccttattcagggagtacgggtcaacgtcttccatcgacgtgcagggaatgcccgaacagtcattttttgacatcctaaacgagttccgtagcgagcaacctgacgcgcgtggttgtcaggctctaaccgaactgctgcgggccgatcctggcccacacctgatggggggagggggcggcgcaaaaggagattcccacaacgggcaacctgccaaggatagcctcttgccgctgcaacccaccaaggagaaagagaaggccagaaaaaagcctgcacggggcctgggaggcggcgatacggtagacagtagtatcttccggaaattgcgcagttccaaaccggaaggagaggccggccgcagcccgggcgaggcggacgagggcaggagcccacccgaagccagtcgaccctgggtatgtcagaagtcatttgcccactttgacgtccagtccatgctattcgacttgaacgaggccgctgccaatcgagtgtcagtgtcacagaggaggaacaccaccacaggcgcctccgccgcaagcgccgcgtcagcaatggcgagtctgaccgctagtagggcccactctctggggggcttagatccagcctttacaagtaccgaagatctcaactgtaaggaaaatttggaacaagatctgggggatgataactccaacgatctgttattatcctgtccacatttccgaaatgagattgggggcgagtgcgaaaggaacgtgtctttttctagagcttctgtgggcagtccatcatctggggagggacacctggccgagccagcactgagcgcctaccgtaccaatgcatcgatcagcgtgctggaggtaccaaaggaacagcaacggacccaaagccgtcccagacagtatagcatagaacatgttgacctgggcgcgcggtactaccaagattactttgtcggcaaggagcacgcaaactattttggtgttgacgaaaagttaggacccgtcgcggttagtattaaacgggaaaaactggaggatcacaaggagcatggcccccaatatcagtacagaatcatatttcggacccgggagttaataaccctgagaggaagcatactcgaggacgccactcccactgccaccaaacacggcacaggtcgcggactcccactcaaagacgctctcgaatacgtaatccccgaactgaatatccattgcctccgactggccctcaacacccccaaagtcaccgagcagcttttaaagttagatgagcagggactgtgtcgaaaacacaaggtggggattctgtactgcaaagctgggcagagttccgaggaagagatgtataacaatgaggaagcgggacctgcatttgaggaattcctctcactgattggcgagaaggtctgcctgaaaggtttcacaaaatacgctgctcaactggatgtgaagacagactctaccggaacacattcactgtatactatgtaccaggattatgagatcatgtttcatgtgtccaccctgctgccctatactcctaacaaccgtcaacagctgctccgcaaacgtcacatcggcaatgatatagtcaccatcatcttccaggagccaggggcgctgccctttaccccaaagaacatcagatcccattttcagcatgtcttcattatcgtccgcgtgcataacccatgcacagataatgtctgctactccatggctgtcaccaggtcgaaagacgcccccccattcggacctcccatcccctctgggacaactttccggaagtctgacgtttttagagattttctgttggccaaggtgataaatgcggaaaatgcggcccataagtccgacaaatttcacacaatggccacacgcactcggcaagaatacctgaaagacttagccgaaaattgtgtctccaatactcccatcgactccactggtaaatttaatctgatctcactgaccagcaaaaaaaaggaaaaaacaaaggcacgagcaggggcggagcagcactccgcgggcgcaattgcctggcgagtcgttgcccaggactacgcccagggagtggagatcgactgtatactaggtatttctaatgagttcgtggtgctgctcgacctccgtaccaaggaagtcgtgttcaactgttattgtggtgacgtgatcggttggactccagattcttccacactgaaaattttttatggccgcggggaccacattttcttgcaggcaaccgagggcagcgtggaagatatccgcgaaattgtccagcggctcaaggtgatgaccagcggctgggaaactgtcgatatgaccctgagaaggaatggtctcggacaactgggcttccacgttaagtacgacggcactgttgctgaggttgaggattatggttttgcctggcaggctggccttcggcagggcagccggcttgtcgagatctgcaaggtggccgtggttaccctgacacacgatcagatgatcgacctgctcaggactagtgtgacagtgaaagtagttattatacccccattcgaggatgggacccctcgccgcggctggccagagacatacgacatgaatacaagcgaacccaaaactgagcaggaatctatcactcccggaggacgacccccctacaggtctaatgccccgtggcagtggtcaggccccgcaagccataatagcctgcctgcttcaaaatgggccacccctacaacaccgggacacgcgcagagtctcagccgcccactcaagcagacacccattgtgcccttccgtgagtcccagccactacactccaagcgccccgtgtccttcccagaaactccatacaccgtgtctcctgcaggggctgatagggtccccccctatagacaacccagcggaagtttctctaccccaggtagcgccacctacgtgcggtacaaaccctctcccgagcgctacacagccgcgccccatcccctgctgagtctggaccctcacttctcccatgatggtacttcaagtggtgactcatcctccggcggactgacgagccaagaatcaactatggagcgacagaaacctgaaccactgtggcacgtgcccgcgcaagcccgcctcagcgccattgccggctcttcggggaataaacatccatccagacaggacgcggctggcaaggacagccctaataggcactctaagggagagcctcagtactctagccactcttcttcgaataccttatcatctaacgcctccagctcccattcagacgatcgatggttcgaccctctcgatccactggaacctgagcaggatcccctctcaaaaggcggctcgagcgactcaggaattgacactaccctgtacacttcttcaccctcatgtatgtccctggctaaagccccaagacccgccaagccacacaaaccccctgggagcatggggctttgtggaggaggtagagaagcggcagggcgaagtcatcacgctgacaggcgacgggaagttagtcccgccccagccgttgccggccaatctaagggctatcgccccaagctttatagtagcgggagtagtactccaactggtcttgcaggcggcagcagagatcctcctaggcaaccctctgacatgggatctcgtgtgggctatccggctcaggtgtataaaaccgcttctgccgagacaccccgcccaagtcagttggcccagccatctccatttcagctttccgcttccgtgccaaagtcatttttctcaaaacaaccagtgcggaataaacacccaacaggatggaaacggacggaggaaccgcctcctcggccactgcccttcagtgatccgaagaaacaggtcgacactaatacaaaaaatgtttttggtcagcccagactcagagcttcacttagggatctgcggtccccaaggaaaaactataagtctacgattgaagacgacctgaagaagctgatcattatggataaccttgggcctgaacaagagcgggataccgggcaaagtcctcaaaagggcctgcagagaaccttgtctgacgagagcttgtgttccggcaggagagagccctctttcgcatctccggcaggtctcgagcccggccttccatcagacgtgctgttcacatcaacatgcgcgttcccaagctcgactctgcccgcgagacgccaacatcagcatccccacccgcccgtagggccaggcgctaccccagccgccggcagtggatttccagagaagaagagcaccatctctgctagcgagctctcactggcggacggtcgggacaggccactgaggcgcttagaccccgggcttatgcccctgcccgacaccgccgcagggctggagtggtcctccctggtgaatgcagcgaaggcatacgaagttcagcgcgctgtttccctgttttcactcaacgacccggccctctccccagatatacccccagcccattctcctgtgcactctcatctgtcgcttgagcgcggtcctcctacccccaggactaccccaaccatgagcgaagagccccccctggacctgaccgggaaggtgtaccagttggaagtcatgctaaagcaactgcataccgatctgcagaaggagaagcaggataaggtggttctacaaagcgaagtggctagccttcgtcagaataaccagcggctgcaggaggagtctcaagccgcatccgagcagcttcgaaagtttgccgagatcttctgtagagagaaaaaagaactgtag

SEQ ID NO: 184206 - DNA, 5346 bp, Artificial Sequence
  derived and/or modified sequence
atgaccacctaccgggccatccccagtgatggagtggacctggccgccagctgtggggcccgggtgggagatgtgctgcccggcccccacactggagactatgcccccctgggcttctgggcccagaatggctccatgagccagcccctgggggagagccctgccacagccacagccacagccacagccaccacccggcccagccccaccaccccagccatgcccaagatgggcgtgcgggcccgggtggccgactggccacccaagcgggaggccctgcgggagcacagcaaccccagccccagccaggacacagatggcaccaaggccaccaagatggcccacagcatgaggagcatccagaatggccagccccccaccagcaccccagccagcagcggcagcaaggccttccaccggctgagcagaagaagaagcaaggatgtggagttccaggacggctggcccaggagccctggccgggccttcctgcccctgcggcacaggagcagcagcgagatcaccctgtctgaatgtgatgctgaagatgctggggagcccaggggggcccggcacactggagccctgcccctcttccgggagtatggcagcaccagcagcattgatgtgcagggcatgcctgagcagagcttctttgacatcctgaatgagttccgctctgagcagccagatgcccggggctgccaggccctgacagagctgctgcgggctgaccccggcccccacctgatgggcggcggcggcggggccaagggggacagccacaacggccagcctgccaaggacagcctgctgcccctgcagcccaccaaggagaaggagaaggccaggaagaagccagcccggggcctgggcggcggggacacagtggacagcagcatcttcaggaagctgcggagcagcaagccagagggggaggccggccgcagccctggagaggctgatgagggccgcagccccccagaggccagccggccctgggtgtgccagaagagctttgcccactttgatgtgcagagcatgctgtttgacctgaatgaagctgctgccaacagagtgtctgtgtcccagaggaggaacaccaccaccggggccagcgctgccagcgctgccagcgccatggccagcctgacagccagccgggcccacagcctgggcggcctggaccctgccttcaccagcacagaggacctgaactgcaaggagaacctggagcaggacctgggagatgacaacagcaatgacctgctgctgagctgcccccacttcagaaatgaaattggaggagaatgtgaaagaaatgtgtccttcagccgggcctctgtgggcagccccagcagcggggagggccacctggccgagcccgccctgagcgcctaccgcaccaatgccagcatctctgtgctggaggtgcccaaggagcagcagaggacccagagccggccccggcagtacagcattgagcacgtggacctgggcgcccgctactaccaggactactttgtgggcaaggagcacgccaactactttggagtggatgagaagctgggccctgtggccgtgtccatcaagcgggagaagctggaggaccacaaggagcacggcccccagtaccagtaccgcatcatcttccgcacccgggagctgatcaccctgcggggcagcatcctggaggatgccacccccacagccaccaagcacggcaccggccggggcctgcccctgaaggatgccctggagtatgtgattcctgagctgaacatccactgcctgcggctggccctgaacacccccaaggtgacagagcagctgctgaagctggatgagcagggcctgtgcaggaagcacaaggtgggcatcctgtactgcaaggccggccagagcagcgaggaggagatgtacaacaatgaggaggccggccctgcctttgaggagttcctgagcctgattggagagaaggtgtgcctgaagggcttcaccaagtatgctgcccagctggatgtgaagacagacagcacaggcacccacagcctgtacaccatgtaccaggactatgagatcatgtttcatgtgtccaccctgctgccctacacccccaacaaccggcagcagctgctgaggaagaggcacatcggaaatgacatcgtgaccatcatcttccaggagcccggggccctgcccttcacccccaagaacatccgcagccacttccagcacgtgttcatcatcgtgcgggtgcacaacccctgcacagacaacgtgtgctacagcatggctgtgaccaggagcaaggatgccccacccttcggcccccccatccccagcggcaccaccttcaggaagagtgatgtgttccgggacttcctgctggccaaggtgatcaatgcagaaaatgctgcccacaagagtgacaagttccacaccatggccaccaggacccggcaggagtacctgaaggacctggccgagaactgtgtgagcaacacccccatcgacagcacaggcaagttcaacctgatcagcctgaccagcaagaagaaggagaagaccaaggcccgggccggggctgagcagcacagcgctggggccatcgcctggagggtggtggcccaggactatgcccagggcgtggagattgactgcatcctgggcatcagcaatgaatttgtggtgctgctggacctgcggaccaaggaggtggtgttcaactgctactgtggagatgtgattggctggaccccagacagcagcaccctgaagatcttctacggccgcggggaccacatcttcctgcaggccacagagggctctgtggaggacatccgggagatcgtgcagaggctgaaggtgatgaccagcggctgggagaccgtggacatgaccctgcggagaaatggcctgggccagctgggcttccacgtgaagtatgatggcaccgtggccgaggtggaggactatggctttgcctggcaggccggcctgcggcagggcagccggctggtggagatctgcaaggtggccgtggtgaccctgacccatgaccagatgattgacctgctgcggacctctgtgacagtgaaggtggtgatcatccccccatttgaagatggcaccccaagaagaggctggccagagacctatgacatgaacaccagcgagcccaagacagagcaggagagcatcacccctgggggccggcccccctaccgcagcaatgccccctggcagtggagcggccctgccagccacaacagcctgcctgccagcaagtgggccacccccaccaccccaggccacgcccagagcctgagccggcccctgaagcagacccccatcgtgcccttccgggagagccagcccctgcacagcaagaggcctgtgtccttccctgagaccccctacacagtgtccccagctggagctgacagagtgcccccctaccggcagcccagcggcagcttcagcaccccaggcagcgccacctacgtgcgctacaagcccagccctgagcgctacacagctgccccccaccccctgctgagcctggacccccacttcagccatgatggcaccagcagcggggacagcagcagcggcggcctgaccagccaggagagcaccatggagcggcagaagccagagcccctgtggcacgtgcctgcccaggcccggctgagcgccatcgccggcagcagcggcaacaagcaccccagccggcaggatgctgctgggaaggacagccccaacagacacagcaagggggagccccagtacagcagccacagcagcagcaacaccctgagcagcaatgccagcagcagccacagtgatgaccgctggtttgaccccctggaccccctggagcctgagcaggaccccctgagcaaaggaggcagcagtgacagcggcatcgacaccaccctgtacaccagcagccccagctgcatgagcctggccaaggcccccaggcctgccaagccccacaagcccccaggctccatgggcctgtgtggcggcggccgggaggccgccggccgcagccaccacgccgacagaagaagagaggtgtccccagccccagctgtggccggccagagcaagggctaccggcccaagctgtacagcagcggcagcagcacccccaccggcctggccggcggcagccgggaccccccccggcagcccagcgacatgggcagccgggtgggctacccagcccaggtgtacaagacagccagcgctgagaccccccggcccagccagctggcccagcccagccccttccagctgagcgcctctgtgcccaagagcttcttcagcaagcagcctgtgaggaacaagcaccccaccggctggaagaggacagaggagcccccaccccggcccctgcccttcagtgaccccaagaagcaggtggacaccaacaccaagaatgtgtttggccagccccggctgcgggccagcctgcgggacctgcggagccccaggaagaactacaagagcaccattgaagatgacctgaagaagctgatcatcatggacaacctgggccctgagcaggagcgggacaccggccagagcccccagaagggcctgcagaggaccctgagtgatgagagcctgtgcagcggccggcgggagcccagctttgccagccctgctggcctggagcccggcctgcccagtgatgtgctcttcaccagcacctgtgccttccccagcagcaccctgcctgcccggcggcagcaccagcacccccacccccctgtgggccctggggccaccccagctgctggcagcggcttccctgagaagaagagcaccatcagcgccagcgagctgagcctggctgatggccgggaccggcccctgcggcggctggaccccggcctgatgcccctgcctgacacagctgctggcctggagtggagcagcctggtgaatgctgccaaggcctatgaggtgcagagagctgtgtccctcttcagcctgaatgaccctgccctgagcccagacatccccccagcccacagccctgtgcacagccacctgagcctggagcggggcccccccacccccaggaccacccccaccatgtctgaggagccccccctggacctgaccgggaaggtgtaccagctggaggtgatgctgaagcagctgcacacagacctgcagaaggagaagcaggacaaggtggtgctgcagagcgaggtggccagcctgcggcagaacaaccagaggctgcaggaggagagccaggccgccagcgagcagctgaggaagtttgctgagatcttctgccgggagaagaaggagctgtag

SEQ ID NO: 184207 - DNA, 5346 bp, Artificial Sequence
  derived and/or modified sequence
atgaccacctaccgggccatccccagcgacggcgtggacctggccgcttcctgtggcgctcgggtgggtgacgtgttaccaggcccacacactggggactacgctcctctcggcttctgggctcagaacggttctatgtcacagcccctaggcgagagtccggcaaccgcaactgccacggcaacagcaacaacacgcccaagcccaaccactcctgcgatgccgaaaatgggggttcgtgctagggtcgctgactggccccccaaacgggaagctttgcgcgaacacagcaacccctccccatctcaagacacagacggtaccaaagctactaaaatggcacattcaatgaggagcatccagaacgggcagccccccacttctacaccggcttcttccggttccaaggcctttcaccgtctgagtagacgacgcagcaaggacgtggagttccaggacgggtggccgaggtctcctggccgggccttcctgccactgagacacagatcaagctcggagattacactcagtgagtgtgacgccgaagatgccggtgaacctcgaggcgcaagacacaccggagcattaccccttttccgcgagtatgggtctacaagtagcattgacgtgcagggtatgcctgagcaaagtttcttcgatatccttaacgaattcaggtctgagcaacctgatgctcggggttgccaggccctgaccgagctcctccgcgcagatcccggcccacacttgatgggaggaggcggcggggcaaagggtgactcccataatggccagccggccaaggattctctgctccctttacagcccacaaaggagaaagagaaggcacggaaaaaaccagccagaggcctcggaggcggggataccgtcgatagttccatcttcagaaaactgcgcagctctaagcctgagggggaagctggaaggtctccgggggaagcagacgaagggaggtctccgcccgaagcttcccggccatgggtgtgtcaaaaaagcttcgctcatttcgacgttcagagtatgctgtttgatttaaacgaggcggccgcaaacagggtgtcagtgtctcagaggcgaaacaccacaacaggtgcttcagctgctagtgccgcgtccgcaatggcttctctgacagcctctagagctcacagtctcgggggtctggaccctgctttcacgagtacagaggacctgaattgtaaagaaaatctcgagcaggatctgggagatgacaatagcaacgatctcctgctctcatgcccacacttccgtaacgagatagggggagaatgtgaacggaatgtgtcattcagtagggcatcagtggggtcacctagtagcggtgaggggcacctagctgaacctgcgcttagtgcctaccgcacaaacgcctccatttcagttctcgaagtgcccaaagaacaacagaggacgcaaagccggccacgacaatacagtatagagcacgtggatctgggggcacgctactaccaggactattttgtcgggaaggagcatgcaaactattttggcgtagatgagaaacttggtcctgtcgccgtgtccatcaagcgggagaagctggaggatcataaggagcacgggccccagtatcagtacagaataatctttagaactagggagctcattacacttaggggttccatcctggaggacgcaacccccaccgctacaaagcatggcaccggacgcggattaccactgaaagacgccctcgaatacgtaatcccagagcttaatatccactgccttcgattggcgctgaatactcctaaggtgaccgaacagctgctcaaacttgacgaacagggtttgtgtcgaaagcacaaggtcggtattctttattgcaaggccgggcagtccagtgaggaggagatgtataataatgaagaagccggccccgcatttgaagagttcctctctcttattggtgagaaggtgtgtcttaaagggttcacaaagtacgctgcgcaattagacgtgaaaactgactcaaccggcactcactccctgtacacaatgtaccaggactatgagatcatgtttcacgtaagtacactgctgccatacactcctaacaataggcagcagctgctcaggaagcgccatattgggaacgatattgtgacaataatttttcaggagcccggggcgctgccatttactcctaaaaatatcagaagccattttcagcatgtcttcatcatcgttagagtgcataatccttgcactgacaacgtctgctactctatggccgttacgagatctaaagacgcccctccgtttgggccgcccatacctagcggaacaacatttagaaagagtgacgttttccgcgattttctgctggcaaaagtcattaacgcagaaaacgccgctcataagtccgataagttccatacaatggccacacgaactagacaggagtatcttaaagatctggctgaaaactgtgttagtaacaccccgatcgattctactggaaagttcaacttgatttcccttacttcaaaaaaaaaagagaagaccaaggcgagggccggtgcagagcagcactctgcaggggctattgcttggcgcgttgtcgcacaggactatgcgcaaggcgtagaaatagactgtatcttaggaatctctaacgaatttgtggtgctcttggacctgcgcaccaaagaagtggttttcaattgttactgtggggatgttatcggctggacaccagatagcagcactttgaagatcttttatgggcgcggcgatcatatctttttgcaggcaactgagggaagcgtagaagacattagagagatcgtccaaagactgaaggtgatgacctcagggtgggagaccgtggacatgacactgaggcgtaatgggctcgggcagctgggattccacgtaaagtacgatgggacagtggcggaggtagaggattatggctttgcttggcaggctgggctgaggcagggttccaggttagtggagatttgtaaagtggctgtagtgacattaacccatgaccaaatgatcgatctgctgaggaccagtgtgacagtcaaagttgtgattataccccctttcgaggacggcacgccacggagaggatggcccgagacctatgatatgaatacctctgagcccaagacagaacaagaaagcataacaccaggtggccgccccccttacaggtccaacgctccttggcagtggtcggggcccgcctcccataatagtcttcccgcgagcaagtgggccacacctacaaccccaggacatgcacagtcgctgtcaagaccgctcaaacagacacctatcgtaccattccgcgagagtcagccactacatagtaagaggccggtgtcctttcccgagaccccctacaccgtttcacccgccggggccgacagggtgcctccttaccgacagccctctgggtctttttcaacgcccggtagtgccacttatgtccgatataagccctccccagagcggtacaccgctgccccccacccgctcttgagcctggatccccatttttctcatgatggtacatcttctggcgactcaagcagtggcgggctgacctcccaggagagcaccatggagaggcagaaaccggaaccgctgtggcatgttcccgcccaagcaaggctgagcgccatcgctgggtcctccggcaacaaacatccaagccggcaagatgctgctggcaaagattcgcctaatcggcattccaaaggggagcctcagtatagtagccatagctctagtaatactcttagctcaaacgctagtagctcacattctgatgataggtggttcgaccccctggatcccctagaacctgagcaagatcctctgtctaagggaggttctagcgatagcggcatcgacacgaccctgtatacatcttccccaagctgtatgagcctcgccaaggctccgagaccagccaagccccacaagcctccaggctctatgggactatgtgggggcgggcgagaggcagccggccggtctcaccatgccgacaggcggagagaggtcagtcccgcccccgccgtggccggacagagcaaggggtatcgcccaaagctgtacagcagcggatctagcacacctactggcctcgccggcggctcaagggatccccctcggcagcctagtgacatgggctcccgggtcggttaccctgctcaagtctataagactgccagtgctgaaacacctcggccgagccaactggcccagcctagtccattccaactttccgcatccgtgccgaagtcatttttttctaagcagcccgttcgcaataagcacccaacaggctggaagcggaccgaggagccaccccctcgccctctgcccttcagcgatccaaagaagcaggtcgacaccaacactaagaacgtctttgggcagccaagacttcgcgcctcactgagggacctgcggtctccaagaaaaaactacaagtctaccatcgaagatgacctgaagaagctgatcatcatggataacctcggacctgaacaagaacgagacacaggacagtcccctcaaaagggactgcagagaactttaagcgacgagagcctatgtagcgggcgtcgtgagccctcattcgcatcccctgctgggctcgagcccggtctcccatctgacgtcctgtttacatctacctgtgcgtttcctagcagcaccctccccgcacggcgacagcaccagcatcctcaccctcctgtgggaccaggtgccacccccgcagctggatcaggctttcccgaaaagaagagcactatctccgcgagcgagttatcactggccgatggaagagaccggccattacggcggctggaccctggtttaatgcccctgcccgacactgccgcaggtctggaatggtcctccctggtgaatgcagctaaggcctatgaggtgcagcgcgccgtcagcctgttcagcctgaatgaccctgcgttaagcccagatatcccacccgctcattcacctgtccatagccacttgtcactagagagagggcctcccacaccgaggactaccccgacgatgagtgaggaaccaccccttgatctgaccggaaaagtttatcagttggaggtcatgttgaagcagttgcatacggatctacagaaggagaagcaagacaaggtggtcctgcagtctgaggtagcaagcctgagacagaacaaccagagactgcaggaggagtcccaagctgccagcgagcagctgagaaagttcgccgagatattttgccgcgagaaaaaggagctatag

SEQ ID NO: 184208 - DNA, 5346 bp, Artificial Sequence
  derived and/or modified sequence
atgactacttaccgcgctatacctagcgacggagtggatctggccgctagttgtggcgctagagttggcgacgtgctccccggtcctcatacgggagactacgctcctttgggattttgggcacaaaatggatccatgtctcagcctctcggtgagtcccccgcaacagccactgccactgctactgcgacgactcgccctagtccgactacacccgctatgcctaagatgggtgtgagagctcgcgtggctgactggccccctaaacgagaggccctcagggagcacagcaaccccagtccatcccaggatactgatggtaccaaagctaccaagatggcccacagcatgcggagcatccaaaacggtcagcccccaaccagcacccccgcatctagtgggtctaaggcgtttcataggctttcacggcgtcgtagtaaggatgtggaattccaggatggctggcccaggtctccaggcagggccttccttccgttgagacacagaagttctagcgaaatcaccctttccgagtgtgatgcagaagatgcaggtgagcctcgcggtgctaggcacaccggggctctcccactgttccgggagtatggtagtacaagctccattgacgttcaggggatgccagaacagtccttctttgacattctgaacgaatttaggagcgaacagcccgacgctcggggttgccaagcgctgaccgagttgctcagagccgatcctggtcctcatctaatgggcggtgggggtggggcaaagggagactcccacaatgggcaacctgccaaagacagtcttcttccccttcagcctaccaaggaaaaggagaaggctcgcaaaaaacctgccagaggcctgggcggtggcgacaccgtggactctagcatcttccgcaagctgaggagctcaaaacctgagggcgaagcaggaaggtctccaggcgaggccgacgagggaaggtccccaccagaggcctcccgtccctgggtgtgtcagaaatcattcgcacacttcgacgtgcaatcaatgctctttgatctgaacgaggccgctgccaaccgggtatccgtgagtcagagacgaaatacaactactggtgcaagcgccgcttcagcggcaagcgccatggcctctctgacggcctcacgtgcccattctcttggcggattggacccagctttcacatcaaccgaagacctgaactgtaaggagaaccttgaacaggatctcggggacgacaattcgaacgaccttctgttgagttgcccccactttagaaacgaaatcggaggggagtgtgagcggaatgtgagtttctcccgcgcatccgtagggagcccaagcagcggtgagggccatctggccgaaccggcattgtcagcctaccgcacaaacgcctcaatctccgtgcttgaggtgcctaaggagcagcagaggacccagtcccgacccagacagtatagcatcgaacacgtcgacctgggcgcacgctattaccaggattacttcgtgggaaaggaacatgccaattattttggggtggacgagaagctgggcccagtcgctgtgtcgattaaaagggagaagctcgaggatcacaaggaacatggcccacagtaccagtatagaattatcttcaggacacgcgagctgatcacgctgaggggaagcattctggaggacgcgacacctaccgccactaagcacggcaccggcagaggtcttcccctgaaggatgcgttagagtatgtgattcccgaactcaatatacattgtctgcgactagcactgaacacccccaaagtcaccgagcagcttctcaaactggacgagcaaggactctgtcgcaaacataaggtgggaatcctgtactgcaaggctgggcagtcctccgaagaagagatgtacaacaacgaagaggccggtcccgcatttgaagagtttctatcccttataggagagaaagtgtgcctcaaaggatttactaagtacgcagcacagctggacgtcaaaacagacagcaccgggactcactcactctacacaatgtaccaggattacgagattatgtttcacgtgtccaccctcctaccctacacacctaacaatcgccaacaactgctacgtaagagacacatcggtaatgatatcgtaacaatcatcttccaagaaccaggcgctctgccatttacccccaaaaacatcaggagccactttcaacatgtgtttatcattgtgagagtacacaacccctgtactgataacgtgtgttacagcatggccgtcacccgcagtaaagatgcccctccttttggtcctcccatcccttcagggaccacctttaggaagtccgatgtctttagagactttctattggccaaggtgattaatgctgagaatgccgcacataaaagtgataaatttcatactatggcaacgaggactcgccaggagtacctaaaggacttagccgaaaactgcgtctctaatacccccatcgatagtaccggaaagtttaatctcattagtttgaccagcaagaaaaaggagaagacaaaggcgagagcaggggctgaacagcattccgctggggcaatcgcgtggcgcgtggtggcccaggactatgcacagggggttgagattgattgcatactggggatcagtaatgaatttgtcgtacttctcgatctccgtactaaagaggttgtcttcaattgctactgtggcgatgtgataggttggacgccagattccagcacattgaaaattttctacgggaggggagaccacattttcctgcaggcgactgaaggatcagttgaagatatccgcgagatcgtacagcgcctgaaagttatgacatctggatgggagacagttgatatgacactccggcgaaacgggttgggtcagttgggcttccacgtcaaatacgacgggaccgtcgccgaggtcgaggactatggctttgcttggcaggccggacttagacaaggcagccgacttgtggaaatctgcaaggtcgccgtcgtgactctgactcacgaccagatgattgatcttctcaggaccagcgtgactgtcaaggtggtgataattcccccttttgaggatggaactccgcgaagaggttggcctgagacctacgatatgaacacctccgaaccaaaaactgaacaggaatctatcacgcctgggggacgtcccccttaccgcagtaatgccccttggcaatggtcagggcctgccagtcataatagtctgcctgcttctaagtgggctacccccaccacaccagggcatgcccagtctctgagccgcccactgaaacagacgcctatagtccctttccgagagagccagcctcttcattctaaaagacctgtgagtttccctgaaacgccttacactgtaagccccgctggcgctgatagagtccccccttataggcagccatctggctctttctctactcccggatcagcaacatacgtcagatataaaccctctccagagagatacactgctgcaccccatcctctcctgtctctggatccacacttctctcacgatggcacatcctctggcgacagtagttcaggaggactcacgtcccaggaaagcaccatggagagacagaagcccgaacctctgtggcacgtgcctgcccaggccaggttatcagctatagcaggaagttctggcaacaagcatccctcccgccaggatgctgctggaaaggacagccctaatcggcactcaaaaggcgaaccccagtacagctcccacagctcctcaaataccttgtcatctaatgcctcatccagtcactcggacgaccgatggtttgatcctttagatccactcgagcccgagcaggatccattgagtaaggggggatcaagcgactcaggaatcgatacaactctgtacacaagctctcccagctgcatgtcactagccaaggcaccccgacccgctaaaccacataaaccccctggctctatgggactgtgtggtgggggacgagaggctgctggaaggagccatcatgctgacaggcggcgtgaggtgtcgcccgctcccgctgtggcaggccaatcaaagggctacagaccgaaattgtactccagtggctcatctacccctacagggctggccggtggttcaagagaccccccacgccaaccgtccgacatgggctctagagttggctatcccgctcaggtgtataagacagcatccgcggagacacccaggccatctcaactggcacaaccttcaccctttcaactctctgccagcgtcccaaagtcatttttttctaagcagcctgtacgcaacaagcacccaaccggctggaaaagaaccgaggagccaccgccaaggccactgccgttttccgatcccaagaaacaggtggatacaaataccaagaacgtatttggacagcctcgcttaagagcctcattacgggacttgcgctcgcctcgcaagaactacaagtccaccatcgaggacgatctgaagaaacttataatcatggacaacctgggccctgaacaggagcgggacacaggccagtctccgcagaaagggttgcagaggacactgtcagacgaatcgctgtgtagcgggcgtcgcgaacctagctttgccagccctgctggattggaacccggacttccctccgacgtcctgtttacttccacatgtgcctttccttcttcaacactccctgcacgtcgtcagcatcagcaccctcatccgccagtcggcccaggagccacacccgcagcaggcagcggcttcccagaaaagaaatccactatttcagcgtcagagctgtctctcgctgacggccgtgatagacccctaaggaggctcgaccctggcctgatgcctttgcccgacacggctgccggtttagagtggagttcattggtaaatgctgccaaagcgtatgaagtgcagagggccgtgagtctttttagtttaaacgatcctgctctgagtcccgatatccccccagcccatagccccgtccattcccacctgtccctggagaggggacccccaaccccccgtaccactcctacgatgtcagaggagccaccacttgatttgacagggaaagtgtaccagctcgaggtgatgctcaagcagcttcatacagacttgcagaaggaaaagcaggataaggtggtccttcaaagcgaagtcgccagtctgagacagaacaaccagcgcttgcaggaggaaagccaggctgcaagcgagcagctcaggaagtttgcggagattttctgtagggaaaaaaaagaactctag

SEQ ID NO: 184209 - DNA, 7994 bp, Artificial Sequence
  derived and/or modified sequence
ggactcgcgcgaagcggcttggaagtgggcagcctggaagtcactcgggccaccggagctggcggcgtctccagcgagcggcgcggagctggacgccgcgatcgtggggcccgcgaggcgggcagccggggcgtccagatgcacagtctctgacatcagctctcctgggaccctccaagagcactagtgtctagaaggcactaaggcatggcgaggacaacatccttgctgcctccagctggcgggcgaccacagctactgcctgctctgcgctactgagccactcggtctggagcccccaggacagcacctgcttcctgaggttgtcctggctcagctgtgcacagcgatggtggagaactggactccacaggctcacaaccttcctgtcaggtttcagggcccagcatccttcatcctgggcctggctgccctgaacaatggctgagggctgggggaccccatagagtgacaccacagcgtacggggccagcagcactccagtgcccgtggactatgaccacctatcgggccatccccagcgatggtgtggacctggcagccagctgtggcgccagggtgggcgatgtcctccctgggccacacacaggggactacgctcccttgggattctgggcccagaatggcagcatgtcccagcctcttggcgagagcccggccaccgccaccgccaccgccaccgccaccacccgccccagccccaccactcccgcaatgcccaagatgggcgtgcgcgcaagggtggccgactggccgcccaagcgggaggccctgagagagcacagcaacccaagcccctcccaggacacagatggcacaaaggccaccaagatggcccattccatgaggagcatacagaacggacagccccccaccagcaccccggcttcctcagggtccaaagccttccaccgactctccaggagaaggtccaaagacgtggagttccaggacgggtggccccggtcccccggcagggccttcctcccccttcggcaccgcagcagcagcgagatcaccctcagcgagtgtgacgcggaggacgcgggggagccgcggggggcccggcacacgggggcgctgcccctcttccgcgagtacgggagcacctcgtccatcgacgtgcagggcatgcccgagcagagcttcttcgacatcctgaacgagttccgcagcgagcagcccgacgcccgagggtgccaggccctcaccgagctcctccgggcagatcctggcccacacctcatggggggcggcggcggagccaagggggactcccacaacgggcagcccgccaaggacagcctcctgccactgcagcccacgaaggagaaggagaaggcccggaagaaacctgcgcggggcctcggcggcggggacacggtggactcgtccatctttcggaagctaaggagcagcaaacccgagggggaggctgggcgttccccgggggaggccgacgagggccggagccccccggaagccagcaggccgtgggtgtgtcagaagagcttcgcccacttcgacgtgcagagcatgctgttcgacctcaacgaggcggccgccaacagggtgtcggtgtcgcagcggcggaacaccaccacgggtgcttcggccgcttccgccgcctcggccatggcctccctcacggcctcgcgggcccacagcctcggaggcctggacccggccttcaccagcacagaggacctaaactgcaaggagaacttggagcaggacctcggcgatgacaacagcaacgacctgctgctcagctgcccgcacttccgcaatgagatcgggggcgagtgtgagcgcaacgtgagcttctcccgggcttccgtgggctccccgagcagcggcgagggccacctggcagagcccgccctgagcgcctaccgcaccaacgccagcatctcggtgttggaagttcccaaggagcagcagcggacgcagagtcggccccggcagtacagcatcgagcatgtggacctgggcgcccgctactaccaggattacttcgtgggcaaagaacatgccaattacttcggcgtggatgagaagctggggccagtggctgtgagcattaagcgggagaagctggaagaccacaaggagcacggacctcagtaccagtacaggatcatcttccggacccgcgagctcatcaccctgcggggctccatcctggaagatgctacgcccacagccaccaagcatgggaccgggcggggcctgcccttgaaggatgccctggagtatgtcatccccgagctcaacatccactgcctgcggctggccctcaacacccccaaggtgacggagcaactgctgaagctcgatgagcaagggctctgccggaagcacaaggtgggcatcctctattgcaaggccggccagagctccgaggaggagatgtacaacaatgaggaggccggccccgcctttgaggagttcctctccctcatcggcgagaaggtctgcctgaagggcttcaccaagtacgctgcccagctggacgtcaagaccgactccacgggaacccactccctctacacgatgtaccaggactacgagatcatgttccatgtctccaccctgctcccttacacccccaacaacaggcagcagctgctacggaagaggcacataggaaatgacatcgtgacgatcatcttccaggagcctggcgcgctaccgttcacccccaagaacatccgctcccacttccagcacgtcttcatcattgtccgagtccacaacccctgcactgataacgtctgttacagtatggctgtgacccgatccaaagacgctcctcctttcggcccccccatccccagtggaaccacattccgcaaatccgacgtcttcagagacttcttgctggccaaggtgattaacgctgagaacgccgcgcacaagtccgacaagttccacaccatggccaccaggacccgccaggagtatctcaaggacctggccgaaaactgtgtctccaacacccccatcgactccaccggcaaattcaacctcatctccctgacctccaagaagaaggaaaagacaaaagcacgggctggcgctgagcagcacagtgcaggggccatcgcctggagggtggtggcccaggactacgcccagggggtggaaatcgactgcattttgggaatttccaatgagtttgtggtgctcctggacttacgcaccaaggaggtggtgttcaactgctactgcggggatgtcattggctggactccagactcctccacactcaaaatcttctatggacgaggagaccacatcttcctacaggcgacagagggttctgtggaggacataagggagatagtgcagagactgaaggtgatgaccagtggctgggagacggtggacatgacgcttcggcggaacgggctcgggcagctgggcttccacgtgaagtacgacggcacggtggccgaggttgaggactatgggttcgcctggcaggccggcctccggcagggcagccgactagtggagatctgcaaggtggccgtggtcacactgacccacgaccagatgatcgacctgctgcgcacctctgtcactgtgaaggtggtcatcatcccgccttttgaggacggcactccccggaggggttggccggagacctacgacatgaatacctcggagcccaagacggagcaggaaagcatcactcctgggggccggcccccctaccgcagcaatgctccctggcagtggagcgggcccgcatcccataactctctaccagcctccaagtgggccactccaaccactcccggccatgcccagtccctgagccggcccctgaagcagacccccatagtccccttccgggagtcccagccactgcacagcaagaggcctgtcagcttcccagaaaccccttacacagtatcaccagcaggggccgacagagtccctccctaccgacagccttctgggagcttctccacccccggttcggccacctacgtgagatacaagccatccccagaaaggtacacggctgccccacaccccctgctatctcttgatccccacttcagccacgatgggacgtccagcggcgactcctcttccggcggcctgaccagccaggagagcaccatggaacgccagaagccagagcctttgtggcatgtgcctgcccaggccaggctctcagccatagccggaagcagcgggaacaagcacccgtccaggcaggatgcagcaggcaaagattcccccaacaggcattccaaaggagaacctcaatactcaagtcattccagcagcaacaccctctccagcaacgcatccagcagccacagcgacgaccgctggttcgaccccctggaccccctggagccagagcaagaccccctctccaagggtggctctagtgacagcggcatcgacaccaccctctacacctccagccctagctgcatgtccctggccaaggctccacggcccgccaagccacacaagccccctggaagtatgggcctttgtggcgggggtcgcgaggccgctgggaggtcccaccacgcagacaggcggcgggaggtctcccctgcccccgcagttgccggccaaagcaagggctaccgaccgaagctgtactcctccggctccagcacccccacgggactggcggggggcagccgagacccaccgaggcagcccagtgacatgggctcgagggttggctaccccgctcaggtttacaaaactgccagtgcagagactcctcggccctcccagctggcccagcccagcccctttcagctctccgcctccgtccccaagtccttcttctccaagcagcctgtacgcaataagcacccaacagggtggaagagaacggaggagcccccaccacggccactccccttcagtgacccaaagaagcaggtggacacgaacaccaaaaatgtctttgggcaaccgaggttgagggcatccctccgagacctccggtcaccacggaagaactacaaatccaccatcgaggatgacctgaagaaactcatcatcatggacaacctggggccagagcaggagagagacacgggacagtcaccgcagaagggcctgcagcggacgctgtcggacgagagcctgtgcagcgggcgccgggagcccagcttcgccagccccgctggcctagagccagggctgcccagcgacgtgctcttcaccagcacctgcgccttcccgtccagcacgctgcctgcacgccgccagcaccagcacccccacccgcccgtcggccccggtgccacccctgccgccggcagcggctttcccgagaagaaatccaccatctcagcctcggagctctcgctggctgatgggcgggaccgccccctgcggcgcctggaccctgggctgatgcccctgcctgacacagctgctggcctcgagtggtccagcctggtgaacgcagccaaggcatacgaagtgcaaagagccgtctcactcttctctctgaacgacccggccctgagcccggacatcccgcctgcacacagtcctgtccacagccacctgagcctggagaggggacccccgacccccaggaccacccctaccatgagcgaggagccacccctggatctgacaggcaaggtgtaccagctggaggtgatgctgaaacagctgcacactgacctgcagaaggagaagcaggacaaggtggtgctccagtcagaggtggccagcctgcggcagaacaaccagcggctgcaggaggagtcgcaggccgccagcgagcagctgcgcaagtttgcggagatcttctgcagggagaagaaggagctctgaggtgggaggccgccgcccgccttcgctccttcccctcaggccgtggccctgctgcctctctccctccactcagctcccagctgccggtgtgaccaagatgacccatccagggccctccccatggacacggaaactccgatggcctcactagggctgtgagtcagggtcagcgcgcacagccctcatgccccagagggcgaagtggtctcaggcctccctccaagctgcccagctgtggtcccggtgagctgggctgtgcttacaccgctcccgggcctgccccgctgtccccatctagcctcttcctgggaccagcccttcgaagctgatggggacggagagaggagccagtctccagacgcctcggctccaggaggtcacacagcaggtttctgcaccacgcacaacaaagttgcggcttgtggggccgaggcccctgcatgaaaagtacagcgtgaaagcaaccctttcttccccacacccagagaggtgaggcccgcgtggacacagaccagggcgcctcggtccctagcacgtgagctccaaaaagcacgaacatgatcccctccctaaccccctcctcccaaaaagcagccaggagcactttcttagagtttaaattattttcttgggggcctgaggatagagagaggcaaggctagcctccagagccgatttatttgagagagaaactctatttggatctccaggacggtttatacgatctttttctatcagctcctcttccgccagaggccactgcacctgggctaggggtccacaggcccctccaccttccagctaaccaggccaggccggggcggtggagccaccacacagccgactctctcctcctcctcccggcacgacctggccctgaccagcagcctcggcctcttctgggttccaggaggggctcccgaagccctcaggacagggctggaggagaacagccttcatctcctcctctggtttttttttcctttgcaagtctcccagcccatctctccgagcagcggccaccagaccccctcaccatgctccccggggagcactgcaccccgcgaaccccactggacgctggttctctaaaggcaataaggggcggccatgccggtgtggtaccacgctgttcctccaggaaaccgtttctttttttccttctttaaaagcaaacagaaaaagatatatatatatatatatatatatttattttttcatgtagagttggcgccagaacaagcctgtatggccacagtctgtggattcatccccccaacctcaagctgaggaccaaggcgtgtcccctgtgggctgggggtcagtgggaggaccagagggatgaagtcagggcaggccggtgccctttttgggaggcaccaggcggggaggagttggcggagcaggtctggctgtgagccagcaccaggcaacccggcccttgtccagggacctctgctgccttctctctggggtcaggaacctcagaggagggggctctggggactgcataggacgcaggcactcggaggtgccggtgtggatgggtgggggtgagagaagagggttcttatcgcgtctcctgtgatcagcctctggccccctggaggaggaaacctcagcgctgcccctgcccccaccctcacccccaacaccaagagtgaggtgggcgtgccccaggcagcgtcctcagccctggccagctactgtgatgccatcttctcccccatccccttctctggggggcccacccgtcccccacccccaccccttagaccctcatcgggtccctttttttttttttttttcagttgtctcctcccatcttcagatcattcgaatcattttggggacttaatcatgtacatggacaagtgtaaattatgatttttggttttgttttctgttattttttaaggatttctgcaaaaacagatctatttaatttgaggttgatgttctatccaatggccgaagatagcagcaggttttttttttcatatgttgatttgtttcatttggattttttttttattattctttattgtcttttttttttccccatccctgtcttgagattttctggcatgtttctggaggtttcaaaggaaataaaggtttcatagaaatgg

SEQ ID NO: 184210 - protein, 949 aa, Artificial Sequence
  derived and/or modified sequence
MEPPGRSSRSTASHTLHQYCCPTQVLDSMKLTPSGRLAESSVEGDAPGSDLSTAVDSPGSQPPYRLSQLPPSSSHMGGPPAGVGLPWAQRARLQPASVALRKQEEEEIKRSKALSDSYELSTDLQDKKVEMLERKYGGSFLSRRAARTIQTAFRQYRMNKNFERLRSSASESRMSRRIILSNMRMQFSFEEYEKAQNPAYFEGKPASLDEGAMAGARSHRLERGLPYGGSCGGGIDGGGSSVTTSGEFSNDITELEDSFSKQVKSLAESIDEALNCHPSGPMSEEPGSAQLEKRESKEQQEDSSATSFSDLPLYLDDTVPQQSPERLPSTEPPPQGRPEFWAPAPLPPVPPPVPSGTREDGSREEGTRRGPGCLECRDFRLRAAHLPLLTIEPPSDSSVDLSDRSDRGSVHRQLVYEADGCSPHGTLKHKGPPGRAPIPHRHYPAPEGPAPAPPGPLPPAPNSGTGPSGVAGGRRLGKCEAAGENSDGGDNESLESSSNSNETINCSSGSSSRDSLREPPATGLCKQTYQRETRHSWDSPAFNNDVVQRRHYRIGLNLFNKKPEKGIQYLIERGFLSDTPVGVAHFILERKGLSRQMIGEFLGNRQKQFNRDVLDCVVDEMDFSSMDLDDALRKFQSHIRVQGEAQKVERLIEAFSQRYCVCNPALVRQFRNPDTIFILAFAIILLNTDMYSPSVKAERKMKLDDFIKNLRGVDNGEDIPRDLLVGIYQRIQGRELRTNDDHVSQVQAVERMIVGKKPVLSLPHRRLVCCCQLYEVPDPNRPQRLGLHQREVFLFNDLLVVTKIFQKKKILVTYSFRQSFPLVEMHMQLFQNSYYQFGIKLLSAVPGGERKVLIIFNAPSLQDRLRFTSDLRESIAEVQEMEKYRVESELEKQKGMMRPNASQPGGAKDSVNGTMARSSLEDTYGAGDGLKRGALSSSLRDLSDAGVCY

SEQ ID NO: 184211 - DNA, 2850 bp, Artificial Sequence
  derived and/or modified sequence
atggaacccccgggccgcagctcaaggtcaaccgcaagccacacgctgcaccaatattgttgtccaacccaggtgctcgactctatgaaattaaccccttcagggcgactcgctgagtcttctgtggagggcgatgcgcccggttccgacttaagcaccgcggtcgactcaccaggtagccaaccaccgtaccggctgtctcaactcccgccaagcagctctcacatgggagggcctcctgccggagtcggactgccttgggctcagagagcccgcctccagccggcatcagtggcattaagaaagcaggaggaagaggagattaagagatcaaaggcactgtcagactcttatgagctttcaaccgacctgcaggataaaaaggttgaaatgctggagcggaaatacggtggaagcttcttaagcaggcgagcagcacgaacaatccagacagcatttcggcagtataggatgaataaaaactttgagagattacgatcctctgctagtgagtccagaatgtctcgccgcattattctgtcaaacatgagaatgcaattttcgttcgaagagtacgaaaaagcacagaatccggcttattttgagggaaaaccagctagcctggacgagggcgccatggccggggcacgctctcaccggctagagcgcgggctcccatatggtgggtcttgtggcgggggaattgacggtggtggttcttctgtgactaccagcggagagttttctaatgatattaccgagctggaagacagtttctctaagcaagttaagtcactcgctgaatcaatcgatgaagccctcaactgtcacccttcaggtccaatgtccgaggagccagggagcgctcagctggaaaagagggagtcaaaggaacagcaggaggactcgtcagctacttcattttccgatctgcccctgtatctcgacgatacggtgcctcaacagagccccgaacgcctgccgagcacggagcctcctccacaggggaggcccgagttttgggccccggccccattgcctcccgtgccaccacctgtaccatccggcacacgagaggatgggagccgcgaagaaggcaccagacgaggacccggttgtctggagtgtcgtgatttcagactccgcgcagcacacctaccattgttaaccatagagcccccatcagacagttctgtagatctgagcgaccgatctgatcgcggtagcgtgcatcgccagctggtgtatgaagccgacggttgctcaccacatggcaccctgaaacacaaagggccccctgggagggcgccaatcccacatcgtcattatcccgcgccagagggtcctgcaccagcccccccaggtcccctaccaccagcccctaacagcggaaccggcccgagcggggttgccggtggtagacgccttggaaaatgtgaagccgcaggagagaacagcgatgggggagacaacgaatctctggagtcgtcctccaactctaacgagactatcaattgtagttctggcagtagtagtagagactctctacgagagcctcccgccactggcctgtgcaagcaaacttaccagagggagactcgacactcctgggacagccctgctttcaacaatgatgtggtccaaaggagacattaccggattgggttaaacctgttcaataagaaacccgagaagggcattcagtacctgattgaacgcggctttttaagcgacacgcccgtgggggtggcacactttatcctcgagaggaagggactttccaggcagatgattggcgagtttctggggaataggcagaagcagttcaatcgcgatgtattggattgtgtcgtcgacgagatggatttctcctctatggatttggacgatgctctcagaaaatttcagtcacatatacgagtgcagggggaggcacaaaaggtggagcgcttaatcgaggcctttagccaaaggtattgcgtctgtaatcccgcacttgtaaggcagtttcgcaatccagatacaatttttattttggccttcgctatcatcctactgaacacagacatgtactcgccgagtgtaaaagctgaaaggaagatgaagcttgatgattttattaagaacttgcggggtgtggacaatggggaggatatacctcgggacctgctcgtgggaatttatcaaagaattcaaggacgagagctgagaacgaacgacgaccacgtctctcaggtccaggctgtggaaagaatgatcgtcggtaaaaaacccgttctgtccctgcctcatcgacgtctggtatgttgctgtcagctgtacgaggtgcctgacccgaaccgaccacaacggctggggctccaccaaagggaggtttttctgtttaacgacttactggttgtcactaaaatcttccaaaaaaaaaaaatccttgttacatactcgtttaggcaaagttttcctctggttgaaatgcacatgcagctgtttcagaactcctattaccagttcgggatcaaactgctgtcggccgttccagggggagagcggaaagtcctcattatctttaatgcgccttcactccaggataggctgaggttcacttccgacctgcgcgagtcaatcgcagaggtacaagagatggagaagtaccgagtcgaatctgaactagagaagcagaaggggatgatgaggcctaacgcgtcccagccaggtggggccaaggactctgtgaacgggaccatggccagatcatccctagaagatacctatggagccggtgacggccttaaacggggggcactgtcttctagcctgcgggacttatcggatgcaggcgtatgctactag

SEQ ID NO: 184212 - DNA, 4004 bp, Artificial Sequence
  derived and/or modified sequence
tccttctagggaagggctggggaggagggggtggtgacacggtggagacaccggctaggccagggggcctgcccttgggacaggtccagacccatggagccccccgggaggagcagcaggtccacagcgtctcatactctacaccagtattgctgtcctactcaggtccttgactccatgaagcttaccccctcaggcaggctggcagagagcagtgtggagggtgatgccccaggcagtgacctgagcacagcggttgatagtcctgggagccaacccccctaccggctgagccagctgcccccctccagcagccacatggggggcccccctgctggagtgggccttccctgggctcagcgggcacgcctccagccagccagtgtcgccctgaggaagcaggaggaggaggagataaagcgctccaaggccctatcggacagctatgaactctccacagacctgcaggacaagaaggtggaaatgctggagaggaagtatgggggctccttcctgagccgcagggctgccaggaccatccagacagccttccgccagtaccgcatgaacaagaactttgagcggctacgcagctcagcctcagagagccgcatgtcccgccgcatcatcctttccaacatgcggatgcagttctcctttgaggagtatgagaaggcacagaaccccgcgtacttcgagggcaagcctgcctcgctggacgagggtgccatggctggtgcccggagccaccggcttgaacgggggctcccatatggaggctcctgtggtgggggcatcgatggtggtggaagctccgtcaccacatctggagagttttctaatgacatcacagaacttgaggactccttctccaaacaggtaaagtctctggctgaatccatcgacgaagccctgaactgccacccgtcagggcccatgtctgaggagccagggtcagcccagctggagaagcgggagtcaaaggaacagcaagaggacagctcagccacatccttcagtgatcttcccctctacctggatgacacagttccccaacaatcccctgagcgactgcccagcacagaacccccaccccagggccggcccgagttctgggcgccagcccctctcccgccagttcctccaccagtgccatcaggaacccgggaagacggtagccgtgaggaaggcactcgcaggggtcccgggtgcttggagtgccgggatttccggctgcgggctgcccaccttcccctgcttaccattgagcctcctagtgacagctccgtggacctgagtgaccgctcagatcgcggctctgtccaccgccagctggtgtatgaggctgatggctgcagcccccatgggaccctgaagcacaaggggccaccaggcagggccccgatcccacaccgccactacccagcccctgaaggcccagccccagccccaccagggcccctgccaccagcccccaacagtggcactgggcccagtggtgtggctgggggtcggaggttggggaagtgcgaggcagcaggcgagaactctgatggtggagataacgagagccttgagagctccagcaattccaatgagaccatcaactgcagctccggctcctcttctcgggacagtctaagggagcctccggctaccggcctgtgcaagcagacttaccagcgggagacaaggcatagctgggactcgccagctttcaacaatgatgtggtccagaggcggcactaccgaatcggcctcaacctcttcaacaagaagccagagaagggtatccagtatctgatcgagcggggcttcctgtcagacacaccggtgggagtggctcacttcatcctggagcggaaaggcctcagccggcagatgataggggaattcctagggaaccggcagaagcagttcaacagagacgtgttggactgtgtggtggatgagatggacttctcctccatggatctggatgatgcgctccggaagttccagtcccatatccgggttcagggtgaggcccagaaagtggagcgactcatcgaagccttcagccagcggtactgtgtctgtaacccagccctcgtgcgccagttccggaacccagacaccatcttcatccttgcttttgccatcatcctcctcaataccgacatgtacagtcccagcgtcaaagctgaacgaaagatgaaactagatgacttcatcaagaacctgagaggggttgacaatggtgaagacatcccccgagacctcctggtgggcatctaccagcgcatccaggggcgtgaactgcggaccaacgatgaccatgtgtcccaggtgcaggctgtggagcgcatgattgttggaaagaaaccagtcctgtctctccctcaccgtcgactggtttgctgctgccagctctacgaggtgccagatccaaaccgcccccagaggctagggttgcatcagcgggaggtcttcctcttcaatgatctccttgtggtcaccaaaattttccagaagaagaagatcttggtgacgtacagtttccgtcagtctttccccctcgtggaaatgcacatgcagctcttccagaattcatattaccagtttgggatcaagttgctgtctgcagtacctggtggggagcgaaaagtcctcatcatcttcaatgcccccagcctccaggaccggctgcgctttacatccgacctgcgcgagtccattgcggaggtgcaggagatggagaaataccgtgtggagtcggagctggagaagcagaaaggtatgatgcggcctaacgcctcacagcctggaggggccaaggactcagtgaatgggacgatggcccgcagtagcctggaggacacttacggggcaggcgatgggctcaaacggggcgcactcagcagttccctgcgagacctctctgatgcaggggtctgttattagcagtccacgccctcaccagaggatgccacctccgcccccacccccgccgccagaggagtacaagagccagaggcccgtctccaactcctcatccttcctgggctccctatttggaagcaagcggggcaaggggcccttccagatgccaccaccgccaacaggccaggcctctgcctcctcttcatctgcttcttccacgcaccaccaccaccaccaccaccatcatggccatagccacggtggcctgggggtgctgcctgatgggcagtccaagctccaggccctgcatgcccagtattgccaaggaccgggccctgccccgccaccctacctcccaccccagcagccctctcttcccccacctccccagcagcccccacccttgccccagctgggctccattccaccgcctcccgcctcagccccacctgtggggccacatcgccacttccacgcccatggcccagtcccagggccccaacactataccttgggccggccaggcagggcacccagacggggggctggaggacaccctcagtttgctccacatggccgccaccccctgcaccagcccacatccccactgcccctgtacagtcctgccccccagcaccctccagcccacaaacagggccctaagcacttcatcttcagccaccacccacagatgatgccagcagcaggcgcggctgggggccctggatcccggccaccagggggctcctactcccacccccaccacccccagtcaccattgtcaccacactcacccatcccaccccacccctcctatccacccctccccccaccctcccctcacaccccgcactcaccccttccacccacctccccccatggcccgctgcacgcctctgggccccctggcacagccaacccccccagtgcaaaccccaaggccaagccaagccggatcagcaccgtggtctgatgaatggagagagtgagctggggaacaggaaagtctggggagccacaggagagggaccttgcaccctctttgcttcctcggttttttcaaaaatatatatacacatagc

SEQ ID NO: 184213 - DNA, 2850 bp, Artificial Sequence
  derived and/or modified sequence
atggagcccccaggccgcagcagccgcagcacagccagccacaccctgcaccagtactgctgccccacccaggtgctggacagcatgaagctgacccccagcggccgcctggccgagagctctgtggagggagatgcccctggcagtgacctgagcacagctgtggacagccctggcagccagcccccctaccgcctgagccagctgccccccagcagcagccacatgggcggccccccagctggggtgggcctgccctgggcccagagggcccggctgcagcctgcctctgtggccctgaggaagcaggaggaggaggagatcaagaggagcaaggccctgagtgacagctatgagctgagcacagacctgcaggacaagaaggtggagatgctggagaggaaatatggaggcagcttcctgagcagaagagctgcccggaccatccagacagccttccggcagtacaggatgaacaagaactttgagcggctgcggagcagcgccagcgagagcaggatgagccgccgcatcatcctgagcaacatgaggatgcagttctcctttgaggagtatgagaaggcccagaacccagcctactttgagggcaagccagccagcctggatgaaggagccatggccggggcccggagccaccggctggagcggggcctgccctatggaggcagctgtggcggcggcattgatggcggcggcagctctgtgaccaccagcggggagttcagcaatgacatcacagagctggaggacagcttcagcaagcaggtgaagagcctggccgagagcattgatgaggccctgaactgccaccccagcggccccatgtctgaggagcccggcagcgcccagctggagaagcgggagagcaaggagcagcaggaggacagcagcgccaccagcttcagtgacctgcccctgtacctggatgacacagtgccccagcagagccctgagcggctgcccagcacagagcccccaccccagggccggcctgagttctgggccccagcccccctgccccctgtgcccccacctgtgcccagcggcaccagagaagatggcagccgggaggagggcacccggcggggccctggctgcctggagtgccgggacttccggctgcgggccgcccacctgcccctgctgaccatcgagcccccaagtgacagctctgtggacctgagtgacagaagtgaccggggctctgtgcaccggcagctggtgtatgaagcagatggctgcagcccccacggcaccctgaagcacaagggccccccaggccgggcccccatcccccaccgccactacccagcccctgagggccctgccccagcccctcctggccccctgcccccagcccccaacagcggcaccggccccagcggcgtggccggcggccggcggctgggcaaatgtgaggccgccggggagaacagtgatggaggagacaatgaaagcctggagagcagcagcaacagcaatgagaccatcaactgcagcagcggcagcagcagccgggacagcctgcgggagcccccagccaccggcctgtgcaagcagacctaccagcgggagaccaggcacagctgggacagccctgccttcaacaatgatgtggtgcagaggaggcactaccgcatcggcctgaacctcttcaacaagaagccagagaagggcatccagtacctgattgagcggggcttcctgagtgacacccctgtgggcgtggcccacttcatcctggagaggaagggcctgagccggcagatgattggagagttcctgggcaaccggcagaagcagttcaacagagatgtgctggactgtgtggtggatgagatggacttcagctccatggacctggatgatgccctgaggaagttccagagccacatccgggtgcagggcgaggcccagaaggtggagcggctcatcgaggccttcagccagcgctactgtgtgtgcaacccagccctggtgcggcagttcagaaatccagacaccatcttcatcctggcctttgccatcatcctgctgaacacagacatgtacagccccagcgtgaaggccgagaggaagatgaagctggatgacttcatcaagaacctgcggggcgtggacaatggagaggacatcccccgggacctgctggtgggcatctaccagaggatccagggccgggagctgcggaccaatgatgaccacgtgtcccaggtgcaggccgtggagaggatgattgtgggcaagaagcctgtgctgagcctgccccaccggcggctggtgtgctgctgccagctgtatgaggtgcctgaccccaaccggccccagaggctgggcctgcaccagcgggaggtgttcctgttcaatgacctgctggtggtgaccaagatcttccagaagaagaagatcctggtgacctacagcttccggcagagcttccccctggtggagatgcacatgcagctgttccagaacagctactaccagtttggcatcaagctgctgtctgctgtgcctggaggagagaggaaggtgctgatcatcttcaatgcccccagcctgcaggaccggctgcgcttcaccagtgacctgcgggagagcattgctgaggtgcaggagatggagaagtacagagtggagagcgagctggagaagcagaagggcatgatgaggcccaatgccagccagcccggcggggccaaggacagcgtgaatggcaccatggcccggagcagcctggaggacacctacggggctggagatggcctgaagagaggagccctgagcagcagcctgcgggacctgagtgatgctggggtgtgctactag

SEQ ID NO: 184214 - DNA, 2850 bp, Artificial Sequence
  derived and/or modified sequence
atggagccccccggccggagcagccggagcaccgccagccacacccttcaccaatactgttgtcctacccaagtgttagactctatgaaacttacacccagtggcagactggctgagtccagcgttgagggggatgctcccggatccgacctctcgacagccgtagattccccaggaagtcagccaccctatcgcctgagccaactaccgccctcctcctcccacatggggggtccccccgctggagtcgggctgccatgggctcaacgagcccgccttcaaccggcctcagtggccctgcgcaaacaggaagaggaggagatcaaaaggtccaaggcgctgtccgactcttacgaactgtccaccgacctccaggacaaaaaggtagaaatgctggagaggaaatatggcggctcttttctcagcagaagggctgcgcggaccattcagaccgctttccggcaatatcgaatgaataagaacttcgagagattgcgctcatcagcctctgagtctcgcatgtctcgtcggatcatccttagcaacatgagaatgcagttctcttttgaagaatacgaaaaggcacagaatcccgcttactttgagggtaagcccgccagtctggatgaaggcgccatggcaggagctagatctcatcggctcgaacgggggctgccctatggtgggtcctgcggcggtggcatagatggtggggggtcatctgtcaccacttctggagagttcagtaacgacattacggaattagaggacagtttttcgaaacaggttaaatcactcgctgagagcatagacgaagccctcaattgtcatccttctggtccaatgagcgaagagccaggaagtgcccagttagagaagcgagaaagcaaagagcaacaggaagattcatctgccacgagttttagtgatctccccctgtatcttgacgacaccgtgcctcagcaaagtccagaacggctaccctcaacagagccgccacctcagggaagaccagagttctgggcccctgcaccgttgcctcctgtccccccgccagtaccctcaggcacaagagaagacggatcccgggaagagggaacccggaggggcccgggttgcttggaatgtcgcgatttccggctcagagcagcccacctgcctcttctgaccattgaacctccctcagacagctccgtggacctgtccgacaggtctgatagagggtcagtgcaccgacagttagtctacgaggccgacggttgttcaccccacggcaccctcaagcacaagggacctcctggccgtgctccaattccccatcggcactacccggcccctgaaggcccggcccccgctccgccaggcccactgccccccgctccaaattctggaaccgggccaagcggagtggccggcgggcggcgactcggtaagtgcgaagctgctggcgaaaactccgacggcggcgacaatgaaagcctggagtcttcaagcaacagcaatgaaaccatcaactgcagtagcggatcaagctcacgggatagtctgcgcgagccacccgcaacaggactatgcaagcaaacctaccagcgcgaaacccgacactcttgggattcacccgcattcaacaacgatgtcgtgcagcggagacattacagaatcggcctaaatctttttaataagaaaccggagaaagggattcaatatctgattgagcgaggatttctcagcgatacaccagtgggcgtggcacacttcatacttgaacgcaaaggcctgtcacgtcagatgattggtgagttccttgggaatagacagaagcaatttaacagggatgtgctggattgcgtggtggacgaaatggatttctcatcaatggacttggatgacgctctgcgaaagttccagtcccatatccgtgtacagggcgaggcccagaaggtagagcgactgattgaggcttttagccagcgctattgcgtgtgcaatcctgctctggtgagacagtttcgcaatcctgacacaatcttcatcctggcctttgctatcatcctccttaatacagatatgtacagcccttccgtcaaagcagaacgtaagatgaaactggacgatttcattaagaacctgcggggcgtggacaatggagaagatatcccgcgtgacctactggtgggcatctatcaaaggattcagggcagagagctccggaccaatgacgaccacgtgagtcaagttcaggccgtcgagcgcatgattgttggcaagaagccagtcctgtccttaccccaccgccggctcgtgtgctgttgccagctgtatgaggtgccggacccgaaccgccctcagcggctcggcctccatcagcgagaagttttcctctttaatgatctcctcgttgtgacaaaaatttttcaaaagaaaaagatacttgtgacatacagtttcagacagtctttccctttggttgaaatgcatatgcagttattccagaacagctattaccaatttggtatcaagttactaagcgccgtccccggcggagagagaaaggtgctgatcatctttaacgcgccaagcctccaagaccggctgcgatttaccagcgatctcagggagtctatcgcagaggtccaggaaatggaaaaataccgcgttgaatccgagctggagaaacaaaagggtatgatgaggccaaacgctagccagcctggaggggctaaggacagcgtcaacggcactatggccagaagctctttggaagacacctacggcgcaggagatggtctgaagcggggagcactgagctcttccctgagggatctgtccgacgctggtgtgtgttactag

SEQ ID NO: 184215 - DNA, 2850 bp, Artificial Sequence
  derived and/or modified sequence
atggagccccctggtcgcagtagcagatccaccgcgtctcacaccctgcaccagtactgctgtccaacccaggtgcttgactccatgaaactcaccccaagcggcaggttggccgagagctctgtcgagggcgatgcccctggttccgatctgtccacagccgtcgatagccctggttcccagcccccttaccggctaagccaactgcccccttcaagctcacatatgggcggaccacctgcaggcgtgggtctaccatgggctcagagggccagactgcaacccgcttccgttgccctccgcaagcaagaggaagaggaaataaaacggtctaaagcccttagtgattcctatgaactgtctactgacctccaagacaaaaaggtggagatgctcgaaagaaaatacggagggtctttcctgagtcggagagcagcgagaacaattcagacagcgtttaggcagtatcgcatgaataaaaattttgagagattgagaagtagcgcgagcgaatctcgcatgtcgcgtcgtataattctgtctaacatgcgaatgcagtttagtttcgaggaatacgagaaagcccagaaccctgcatattttgaaggcaagcccgcttcactggatgagggcgcaatggctggcgcacgctctcataggctagagcggggactaccgtacgggggaagttgtggcggaggcattgatggagggggtagcagcgtcactacgtcaggggaatttagcaacgatattaccgagctcgaggattccttttcaaagcaagtgaagagcctcgctgaatctatagatgaggcactgaactgtcacccctcagggccaatgtctgaggagcctgggagcgcccagttagagaaacgggagtccaaagagcagcaggaagattcaagtgctacctccttctcagacctgccgctgtaccttgatgacacagtccctcagcaatcccccgaacgactgccatcaaccgagccgccaccccaggggagacctgagttttgggcacccgctcctcttccccctgtacccccaccagtgccaagtgggactcgggaagacggttccagggaagagggcacccgcagaggacccggttgtcttgagtgccgcgactttcggctccgggctgcacacctgccccttctgacgattgagcccccttcggattcctccgtagacctgtctgatcgctcagatagggggagcgtccaccggcaattagtatatgaggccgatggatgtagtccacatggtacattgaagcacaaaggccctcccggaagggcgcctattccccaccggcactatccagctcccgagggacctgcccctgctccaccaggcccactccccccagcccctaacagtggtacaggcccatcaggcgtcgccggagggagaaggttaggaaagtgcgaagctgccggagagaattctgatggtggagacaacgaaagcctggagtccagctcaaattccaatgaaactatcaattgtagcagcggaagctctagccgcgactcgctgcgtgagccaccagccaccggcctctgcaaacagacctatcagcgcgagacccgccattcctgggactctccagcattcaataacgatgtggtacagagacgtcactacagaattggcttaaatttatttaataagaaacctgagaagggcattcagtacctgatagagcgaggattcttatccgatactccagtgggtgtggctcattttatcctcgagcgcaaaggcctgtctagacagatgatcggagaattcctagggaatcgacagaagcagttcaatcgggatgtgctggattgcgtagttgacgagatggatttcagcagtatggacctggacgatgcactgagaaaatttcagtctcatatccgtgttcagggtgaagcccagaaggtcgagcggctgatcgaggctttctctcagcgctactgcgtttgtaatccggctctggtgaggcaattcaggaacccggacactatttttattctggcgttcgccattattttgctcaatactgatatgtacagtccatcagtcaaagccgaacgtaaaatgaagcttgacgacttcattaaaaacttacggggagtcgacaatggcgaggatatcccaagggatctcttggtcgggatctatcagcgcatccagggcagggaactgcgcacgaacgacgaccacgtgagccaggtccaggctgtggaacgcatgatagtcggaaaaaaaccagtactctccttgccacatcggagactggtgtgttgctgtcagctctatgaagttcccgacccgaaccgcccacaaagattagggctgcaccaacgtgaagtgtttctgttcaatgatttactcgtagtaacaaagatattccagaagaagaagatactggtcacatattcgttccggcagtctttccctttggttgagatgcatatgcagctattccaaaattcttactatcagttcggcattaaactgctctcggcagtaccaggaggggaaagaaaagtcctaattatatttaatgccccaagtctgcaggacagacttcgcttcacttctgatctgcgggagtctatcgcagaagttcaggagatggagaaatacagagtggaatccgagctggaaaagcagaaaggcatgatgcgccctaatgcatctcaacctggcggagccaaggactctgtaaatggtacgatggctaggtcaagtttagaggacacctacggcgctggcgacggcctgaagagaggcgctctctcatcaagtttgcgagacctgagtgatgccggagtttgttactag

SEQ ID NO: 184216 - DNA, 2850 bp, Artificial Sequence
  derived and/or modified sequence
atggagccccccggcagaagcagcagaagcaccgccagccacaccctgcaccagtactgctgccccacccaggtgctggacagcatgaagctgacccccagcggcagactggccgagagcagcgtggagggcgacgcccccggcagcgacctgagcaccgccgtggacagccccggcagccagcccccctacagactgagccagctgccccccagcagcagccacatgggcggcccccccgccggcgtgggcctgccctgggcccagagagccagactgcagcccgccagcgtggccctgagaaagcaggaggaggaggagatcaagagaagcaaggccctgagcgacagctacgagctgagcaccgacctgcaggacaagaaggtggagatgctggagagaaagtacggcggcagcttcctgagcagaagagccgccagaaccatccagaccgccttcagacagtacagaatgaacaagaacttcgagagactgagaagcagcgccagcgagagcagaatgagcagaagaatcatcctgagcaacatgagaatgcagttcagcttcgaggagtacgagaaggcccagaaccccgcctacttcgagggcaagcccgccagcctggacgagggcgccatggccggcgccagaagccacagactggagagaggcctgccctacggcggcagctgcggcggcggcatcgacggcggcggcagcagcgtgaccaccagcggcgagttcagcaacgacatcaccgagctggaggacagcttcagcaagcaggtgaagagcctggccgagagcatcgacgaggccctgaactgccaccccagcggccccatgagcgaggagcccggcagcgcccagctggagaagagagagagcaaggagcagcaggaggacagcagcgccaccagcttcagcgacctgcccctgtacctggacgacaccgtgccccagcagagccccgagagactgcccagcaccgagccccccccccagggcagacccgagttctgggcccccgcccccctgccccccgtgcccccccccgtgcccagcggcaccagagaggacggcagcagagaggagggcaccagaagaggccccggctgcctggagtgcagagacttcagactgagagccgcccacctgcccctgctgaccatcgagccccccagcgacagcagcgtggacctgagcgacagaagcgacagaggcagcgtgcacagacagctggtgtacgaggccgacggctgcagcccccacggcaccctgaagcacaagggcccccccggcagagcccccatcccccacagacactaccccgcccccgagggccccgcccccgccccccccggccccctgccccccgcccccaacagcggcaccggccccagcggcgtggccggcggcagaagactgggcaagtgcgaggccgccggcgagaacagcgacggcggcgacaacgagagcctggagagcagcagcaacagcaacgagaccatcaactgcagcagcggcagcagcagcagagacagcctgagagagccccccgccaccggcctgtgcaagcagacctaccagagagagaccagacacagctgggacagccccgccttcaacaacgacgtggtgcagagaagacactacagaatcggcctgaacctgttcaacaagaagcccgagaagggcatccagtacctgatcgagagaggcttcctgagcgacacccccgtgggcgtggcccacttcatcctggagagaaagggcctgagcagacagatgatcggcgagttcctgggcaacagacagaagcagttcaacagagacgtgctggactgcgtggtggacgagatggacttcagcagcatggacctggacgacgccctgagaaagttccagagccacatcagagtgcagggcgaggcccagaaggtggagagactgatcgaggccttcagccagagatactgcgtgtgcaaccccgccctggtgagacagttcagaaaccccgacaccatcttcatcctggccttcgccatcatcctgctgaacaccgacatgtacagccccagcgtgaaggccgagagaaagatgaagctggacgacttcatcaagaacctgagaggcgtggacaacggcgaggacatccccagagacctgctggtgggcatctaccagagaatccagggcagagagctgagaaccaacgacgaccacgtgagccaggtgcaggccgtggagagaatgatcgtgggcaagaagcccgtgctgagcctgccccacagaagactggtgtgctgctgccagctgtacgaggtgcccgaccccaacagaccccagagactgggcctgcaccagagagaggtgttcctgttcaacgacctgctggtggtgaccaagatcttccagaagaagaagatcctggtgacctacagcttcagacagagcttccccctggtggagatgcacatgcagctgttccagaacagctactaccagttcggcatcaagctgctgagcgccgtgcccggcggcgagagaaaggtgctgatcatcttcaacgcccccagcctgcaggacagactgagattcaccagcgacctgagagagagcatcgccgaggtgcaggagatggagaagtacagagtggagagcgagctggagaagcagaagggcatgatgagacccaacgccagccagcccggcggcgccaaggacagcgtgaacggcaccatggccagaagcagcctggaggacacctacggcgccggcgacggcctgaagagaggcgccctgagcagcagcctgagagacctgagcgacgccggcgtgtgctactag

SEQ ID NO: 184217 - protein, 442 aa, Artificial Sequence
  derived and/or modified sequence
MSACREIALLRELKHPNVIALQKVFLSHSDRKVWLLFDYAEHDLWHIIKFHRASKANKKPMQLPRSMVKSLLYQILDGIHYLHANWVLHRDLKPANILVMGEGPERGRVKIADMGFARLFNSPLKPLADLDPVVVTFWYRAPELLLGARHYTKAIDIWAIGCIFAELLTSEPIFHCRQEDIKTSNPFHHDQLDRIFSVMGFPADKDWEDIRKMPEYPTLQKDFRRTTYANSSLIKYMEKHKVKPDSKVFLLLQKLLTMDPTKRITSEQALQDPYFQEDPLPTLDVFAGCQIPYPKREFLNEDDPEEKGDKNQQQQQNQHQQPTAPPQQAAAPPQAPPPQQNSTQTNGTAGGAGAGVGGTGAGLQHSQDSSLNQVPPNKKPRLGPSGANSGGPVMPSDYQHSSSRLNYQSSVQGSSQSQSTLGYSSSSQQSSQYHPSHQAHRY

SEQ ID NO: 184218 - protein, 502 aa, Artificial Sequence
  derived and/or modified sequence
MDYDFKAKLAAERERVEDLFEYEGCKVGRGTYGHVYKARRKDGKDEKEYALKQIEGTGISMSACREIALLRELKHPNVIALQKVFLSHSDRKVWLLFDYAEHDLWHIIKFHRASKANKKPMQLPRSMVKSLLYQILDGIHYLHANWVLHRDLKPANILVMGEGPERGRVKIADMGFARLFNSPLKPLADLDPVVVTFWYRAPELLLGARHYTKAIDIWAIGCIFAELLTSEPIFHCRQEDIKTSNPFHHDQLDRIFSVMGFPADKDWEDIRKMPEYPTLQKDFRRTTYANSSLIKYMEKHKVKPDSKVFLLLQKLLTMDPTKRITSEQALQDPYFQEDPLPTLDVFAGCQIPYPKREFLNEDDPEEKGDKNQQQQQNQHQQPTAPPQQAAAPPQAPPPQQNSTQTNGTAGGAGAGVGGTGAGLQHSQDSSLNQVPPNKKPRLGPSGANSGGPVMPSDYQHSSSRLNYQSSVQGSSQSQSTLGYSSSSQQSSQYHPSHQAHRY

SEQ ID NO: 184219 - protein, 441 aa, Artificial Sequence
  derived and/or modified sequence
SLTRNIQLLRELKHPNVIALQKVFLSHSDRKVWLLFDYAEHDLWHIIKFHRASKANKKPMQLPRSMVKSLLYQILDGIHYLHANWVLHRDLKPANILVMGEGPERGRVKIADMGFARLFNSPLKPLADLDPVVVTFWYRAPELLLGARHYTKAIDIWAIGCIFAELLTSEPIFHCRQEDIKTSNPFHHDQLDRIFSVMGFPADKDWEDIRKMPEYPTLQKDFRRTTYANSSLIKYMEKHKVKPDSKVFLLLQKLLTMDPTKRITSEQALQDPYFQEDPLPTLDVFAGCQIPYPKREFLNEDDPEEKGDKNQQQQQNQHQQPTAPPQQAAAPPQAPPPQQNSTQTNGTAGGAGAGVGGTGAGLQHSQDSSLNQVPPNKKPRLGPSGANSGGPVMPSDYQHSSSRLNYQSSVQGSSQSQSTLGYSSSSQQSSQYHPSHQAHRY

SEQ ID NO: 184220 - protein, 251 aa, Artificial Sequence
  derived and/or modified sequence
MSACREIALLRELKHPNVIALQKVFLSHSDRKVWLLFDYAEHDLWHIIKFHRASKANKKPMQLPRSMVKSLLYQILDGIHYLHANWVLHRDLKPANILVMGEGPERGRVKIADMGFARLFNSPLKPLADLDPVVVTFWYRAPELLLGARHYTKAIDIWAIGCIFAELLTSEPIFHCRQEDIKTSNPFHHDQLDRIFSVMGFPADKDWEDIRKMPEYPTLQKDFRRTTYANSSLIKYMEKHKVKPDSKVFLL

SEQ ID NO: 184221 - DNA, 1509 bp, Artificial Sequence
  derived and/or modified sequence
atggactacgacttcaaggccaagctggccgccgagagagagagagtggaggacctgttcgagtacgagggctgcaaggtgggcagaggcacctacggccacgtgtacaaggccagaagaaaggacggcaaggacgagaaggagtacgccctgaagcagatcgagggcaccggcatcagcatgagcgcctgcagagagatcgccctgctgagagagctgaagcaccccaacgtgatcgccctgcagaaggtgttcctgagccacagcgacagaaaggtgtggctgctgttcgactacgccgagcacgacctgtggcacatcatcaagttccacagagccagcaaggccaacaagaagcccatgcagctgcccagaagcatggtgaagagcctgctgtaccagatcctggacggcatccactacctgcacgccaactgggtgctgcacagagacctgaagcccgccaacatcctggtgatgggcgagggccccgagagaggcagagtgaagatcgccgacatgggcttcgccagactgttcaacagccccctgaagcccctggccgacctggaccccgtggtggtgaccttctggtacagagcccccgagctgctgctgggcgccagacactacaccaaggccatcgacatctgggccatcggctgcatcttcgccgagctgctgaccagcgagcccatcttccactgcagacaggaggacatcaagaccagcaaccccttccaccacgaccagctggacagaatcttcagcgtgatgggcttccccgccgacaaggactgggaggacatcagaaagatgcccgagtaccccaccctgcagaaggacttcagaagaaccacctacgccaacagcagcctgatcaagtacatggagaagcacaaggtgaagcccgacagcaaggtgttcctgctgctgcagaagctgctgaccatggaccccaccaagagaatcaccagcgagcaggccctgcaggacccctacttccaggaggaccccctgcccaccctggacgtgttcgccggctgccagatcccctaccccaagagagagttcctgaacgaggacgaccccgaggagaagggcgacaagaaccagcagcagcagcagaaccagcaccagcagcccaccgcccccccccagcaggccgccgcccccccccaggccccccccccccagcagaacagcacccagaccaacggcaccgccggcggcgccggcgccggcgtgggcggcaccggcgccggcctgcagcacagccaggacagcagcctgaaccaggtgccccccaacaagaagcccagactgggccccagcggcgccaacagcggcggccccgtgatgcccagcgactaccagcacagcagcagcagactgaactaccagagcagcgtgcagggcagcagccagagccagagcaccctgggctacagcagcagcagccagcagagcagccagtaccaccccagccaccaggcccacagatactag

SEQ ID NO: 184222 - DNA, 6067 bp, Artificial Sequence
  derived and/or modified sequence
agggggaggggcggccctggtacgcaggcgcgcatgctttgtgggggcgaggctgtggtggcccgagattccaggagggcttcgtgtatggacctcaagcgttggaggtagcagacttttcagcagaagaaaagatgaaaaggaatatgcattgaagcaaattgaaggcacaggaatatccatgtcggcttgtagagagattgcacttttgcgagaattgaagcaccctaatgtgattgcattgcagaaggtgttcctttctcacagtgacaggaaggtatggctgctgtttgattatgcagagcatgacttgtggcatattattaagtttcaccgtgcatcaaaagcaaataaaaagcccatgcagttgccaagatctatggttaaatccttactttaccagattcttgatggtatccattacctccatgcaaattgggtgcttcacagagacttgaaaccagcaaatatcctagtaatgggagaaggtcctgagagggggagagtcaaaatagctgacatgggttttgccagattattcaattctcctctaaagccactagcagatttggatccagtagttgtgacattttggtatcgggctccagaacttttgcttggtgcaaggcattatacaaaggccattgatatatgggcaataggttgtatatttgctgaattgttgacttcggaacctatttttcactgtcgtcaggaagatataaaaacaagcaatccctttcatcatgatcaactggatcggatatttagtgtcatggggtttcctgcagataaagactgggaagatattagaaagatgccagaatatcccacacttcaaaaagactttagaagaacaacgtatgccaacagtagcctcataaagtacatggagaaacacaaggtcaagcctgacagcaaagtgttcctcttgcttcagaaactcctgaccatggatccaaccaagagaattacctcggagcaagctctgcaggatccctattttcaggaggaccctttgccaacattagatgtatttgccggctgccagattccataccccaaacgagaattccttaatgaagatgatcctgaagaaaaaggtgacaagaatcagcaacagcagcagaaccagcatcagcagcccacagcccctccacagcaggcagcagcccctccacaggcgcccccaccacagcagaacagcacccagaccaacgggaccgcaggtggggctggggccggggtcgggggcaccggagcagggttgcagcacagccaggactccagcctgaaccaggtgcctccaaacaagaagccacggctagggccttcaggcgcaaactcaggtggacctgtgatgccctcggattatcagcactccagttctcgcctgaattaccaaagcagcgttcagggatcctctcagtcccagagcacacttggctactcttcctcgtctcagcagagctcacagtaccacccatctcaccaggcccaccggtactgaccagctcccgttgggccaggccagcccagcccagagcacaggctccagcaatatgtctgcattgaaaagaaccaaaaaaatgcaaactatgatgccatttaaaactcatacacatgggaggaaaaccttatatactgagcattgtgcaggactgatagctcttctttattgacttaaagaagattcttgtgaagtttccccagcaccccttccctgcatgtgttccattgtgacttctctgataaagcgtctgatctaatcccagcacttctgtaaccttcagcatttctttgaaggatttcctggtgcacctttctcatgctgtagcaatcactatggtttatcttttcaaagctcttttaataggattttaatgttttagaaacaggattccagtggtgtatagttttatacttcatgaactgatttagcaacacaggtaaaaatgcaccttttaaagcactacgttttcacagacaataactgttctgctcatggaagtcttaaacagaaactgttactgtcccaaagtactttactattacgttcgtatttatctagtttcagggaaggtctaataaaaagacaagcggtgggacagagggaacctacaaccaaaaactgcctagatctttgcagttatgtgctttatgccacgaagaactgaagtatgtggtaatttttatagaatcattcatatggaactgagttcccagcatcatcttattctgaatagcattcagtaattaagaattacaattttaaccttcatgtagctaagtctaccttaaaaagggtttcaagagctttgtacagtctcgatggcccacaccaaaacgctgaagagagtaacaactgcactaggatttctgtaaggagtaattttgatcaaaagacgtgttacttccctttgaaggaaaagtttttagtgtgtattgtacataaagtcggcttctctaaagaaccattggtttcttcacatctgggtctgcgtgagtaactttcttgcataatcaaggttactcaagtagaagcctgaaaattaatctgcttttaaaataaagagcagtgttctccattcgtatttgtattagatatagagtgactatttttaaagcatgttaaaaatttaggttttattcatgtttaaagtatgtattatgtatgcataattttgctgttgttactgaaacttaattctatcaagaatctttttcattgcactgaatgatttcttttgcccctaggagaaaacttaataattgtgcctaaaaactatgggcggatagtataagactatactagacaaagtgaatatttgcatttccattatctatgaattagtggctgagttctttcttagctgctttaaggagcccctcactccccagagtcaaaaggaaatgtaaaaacttagagctcccattgtaatgtaaggggcaagaaatttgtgttcttctgaatgctactagcagcaccagccttgttttaaatgttttcttgagctagaagaaatagctgattattgtatatgcaaattacatgcatttttaaaaactattctttctgaacttatctacctggttatgatactgtgggtccatacacaagtaaaataagattagacagaagccagtatacattttgcactattgatgtgatactgtagccagccaggaccttactgatctcagcataataatgctcactaataatgaagtctgcatagtgacactcatcaagactgaagatgaagcaggttacgtgctccattggaaggagtttctgatagtctcctgctgttttaccccttccattttttaaaataagaaattagcagccctctgcataatgtagctgcctatatgcagttttatcctgtgccctaaagcctcactgtccagagctgttggtcatcagatgcttattgcaccctcaccatgtgcctggtgccctgctgggtagagaacacagaggacagggcatacttcttgtccttaaggagcttgtgatctgtgacagtaagccctcctgggatgtctgtgccatgtgattgacttacaagtgaaactgtcttataatatgaaggtctttttgtttacttctaaacccacttgggtagttactatccccaaatctgttctgtaaataatattatggaagggtttctatgtcagtctaccttagagaaagccagtgattcaatatcacaaaaggcattgacgtatctttgaaatgttcacagcagccttttaacaacaactgggtggtccttgtaggcagaacatactctcctaagtggttgtaggaaattgcaaggaaaatagaaggtctgttcttgctctcaaggaggttacctttaataaaagaagacaaacccagatagatatgtaaaccaaaatactatgccccttaatactttataagcagcattgttaaatagttcttacgcttatacattcacagaactaccctgttttccttgtatataatgacttttgctggcagaactgaaatataaactgtaaggggatttcgtcagttgctcccagtatacaatatcctccaggacatagccagaaatctccattccacacatgactgagttcctatccctgcactggtactggctcttttctcctctttccttgcctcagggttcgtgctacccactgattccctttacccttagtaataattttggatcattttctttcctttaaaggggaacaaagccttttttttttttgagacggagtgttgctctgtcacccaagctggagtgcagtggcacgatcttggctcactccaacctccaccttccaggttcaagtgattctcctgcctcagcctcccgagtagctgggactacgggcacgcaccaccacgtctggctaatttttgtatttttagtagagatggggtttcaccctattggtcaggctggtcttgaattcctcacctcaggtcatccgcctgtctcggcctcccgaagtgctgggattataggtgtgagccaccgcacccagttgggaacaaagcctttttaacacacgtaagggccctcaaaccgtgggacctctaaggagacctttgaagctttttgagggcaaactttacctttgtggtccccaaatgatggcatttctctttgaaatttattagatactgttatgtcccccaagggtacaggaggggcatccctcagcctatgggaacacccaaactaggaggggttattgacaggaaggaatgaatccaagtgaaggctttctgctcttcgtgttacaaaccagtttcagagttagctttctggggaggtgtgtgtttgtgaaaggaattcaagtgttgcaggacagatgagctcaaggtaaggtagctttggcagcagggctgatactatgaggctgaaacaatccttgtgatgaagtagatcatgcagtgacatacaaagaccaaggattatgtatatttttatatctctgtggttttgaaactttagtacttagaattttggccttctgcactactcttttgctcttacgaacataatggactcttaagaatggaaagggatgacatttacctatgtgtgctgcctcattcctggtgaagcaactgctacttgttctctatgcctctaaaatgatgctgttttctctgctaaaggtaaaagaaaagaaaaaaatagttggaaaataagacatgcaacttgatgtgcttttgagtaaatttatgcagcagaaactatacaatgaaggaagaattctatggaaattacaaatccaaaactctatgatgatgtcttcctagggagtagagaaaggcagtgaaatggcagttagaccaacagaggcttgaaggattcaagtacaagtaatattttgtataaaacatagcagtttaggtccccataatcctcaaaaatagtcacaaatataacaaagttcattgttttagggtttttaaaaaacgtgttgtacctaaggccatacttactcttctatgctatcactgcaaaggggtgatatgtatgtattatataaaaaaaaaaacccttaatgcactgttatctcctaaatatttagtaaattaatactatttaatttttttaaagatttgtctgtgtagacactaaaagtattacacaaaatctggactgaaggtgtcctttttaacaacaatttaaagtactttttatatatgttatgtagtatatcctttctaaactgcctagtttgtatattcctataattcctatttgtgaagtgtacctgttcttgtctcttttttcagtcattttctgcacgcatccccctttatatggttatagagatgactgtagcttttcgtgctccactgcgaggtttgtgctcagagccgctgcaccccagcgaggcctgctccatggagtgcaggacgagctactgctttggagcgagggtttcctgcttttgagttgacctgacttccttcttgaaatgactgttaaaactaaaataaattacattgcatttattttatattcttggttgaaataaaatttaattgactttg

SEQ ID NO: 184223 - DNA, 6246 bp, Artificial Sequence
  derived and/or modified sequence
tgtggccgccgaggagtcccttgctgaaggcggaccgcggagcggcgggcggcgggcggcgcgcgcgcgcgcgcgagaggcggctgttggagaagtggagcggcggtcgcggggggaggaggaggagggactgagcggcggcggcccccgcgtcccgtgcctctatgggggaagcagacaatggattatgatttcaaggcgaagctggcggcggagcgggagcgggtggaggatttgtttgagtacgaagggtgcaaagtgggacgcggcacctacggtcacgtctacaaggcgaggcggaaagatggaaaagatgaaaaggaatatgcattgaagcaaattgaaggcacaggaatatccatgtcggcttgtagagagattgcacttttgcgagaattgaagcaccctaatgtgattgcattgcagaaggtgttcctttctcacagtgacaggaaggtatggctgctgtttgattatgcagagcatgacttgtggcatattattaagtttcaccgtgcatcaaaagcaaataaaaagcccatgcagttgccaagatctatggttaaatccttactttaccagattcttgatggtatccattacctccatgcaaattgggtgcttcacagagacttgaaaccagcaaatatcctagtaatgggagaaggtcctgagagggggagagtcaaaatagctgacatgggttttgccagattattcaattctcctctaaagccactagcagatttggatccagtagttgtgacattttggtatcgggctccagaacttttgcttggtgcaaggcattatacaaaggccattgatatatgggcaataggttgtatatttgctgaattgttgacttcggaacctatttttcactgtcgtcaggaagatataaaaacaagcaatccctttcatcatgatcaactggatcggatatttagtgtcatggggtttcctgcagataaagactgggaagatattagaaagatgccagaatatcccacacttcaaaaagactttagaagaacaacgtatgccaacagtagcctcataaagtacatggagaaacacaaggtcaagcctgacagcaaagtgttcctcttgcttcagaaactcctgaccatggatccaaccaagagaattacctcggagcaagctctgcaggatccctattttcaggaggaccctttgccaacattagatgtatttgccggctgccagattccataccccaaacgagaattccttaatgaagatgatcctgaagaaaaaggtgacaagaatcagcaacagcagcagaaccagcatcagcagcccacagcccctccacagcaggcagcagcccctccacaggcgcccccaccacagcagaacagcacccagaccaacgggaccgcaggtggggctggggccggggtcgggggcaccggagcagggttgcagcacagccaggactccagcctgaaccaggtgcctccaaacaagaagccacggctagggccttcaggcgcaaactcaggtggacctgtgatgccctcggattatcagcactccagttctcgcctgaattaccaaagcagcgttcagggatcctctcagtcccagagcacacttggctactcttcctcgtctcagcagagctcacagtaccacccatctcaccaggcccaccggtactgaccagctcccgttgggccaggccagcccagcccagagcacaggctccagcaatatgtctgcattgaaaagaaccaaaaaaatgcaaactatgatgccatttaaaactcatacacatgggaggaaaaccttatatactgagcattgtgcaggactgatagctcttctttattgacttaaagaagattcttgtgaagtttccccagcaccccttccctgcatgtgttccattgtgacttctctgataaagcgtctgatctaatcccagcacttctgtaaccttcagcatttctttgaaggatttcctggtgcacctttctcatgctgtagcaatcactatggtttatcttttcaaagctcttttaataggattttaatgttttagaaacaggattccagtggtgtatagttttatacttcatgaactgatttagcaacacaggtaaaaatgcaccttttaaagcactacgttttcacagacaataactgttctgctcatggaagtcttaaacagaaactgttactgtcccaaagtactttactattacgttcgtatttatctagtttcagggaaggtctaataaaaagacaagcggtgggacagagggaacctacaaccaaaaactgcctagatctttgcagttatgtgctttatgccacgaagaactgaagtatgtggtaatttttatagaatcattcatatggaactgagttcccagcatcatcttattctgaatagcattcagtaattaagaattacaattttaaccttcatgtagctaagtctaccttaaaaagggtttcaagagctttgtacagtctcgatggcccacaccaaaacgctgaagagagtaacaactgcactaggatttctgtaaggagtaattttgatcaaaagacgtgttacttccctttgaaggaaaagtttttagtgtgtattgtacataaagtcggcttctctaaagaaccattggtttcttcacatctgggtctgcgtgagtaactttcttgcataatcaaggttactcaagtagaagcctgaaaattaatctgcttttaaaataaagagcagtgttctccattcgtatttgtattagatatagagtgactatttttaaagcatgttaaaaatttaggttttattcatgtttaaagtatgtattatgtatgcataattttgctgttgttactgaaacttaattctatcaagaatctttttcattgcactgaatgatttcttttgcccctaggagaaaacttaataattgtgcctaaaaactatgggcggatagtataagactatactagacaaagtgaatatttgcatttccattatctatgaattagtggctgagttctttcttagctgctttaaggagcccctcactccccagagtcaaaaggaaatgtaaaaacttagagctcccattgtaatgtaaggggcaagaaatttgtgttcttctgaatgctactagcagcaccagccttgttttaaatgttttcttgagctagaagaaatagctgattattgtatatgcaaattacatgcatttttaaaaactattctttctgaacttatctacctggttatgatactgtgggtccatacacaagtaaaataagattagacagaagccagtatacattttgcactattgatgtgatactgtagccagccaggaccttactgatctcagcataataatgctcactaataatgaagtctgcatagtgacactcatcaagactgaagatgaagcaggttacgtgctccattggaaggagtttctgatagtctcctgctgttttaccccttccattttttaaaataagaaattagcagccctctgcataatgtagctgcctatatgcagttttatcctgtgccctaaagcctcactgtccagagctgttggtcatcagatgcttattgcaccctcaccatgtgcctggtgccctgctgggtagagaacacagaggacagggcatacttcttgtccttaaggagcttgtgatctgtgacagtaagccctcctgggatgtctgtgccatgtgattgacttacaagtgaaactgtcttataatatgaaggtctttttgtttacttctaaacccacttgggtagttactatccccaaatctgttctgtaaataatattatggaagggtttctatgtcagtctaccttagagaaagccagtgattcaatatcacaaaaggcattgacgtatctttgaaatgttcacagcagccttttaacaacaactgggtggtccttgtaggcagaacatactctcctaagtggttgtaggaaattgcaaggaaaatagaaggtctgttcttgctctcaaggaggttacctttaataaaagaagacaaacccagatagatatgtaaaccaaaatactatgccccttaatactttataagcagcattgttaaatagttcttacgcttatacattcacagaactaccctgttttccttgtatataatgacttttgctggcagaactgaaatataaactgtaaggggatttcgtcagttgctcccagtatacaatatcctccaggacatagccagaaatctccattccacacatgactgagttcctatccctgcactggtactggctcttttctcctctttccttgcctcagggttcgtgctacccactgattccctttacccttagtaataattttggatcattttctttcctttaaaggggaacaaagccttttttttttttgagacggagtgttgctctgtcacccaagctggagtgcagtggcacgatcttggctcactccaacctccaccttccaggttcaagtgattctcctgcctcagcctcccgagtagctgggactacgggcacgcaccaccacgtctggctaatttttgtatttttagtagagatggggtttcaccctattggtcaggctggtcttgaattcctcacctcaggtcatccgcctgtctcggcctcccgaagtgctgggattataggtgtgagccaccgcacccagttgggaacaaagcctttttaacacacgtaagggccctcaaaccgtgggacctctaaggagacctttgaagctttttgagggcaaactttacctttgtggtccccaaatgatggcatttctctttgaaatttattagatactgttatgtcccccaagggtacaggaggggcatccctcagcctatgggaacacccaaactaggaggggttattgacaggaaggaatgaatccaagtgaaggctttctgctcttcgtgttacaaaccagtttcagagttagctttctggggaggtgtgtgtttgtgaaaggaattcaagtgttgcaggacagatgagctcaaggtaaggtagctttggcagcagggctgatactatgaggctgaaacaatccttgtgatgaagtagatcatgcagtgacatacaaagaccaaggattatgtatatttttatatctctgtggttttgaaactttagtacttagaattttggccttctgcactactcttttgctcttacgaacataatggactcttaagaatggaaagggatgacatttacctatgtgtgctgcctcattcctggtgaagcaactgctacttgttctctatgcctctaaaatgatgctgttttctctgctaaaggtaaaagaaaagaaaaaaatagttggaaaataagacatgcaacttgatgtgcttttgagtaaatttatgcagcagaaactatacaatgaaggaagaattctatggaaattacaaatccaaaactctatgatgatgtcttcctagggagtagagaaaggcagtgaaatggcagttagaccaacagaggcttgaaggattcaagtacaagtaatattttgtataaaacatagcagtttaggtccccataatcctcaaaaatagtcacaaatataacaaagttcattgttttagggtttttaaaaaacgtgttgtacctaaggccatacttactcttctatgctatcactgcaaaggggtgatatgtatgtattatataaaaaaaaaaacccttaatgcactgttatctcctaaatatttagtaaattaatactatttaatttttttaaagatttgtctgtgtagacactaaaagtattacacaaaatctggactgaaggtgtcctttttaacaacaatttaaagtactttttatatatgttatgtagtatatcctttctaaactgcctagtttgtatattcctataattcctatttgtgaagtgtacctgttcttgtctcttttttcagtcattttctgcacgcatccccctttatatggttatagagatgactgtagcttttcgtgctccactgcgaggtttgtgctcagagccgctgcaccccagcgaggcctgctccatggagtgcaggacgagctactgctttggagcgagggtttcctgcttttgagttgacctgacttccttcttgaaatgactgttaaaactaaaataaattacattgcatttattttatattcttggttgaaataaaatttaattgactttg

SEQ ID NO: 184224 - DNA, 955 bp, Artificial Sequence
  derived and/or modified sequence
agcgggtggaggatttgtttgagtacgaagggtgcaaagtgggacgcggcacctacggtcacgtctacaaggcgaggcggaaagatggattccaggagggcttcgtgtatggacctcaagcgttggaggtagcagacttttcagcagaagaaaagatgaaaaggaatatgcattgaagcaaattgaaggcacaggaatatccatgtcggcttgtagagagattgcacttttgcgagaattgaagcaccctaatgtgattgcattgcagaaggtgttcctttctcacagtgacaggaaggtatggctgctgtttgattatgcagagcatgacttgtggcatattattaagtttcaccgtgcatcaaaagcaaataaaaagcccatgcagttgccaagatctatggttaaatccttactttaccagattcttgatggtatccattacctccatgcaaattgggtgcttcacagagacttgaaaccagcaaatatcctagtaatgggagaaggtcctgagagggggagagtcaaaatagctgacatgggttttgccagattattcaattctcctctaaagccactagcagatttggatccagtagttgtgacattttggtatcgggctccagaacttttgcttggtgcaaggcattatacaaaggccattgatatatgggcaataggttgtatatttgctgaattgttgacttcggaacctatttttcactgtcgtcaggaagatataaaaacaagcaatccctttcatcatgatcaactggatcggatatttagtgtcatggggtttcctgcagataaagactgggaagatattagaaagatgccagaatatcccacacttcaaaaagactttagaagaacaacgtatgccaacagtagcctcataaagtacatggagaaacacaaggtcaagcctgacagcaaagtgttcctcttg

SEQ ID NO: 184225 - DNA, 1509 bp, Artificial Sequence
  derived and/or modified sequence
atggattatgactttaaagctaaactggctgcagaacgggagagggtggaagatttgttcgaatacgagggatgtaaagttggaagagggacttacgggcacgtctataaggcacggcgcaaagatggtaaagacgagaaggagtatgcactgaaacaaatcgaaggcaccgggatttctatgtctgcgtgccgggagatcgccctgcttcgcgaactgaaacatccaaacgtgattgctctccagaaggtttttctaagtcacagcgatcgaaaagtgtggctactcttcgattacgctgagcatgacctctggcatattatcaagttccatagggcctctaaggctaacaaaaaacctatgcagctgccaagatccatggtcaagagcctgttatatcaaatactcgatggcatacactatctgcatgcaaattgggtgctacaccgggacttaaagcctgcaaatattcttgtgatgggagaaggccccgagagagggcgggtcaagattgctgacatggggttcgcccggctattcaattctcccctgaaaccacttgcagacttagaccccgtcgtcgttaccttctggtatagggccccagagctgttgttaggcgctcgccattataccaaggccatcgatatctgggccattggatgcatctttgcagagcttctgacctccgagcccattttccattgtcgacaagaggacatcaagaccagtaatccattccatcatgaccagctggatcgtatcttttcagtgatggggtttcctgcagataaagactgggaggatattcgaaaaatgcctgaatatcccacccttcagaaggacttccgccgtaccacgtacgcaaactcttccctgattaagtatatggagaagcacaaggtcaaaccagatagtaaagtctttcttcttcttcagaagctgcttaccatggatcccaccaaacgaatcacctcagagcaagccttacaggatccctacttccaggaggacccactgcctaccttagacgtgtttgcaggatgccagatcccgtatcccaaaagggaattcctgaacgaggacgacccagaggagaaaggcgacaaaaatcaacagcagcagcagaaccagcaccagcagccaacagctcctccacagcaggcagcagccccaccccaggctccccctccccagcagaatagtacccaaactaatggcaccgcaggcggcgccggcgcaggtgttggtggtacaggtgccgggcttcaacacagtcaggacagcagtctcaaccaagtgccccctaataagaaaccacgcctgggcccttctggcgctaatagcgggggccctgtgatgcccagtgattaccagcacagctcaagcaggcttaactatcagtcgagtgttcagggctcctcccaatcacagtccacgcttggctattcatcttccagtcagcagtcctcgcagtaccatccctcacaccaggctcatagatactag

SEQ ID NO: 184226 - DNA, 1509 bp, Artificial Sequence
  derived and/or modified sequence
atggactatgacttcaaggccaagctggccgctgagcgggagcgggtggaggacctgtttgaatatgagggctgcaaggtgggccggggcacctacggccacgtgtacaaggcccggaggaaggatggcaaggatgagaaggagtatgccctgaagcagatcgagggcaccggcatctccatgtctgcctgccgggagatcgccctgctgcgggagctgaagcaccccaacgtgattgccctgcagaaggtgttcctgagccacagcgacaggaaggtgtggctgctgtttgattatgcagagcatgacctgtggcacatcatcaagttccaccgggccagcaaggccaacaagaagcccatgcagctgcccaggtccatggtgaagagcctgctgtaccagatcctggatggcatccactacctgcacgccaactgggtgctgcaccgggacctgaagccagccaacatcctggtgatgggagagggccctgagcggggccgggtgaagattgctgacatgggctttgcccggctcttcaacagccccctgaagcccctggccgacctggaccctgtggtggtgaccttctggtaccgggcccctgagctgctgctgggcgcccggcactacaccaaggccatcgacatctgggccatcggctgcatctttgctgagctgctgaccagcgagcccatcttccactgccggcaggaggacatcaagaccagcaaccccttccaccacgaccagctggaccgcatcttctctgtgatgggcttccctgctgacaaggactgggaggacatcaggaagatgcctgagtaccccaccctgcagaaggacttccggaggaccacctacgccaacagcagcctcatcaagtacatggagaagcacaaggtgaagccagacagcaaggtgttcctgctgctgcagaagctgctgaccatggaccccaccaagaggatcaccagcgagcaggccctgcaggacccctacttccaggaggaccccctgcccaccctggatgtgtttgctggctgccagatcccctaccccaagcgggagttcctgaatgaagatgatcctgaggagaagggggacaagaaccagcagcagcagcagaaccagcaccagcagcccacagccccaccccagcaggccgccgccccaccccaggcccccccaccccagcagaacagcacccagaccaacggcacagctggaggagctggggccggcgtgggcggcactggagctggcctgcagcacagccaggacagcagcctgaaccaggtgccccccaacaagaagccccggctgggccccagcggggccaacagcggcggccctgtgatgcccagcgactaccagcacagcagcagccggctgaactaccagagctctgtgcagggcagcagccagagccagagcaccctgggctacagcagcagcagccagcagagcagccagtaccaccccagccaccaggcccaccgctactag

SEQ ID NO: 184227 - DNA, 1509 bp, Artificial Sequence
  derived and/or modified sequence
atggactacgacttcaaggccaagctggccgccgagcgggagcgggtagaggatttatttgagtatgagggctgtaaggtgggccgcgggacgtacggtcacgtctacaaggcccgacgaaaggacgggaaggatgaaaaggagtatgcactaaagcaaatcgagggcaccggaatctcaatgtcagcttgcagggagatcgccctgctgcgcgagctaaaacatcccaatgtgattgccttacagaaagtgtttctgtcccactcagacagaaaagtgtggctgctcttcgactacgctgagcatgatctctggcatatcatcaaatttcaccgcgcttcgaaggctaataagaagcccatgcagttaccacgaagtatggttaagtcactgctgtatcaaatactggacggaattcattacctccatgccaactgggtgctgcaccgggatcttaagcccgctaatatcttggtcatgggggagggccccgagcgcggacgggtaaaaatagcagatatgggattcgccaggctgtttaattcacctctgaagccactggcagatctggaccctgtggtggtgactttctggtatcgcgcccccgagcttctgttaggggctagacactataccaaagcgatcgacatatgggcaattggctgcatatttgcggagctgctaacatcggagccaattttccactgtagacaggaggatatcaaaacgtcaaatccatttcaccatgaccagctggaccggatattttccgtgatgggtttcccagcagacaaagactgggaagacattcggaagatgccggagtaccccacattgcagaaggacttcaggagaacaacatatgccaattccagccttatcaaatacatggagaaacataaggtgaaacctgactctaaagtgttcctgttactccaaaagcttttgacaatggatcccactaagaggataactagcgagcaggccctgcaagacccatattttcaggaggatcctttacctacccttgacgttttcgccggctgccaaattccatacccaaagcgggaattcctgaacgaggatgatcccgaggagaaaggagacaagaatcagcagcaacagcagaatcagcatcagcaaccaactgcgcccccccagcaggctgccgccccgcctcaagcacccccccctcagcagaactcaacacagacaaatggtacagcagggggcgccggagccggagtggggggtacaggggccgggctgcagcatagccaagactccagccttaatcaggtgccgccaaataaaaagccacgactcgggccgtcaggagccaactctggtggccccgtcatgccctcagattatcagcactcaagttctcggctgaactaccaatcttctgtacaaggtagctcccagagccagagcaccctcggctacagctcaagttcacagcagtcatcgcagtaccacccaagtcaccaagcccatagatattag

SEQ ID NO: 184228 - DNA, 1509 bp, Artificial Sequence
  derived and/or modified sequence
atggattacgacttcaaggccaagttggctgctgagcgagaaagagtagaagatctattcgagtatgaagggtgcaaagttggacgcggtacctacgggcacgtgtataaggcacggagaaaagacggtaaggacgagaaggagtatgccctgaagcagattgaaggtacaggtatcagcatgtcagcctgtagagaaattgcccttctgagggagctgaaacatcccaacgtcattgccctccagaaggtattcctgtcccattccgatcgaaaggtatggttactcttcgattatgccgagcatgatctgtggcacattataaagtttcacagggcttcaaaggccaataagaagcctatgcagctccctagatccatggtcaagagccttctgtaccagatcttggacgggatccattatctccacgctaattgggtgttgcaccgcgaccttaaacccgctaatattctggtaatgggagaaggtcctgagcggggaagggtaaaaattgcggacatgggcttcgctcgtctttttaacagccccctaaagccactcgctgatctggatccagtggtggtgaccttctggtacagggcaccagagctactgttgggcgctagacattacacgaaagccatcgacatatgggcaataggttgcatcttcgccgaacttctcaccagcgagcccatatttcactgtcgacaggaggatataaaaactagcaacccttttcaccatgatcagctggatcggattttcagcgtaatgggattccctgcagacaaggattgggaggacatacgcaagatgcccgaatatcccactctccaaaaggacttcaggaggaccacctacgccaacagctctttaatcaaatacatggaaaagcacaaggttaagccagatagtaaggtatttctgttgttgcagaagctgctcaccatggatcctactaagagaatcacttcagagcaggcgctgcaggacccttatttccaagaagaccctctacccactctggacgtttttgcagggtgtcaaattccgtatcccaagagggaatttctcaacgaggatgatcctgaagaaaagggggataaaaaccagcaacagcagcagaaccagcaccagcaacccactgctcctccccagcaagctgcagcaccacctcaggccccacctccccagcagaattctacccagaccaacggaacagccggtggggctggcgctggtgtgggaggaaccggggcaggcctgcagcatagccaggacagttccctaaaccaagtgccacctaataagaagcccagactaggccctagcggtgctaactccggagggccagttatgccaagcgactaccaacacagctcctctcgcttaaactaccagtcaagtgtgcagggctccagccagagccagagcacccttggctattcgtcatcttcgcagcaatctagccagtatcacccctctcatcaggcccaccgatactag

SEQ ID NO: 184229 - protein, 690 aa, Artificial Sequence
  derived and/or modified sequence
MGAVARAHGGLRVARARESVAGGRHRGAGRPGARAAGAAAGLVRAEAGGRRAGRGRRPGRGLPTGGGGLAAAAVGREVAQGLCDAIRLDGGLDLLLRLLQAPELETRVQAARLLEQILVAENRDRVARIGLGVILNLAKEREPVELARSGSGILEHMFKHSEETCQRLVAAGGLDAVLYWCRRTDPALLRHCALALGNCALHGGQAVQRRMVEKRAAEWLFPLAFSKEDELLSLHACLAVAVLATNKEVEREVERSGTLALVEPLVASLDPGRFARCLVDASDTSQGRGPDDLQRLVPLLDSNRLEAQCIGAFYLCAEAAIKSLQGKTKVFSDIGAIQSLKRLVSYSTNGTKSALAKRALRLLGEEVPRPILPSVPSWKEAEVQTWLQQIGFSKYCESFREQQVDGDLLLRLTEEELQTDLGMKSGITRKRFFRELTELKTFANYSTCDRSNLADWLGSLDPRFRQYTYGLVSCGLDRSLLHRVSEQQLLEDCGIHLGVHRARILTAAREMLHSPLPCTGGKPSGDTPDVFISYRRNSGSQLASLLKVHLQLHGFSVFIDVEKLEAGKFEDKLIQSVMGARNFVLVLSPGALDKCMQDHDCKDWVHKEIVTALSCGKNIVPIIDGFEWPEPQVLPEDMQAVLTFNGIKWSHEYQEATIEKIIRFLQGRSSRDSSAGSDTSLEGAAPMGPT

SEQ ID NO: 184230 - protein, 722 aa, Artificial Sequence
  derived and/or modified sequence
MVLTLLLSAYKLCRFFAMSGPRRGAERLAVPGPDGGGGTGPWWAAGGPGPRVSPGAGTEVQDALERALPELQQALSALKQAGGARAVGAGLAEVFQLVEEAWLLAVGREVAQGLCDAIRLDGGLDLLLRLLQAPELETRVQAARLLEQILVAENRDRVARIGLGVILNLAKEREPVELARSGSGILEHMFKHSEETCQRLVAAGGLDAVLYWCRRTDPALLRHCALALGNCALHGGQAVQRRMVEKRAAEWLFPLAFSKEDELLSLHACLAVAVLATNKEVEREVERSGTLALVEPLVASLDPGRFARCLVDASDTSQGRGPDDLQRLVPLLDSNRLEAQCIGAFYLCAEAAIKSLQGKTKVFSDIGAIQSLKRLVSYSTNGTKSALAKRALRLLGEEVPRPILPSVPSWKEAEVQTWLQQIGFSKYCESFREQQVDGDLLLRLTEEELQTDLGMKSGITRKRFFRELTELKTFANYSTCDRSNLADWLGSLDPRFRQYTYGLVSCGLDRSLLHRVSEQQLLEDCGIHLGVHRARILTAAREMLHSPLPCTGGKPSGDTPDVFISYRRNSGSQLASLLKVHLQLHGFSVFIDVEKLEAGKFEDKLIQSVMGARNFVLVLSPGALDKCMQDHDCKDWVHKEIVTALSCGKNIVPIIDGFEWPEPQVLPEDMQAVLTFNGIKWSHEYQEATIEKIIRFLQGRSSRDSSAGSDTSLEGAAPMGPT

SEQ ID NO: 184231 - DNA, 1050 bp, Artificial Sequence
  derived and/or modified sequence
acctgaccggagagccggctagatatggcgtcctctttgcttgcgggcgagcgattggtgcgtgctttgggccccggcggggagctggagccagagcggctaccccgaaagctgcgggccgagcttgaggccgcgctggggaagaagcacaagggcggtgatagctccagtggcccccaacgcttggtttctttccgtctcatccgggatctgcaccagcatctgagagaaagggattccaaactatacctccatgagctcctagaaggcagtgaaatctatctcccagaggttgtgaagcctccacggaacccagaactagttgcccggctggagaagattaagatacagctggccaatgaggaatataaacggatcacccgcaacgtcacttgtcaggatacaagacatggtgggactctcagcgacctgggaaagcaagtgagatcattgaaggctctggtcatcaccatcttcaatttcattgtcacggtggttgctgccttcgtctgcacttaccttggaagccaatatatcttcacagaaatggcctcgagaccgcgtggcgcgcattgggctgggcgtgatcctgaacctggcgaaggaacgcgaacccgtagagctggcgcggagtgggtcaggcatcttggagcacatgttcaagcattcggaggagacatgccagaggctggtggcggccggcggcctggacgcggtgctgtattggtgccgccgcacggaccccgcgctgctgcgccactgcgcgctggcgctgggcaactgcgcgctgcacgggggccaggcggtgcagcgacgcatggtagagaagcgcgcagccgagtggctcttcccgctcgccttctccaaggaggacgagctgctttcgctgcacgcctgcctcgcagtagcggtgttggcgactaacaaggaggtggagcgcgaggtggagcgctcgggcacgctggcgctcgtggagccgcttgtggcctcgctggaccctggccgcttcgcccgctgtctggtggacgccagcgacacaagccagggccg

SEQ ID NO: 184232 - DNA, 2073 bp, Artificial Sequence
  derived and/or modified sequence
atgggcgccgtggccagagcccacggcggcctgagagtggccagagccagagagagcgtggccggcggcagacacagaggcgccggcagacccggcgccagagccgccggcgccgccgccggcctggtgagagccgaggccggcggcagaagagccggcagaggcagaagacccggcagaggcctgcccaccggcggcggcggcctggccgccgccgccgtgggcagagaggtggcccagggcctgtgcgacgccatcagactggacggcggcctggacctgctgctgagactgctgcaggcccccgagctggagaccagagtgcaggccgccagactgctggagcagatcctggtggccgagaacagagacagagtggccagaatcggcctgggcgtgatcctgaacctggccaaggagagagagcccgtggagctggccagaagcggcagcggcatcctggagcacatgttcaagcacagcgaggagacctgccagagactggtggccgccggcggcctggacgccgtgctgtactggtgcagaagaaccgaccccgccctgctgagacactgcgccctggccctgggcaactgcgccctgcacggcggccaggccgtgcagagaagaatggtggagaagagagccgccgagtggctgttccccctggccttcagcaaggaggacgagctgctgagcctgcacgcctgcctggccgtggccgtgctggccaccaacaaggaggtggagagagaggtggagagaagcggcaccctggccctggtggagcccctggtggccagcctggaccccggcagattcgccagatgcctggtggacgccagcgacaccagccagggcagaggccccgacgacctgcagagactggtgcccctgctggacagcaacagactggaggcccagtgcatcggcgccttctacctgtgcgccgaggccgccatcaagagcctgcagggcaagaccaaggtgttcagcgacatcggcgccatccagagcctgaagagactggtgagctacagcaccaacggcaccaagagcgccctggccaagagagccctgagactgctgggcgaggaggtgcccagacccatcctgcccagcgtgcccagctggaaggaggccgaggtgcagacctggctgcagcagatcggcttcagcaagtactgcgagagcttcagagagcagcaggtggacggcgacctgctgctgagactgaccgaggaggagctgcagaccgacctgggcatgaagagcggcatcaccagaaagagattcttcagagagctgaccgagctgaagaccttcgccaactacagcacctgcgacagaagcaacctggccgactggctgggcagcctggaccccagattcagacagtacacctacggcctggtgagctgcggcctggacagaagcctgctgcacagagtgagcgagcagcagctgctggaggactgcggcatccacctgggcgtgcacagagccagaatcctgaccgccgccagagagatgctgcacagccccctgccctgcaccggcggcaagcccagcggcgacacccccgacgtgttcatcagctacagaagaaacagcggcagccagctggccagcctgctgaaggtgcacctgcagctgcacggcttcagcgtgttcatcgacgtggagaagctggaggccggcaagttcgaggacaagctgatccagagcgtgatgggcgccagaaacttcgtgctggtgctgagccccggcgccctggacaagtgcatgcaggaccacgactgcaaggactgggtgcacaaggagatcgtgaccgccctgagctgcggcaagaacatcgtgcccatcatcgacggcttcgagtggcccgagccccaggtgctgcccgaggacatgcaggccgtgctgaccttcaacggcatcaagtggagccacgagtaccaggaggccaccatcgagaagatcatcagattcctgcagggcagaagcagcagagacagcagcgccggcagcgacaccagcctggagggcgccgcccccatgggccccacctag

SEQ ID NO: 184233 - DNA, 2169 bp, Artificial Sequence
  derived and/or modified sequence
atggtgctgaccctgctgctgagcgcctacaagctgtgcagattcttcgccatgagcggccccagaagaggcgccgagagactggccgtgcccggccccgacggcggcggcggcaccggcccctggtgggccgccggcggccccggccccagagtgagccccggcgccggcaccgaggtgcaggacgccctggagagagccctgcccgagctgcagcaggccctgagcgccctgaagcaggccggcggcgccagagccgtgggcgccggcctggccgaggtgttccagctggtggaggaggcctggctgctggccgtgggcagagaggtggcccagggcctgtgcgacgccatcagactggacggcggcctggacctgctgctgagactgctgcaggcccccgagctggagaccagagtgcaggccgccagactgctggagcagatcctggtggccgagaacagagacagagtggccagaatcggcctgggcgtgatcctgaacctggccaaggagagagagcccgtggagctggccagaagcggcagcggcatcctggagcacatgttcaagcacagcgaggagacctgccagagactggtggccgccggcggcctggacgccgtgctgtactggtgcagaagaaccgaccccgccctgctgagacactgcgccctggccctgggcaactgcgccctgcacggcggccaggccgtgcagagaagaatggtggagaagagagccgccgagtggctgttccccctggccttcagcaaggaggacgagctgctgagcctgcacgcctgcctggccgtggccgtgctggccaccaacaaggaggtggagagagaggtggagagaagcggcaccctggccctggtggagcccctggtggccagcctggaccccggcagattcgccagatgcctggtggacgccagcgacaccagccagggcagaggccccgacgacctgcagagactggtgcccctgctggacagcaacagactggaggcccagtgcatcggcgccttctacctgtgcgccgaggccgccatcaagagcctgcagggcaagaccaaggtgttcagcgacatcggcgccatccagagcctgaagagactggtgagctacagcaccaacggcaccaagagcgccctggccaagagagccctgagactgctgggcgaggaggtgcccagacccatcctgcccagcgtgcccagctggaaggaggccgaggtgcagacctggctgcagcagatcggcttcagcaagtactgcgagagcttcagagagcagcaggtggacggcgacctgctgctgagactgaccgaggaggagctgcagaccgacctgggcatgaagagcggcatcaccagaaagagattcttcagagagctgaccgagctgaagaccttcgccaactacagcacctgcgacagaagcaacctggccgactggctgggcagcctggaccccagattcagacagtacacctacggcctggtgagctgcggcctggacagaagcctgctgcacagagtgagcgagcagcagctgctggaggactgcggcatccacctgggcgtgcacagagccagaatcctgaccgccgccagagagatgctgcacagccccctgccctgcaccggcggcaagcccagcggcgacacccccgacgtgttcatcagctacagaagaaacagcggcagccagctggccagcctgctgaaggtgcacctgcagctgcacggcttcagcgtgttcatcgacgtggagaagctggaggccggcaagttcgaggacaagctgatccagagcgtgatgggcgccagaaacttcgtgctggtgctgagccccggcgccctggacaagtgcatgcaggaccacgactgcaaggactgggtgcacaaggagatcgtgaccgccctgagctgcggcaagaacatcgtgcccatcatcgacggcttcgagtggcccgagccccaggtgctgcccgaggacatgcaggccgtgctgaccttcaacggcatcaagtggagccacgagtaccaggaggccaccatcgagaagatcatcagattcctgcagggcagaagcagcagagacagcagcgccggcagcgacaccagcctggagggcgccgcccccatgggccccacctag

SEQ ID NO: 184234 - DNA, 2073 bp, Artificial Sequence
  derived and/or modified sequence
atgggggctgttgcgcgcgcccatgggggtctcagggttgccagagcacgcgagagcgtggctggaggccgtcataggggagcgggccgcccaggagcccgcgccgccggtgcagcagcgggcctcgttagggccgaggccgggggccgccgagcagggagagggcgccgccccggtagaggacttccaacaggtggaggaggcctagccgctgctgccgtgggacgcgaggtggcccaggggctgtgcgatgccatcaggctggatggaggtctggatctgttgctccggctccttcaggcccctgaattggagacacgagtgcaagctgcacggcttctggaacagatcctcgtggcagaaaacagggaccgcgtggccagaattggcctcggtgtgattcttaacctggctaaggagcgcgaacctgtggagctggctcggagtggctccggcatcctggagcatatgtttaagcactccgaagaaacgtgccagaggctcgtggcggccggcggtctagacgcggtgctgtactggtgcagaaggactgatcctgctcttttgcggcattgtgcccttgctctcggaaattgtgccctccatggcgggcaggccgtccaaagaaggatggtggaaaagcgggctgctgagtggttattcccactggctttctccaaggaagatgaactgctgagtctgcatgcgtgtttggccgtggcagtgctggctacgaataaagaagtggaacgcgaagttgaacgcagtggtacattggcactggtcgagccactcgttgccagcctcgatcctggacgcttcgcccggtgtctggtggacgcgtcagacactagtcagggccgggggcctgatgacctgcagcgtctcgtccctttgcttgactctaaccgcctggaggcacagtgcattggggccttttatctctgtgcagaagcagctatcaaatcccttcaggggaagacgaaggttttttccgatattggtgctatccaatcacttaagcggttggtatcttacagtaccaacggaaccaagtctgcactggcgaaaagagctttgagactactcggcgaagaggttccccgaccaattctgcctagtgtgcctagttggaaagaagcagaggtgcagacttggctccagcagataggattctctaaatattgtgaaagtttccgcgagcaacaggtcgacggcgacctgcttctcagactgaccgaggaggaactccagaccgacctggggatgaaatccggcattacaaggaaacggttcttccgagaactgacagaattgaaaactttcgccaactactctacctgtgacaggtctaatctcgcagattggctcggatctctggatccacgcttccggcaatatacctatgggcttgtctcatgcgggctggacaggagcctgctacacagagttagcgaacagcagctgcttgaagattgtgggatccatttgggggttcatagagcacggattctgacagctgcccgggagatgctccactcaccattgccctgtaccggggggaagccaagtggcgatacgccagacgtgtttatcagctaccgacgaaacagtggttcacagctcgcctctctgttaaaggtgcacttgcagttacatggattttcagtgtttatcgacgtggaaaaactcgaggccggtaagttcgaggataaactgatccagtcggtgatgggtgctcgcaatttcgtgctggttttgtctccaggtgccctggacaagtgcatgcaggatcacgactgcaaggactgggtacataaagagatagttacagcacttagttgtgggaagaacatcgtgccgatcatagacgggttcgaatggccggaaccacaggttttgccagaggatatgcaagcagttcttaccttcaacggaataaaatggtcccatgaatatcaagaggcgaccattgagaagatcatcaggttcctccagggcagaagcagccgcgattcctctgcggggtctgatacctctctggaaggtgctgcgcccatgggtcctacctag

SEQ ID NO: 184235 - DNA, 2169 bp, Artificial Sequence
  derived and/or modified sequence
atggtgctgaccctgctgctgtcagcctataagctttgtaggttcttcgccatgtcaggtcctcgtcggggcgctgagcggttggccgttcccggcccagacggagggggaggaactgggccctggtgggccgcaggagggccaggaccccgggtcagccccggagccgggacagaggtacaagatgcgctagagcgcgcactgccagaactccagcaagcgttatcagcactgaagcaggcagggggcgcccgggccgtgggagccggactggcagaggtgtttcagctggtcgaagaggcctggttactggccgtgggacgggaggtggctcaggggctgtgtgacgcaattcgtctggatggtggcttagatttactcctgcgcctgctgcaggcacctgaactggaaacgcgcgttcaggcggcaaggctcttagagcagattctcgtcgccgagaatcgggatagagtcgcaagaattgggctgggagtgattcttaatttggccaaagagcgcgaacctgttgagcttgcacgtagcgggagtgggatcttggaacacatgtttaaacattccgaggaaacatgtcaaagactggtcgctgctggcggcctggatgcggtcctgtattggtgccggcgtacggatcctgccctgttgcgacactgtgctctcgctcttggcaactgcgcactccacgggggacaggcagtccaacgtcgaatggtcgaaaaacgggccgccgaatggctttttcccctcgcgttttccaaggaggacgagttactttcactacacgcctgcctcgcagtggccgtgttggccactaacaaagaagtggagcgcgaggttgagcgcagtggcaccttggccctggtggagcctctggtggcaagcctggacccaggtcggtttgctagatgtctagtggacgcaagtgacacctcgcagggacggggaccagatgatttgcaacggttagtccccttgctggattcgaaccgcttggaagcccagtgcatcggcgcattctacctctgtgcggaggccgccatcaagagtctgcagggaaagacaaaagtgttttctgacatcggagctatccaaagtctcaagcggctggtctcttacagcaccaatggtaccaagtctgcactcgccaaacgcgccctcaggctgctgggcgaggaggtgcctcggccgatactcccatccgttccctcctggaaagaagctgaggtccaaacttggctgcagcaaattggctttagtaaatactgcgagtctttcagggaacagcaggttgacggggatctcctgctgcggctgaccgaggaggaattacaaacggacttaggcatgaaatcaggaatcacgcgaaagaggttttttagagagctcacagaactgaaaacctttgccaactactccacatgcgacaggagcaatttagcagattggctgggatctcttgatcctcggtttcgccagtatacgtacggcctcgtttcctgcgggctggaccgctccctattgcatagagtgtccgagcagcaactgctcgaagactgcggcattcacttaggcgtgcatagggccagaatccttacggctgcaagagagatgctccacagcccgctgccctgcacaggaggcaagcctagtggagacactccagatgtcttcatcagttaccggcgcaactccggatctcagctcgcttccctcctaaaggttcatttgcaactgcatgggttctccgtgtttatcgacgtcgagaagttggaggccggaaaattcgaagacaagctgattcagagcgttatgggtgcacgcaactttgtgctggtcttatctcccggtgccctcgacaagtgcatgcaggaccacgactgcaaggattgggttcataaagaaatcgtaacagctctgtcctgtgggaagaatattgtacctattatcgacgggttcgaatggcccgagccacaggtcctcccagaggatatgcaggccgtcttaacttttaatggcattaagtggtctcatgagtatcaggaagctacaatcgagaagatcatcagatttctgcaaggccggagctctagggacagtagcgccggcagcgacacatcactggagggggccgcaccaatgggtcctacatag

SEQ ID NO: 184236 - DNA, 387 bp, Artificial Sequence
  derived and/or modified sequence
atgtcgtgtcaccaatcgccgttagtcttcgacgtgggccagtgcagacagcacgatctagcggggcaaattctaatctaccactcactgacccctgctggaccattggggaggccccctgacgtgccacatagcccacacctagccagtcccaccgggtctaggcagcgaaccgtcggtggaacctgtgatacagctctgttcctctgctcttgtttttcatcttccttctttagcctgctggtaacactgttcttttttacactgagtcctcataagactcgcaactttgtgattctgcttatcttcctctattccgtctgtctgcacactgatggctaccttagggccagcgagctttccttgcctccttccatcatttcgtag

SEQ ID NO: 184237 - DNA, 2073 bp, Artificial Sequence
  derived and/or modified sequence
atgggcgctgtggcccgggcccacggcggcctgcgggtggcccgggcccgggagagcgtggccggcggccgccacagaggagctggccggcctggggcccgggccgccggggctgctgctggcctggtgcgggcagaggccggcggccggcgggccggccggggccggcggcccggccggggcctgcccaccggcggcggcggcctggccgctgctgctgtgggccgggaggtggcccagggcctgtgtgatgccatccggctggatggcggcctggacctgctgctgcggctgctgcaggcccctgagctggagaccagggtgcaggccgcccggctgctggagcagatcctggtggctgaaaatagagacagagtggccagaattggcctgggcgtcatcctgaacctggccaaggagcgggagcctgtggagctggcccggagcggcagcggcatcctggagcacatgttcaagcacagcgaggagacctgccagaggctggtggccgccggcggcctggatgctgtgctgtactggtgcagaagaacagatcctgccctgctgcggcactgtgccctggccctgggcaactgtgccctgcacggcggccaggccgtgcagaggaggatggtggagaagagagctgctgagtggctgttccccctggccttcagcaaggaggatgagctgctgagcctgcacgcctgcctggccgtggccgtgctggccaccaacaaggaggtggagcgggaggtggagaggagcggcaccctggccctggtggagcccctggtggccagcctggaccccggccgctttgcccgctgcctggtggatgccagtgacaccagccagggccggggcccagatgacctgcagaggctggtgcccctgctggacagcaaccggctggaggcccagtgcatcggggccttctacctgtgtgccgaggccgccatcaagagcctgcagggcaagaccaaggtgttcagtgacatcggggccatccagagcctgaagaggctggtgtcctacagcaccaacggcaccaagagcgccctggccaagagggccctgcggctgctgggggaggaggtgccccggcccatcctgcccagcgtgcccagctggaaggaggccgaggtgcagacctggctgcagcagatcggcttcagcaagtactgtgagagcttccgggagcagcaggtggatggagacctgctgctgcggctgacagaggaggagctgcagacagacctgggcatgaagagcggcatcaccaggaagcgcttcttccgggagctgacagagctgaagacctttgccaactacagcacctgtgacaggagcaacctggccgactggctgggcagcctggacccccgcttccggcagtacacctacggcctggtgtcctgtggcctggacaggagcctgctgcaccgggtgtctgagcagcagctgctggaggactgtggcatccacctgggcgtgcaccgggcccgcatcctgacagctgcccgggagatgctgcacagccccctgccctgcacaggaggcaagcccagcggggacaccccagatgtgttcatctcctacagaagaaacagcggcagccagctggccagcctgctgaaggtgcacctgcagctgcacggcttcagcgtcttcattgatgtggagaagctggaggccggcaagtttgaggacaagctgatccagagcgtgatgggcgccaggaactttgtgctggtgctgagccctggggccctggacaagtgcatgcaggaccatgactgcaaggactgggtgcacaaggagatcgtgacagccctgagctgtgggaagaacatcgtgcccatcattgatggctttgagtggccagagccccaggtgctgcctgaggacatgcaggccgtgctgaccttcaacggcatcaagtggagccatgagtaccaggaggccaccatcgagaagatcatccgcttcctgcagggccgcagcagccgggacagcagcgctggcagtgacaccagcctggagggcgccgcccccatgggccccacctag

SEQ ID NO: 184238 - DNA, 2169 bp, Artificial Sequence
  derived and/or modified sequence
atggtgctgaccctgctgctgagcgcctacaagctgtgccgcttctttgccatgagcggccccaggagaggagctgagcggctggccgtgcccggcccagatggcggcggcggcaccggcccctggtgggccgccggcggccctggcccccgggtgtcccctggggccggcacagaggtgcaggatgccctggagcgggccctgcctgagctgcagcaggccctgagcgccctgaagcaggccggcggggcccgggctgtgggcgccggcctggccgaggtgttccagctggtggaggaggcctggctgctggccgtgggccgggaggtggcccagggcctgtgtgatgccatccggctggatggcggcctggacctgctgctgcggctgctgcaggcccctgagctggagaccagggtgcaggccgcccggctgctggagcagatcctggtggctgaaaatagagacagagtggccagaattggcctgggcgtcatcctgaacctggccaaggagcgggagcctgtggagctggcccggagcggcagcggcatcctggagcacatgttcaagcacagcgaggagacctgccagaggctggtggccgccggcggcctggatgctgtgctgtactggtgcagaagaacagatcctgccctgctgcggcactgtgccctggccctgggcaactgtgccctgcacggcggccaggccgtgcagaggaggatggtggagaagagagctgctgagtggctgttccccctggccttcagcaaggaggatgagctgctgagcctgcacgcctgcctggccgtggccgtgctggccaccaacaaggaggtggagcgggaggtggagaggagcggcaccctggccctggtggagcccctggtggccagcctggaccccggccgctttgcccgctgcctggtggatgccagtgacaccagccagggccggggcccagatgacctgcagaggctggtgcccctgctggacagcaaccggctggaggcccagtgcatcggggccttctacctgtgtgccgaggccgccatcaagagcctgcagggcaagaccaaggtgttcagtgacatcggggccatccagagcctgaagaggctggtgtcctacagcaccaacggcaccaagagcgccctggccaagagggccctgcggctgctgggggaggaggtgccccggcccatcctgcccagcgtgcccagctggaaggaggccgaggtgcagacctggctgcagcagatcggcttcagcaagtactgtgagagcttccgggagcagcaggtggatggagacctgctgctgcggctgacagaggaggagctgcagacagacctgggcatgaagagcggcatcaccaggaagcgcttcttccgggagctgacagagctgaagacctttgccaactacagcacctgtgacaggagcaacctggccgactggctgggcagcctggacccccgcttccggcagtacacctacggcctggtgtcctgtggcctggacaggagcctgctgcaccgggtgtctgagcagcagctgctggaggactgtggcatccacctgggcgtgcaccgggcccgcatcctgacagctgcccgggagatgctgcacagccccctgccctgcacaggaggcaagcccagcggggacaccccagatgtgttcatctcctacagaagaaacagcggcagccagctggccagcctgctgaaggtgcacctgcagctgcacggcttcagcgtcttcattgatgtggagaagctggaggccggcaagtttgaggacaagctgatccagagcgtgatgggcgccaggaactttgtgctggtgctgagccctggggccctggacaagtgcatgcaggaccatgactgcaaggactgggtgcacaaggagatcgtgacagccctgagctgtgggaagaacatcgtgcccatcattgatggctttgagtggccagagccccaggtgctgcctgaggacatgcaggccgtgctgaccttcaacggcatcaagtggagccatgagtaccaggaggccaccatcgagaagatcatccgcttcctgcagggccgcagcagccgggacagcagcgctggcagtgacaccagcctggagggcgccgcccccatgggccccacctag

SEQ ID NO: 184239 - DNA, 2073 bp, Artificial Sequence
  derived and/or modified sequence
atgggcgccgtggcccgggcccacggcggcctgcgggtggcccgggcccgagagtcagtggcaggcggtcgccacaggggagccggcagaccaggtgccagagccgcaggagcagccgctggcctggtgcgagctgaagctggcgggcgccgcgcaggcagaggacgccgcccgggccgtggccttccaacaggcggcggcggccttgcagctgcggccgtcgggcgggaagtcgcccaagggctgtgcgatgctatccggctggatggcggtctcgacctgctgctgaggctattgcaagcaccggagctggagacacgcgttcaggccgcacggctccttgagcagattctcgttgccgaaaaccgagatcgcgtcgccagaattgggcttggagtaattctgaatttagccaaggagagagagcctgtggagctggcaaggagcggaagtggaattttggaacacatgttcaagcacagcgaggaaacttgtcagcggctggtggccgccggcggcctggatgccgtactttactggtgccgtcgtactgatccggctcttcttagacattgcgccctcgccctggggaactgtgctcttcacggcggccaggcagtccaacggcgaatggtggagaaaagagccgctgagtggttgttcccgcttgcattctctaaggaagatgaactcctcagtttgcatgcctgccttgcggtcgctgtgcttgcgacaaacaaggaagtcgaacgtgaggtcgaaagaagcgggaccctcgcactggttgagcctctcgtggcttccctcgatccggggcgatttgcccgctgtcttgttgatgctagcgacacctctcagggaaggggtcctgacgacctgcagaggctagtgcccttgttggactccaataggcttgaggcgcagtgcatcggagcgttctacctgtgtgcagaagccgcgataaagagcctacagggtaaaacaaaagtgttcagcgacatcggcgccatccagagtctcaagcgtctggttagctacagtaccaacggaaccaaatccgccctcgctaagagggccttgagactgctgggggaagaggtgccacgccctatcctgccgagcgtaccttcttggaaagaggccgaggttcaaacctggctgcagcagattggcttttccaaatattgtgagtctttcagggaacagcaggtcgatggggatctgttactgcgcttgacagaagaggagttgcaaactgacctaggtatgaagagtggcatcactcgtaaaaggttttttcgtgagcttactgagctaaagacatttgcaaattattcaacctgcgaccgtagtaatctggccgattggcttggctctcttgatccacggtttcggcaatatacctacggcctcgtctcctgtggcctggacagaagcctactgcacagggtatcagagcagcagctccttgaagattgcggaattcatctcggggtccatagagctagaatccttactgctgctagagagatgctgcactctccactgccgtgcaccggcgggaagccatctggggacactccagatgtcttcattagctatcgaaggaactctggtagtcagctggcatcccttttgaaggttcacctgcagttgcacggattttcagtgtttatagatgtagaaaagcttgaagccggcaagtttgaggacaaactgatccagtctgtcatgggagccagaaatttcgtcctcgtgctttcgcccggcgctctagacaagtgtatgcaagaccatgactgtaaagactgggtgcataaggagattgtaacagcccttagttgcggcaagaatatcgtgccaattattgatggctttgaatggccggagccccaggtgctgccggaggatatgcaggctgtcctgacgttcaatggtattaagtggtcacacgaatatcaagaagccaccattgagaaaatcatcagattcctccaagggagaagtagccgtgattcttcagccggatccgacacaagcttagaaggcgccgcaccaatgggacccacgtag

SEQ ID NO: 184240 - DNA, 2169 bp, Artificial Sequence
  derived and/or modified sequence
atggtgctgaccctgctgctgagcgcctacaagctgtgccggttcttcgcgatgtctggccctcggcgtggagccgagcgccttgctgtccctgggcccgacggagggggcggaacaggtccatggtgggctgcggggggcccgggcccacgcgttagccctggcgctggtactgaagtgcaggatgccctggaacgggccctaccagaactgcaacaggccctgtccgccctgaagcaagccggcggcgcccgcgccgtgggtgctggtctggctgaggtttttcagctggtggaagaagcatggctgttagcggttggaagggaagtggctcagggactgtgcgatgccatccgactggacggagggctagatctgctgttgagattgctccaggcacccgaacttgagactcgagtgcaggcagccagactgttagagcagatcctggtcgctgagaaccgcgatagagtggcacggattggcctcggagtcatcttaaatctggcaaaggagcgggagcccgtggagctagcacgttctggcagcggcatccttgaacacatgttcaagcactctgaggaaacttgtcaacgtctagtggccgcagggggcctagacgctgtgctctattggtgcagacgcactgatccagctcttttaaggcattgtgcgctggccctgggcaactgcgctctccacgggggtcaggctgtgcaaagacggatggtggaaaaaagagccgccgagtggctgtttccgcttgcttttagcaaggaagatgagctgctgtccttgcatgcttgtttggctgtcgcggtgctggcaactaacaaagaggttgagagagaggttgagcggagtggcacgctggcgctggtggagccactggtggccagcctggatcccgggaggttcgctagatgtctcgtagatgcctcagacaccagtcaggggaggggaccggacgatctccagcgtcttgtacctctgttggacagcaatcggctagaggcacagtgtatcggggccttctatttatgcgccgaagccgcaatcaagagtctccaaggcaagacaaaagtgttctcagatatcggggctatacagtcgttaaaacggctcgtgagttattccaccaatgggactaaaagcgctctggctaaacgtgctttgcggctgctcggagaagaggtgcctagacctatcctgccatctgtgccctcttggaaagaggctgaggtgcaaacatggttacaacaaatcggtttcagcaagtactgcgagtctttccgcgagcaacaggtcgatggggatttgttgcttcgtctcaccgaagaagaattacagacagacctgggtatgaaatccggcatcaccagaaagaggtttttcagggaattgacagaactcaaaaccttcgccaactactcaacctgtgatcggtcaaatctagcagactggctgggctcgctggatccccgatttagacagtatacttatggtctcgtttcatgcggtctagaccgcagcttgctacaccgtgtctctgaacagcagctgttagaggactgcgggattcatctgggggtacaccgcgcacgcatcctcaccgccgccagggaaatgctccacagtcctttgccttgtactgggggaaagcccagcggagatacccctgacgttttcatttcttataggagaaatagtggaagccaactggccagtcttcttaaagttcacctgcagttgcatggtttctcagtatttattgacgtggaaaagctagaggcagggaagtttgaagacaagctgatccagtctgtgatgggggctcgcaatttcgtgctagtcctttccccaggggccctggacaagtgtatgcaggatcacgattgcaaagactgggtgcacaaggaaatcgtgaccgccttgagctgtgggaaaaatatagtacccatcattgacggtttcgagtggccagagccacaagtgttgccggaggacatgcaggcagttctgactttcaatggcattaagtggagccacgagtaccaagaagccactatcgaaaaaattatacgctttctgcagggcagatcatctcgcgactctagcgctggatccgacacttctctcgagggagcagcccccatgggtcctacctag

SEQ ID NO: 184241 - DNA, 2073 bp, Artificial Sequence
  derived and/or modified sequence
atgggagccgtggccagggcacacgggggtttacgtgtagccagagccagagagtccgtggctggcggaaggcaccggggtgccggaagacctggagccagagcggctggcgcagcagctgggttggtgcgagctgaagccggaggaagacgggcaggaaggggtaggcggcctggtcggggactacccactggcggtggaggccttgctgctgctgccgttggcagagaggttgctcagggtctctgtgatgccattcggctggatggcggactcgatctcctcctccgattactccaggcgccagaacttgaaacacgggtgcaagctgctagactgctggagcagattttggtggccgagaacagggatagagtcgcccgaataggactgggcgtcatactgaacctagctaaagaaagagagccagtggagctcgcacgatcgggatctggtatacttgagcacatgttcaagcatagcgaagagacatgccaacgcttagtggctgccggtggactggacgcagtcctgtattggtgccggcgtaccgaccccgctctcctccggcattgcgctctggccctcgggaactgcgccttacacggtgggcaggctgtacaaagacgcatggtcgaaaaacgagctgccgaatggctgttccccctcgcctttagtaaggaagacgagctgctcagcctgcatgcatgcctggcagtggcagtgcttgccaccaataaggaggtggagcgggaggtggagaggtccgggacactcgcacttgtcgagccactagtggcttcactggacccaggacgattcgcccgttgcttagtggacgcaagcgacacctcgcagggacgcggacccgacgacctccagcgtcttgtcccacttttggattctaaccgtcttgaggcccagtgcatcggcgctttttacctgtgtgctgaagccgcaataaagagcttgcagggaaaaaccaaggttttctctgatattggggcaatccagtcactcaagaggctggtatcttattcaactaacggaaccaagtccgcacttgctaaacgggctctgcgactcttgggtgaagaagtcccgaggcccatcctgccatccgtgcctagttggaaggaggccgaagtacagacctggctacaacagattggtttttcaaagtactgtgagtccttccgcgagcagcaggtcgacggcgatttattattgcgcttgactgaagaggagttgcagacagatcttggaatgaagagcggtatcaccaggaagcgcttttttagggaactgaccgagctcaaaacttttgcaaactactctacttgcgacaggtcaaatctggctgattggctgggatcactggatcccagattcagacagtatacttatggcttggtgtcatgcgggctagatcgaagcctgctgcatcgcgtgtccgagcagcagttgttggaagactgtgggatacacctgggggtgcatcgtgctcgtatcctcaccgccgctcgcgaaatgctgcacagcccactaccgtgtacgggtggaaagcccagcggcgacacaccggacgtctttatctcatatcggaggaatagtggatcacagctggcctctctcttgaaggtccatctccagctgcatggattctcggttttcatcgatgtggaaaaactggaagcaggtaaattcgaagacaagttgatccagtccgtcatgggcgctcggaatttcgtactggtccttagccccggagcgctcgataaatgtatgcaggatcatgactgtaaggactgggttcacaaggagatcgtgactgctttatcatgcggcaagaatattgttcccattatcgatggctttgagtggccggaacctcaggttctgcccgaagatatgcaggccgtcctaaccttcaacgggattaaatggagccacgagtatcaggaggccaccatagagaaaataattcggttcctgcagggtaggtcatcacgtgacagctcagctggatcagacacctctctggaaggggctgcgcctatgggcccaacctag

SEQ ID NO: 184242 - DNA, 2169 bp, Artificial Sequence
  derived and/or modified sequence
atggtgttaacattactgctaagtgcttacaagttgtgtagattctttgcaatgagtggcccaagacgtggcgcagaaaggctggcagtccccggacctgacggagggggtggaaccggaccctggtgggcggctgggggacctggtcccagggtatctccaggcgcagggaccgaggtacaggacgcattagagcgggcactgccagagctgcagcaggctctatccgcgctgaagcaagctgggggtgcccgtgcagtcggagctggactggcagaagtcttccagttagtggaagaggcttggctgttagcagttggaagggaagtagctcagggcttgtgcgacgctataagactggatgggggtctcgacctgctgcttcgattgctccaggcacccgagctagagactagagtgcaagccgctcgtctgctggaacagatccttgtggctgaaaacagagacagggtggctaggattggccttggtgtcatcctgaatctggcgaaagagagagaacccgtggagctcgcgagaagcggtagtggcatcctggaacacatgttcaagcactcagaggagacatgccaacgcctcgtggctgcgggaggcctggacgccgtcctgtactggtgccggagaactgacccagcccttttaagacactgtgcgctggcgctgggaaactgcgctctgcacgggggacaagccgttcaacgtcgaatggtagagaagcgggctgctgagtggctatttcctttggcattttctaaggaagacgaactgctttcactccacgcctgcctagcagtcgcggtgctcgccacaaataaggaggtcgagcgggaggtcgagaggtctgggactttggccttagtagaaccactcgtggcctccctggaccctggaaggtttgcccgatgtctagtagacgcctccgatacaagtcagggcaggggccctgatgatttgcagcggctcgtgccactcttagactcaaacagacttgaggcccaatgcattggagccttctacctatgtgctgaagctgccatcaagtccctacagggaaagactaaggtctttagcgacatcggagccatacagtcactcaagcgcctggtgtcctatagcaccaacgggactaagagcgccctggccaagagggccttacggcttcttggtgaagaagtacctagaccaatcctcccatccgtgccttcttggaaggaagcggaagtccagacgtggttacagcagatcgggttcagcaaatattgtgagtcctttcgcgagcaacaggtggacggagatttgctgttaagacttactgaggaggagctgcagaccgatctggggatgaagtcgggcatcaccagaaagaggttcttcagagaattgacagagctgaagacctttgccaattactctacctgtgatagatctaacctggcggattggctgggctcacttgatcccagattccgccagtatacctacggattagtcagctgcgggcttgatcgatcactgcttcatcgcgtgtctgagcagcagcttttggaggactgcggcatccacctcggggtccatagggccaggattttgacagccgcacgggagatgctacacagtcctctgccatgcaccgggggaaagccatccggagacacaccggacgtgttcatttcatacaggagaaactccggcagccagttggcgagtctattgaaagtgcatctgcaactccatggatttagtgtgttcattgatgttgagaaacttgaggccggtaaattcgaggacaaactgatccaatcagtgatgggggcacgcaactttgtattggtgctgagccccggtgcactggacaagtgtatgcaggaccacgattgtaaggactgggttcacaaggagattgttacagcattgtcatgtggaaagaatatcgtcccaataattgatggtttcgaatggcctgagccacaggtgcttcccgaggacatgcaagccgttttgacgttcaacggaatcaagtggtctcatgagtatcaggaggccactatcgagaaaattattcgttttctgcagggacggtcctcgagagatagtagtgcaggttccgacaccagcctcgaaggagccgcacccatgggtcctacctag

SEQ ID NO: 184243 - DNA, 2073 bp, Artificial Sequence
  derived and/or modified sequence
atgggtgccgtggctagggcacatgggggactgagagttgccagggcccgcgaaagcgtagcagggggacgacaccggggtgcaggacggcccggagcacgagcagccggtgccgccgcgggattagtgagagcagaggccggcggcagacgggctggcagaggacgaagacccggtagaggcctgccaacaggaggagggggtctcgctgctgcagccgtaggccgagaggttgctcagggactatgtgatgccattaggctggatggcggtctcgaccttttgctccggttgttacaggcccctgaattagagacgcgggtgcaggctgctcggctcctggagcagatcctggtcgctgagaatcgggatagggtcgcgcgcattggacttggcgtgatcctgaacttggctaaggaaagagagccagtcgagcttgctaggtctggctccgggatattagaacacatgtttaaacatagcgaggaaacttgtcaacgtctcgttgctgccggtggactcgacgccgttttatattggtgtcggagaaccgaccctgcacttttgcgtcactgtgcactggcactcggtaattgcgccctacatgggggccaggcggtccaacgtcggatggtagagaagagagctgcagagtggctgtttcctttggccttctccaaggaggatgaactcctcagcctacatgcttgtctcgccgtggcagtcctcgctacaaacaaggaggtggagcgggaagttgaaaggtctggcacactcgccctggtggagcccctcgttgcaagtctggatcccggtaggttcgctcgctgtctggttgacgcttccgacacctcccaggggcggggtcctgacgaccttcagcgcctggttcctcttcttgattccaaccgtctcgaggcccagtgcattggggcattttatttatgtgccgaggccgctattaaatctctacagggaaaaacaaaggtcttttccgacataggagcaatacaaagcctgaagagactcgtgtcatactccacaaatggaacgaaatcagccctcgctaaacgggcgcttcgactgcttggcgaggaggtaccacgccctatcctgccctctgtcccatcttggaaggaggccgaggtccagacgtggctgcagcagatcggcttcagcaagtactgtgaatctttccgggagcaacaggttgacggggatctcctgctccgccttacggaagaagaactccagactgatctgggaatgaagagtggtatcactcgaaaacgtttctttagggaactaacagaactcaagaccttcgcaaactattcgacatgcgatcgcagtaatctggcggactggcttggatctctggatccaaggttcagacagtacacatacgggcttgtctcatgcgggctggaccggtccctattacacagggttagtgagcagcagctgctggaagattgtggaatccacctgggggtccatagagcaaggattctaacagctgcccgagagatgctgcattcacctctgccctgtacaggtggaaaaccttccggggacacaccagatgtgtttatcagctatcggagaaactcgggctcccagctggcctcattacttaaggtgcacctgcaactgcacggcttcagtgtgttcatagacgttgaaaagctcgaggcaggtaaattcgaggacaagctgatccagagtgttatgggcgctagaaacttcgtgctggtcttgagtcctggggctctggacaagtgcatgcaagatcacgattgcaaagactgggtacataaggaaatcgtgaccgcactgagctgcggcaaaaatattgtccccatcattgacggttttgaatggccggagccccaagttttgcccgaagatatgcaggccgtgctgacatttaatggaatcaagtggagtcatgaatatcaagaagctactatcgagaaaatcatcaggtttctccaggggagatcaagtagagactcgtcagctgggtccgatacttcacttgagggggcagcaccaatggggcctacttag

SEQ ID NO: 184244 - DNA, 2073 bp, Artificial Sequence
  derived and/or modified sequence
atgggtgccgtggctagggcacatgggggactgagagttgccagggcccgcgaaagcgtagcagggggacgacaccggggtgcaggacggcccggagcacgagcagccggtgccgccgcgggattagtgagagcagaggccggcggcagacgggctggcagaggacgaagacccggtagaggcctgccaacaggaggagggggtctcgctgctgcagccgtaggccgagaggttgctcagggactatgtgatgccattaggctggatggcggtctcgaccttttgctccggttgttacaggcccctgagctggaaacccgggtgcaggccgcacgcctgctagaacagatacttgttgccgaaaatagggacagagtagcacgcataggacttggagtcattctcaatctggcaaaagaaagagaaccggtcgagctggcgagaagcggatcgggcattttagagcacatgttcaaacacagcgaggagacgtgtcagcgcttagtggcggctggcggccttgatgccgtgctgtattggtgccgacggacagatccagcactgcttcgacactgcgcactggctcttggaaattgtgcccttcatggcggccaggccgtgcagcgccggatggtagaaaaaagagcagcagaatggctgtttcctctcgccttttccaaggaagacgaattactgtcccttcacgcttgtctggccgtggctgtcctagcaacgaacaaagaggtagagagagaagtggagagaagtggaacattagccctagttgagcctttggtggcatccttagaccctggcagattcgcaaggtgccttgtcgacgcctccgacacatcgcagggtcgggggccagacgatctgcagcgccttgtacctctgttggactcaaatcgactcgaggcccagtgtatcggcgccttctacttatgcgctgaagctgccattaaatctttgcagggtaaaactaaggttttcagcgatattggggcaatccagagtctcaaacgcctcgtcagttattccacaaacggcaccaaatcagccctagccaaacgggccctaagactgcttggggaagaggttccacggcccatactaccctccgtccccagctggaaagaggcagaagtacagacgtggctgcaacagattggattttccaagtactgtgaatcatttagggaacaacaggtggacggggacctgctgttgaggttgactgaggaggagcttcagactgatctggggatgaagagcggcatcaccagaaaacgttttttcagagaacttaccgaactcaagacttttgcaaattatagtacctgcgatcgctcaaatcttgctgactggttagggagcctagatcctcgatttagacagtatacctatggactggtcagctgcggtctcgatagatccctgctccatcgagtatcggagcagcaactgctggaagattgtggtatacatctaggagtccacagagcccggatactgactgctgccagagaaatgctgcattcccccttaccctgtactggtggcaagccgagcggtgatactccggacgtttttatctcgtaccggcgcaattctgggagccaattggcctctctgctgaaagtgcatttacaattgcatggcttttctgtatttatcgatgtggagaaactcgaagcaggcaagtttgaagataagctgatacagagcgtcatgggtgcaagaaactttgtactggtcctctcccctggggctcttgataaatgtatgcaagatcacgattgcaaagactgggtgcacaaagagatagtcaccgccctcagctgtggaaagaatatagtcccgatcattgatggcttcgagtggccagaacctcaggtactgccagaagacatgcaggctgtgcttacattcaacggcattaaatggagtcatgagtatcaagaagctacaattgagaagatcatccgattcctccagggacgttctagcagagatagtagtgctgggtccgacacctctctggagggcgccgctcccatgggcccaacatag

SEQ ID NO: 184245 - DNA, 4053 bp, Artificial Sequence
  derived and/or modified sequence
atggtcctgacgctgcttctctccgcctacaagctgtgtcgcttcttcgccatgtcgggcccacggcggggcgccgagcggctggcggtgcctgggccagatgggggcggtggcacgggcccatggtgggctgcgggtggcccgggcccgcgaaagtgtcgccgggggcaggcaccgaggtgcaggacgccctggagcgcgcgctgccggagctgcagcaggccttgtccgcgctgaagcaggcgggcggcgcgcgggccgtgggcgccggcctggccgaggtcttccaactggtggaggaggcctggctgctgcggccgtgggccgcgaggtagcccagggtctgtgcgacgccatccgcctcgatggcggcctcgacctgctgttgcggctgctgcaggcgccggagttggagacgcgtgtgcaggccgcgcgcctgctggagcagatcctggtggctgagaaccgagaccgcgtggcgcgcattgggctgggcgtgatcctgaacctggcgaaggaacgcgaacccgtagagctggcgcggagtgggtcaggcatcttggagcacatgttcaagcattcggaggagacatgccagaggctggtggcggccggcggcctggacgcggtgctgtattggtgccgccgcacggaccccgcgctgctgcgccactgcgcgctggcgctgggcaactgcgcgctgcacgggggccaggcggtgcagcgacgcatggtagagaagcgcgcagccgagtggctcttcccgctcgccttctccaaggaggacgagctgctttcgctgcacgcctgcctcgcagtagcggtgttggcgactaacaaggaggtggagcgcgaggtggagcgctcgggcacgctggcgctcgtggagccgcttgtggcctcgctggaccctggccgcttcgcccgctgtctggtggacgccagcgacacaagccagggccgcgggcccgacgacctgcagcgcctcgtgccgttgctcgactctaaccgcttggaggcgcagtgcatcggggctttctacctctgcgccgaggctgccatcaagagcctgcaaggcaagaccaaggtgttcagcgacatcggcgccatccagagcctgaaacgcctggtttcctactctaccaatggcactaagtcggcgctggccaagcgcgcgctgcgcctgctgggcgaggaggtgccacggcccatcctgccctccgtgcccagctggaaggaggccgaggttcagacgtggctgcagcagatcggtttctccaagtactgcgagagcttccgggagcagcaggtggatggcgacctgcttctgcggctcacggaggaggaactccagaccgacctgggcatgaaatcgggcatcacccgcaagaggttctttagggagctcacggagctcaagaccttcgccaactattctacgtgcgaccgcagcaacctggcggactggctgggcagcctggacccgcgcttccgccagtacacctacggcctggtcagctgcggcctggaccgctccctgctgcaccgcgtgtctgagcagcagctgctggaagactgcggcatccacctgggcgtgcaccgcgcccgcatcctcacggcggccagagaaatgctacactccccgctgccctgtactggtggcaaacccagtggggacactccagatgtcttcatcagctaccgccggaactcaggttcccagctggccagtctcctgaaggtgcacctgcagctgcatggcttcagtgtcttcattgatgtggagaagctggaagcaggcaagttcgaggacaaactcatccagagtgtcatgggtgcccgcaactttgtgttggtgctatcacctggagcactggacaagtgcatgcaagaccatgactgcaaggattgggtgcataaggagattgtgactgctttaagctgcggcaagaacattgtgcccatcattgatggcttcgagtggcctgagccccaggtcctgcctgaggacatgcaggctgtgcttactttcaacggtatcaagtggtcccacgaataccaggaggccaccattgagaagatcatccgcttcctgcagggccgctcctcccgggactcatctgcaggctctgacaccagtttggagggtgctgcacccatgggtccaacctaaccagtccccagttccccagccctgctgtgacttccatttccatcgtcctttctgaaggaacagctcctgaaaccagtctccctgggctgagacaacctgggctcttcttaggaaatggctctccctccccctgtcccccaccctcatggcccacctccaacccactttcctcagtatctggagagggaagggaagtcaggcttgggcacgggaggttagaactcccccaggccctgccattgggttgtctgtctccgtcatggggagggtccctgctcagttctggagacactggagttggggtgggggtggttctgcattcccttctcctgctgatagcagtcagcttgaggaggatgaaggaaggcagcctcagacaggaattaaggcaatgcccaggcgggcctgggcactgtattctgagcaaaggcctgggcccaggagccagccagggatgagtgccatcatggctctccactcagactgtgcctggcccctgcacttacaacttcctgccgctctgtggccttgccctgtaatcactcagtgcccttagctagcctgactaagtcccagatcccctacagcttccttcggtgtggtatcttttgccacatccagggcgagggttgaggcaaaccagccctccctctgacttccttgtcactgcagccagctttgctgcacttgctggtgcacaggagcctcctgtttgggcctgggtctgggcatggggaggccgtgcctcaaagcccaccctaccccatgccttggtgctgtgcctcaggctccttcctggtctggcccagctggcttccccagcccctcagccatccagggctacccactgcttactcagggaccaggcagcccccatggcagtaaaagcagcctagacagaacctgcagctctgtggaaagaggcaaagtcctgaaaaggcaaagggttgtcacttagggcagcttctccaactttaacatgcatccaagtcacctgggaatgttgttaaaatcaggagatctggggtggggcctaggactctgcatttcttacagattcccaggtgagctgatgctggtggttaagggtagcaaatctctaaagcacgaagccctcacaaatctttgccatttcccaaacactccgctccatggtctccagtcatcagagcaactctacctggtattatcatccccattttacagataatgacactgaggctcagaaaggttgaggataagcccactttcctgtcattagtggcagccccagatccagacctaggcctcctggcacccagtccactggcagtggaattgctttcctgagaatcattctgaggctgggctattgcttctcccttgcttcaaagaatctagcagcgggggataggattttgcaacaaaaagctgacccagaggccatacagagcaggaatatcccattgccccctcctccactgggttcagagggtaagaaagcaccctccaataaacccaggctccaggccgtgggggctgctgaaggctctttccccgcaagggccaggtgttgacaccttaaagctggcgcccccagccccactcttggctgtgctggccaggtgactcctagttcttggccacatcatcagaaagtcaaaggtctcactccaggtttggggctccttccttccactcccctccctgccagagtctgtcttggccagtgccagcctcgatgctttggttttgaccccacctgatcctcctttcctcatgcagcacaagtgctcaccggggccagagccagggcatggatatgacaagcagggcagcctggacactgccctcacaggacagcgccaataacaatacagtgtctgagtatctccagggga

SEQ ID NO: 184246 - DNA, 6977 bp, Artificial Sequence
  derived and/or modified sequence
ccaaaacccgggtctctccgcgtggccccgcctccaggccggggatgtcccccgcggccccgcgcccatggtcctgacgctgcttctctccgcctacaagctgtgtcgcttcttcgccatgtcgggcccacggcggggcgccgagcggctggcggtgcctgggccagatgggggcggtggcacgggcccatggtgggctgcgggtggcccgggcccgcgagtgtcgccgggggcaggcaccgaggtgcaggacgccctggagcgcgcgctgccggagctgcagcaggccttgtccgcgctgaagcaggcgggcggcgcgcgggccgtgggcgccggcctggccgaggtcttccaactggtggaggaggcctggctgctggccgtgggccgcgaggtagcccagggtctgtgcgacgccatccgcctcgatggcggcctcgacctgctgttgcggctgctgcaggcgccggagttggagacgcgtgtgcaggccgcgcgcctgctggagcagatcctggtggctgagaaccgagaccgcgtggcgcgcattgggctgggcgtgatcctgaacctggcgaaggaacgcgaacccgtagagctggcgcggagtgggtcaggcatcttggagcacatgttcaagcattcggaggagacatgccagaggctggtggcggccggcggcctggacgcggtgctgtattggtgccgccgcacggaccccgcgctgctgcgccactgcgcgctggcgctgggcaactgcgcgctgcacgggggccaggcggtgcagcgacgcatggtagagaagcgcgcagccgagtggctcttcccgctcgccttctccaaggaggacgagctgctttcgctgcacgcctgcctcgcagtagcggtgttggcgactaacaaggaggtggagcgcgaggtggagcgctcgggcacgctggcgctcgtggagccgcttgtggcctcgctggaccctggccgcttcgcccgctgtctggtggacgccagcgacacaagccagggccgcgggcccgacgacctgcagcgcctcgtgccgttgctcgactctaaccgcttggaggcgcagtgcatcggggctttctacctctgcgccgaggctgccatcaagagcctgcaaggcaagaccaaggtgttcagcgacatcggcgccatccagagcctgaaacgcctggtttcctactctaccaatggcactaagtcggcgctggccaagcgcgcgctgcgcctgctgggcgaggaggtgccacggcccatcctgccctccgtgcccagctggaaggaggccgaggttcagacgtggctgcagcagatcggtttctccaagtactgcgagagcttccgggagcagcaggtggatggcgacctgcttctgcggctcacggaggaggaactccagaccgacctgggcatgaaatcgggcatcacccgcaagaggttctttagggagctcacggagctcaagaccttcgccaactattctacgtgcgaccgcagcaacctggcggactggctgggcagcctggacccgcgcttccgccagtacacctacggcctggtcagctgcggcctggaccgctccctgctgcaccgcgtgtctgagcagcagctgctggaagactgcggcatccacctgggcgtgcaccgcgcccgcatcctcacggcggccagagaaatgctacactccccgctgccctgtactggtggcaaacccagtggggacactccagatgtcttcatcagctaccgccggaactcaggttcccagctggccagtctcctgaaggtgcacctgcagctgcatggcttcagtgtcttcattgatgtggagaagctggaagcaggcaagttcgaggacaaactcatccagagtgtcatgggtgcccgcaactttgtgttggtgctatcacctggagcactggacaagtgcatgcaagaccatgactgcaaggattgggtgcataaggagattgtgactgctttaagctgcggcaagaacattgtgcccatcattgatggcttcgagtggcctgagccccaggtcctgcctgaggacatgcaggctgtgcttactttcaacggtatcaagtggtcccacgaataccaggaggccaccattgagaagatcatccgcttcctgcagggccgctcctcccgggactcatctgcaggctctgacaccagtttggagggtgctgcacccatgggtccaacctaaccagtccccagttccccagccctgctgtgacttccatttccatcgtcctttctgaaggaacagctcctgaaaccagtctccctgggctgagacaacctgggctcttcttaggaaatggctctccctccccctgtcccccaccctcatggcccacctccaacccactttcctcagtatctggagagggaagggaagtcaggcttgggcacgggaggttagaactcccccaggccctgccattgggttgtctgtctccgtcatggggagggtccctgctcagttctggagacactggagttggggtgggggtggttctgcattcccttctcctgctgatagcagtcagcttgaggaggatgaaggaaggcagcctcagacaggaattaaggcaatgcccaggcgggcctgggcactgtattctgagcaaaggcctgggcccaggagccagccagggatgagtgccatcatggctctccactcagactgtgcctggcccctgcacttacaacttcctgccgctctgtggccttgccctgtaatcactcagtgcccttagctagcctgactaagtcccagatcccctacagcttccttcggtgtggtatcttttgccacatccagggcgagggttgaggcaaaccagccctccctctgacttccttgtcactgcagccagctttgctgcacttgctggtgcacaggagcctcctgtttgggcctgggtctgggcatggggaggccgtgcctcaaagcccaccctaccccatgccttggtgctgtgcctcaggctccttcctggtctggcccagctggcttccccagcccctcagccatccagggctacccactgcttactcagggaccaggcagcccccatggcagtaaaagcagcctagacagaacctgcagctctgtggaaagaggcaaagtcctgaaaaggcaaagggttgtcacttagggcagcttctccaactttaacatgcatccaagtcacctgggaatgttgttaaaatcaggagatctggggtggggcctaggactctgcatttcttacagattcccaggtgagctgatgctggtggttaagggtagcaaatctctaaagcacgaagccctcacaaatctttgccatttcccaaacactccgctccatggtctccagtcatcagagcaactctacctggtattatcatccccattttacagataatgacactgaggctcagaaaggttgaggataagcccactttcctgtcattagtggcagccccagatccagacctaggcctcctggcacccagtccactggcagtggaattgctttcctgagaatcattctgaggctgggctattgcttctcccttgcttcaaagaatctagcagcgggggataggattttgcaacaaaaagctgacccagaggccatacagagcaggaatatcccattgccccctcctccactgggttcagagggtaagaaagcaccctccaataaacccaggctccaggccgtgggggctgctgaaggctctttccccgcaagggccaggtgttgacaccttaaagctggcgcccccagccccactcttggctgtgctggccaggtgactcctagttcttggccacatcatcagaaagtcaaaggtctcactccaggtttggggctccttccttccactcccctccctgccagagtctgtcttggccagtgccagcctcgatgctttggttttgaccccacctgatcctcctttcctcatgcagcacaagtgctcaccggggccagagccagggcatggatatgacaagcagggcagcctggacactgccctcacaggacagcgccaataacaatacagtgtctgagtatctccaggggatgatttctggctctttgtctccaatcagtcccactccctcctgaggtccccaagggcagtattcagagaggtttcctgcgttttatttctatttggtataccctccactgttgtccactgccctgtgtggccttctggttgacctctgcccgatcttctgtctctctgagggaatcagagtccagcatccagccccagctggaacagctgaagtcacaagcctcctctaagccaaggccagtgtgttcagaggtgactgccacccatactaggacaaacacagctcagatcaccaggtcaagcacctaggcctggcttctcctgagacagaggactcagaagtggcctttcctccaaagcctgctcagacacaggtctgtagggccagggtgttctgcttggctgggctgcagctgctacccctcggttggggctgagtcagccagatcctccccctacttctccccaagggccaagaactgctcagggacattaaaggtcaaaagtccagccacactcattcatcctttccccaggcccatgaagagaggcatctcattgtagaatgtatgaggaagtgggaagtatctcagagaatcagctaagtttcctaacttgtccatccaaatgtgatcaccacgattcaacaatttggggcattgctgatctagccgttcctagtggggcttgctcaaggttgcacagcgagtcagtagaagccctggctggccccacttggtaccaatccaccaggcagctcagggctcctgcccagcccagcagcttctgttgtctaacgtatggcaggcagactgggagcaggaaaacagagggccccaaagcccaaggcaccagaaggtttgtttcagtttgctgaagctgatttgtaatgattggcactcttcagccaggggagtgggtaggccatagccaaggatcgattccccaaccacagcaaaggcaacactcttcctccagagatcaccaagcccctcttacctccctccctccttcccaaggctggcactaaccaggtaccacattcattgttaaggaatggctgatgactgctacacgtgttgggaacctggttggggctgtgcagtttgggctggaaggagagatgccagccctcgtgctgcctctggtccctgaagtgtcacctctctcaggacctctcctctggcctgtggggttataagtgatggatagcagaaagggagaactgactcctgtcccaaatagctcctctgccacctgtcctgcagtgggcctgtgtgggttatgattctagatcctagacagaggctgggtcagctgtggatggggtggtgccttggtctctcttgactacctcgtccaaagagagcactgcccttagacaagagttgcttgtcctgctgtgggctgggcttccagctgcagacctccagttgcttggtgttcactttgctcctcttgccctctgtcttctggtccaggcagatcaggggctctggggaaactgctggaactcgaggtgaggatcagccttttccagcatcctgtgagagaccagagagagagtttggatttcatgtggggaaccctcaaggcctgtctggagaagtgacacaggatttactggggtgggctggtccaggtagctctcctgaacctcctccttccccaagctgagaagctgagagctggaggacaatatccagggacatggctctggaaaataacttttttttttttaagagacagggtcttgctctgttgtccaggctggagggcagtgacataatcatagctcactgtacccttgaactcctgggctcaagtgatcctcctgcctcagcctccttagtagctgggactaccagtgcataccaccatgcctgggtgattttttaaattttttatacagacaaggtcttgctatgttgcccaggctgatcttgaattcccgggctcaagtggtcctcctgcctcagcctcccacaggatcgggattacaggcaagagcctccacgcccggccatgaaatataattcttaatatcatacaggaaaaagtcagcgggtcaagctagcctgtggcccagccacaactagctgacaaagcttcctggccttccctttaacacagttctgctgccatagttccatctataaaatgggaatggagggaaataggggaactgggatagagaacacagccttgccaagcagcaatgttagcctgatccttcctccacctagctcgccatctcgcccttggaaaatggctcctggaggattaggcagccatctgcaaggagaggggcaacctgggacaagacacccagagggtaaggattccaggaatgaagctgccatttctggttgggaggagaagaggaaacttttaagagaaagggctccattatgagcatgggttcagggccctgcattacccaatcagaacagccgggatgagcaggaggccagctcccaggaggaaggggaaccccttcataaagttcagagtggctgggtagagtgagttgaagaatgccggaggccgtcagcatggccaggctattcacacaggccacagcagaaaagagagcacctgtgaagaaataaataccatactctggagtccgaaagggccatattccaactctggcaccaccacctcacagctgtgtgaccgggagtagtcacttaacctatgtctccccttcctcaccagtaaatcctgctacatcatgtactgtgacaaggattcagtaaggtcatatgtggacagtagctggcacagaggggctactaaacaaatggctgctattaaatccacattaaaagtacatgtgatctgacagaacccagcac

SEQ ID NO: 184247 - protein, 1114 aa, Artificial Sequence
  derived and/or modified sequence
MLSCLKEEMPPQELTRRLATVITHVDEIMQQEVRPLMAVEIIEQLHRQFAILSGGRGEDGAPIITFPEFSGFKHIPDEDFLNVMTYLTSIPSVEAASIGFIVVIDRRRDKWSSVKASLTRIAVAFPGNLQLIFILRPSRFIQRTFTDIGIKYYRNEFKTKVPIIMVNSVSDLHGYIDKSQLTRELGGTLEYRHGQWVNHRTAIENFALTLKTTAQMLQTFGSCLATAELPRSMLSTEDLLMSHTRQRDKLQDELKLLGKQGTTLLSCIQEPATKCPNSKLNLNQLENVTTMERLLVQLDETEKAFSHFWSEHHLKLNQCLQLQHFEHDFCKAKLALDNLLEEQAEFTGIGDSVMHVEQILKEHKKLEEKSQEPLEKAQLLALVGDQLIQSHHYAADAIRPRCVELRHLCDDFINGNKKKWDILGKSLEFHRQLDKVSQWCEAGIYLLASQAVDKCQSREGVDIALNDIATFLGTVKEYPLLSPKEFYNEFELLLTLDAKAKAQKVLQRLDDVQEIFHKRQVSLMKLAAKQTRPVQPVAPHPESSPKWVSSKTSQPSTSVPLARPLRTSEEPYTETELNSRGKEDDETKFEVKSEEIFESHHERGNPELEQQARLGDLSPRRRIIRDLLETEEIYIKEIKSIIDGYITPMDFIWLKHLIPDVLQNNKDFLFGNIRELYEFHNRTFLKELEKCAENPELLAHCFLKRKEDLQIYFKYHKNLPRARAIWQECQDCAYFGVCQRQLDHNLPLFKYLKGPSQRLIKYQMLLKGLLDFESPEDMEIDPGELGGSAKDGPKRTKDSAFSTELQQALAVIEDLIKSCELAVDLAAVTECPDDIGKLGKLLLHGPFSVWTIHKDRYKMKDLIRFKPSQRQIYLFERGIVFCKIRMEPGDQGLSPHYSFKKTMKLMTLSIRQLGRGSHRKFEIASRNGLEKYILQAASKEIRDCWFSEISKLLMEQQNNIKDQGNPQFEMSTSKGSGAGSGPWIKNMERATTSKEDPASSTGGIKGCSSREFSSMDTFEDCEGAEDMEKESSALSLAGLFQSDDSHETCSSKSAFLERGESSQGEKEERDEEETATRSTEEERAGASTGRLAPAGATAGFQARALRPRTSAQES

SEQ ID NO: 184248 - protein, 628 aa, Artificial Sequence
  derived and/or modified sequence
MLSCLKEEMPPQELTRRLATVITHVDEIMQQEVRPLMAVEIIEQLHRQFAILSGGRGEDGAPIITFPEFSGFKHIPDEDFLNVMTYLTSIPSVEAASIGFIVVIDRRRDKWSSVKASLTRIAVAFPGNLQLIFILRPSRFIQRTFTDIGIKYYRNEFKTKVPIIMVNSVSDLHGYIDKSQLTRELGGTLEYRHGQWVNHRTAIENFALTLKTTAQMLQTFGSCLATAELPRSMLSTEDLLMSHTRQRDKLQDELKLLGKQGTTLLSCIQEPATKCPNSKLNLNQLENVTTMERLLVQLDETEKAFSHFWSEHHLKLNQCLQLQHFEHDFCKAKLALDNLLEEQAEFTGIGDSVMHVEQILKEHKKLEEKSQEPLEKAQLLALVGDQLIQSHHYAADAIRPRCVELRHLCDDFINGNKKKWDILGKSLEFHRQLDKVSQWCEAGIYLLASQAVDKCQSREGVDIALNDIATFLGTVKEYPLLSPKEFYNEFELLLTLDAKAKAQKVLQRLDDVQEIFHKRQVSLMKLAAKQTRPVQPVAPHPESSPKWVSSKTSQPSTSVPLARPLRTSEEPYTETELNSRGKEDDETKFEVKSEEIFESHHERGNPELEQQARLGDLSPRRYSSQYFK

SEQ ID NO: 184249 - protein, 172 aa, Artificial Sequence [sequence omitted]

SEQ ID NO: 184250 - protein, 711 aa, Artificial Sequence
  derived and/or modified sequence
MLSCLKEEMPPQELTRRLATVITHVDEIMQQEVRPLMAVEIIEQLHRQFAILSGGRGEDGAPIITFPEFSGFKHIPDEDFLNVMTYLTSIPSVEAASIGFIVVIDRRRDKWSSVKASLTRIAVAFPGNLQLIFILRPSRFIQRTFTDIGIKYYRNEFKTKVPIIMVNSVSDLHGYIDKSQLTRELGGTLEYRHGQWVNHRTAIENFALTLKTTAQMLQTFGSCLATAELPRSMLSTEDLLMSHTRQRDKLQDELKLLGKQGTTLLSCIQEPATKCPNSKLNLNQLENVTTMERLLVQLDETEKAFSHFWSEHHLKLNQCLQLQHFEHDFCKAKLALDNLLEEQAEFTGIGDSVMHVEQILKEHKKLEEKSQEPLEKAQLLALVGDQLIQSHHYAADAIRPRCVELRHLCDDFINGNKKKWDILGKSLEFHRQLDKVSQWCEAGIYLLASQAVDKCQSREGVDIALNDIATFLGTVKEYPLLSPKEFYNEFELLLTLDAKAKAQKVLQRLDDVQEIFHKRQVSLMKLAAKQTRPVQPVAPHPESSPKWVSSKTSQPSTSVPLARPLRTSEEPYTETELNSRGKEDDETKFEVKSEEIFESHHERGNPELEQQARLGDLSPRRRIIRDLLETEEIYIKEIKSIIDGYITPMDFIWLKHLIPDVLQNNKDFLFGNIRELYEFHNRTFLKELEKCAENPELLAHCFLKRVSLYSQ

SEQ ID NO: 184251 - protein, 1074 aa, Artificial Sequence
  derived and/or modified sequence
MLSCLKEEMPPQELTRRLATVITHVDEIMQQEVRPLMAVEIIEQLHRQFAILSGGRGEDGAPIITFPEFSGFKHIPDEDFLNVMTYLTSIPSVEAASIGFIVVIDRRRDKWSSVKASLTRIAVAFPGNLQLIFILRPSRFIQRTFTDIGIKYYRNEFKTKVPIIMVNSVSDLHGYIDKSQLTRELGGTLEYRHGQWVNHRTAIENFALTLKTTAQMLQTFGSCLATAELPRSMLSTEDLLMSHTRQRDKLQDELKLLGKQGTTLLSCIQEPATKCPNSKLNLNQLENVTTMERLLVQLDETEKAFSHFWSEHHLKLNQCLQLQHFEHDFCKAKLALDNLLEEQAEFTGIGDSVMHVEQILKEHKKLEEKSQEPLEKAQLLALVGDQLIQSHHYAADAIRPRCVELRHLCDDFINGNKKKWDILGKSLEFHRQLDKVSQWCEAGIYLLASQAVDKCQSREGVDIALNDIATFLGTVKEYPLLSPKEFYNEFELLLTLDAKAKAQKVLQRLDDVQEIFHKRQVSLMKLAAKQTRPVQPVAPHPESSPKWVSSKTSQPSTSVPLARPLRTSEEPYTETELNSRGKEDDETKFEVKSEEIFESHHERGNPELEQQARLGDLSPRRRIIRDLLETEEIYIKEIKSIIDGYITPMDFIWLKHLIPDVLQNNKDFLFGNIRELYEFHNRTFLKELEKCAENPELLAHCFLKRKEDLQIYFKYHKNLPRARAIWQECQDCAYFGVCQRQLDHNLPLFKYLKGPSQRLIKYQMLLKGLLDFESPEDMEIDPGELGGSAKDGPKRTKDSAFSTELQQALAVIEDLIKSCELAVDLAAVTECPDDIGKLGKLLLHGPFSVWTIHKDRYKMKDLIRFKPSQRQIYLFERGIVFCKIRMEPGDQGLSPHYSFKKTMKLMTLSIRQLGRGSHRKFEIASRNGLEKYILQAASKEIRDCWFSEISKLLMEQQNNIKDQGNPQFEMSTSKGSGAGSGPWIKNMERATTSKEDPASSTGGIKGCSSREFSSMDTFEDCEGAEDMEKESSALSLAGLFQSDDSHETCSSKSAFLERGESSQGEKEERDEEET

SEQ ID NO: 184252 - DNA, 3345 bp, Artificial Sequence
  derived and/or modified sequence
atgctgagctgcctgaaggaggagatgcccccccaggagctgaccagaagactggccaccgtgatcacccacgtggacgagatcatgcagcaggaggtgagacccctgatggccgtggagatcatcgagcagctgcacagacagttcgccatcctgagcggcggcagaggcgaggacggcgcccccatcatcaccttccccgagttcagcggcttcaagcacatccccgacgaggacttcctgaacgtgatgacctacctgaccagcatccccagcgtggaggccgccagcatcggcttcatcgtggtgatcgacagaagaagagacaagtggagcagcgtgaaggccagcctgaccagaatcgccgtggccttccccggcaacctgcagctgatcttcatcctgagacccagcagattcatccagagaaccttcaccgacatcggcatcaagtactacagaaacgagttcaagaccaaggtgcccatcatcatggtgaacagcgtgagcgacctgcacggctacatcgacaagagccagctgaccagagagctgggcggcaccctggagtacagacacggccagtgggtgaaccacagaaccgccatcgagaacttcgccctgaccctgaagaccaccgcccagatgctgcagaccttcggcagctgcctggccaccgccgagctgcccagaagcatgctgagcaccgaggacctgctgatgagccacaccagacagagagacaagctgcaggacgagctgaagctgctgggcaagcagggcaccaccctgctgagctgcatccaggagcccgccaccaagtgccccaacagcaagctgaacctgaaccagctggagaacgtgaccaccatggagagactgctggtgcagctggacgagaccgagaaggccttcagccacttctggagcgagcaccacctgaagctgaaccagtgcctgcagctgcagcacttcgagcacgacttctgcaaggccaagctggccctggacaacctgctggaggagcaggccgagttcaccggcatcggcgacagcgtgatgcacgtggagcagatcctgaaggagcacaagaagctggaggagaagagccaggagcccctggagaaggcccagctgctggccctggtgggcgaccagctgatccagagccaccactacgccgccgacgccatcagacccagatgcgtggagctgagacacctgtgcgacgacttcatcaacggcaacaagaagaagtgggacatcctgggcaagagcctggagttccacagacagctggacaaggtgagccagtggtgcgaggccggcatctacctgctggccagccaggccgtggacaagtgccagagcagagagggcgtggacatcgccctgaacgacatcgccaccttcctgggcaccgtgaaggagtaccccctgctgagccccaaggagttctacaacgagttcgagctgctgctgaccctggacgccaaggccaaggcccagaaggtgctgcagagactggacgacgtgcaggagatcttccacaagagacaggtgagcctgatgaagctggccgccaagcagaccagacccgtgcagcccgtggccccccaccccgagagcagccccaagtgggtgagcagcaagaccagccagcccagcaccagcgtgcccctggccagacccctgagaaccagcgaggagccctacaccgagaccgagctgaacagcagaggcaaggaggacgacgagaccaagttcgaggtgaagagcgaggagatcttcgagagccaccacgagagaggcaaccccgagctggagcagcaggccagactgggcgacctgagccccagaagaagaatcatcagagacctgctggagaccgaggagatctacatcaaggagatcaagagcatcatcgacggctacatcacccccatggacttcatctggctgaagcacctgatccccgacgtgctgcagaacaacaaggacttcctgttcggcaacatcagagagctgtacgagttccacaacagaaccttcctgaaggagctggagaagtgcgccgagaaccccgagctgctggcccactgcttcctgaagagaaaggaggacctgcagatctacttcaagtaccacaagaacctgcccagagccagagccatctggcaggagtgccaggactgcgcctacttcggcgtgtgccagagacagctggaccacaacctgcccctgttcaagtacctgaagggccccagccagagactgatcaagtaccagatgctgctgaagggcctgctggacttcgagagccccgaggacatggagatcgaccccggcgagctgggcggcagcgccaaggacggccccaagagaaccaaggacagcgccttcagcaccgagctgcagcaggccctggccgtgatcgaggacctgatcaagagctgcgagctggccgtggacctggccgccgtgaccgagtgccccgacgacatcggcaagctgggcaagctgctgctgcacggccccttcagcgtgtggaccatccacaaggacagatacaagatgaaggacctgatcagattcaagcccagccagagacagatctacctgttcgagagaggcatcgtgttctgcaagatcagaatggagcccggcgaccagggcctgagcccccactacagcttcaagaagaccatgaagctgatgaccctgagcatcagacagctgggcagaggcagccacagaaagttcgagatcgccagcagaaacggcctggagaagtacatcctgcaggccgccagcaaggagatcagagactgctggttcagcgagatcagcaagctgctgatggagcagcagaacaacatcaaggaccagggcaacccccagttcgagatgagcaccagcaagggcagcggcgccggcagcggcccctggatcaagaacatggagagagccaccaccagcaaggaggaccccgccagcagcaccggcggcatcaagggctgcagcagcagagagttcagcagcatggacaccttcgaggactgcgagggcgccgaggacatggagaaggagagcagcgccctgagcctggccggcctgttccagagcgacgacagccacgagacctgcagcagcaagagcgccttcctggagagaggcgagagcagccagggcgagaaggaggagagagacgaggaggagaccgccaccagaagcaccgaggaggagagagccggcgccagcaccggcagactggcccccgccggcgccaccgccggcttccaggccagagccctgagacccagaaccagcgcccaggagagctag

SEQ ID NO: 184253 - DNA, 1887 bp, Artificial Sequence
  derived and/or modified sequence
atgctgagctgcctgaaggaggagatgcccccccaggagctgaccagaagactggccaccgtgatcacccacgtggacgagatcatgcagcaggaggtgagacccctgatggccgtggagatcatcgagcagctgcacagacagttcgccatcctgagcggcggcagaggcgaggacggcgcccccatcatcaccttccccgagttcagcggcttcaagcacatccccgacgaggacttcctgaacgtgatgacctacctgaccagcatccccagcgtggaggccgccagcatcggcttcatcgtggtgatcgacagaagaagagacaagtggagcagcgtgaaggccagcctgaccagaatcgccgtggccttccccggcaacctgcagctgatcttcatcctgagacccagcagattcatccagagaaccttcaccgacatcggcatcaagtactacagaaacgagttcaagaccaaggtgcccatcatcatggtgaacagcgtgagcgacctgcacggctacatcgacaagagccagctgaccagagagctgggcggcaccctggagtacagacacggccagtgggtgaaccacagaaccgccatcgagaacttcgccctgaccctgaagaccaccgcccagatgctgcagaccttcggcagctgcctggccaccgccgagctgcccagaagcatgctgagcaccgaggacctgctgatgagccacaccagacagagagacaagctgcaggacgagctgaagctgctgggcaagcagggcaccaccctgctgagctgcatccaggagcccgccaccaagtgccccaacagcaagctgaacctgaaccagctggagaacgtgaccaccatggagagactgctggtgcagctggacgagaccgagaaggccttcagccacttctggagcgagcaccacctgaagctgaaccagtgcctgcagctgcagcacttcgagcacgacttctgcaaggccaagctggccctggacaacctgctggaggagcaggccgagttcaccggcatcggcgacagcgtgatgcacgtggagcagatcctgaaggagcacaagaagctggaggagaagagccaggagcccctggagaaggcccagctgctggccctggtgggcgaccagctgatccagagccaccactacgccgccgacgccatcagacccagatgcgtggagctgagacacctgtgcgacgacttcatcaacggcaacaagaagaagtgggacatcctgggcaagagcctggagttccacagacagctggacaaggtgagccagtggtgcgaggccggcatctacctgctggccagccaggccgtggacaagtgccagagcagagagggcgtggacatcgccctgaacgacatcgccaccttcctgggcaccgtgaaggagtaccccctgctgagccccaaggagttctacaacgagttcgagctgctgctgaccctggacgccaaggccaaggcccagaaggtgctgcagagactggacgacgtgcaggagatcttccacaagagacaggtgagcctgatgaagctggccgccaagcagaccagacccgtgcagcccgtggccccccaccccgagagcagccccaagtgggtgagcagcaagaccagccagcccagcaccagcgtgcccctggccagacccctgagaaccagcgaggagccctacaccgagaccgagctgaacagcagaggcaaggaggacgacgagaccaagttcgaggtgaagagcgaggagatcttcgagagccaccacgagagaggcaaccccgagctggagcagcaggccagactgggcgacctgagccccagaagatacagcagccagtacttcaagtag

SEQ ID NO: 184254 - DNA, 2136 bp, Artificial Sequence
  derived and/or modified sequence
atgctgagctgcctgaaggaggagatgcccccccaggagctgaccagaagactggccaccgtgatcacccacgtggacgagatcatgcagcaggaggtgagacccctgatggccgtggagatcatcgagcagctgcacagacagttcgccatcctgagcggcggcagaggcgaggacggcgcccccatcatcaccttccccgagttcagcggcttcaagcacatccccgacgaggacttcctgaacgtgatgacctacctgaccagcatccccagcgtggaggccgccagcatcggcttcatcgtggtgatcgacagaagaagagacaagtggagcagcgtgaaggccagcctgaccagaatcgccgtggccttccccggcaacctgcagctgatcttcatcctgagacccagcagattcatccagagaaccttcaccgacatcggcatcaagtactacagaaacgagttcaagaccaaggtgcccatcatcatggtgaacagcgtgagcgacctgcacggctacatcgacaagagccagctgaccagagagctgggcggcaccctggagtacagacacggccagtgggtgaaccacagaaccgccatcgagaacttcgccctgaccctgaagaccaccgcccagatgctgcagaccttcggcagctgcctggccaccgccgagctgcccagaagcatgctgagcaccgaggacctgctgatgagccacaccagacagagagacaagctgcaggacgagctgaagctgctgggcaagcagggcaccaccctgctgagctgcatccaggagcccgccaccaagtgccccaacagcaagctgaacctgaaccagctggagaacgtgaccaccatggagagactgctggtgcagctggacgagaccgagaaggccttcagccacttctggagcgagcaccacctgaagctgaaccagtgcctgcagctgcagcacttcgagcacgacttctgcaaggccaagctggccctggacaacctgctggaggagcaggccgagttcaccggcatcggcgacagcgtgatgcacgtggagcagatcctgaaggagcacaagaagctggaggagaagagccaggagcccctggagaaggcccagctgctggccctggtgggcgaccagctgatccagagccaccactacgccgccgacgccatcagacccagatgcgtggagctgagacacctgtgcgacgacttcatcaacggcaacaagaagaagtgggacatcctgggcaagagcctggagttccacagacagctggacaaggtgagccagtggtgcgaggccggcatctacctgctggccagccaggccgtggacaagtgccagagcagagagggcgtggacatcgccctgaacgacatcgccaccttcctgggcaccgtgaaggagtaccccctgctgagccccaaggagttctacaacgagttcgagctgctgctgaccctggacgccaaggccaaggcccagaaggtgctgcagagactggacgacgtgcaggagatcttccacaagagacaggtgagcctgatgaagctggccgccaagcagaccagacccgtgcagcccgtggccccccaccccgagagcagccccaagtgggtgagcagcaagaccagccagcccagcaccagcgtgcccctggccagacccctgagaaccagcgaggagccctacaccgagaccgagctgaacagcagaggcaaggaggacgacgagaccaagttcgaggtgaagagcgaggagatcttcgagagccaccacgagagaggcaaccccgagctggagcagcaggccagactgggcgacctgagccccagaagaagaatcatcagagacctgctggagaccgaggagatctacatcaaggagatcaagagcatcatcgacggctacatcacccccatggacttcatctggctgaagcacctgatccccgacgtgctgcagaacaacaaggacttcctgttcggcaacatcagagagctgtacgagttccacaacagaaccttcctgaaggagctggagaagtgcgccgagaaccccgagctgctggcccactgcttcctgaagagagtgagcctgtacagccagtag

SEQ ID NO: 184255 - DNA, 3225 bp, Artificial Sequence
  derived and/or modified sequence
atgctgagctgcctgaaggaggagatgcccccccaggagctgaccagaagactggccaccgtgatcacccacgtggacgagatcatgcagcaggaggtgagacccctgatggccgtggagatcatcgagcagctgcacagacagttcgccatcctgagcggcggcagaggcgaggacggcgcccccatcatcaccttccccgagttcagcggcttcaagcacatccccgacgaggacttcctgaacgtgatgacctacctgaccagcatccccagcgtggaggccgccagcatcggcttcatcgtggtgatcgacagaagaagagacaagtggagcagcgtgaaggccagcctgaccagaatcgccgtggccttccccggcaacctgcagctgatcttcatcctgagacccagcagattcatccagagaaccttcaccgacatcggcatcaagtactacagaaacgagttcaagaccaaggtgcccatcatcatggtgaacagcgtgagcgacctgcacggctacatcgacaagagccagctgaccagagagctgggcggcaccctggagtacagacacggccagtgggtgaaccacagaaccgccatcgagaacttcgccctgaccctgaagaccaccgcccagatgctgcagaccttcggcagctgcctggccaccgccgagctgcccagaagcatgctgagcaccgaggacctgctgatgagccacaccagacagagagacaagctgcaggacgagctgaagctgctgggcaagcagggcaccaccctgctgagctgcatccaggagcccgccaccaagtgccccaacagcaagctgaacctgaaccagctggagaacgtgaccaccatggagagactgctggtgcagctggacgagaccgagaaggccttcagccacttctggagcgagcaccacctgaagctgaaccagtgcctgcagctgcagcacttcgagcacgacttctgcaaggccaagctggccctggacaacctgctggaggagcaggccgagttcaccggcatcggcgacagcgtgatgcacgtggagcagatcctgaaggagcacaagaagctggaggagaagagccaggagcccctggagaaggcccagctgctggccctggtgggcgaccagctgatccagagccaccactacgccgccgacgccatcagacccagatgcgtggagctgagacacctgtgcgacgacttcatcaacggcaacaagaagaagtgggacatcctgggcaagagcctggagttccacagacagctggacaaggtgagccagtggtgcgaggccggcatctacctgctggccagccaggccgtggacaagtgccagagcagagagggcgtggacatcgccctgaacgacatcgccaccttcctgggcaccgtgaaggagtaccccctgctgagccccaaggagttctacaacgagttcgagctgctgctgaccctggacgccaaggccaaggcccagaaggtgctgcagagactggacgacgtgcaggagatcttccacaagagacaggtgagcctgatgaagctggccgccaagcagaccagacccgtgcagcccgtggccccccaccccgagagcagccccaagtgggtgagcagcaagaccagccagcccagcaccagcgtgcccctggccagacccctgagaaccagcgaggagccctacaccgagaccgagctgaacagcagaggcaaggaggacgacgagaccaagttcgaggtgaagagcgaggagatcttcgagagccaccacgagagaggcaaccccgagctggagcagcaggccagactgggcgacctgagccccagaagaagaatcatcagagacctgctggagaccgaggagatctacatcaaggagatcaagagcatcatcgacggctacatcacccccatggacttcatctggctgaagcacctgatccccgacgtgctgcagaacaacaaggacttcctgttcggcaacatcagagagctgtacgagttccacaacagaaccttcctgaaggagctggagaagtgcgccgagaaccccgagctgctggcccactgcttcctgaagagaaaggaggacctgcagatctacttcaagtaccacaagaacctgcccagagccagagccatctggcaggagtgccaggactgcgcctacttcggcgtgtgccagagacagctggaccacaacctgcccctgttcaagtacctgaagggccccagccagagactgatcaagtaccagatgctgctgaagggcctgctggacttcgagagccccgaggacatggagatcgaccccggcgagctgggcggcagcgccaaggacggccccaagagaaccaaggacagcgccttcagcaccgagctgcagcaggccctggccgtgatcgaggacctgatcaagagctgcgagctggccgtggacctggccgccgtgaccgagtgccccgacgacatcggcaagctgggcaagctgctgctgcacggccccttcagcgtgtggaccatccacaaggacagatacaagatgaaggacctgatcagattcaagcccagccagagacagatctacctgttcgagagaggcatcgtgttctgcaagatcagaatggagcccggcgaccagggcctgagcccccactacagcttcaagaagaccatgaagctgatgaccctgagcatcagacagctgggcagaggcagccacagaaagttcgagatcgccagcagaaacggcctggagaagtacatcctgcaggccgccagcaaggagatcagagactgctggttcagcgagatcagcaagctgctgatggagcagcagaacaacatcaaggaccagggcaacccccagttcgagatgagcaccagcaagggcagcggcgccggcagcggcccctggatcaagaacatggagagagccaccaccagcaaggaggaccccgccagcagcaccggcggcatcaagggctgcagcagcagagagttcagcagcatggacaccttcgaggactgcgagggcgccgaggacatggagaaggagagcagcgccctgagcctggccggcctgttccagagcgacgacagccacgagacctgcagcagcaagagcgccttcctggagagaggcgagagcagccagggcgagaaggaggagagagacgaggaggagacctag

SEQ ID NO: 184256 - DNA, 3345 bp, Artificial Sequence
  derived and/or modified sequence
atgctcagctgtctgaaagaagagatgccgccgcaggaacttacccggcgcttagctaccgtcatcacccacgtagacgagataatgcagcaggaggttcggcccctaatggctgtggaaattattgagcagctccacaggcaattcgcaatcctgtccggaggacggggggaggatggcgcaccaatcatcacttttcctgagttcagcggctttaagcacatccccgacgaagattttctcaatgtcatgacttacctgacatccatacccagcgtagaagccgcttccatcggattcattgtggtcatcgatcggagacgcgataaatggagttcggtcaaggcatcactcactaggattgccgtggccttccctggcaacttacagttgatctttattttacgtccgtctagatttatccagagaacatttaccgatattgggattaaatactaccgtaacgaattcaagaccaaggttccgattatcatggtcaatagtgtgagcgatctacacggatacatcgacaagtcccagctgacccgcgaactggggggaactcttgagtaccgacacgggcagtgggtgaaccatcgtacagccatcgaaaacttcgccctcactctgaaaaccactgcgcagatgctgcagactttcggatcttgcctagcaactgcggaactccctaggtctatgctgtcaacagaagacctcctcatgtcacacacaagacagcgcgataaactacaggatgagctgaaacttctgggaaagcaagggactactctgctttcatgcatccaggagcctgcaaccaagtgtccaaactcaaagctcaacttgaatcagctagaaaacgtgacgactatggaaagattactggtacagctggacgaaaccgagaaggcgttttctcatttttggtctgagcatcatctcaagctgaatcagtgtttacagctgcagcattttgagcacgatttctgtaaagcgaaattagccctggacaatctcctagaggaacaggctgaatttaccggaatcggtgactcagttatgcatgttgagcaaatcctgaaggagcacaagaagctggaagaaaagagccaggaacctctggaaaaggcacagttgttggctttggtaggtgaccaactgatacagagtcaccactacgccgcagacgctattcgtcccagatgtgtcgagttgcgccacctctgtgacgactttattaacggaaacaagaaaaaatgggacattctgggtaaatccctggagtttcataggcagctggacaaggtgagtcagtggtgcgaggcaggaatttatttgcttgccagtcaggcggtggacaagtgccaatctcgagagggcgttgacatagctcttaatgacatagcaacatttctcggaactgttaaggaataccccttgctcagcccaaaagagttttataatgagttcgagctgctattgacacttgatgcgaaggccaaagctcagaaagtgcttcagaggcttgatgacgtgcaggagatttttcacaaacgccaggtctcattaatgaagcttgccgcaaagcagactcgacctgtccagccagtcgccccccaccccgagagttcacccaagtgggtctccagtaagacttcgcagccttctacatctgtgccccttgctaggcccctaagaacatccgaggaaccctacacagaaaccgagttaaacagtagggggaaggaggacgacgagacaaagtttgaagtcaaaagcgaggaaattttcgagtcccatcacgaaagaggaaaccccgagctcgaacaacaggcccgtctaggcgatttgtctcctcgacggaggattatcagagatctgctcgagacagaggagatatatattaaagagattaaatccattatagacggttacatcacaccaatggatttcatctggctcaaacacctaatccctgatgtccttcaaaataataaggatttcctgttcggtaacattagagaactctacgaattccataacagaaccttcctcaaggagctggaaaagtgtgcagagaaccctgagcttctggctcactgctttctgaagcgaaaagaagatctgcaaatctattttaagtaccacaaaaacctgcctagggctagggcgatatggcaagagtgccaagactgtgcttactttggagtgtgtcaacgccaacttgaccacaacttgcccctgtttaagtatctgaagggtcccagccagcggctgatcaagtatcagatgctgctgaagggactgcttgactttgagtcaccagaggacatggaaatcgaccccggggaactaggaggtagcgctaaagatggccctaaaagaacaaaagacagtgccttttccacagaactgcagcaggcgttggccgtgattgaagatctgattaaaagttgcgagttggcggtagacctcgcggcggtaaccgagtgccctgatgatattgggaaattggggaaactcctgctgcacggacctttttccgtatggactatccacaaggataggtataagatgaaagatcttatccgcttcaaaccgagccagcgccagatttacctgtttgaaagaggcatcgttttttgcaagatccgcatggagcctggtgaccaaggccttagtccccactattcttttaaaaaaaccatgaagctgatgaccctgagtatcagacagcttggtagaggatctcaccggaagttcgagatcgcaagcagaaacggcttggagaagtacatcttgcaggccgcgagcaaggagattcgggactgttggttctccgagatttccaaactgttgatggaacagcaaaataacatcaaggaccagggcaatccacaatttgagatgagcacttcaaagggttctggggcggggagcggcccatggatcaaaaatatggaacgggccacgacctcaaaagaagaccccgcctccagcactggcggtatcaagggttgttccagccgtgagttcagctcaatggacacattcgaggactgcgaaggtgccgaagacatggagaaagaatccagcgctctttcactcgccggtctgtttcagtcagatgactctcatgaaacctgttcatctaaatcagctttcctggaacgaggagagtcctctcagggagaaaaagaggagcgtgatgaggaagaaaccgccactcgatccaccgaggaggagagggcaggagcaagcaccgggagacttgcccctgcaggagctaccgccggattccaggcccgagctctcaggccgcgaacctcagctcaggagtcttag

SEQ ID NO: 184257 - DNA, 1887 bp, Artificial Sequence
  derived and/or modified sequence
atgctaagctgcctgaaggaagagatgcctcctcaggaactgactcggagactggcgacagtaattacccacgtcgatgaaataatgcagcaagaagtgcggcctctgatggcggtcgagatcatcgagcagctgcataggcaattcgcaattttaagtggcggccggggggaggacggagcccctattataacatttccagaattcagtggatttaagcacataccagacgaggactttctcaatgtgatgacataccttacaagtattccctccgtggaagcggcatctatcggctttatcgtggtgatcgaccgaagacgggataaatggagcagcgtgaaggcatcacttacacggatcgccgtcgcatttcccggtaaccttcagcttatctttatcctgaggccctcaaggtttatccagcgtacatttactgatataggtatcaaatattataggaacgaattcaagactaaggtacctattataatggtgaatagtgtgagtgacctacatgggtacatcgataaatcccaactgacgcgcgagcttggggggaccctcgaatatcggcatgggcagtgggttaaccatcgaacagccatcgagaactttgccttgacactgaaaacaacagcccagatgctacagacatttggctcatgccttgcgactgccgagctccccagaagcatgctgagtacagaagaccttctgatgtcacacacaaggcagcgggacaagctgcaggacgagctgaagctgctgggaaagcaggggactaccctgctgtcatgcatccaggaacccgctactaagtgcccaaacagcaaactcaatctaaatcagctggaaaatgtcactacgatggagcgtctgctcgttcagctggacgaaaccgaaaaagccttctctcacttttggtccgagcatcacctgaagctaaatcaatgtctgcagctccagcatttcgaacatgatttttgcaaggccaaactcgctctcgacaacctgttagaggagcaggcagagtttactggcataggtgatagcgtgatgcacgttgagcagatacttaaagagcataaaaagctggaggagaagtcccaggagcctctggaaaaggcacaattactagctctggttggggatcagctgatccagtcccaccactatgccgccgacgctattaggcccaggtgcgtggaattgcgccacctgtgcgatgacttcattaacggcaataaaaagaagtgggatatactgggtaagtccctcgaattccatcggcagctggacaaggtatcccaatggtgcgaagccggtatatatttgctggcttcccaggctgtcgataaatgccaaagtagggagggagtcgatatagcactcaacgacatcgctacttttctaggcacagtgaaggagtaccctctcctgtctcccaaagagttttataatgagttcgagttgctcctgacgttggatgccaaagcaaaggctcagaaagtgcttcagagactggacgatgtgcaggaaatcttccacaaaaggcaggtctcgcttatgaagctggccgctaagcagacacgacccgttcagcccgtggcgccacaccccgaaagcagtcctaaatgggtgtcatccaagaccagccagccttctaccagtgtgcctctcgctagacccctacggactagtgaagagccctatactgaaactgagttgaatagcagaggtaaagaggatgacgaaaccaaatttgaagttaagtctgaagaaatatttgagtctcaccacgagagaggaaaccctgagctggaacagcaggccaggctgggcgacctgagcccccggaggtattcctctcagtatttcaagtag

SEQ ID NO: 184258 - DNA, 2136 bp, Artificial Sequence
  derived and/or modified sequence
atgctgagctgcctgaaagaggagatgcctccccaagaactgactcggagactggctaccgtgattacccatgtcgatgagataatgcagcaggaggtaagaccgctcatggcagtcgagattattgaacagttgcatagacagttcgccatattgtccggcggccgcggtgaggacggtgccccgatcatcactttccctgagttcagcggatttaaacacattccagacgaggacttcctgaacgtgatgacttacctgacttcaatcccatccgtggaagccgccagtattggattcatcgtggtgatcgatcgccgacgtgataaatggtctagtgtgaaggcttctctcactcgtattgctgtggccttccccggaaacctccagctcatcttcatcctacgacctagtaggttcatccagcgcactttcacggacatcggaatcaaatactatcggaacgagttcaaaaccaaagttcctattattatggtgaattcagtaagcgacctacacggctatatcgacaaatcccagttaacaagggagctcggtggaaccctagagtatcgccatggccagtgggtgaatcatcggaccgccatcgaaaatttcgctctcacactgaagacaaccgcccagatgctacagacctttgggtcttgtctcgccacggcagagctgcctagaagtatgctgtctactgaggatctccttatgtcacatactcggcagagggataaactgcaagatgagttaaaattactgggcaagcagggtacgactctccttagctgtattcaggagcccgcaaccaagtgcccgaactcaaaactgaacttaaatcaattggaaaatgtgacgacaatggagaggttgttagttcaactggacgagactgagaaggccttctctcacttttggagcgagcaccacctgaagttgaatcagtgtttgcaactccagcactttgagcacgatttctgtaaggcgaagctcgctctggacaacctgctcgaggagcaggccgaattcaccgggattggggactcagtgatgcatgtggaacagattctaaaagaacataaaaaattagaggagaagagccaggagccccttgaaaaagcgcagttactggccctggtaggagatcagctgatccagtcccatcattatgcagccgatgccattcggccacggtgcgtagagctcagacacctttgcgacgactttatcaatggcaacaaaaaaaaatgggatatactcggcaagagcctcgagtttcatcgccagctggacaaagtctcgcaatggtgtgaggcagggatctacctgttagcaagccaagccgttgataagtgccagagccgggagggggtagacatcgccctgaatgatatagccacattcctcggcacagtcaaagagtatccattgctatccccaaaggagttctataatgagttcgaacttctgctcactctggatgccaaggccaaggcccaaaaggtcctccagaggctcgatgatgttcaggagatctttcacaagcgtcaggtgtcactgatgaagctggccgcgaaacagacccgcccagttcagcccgtggcccctcaccccgaatcgtctcccaaatgggtctcttcaaaaacgagtcagcctagcacctctgtcccgttggctcgccctctgaggactagtgaagagccttacaccgagaccgagctgaattcaagagggaaggaggacgatgaaaccaaattcgaggtgaagtctgaagagatattcgagagccatcacgagagggggaatcctgagctggaacaacaggcccgcttgggggatctatcccccagacgccggatcatccgggatctgctagaaacagaggagatttacatcaaggagatcaagtcaatcatcgacggctacattacgcctatggattttatctggctgaagcaccttatcccggacgtactgcagaacaacaaggactttctctttggtaacatacgggagttgtacgaattccacaatcggacttttctaaaggagttagaaaaatgcgcagaaaaccccgaactactggcccattgcttcctgaaaagagtgtccctttatagtcaatag

SEQ ID NO: 184259 - DNA, 3225 bp, Artificial Sequence
  derived and/or modified sequence
atgcttagttgtttaaaggaagaaatgccaccccaagagctgaccagaaggctggccactgtgatcactcatgtcgatgagataatgcagcaggaggttagacccctaatggctgtggaaattatagagcagctgcataggcaatttgcaatcctctcagggggtcgcggagaggatggcgcgcccattataaccttccctgaattttccggttttaagcacatcccagacgaggactttctcaacgtcatgacttatttaacttccatcccatcagttgaggcagcatccattgggtttatcgtcgtcatcgacagacgccgcgacaaatggtcatctgtgaaagcctccctgacgcgcattgcagtagcatttcccggaaaccttcagctgatatttatattgaggcctagtcggttcattcagagaacatttactgacatcgggatcaagtattaccggaatgaatttaagactaaggttccgataattatggtgaatagcgtgagtgaccttcacggatacatcgataagagccagctcacacgagaactgggcggaactctggagtaccgacatggccaatgggtcaaccacaggaccgccattgaaaacttcgccttgaccttgaagacaacagcccaaatgctgcaaacctttgggtcatgtctcgccactgccgagctgcctaggtccatgctgagtacggaggatctcctgatgtcccatacacggcagcgtgataagctccaggatgagctaaaattgctgggcaaacaaggcaccaccctgctgtcatgcattcaggagcctgcaacgaagtgtcctaattcgaaactaaacctgaatcaactcgaaaacgtgaccacaatggaacgactgttagtccagttggacgagacagaaaaagccttttcacatttctggagcgagcaccacctgaagctcaaccaatgtctgcagctgcagcactttgaacacgacttctgcaaagctaaactcgccctggataatctgctggaggaacaagccgaatttacagggatcggcgatagtgtaatgcatgtggagcagatcctgaaggaacacaagaaactggaggagaagtcccaggagcctctggagaaggcccaactcttggccctcgttggcgaccagctgatccagagccaccattatgccgctgacgccattcgcccaaggtgtgtggaactgcgccacttgtgtgatgacttcatcaacggcaataagaagaaatgggatatactgggaaagtcactcgagttccatcgtcagctggataaggtgagtcagtggtgcgaggctgggatttatttgttggcctctcaggccgtcgataagtgtcagtcacgggaaggtgtcgatatcgcgttgaacgacattgcgacattcctcgggactgtaaaagagtacccgcttttgagcccgaaggaattttataatgagttcgagctgttactaactctcgatgcaaaggcaaaggcacagaaagtactccaacggctcgacgacgtacaggaaatctttcataagcggcaggtgtccctcatgaaactcgcggccaaacaaaccagacccgtacagcctgtggcccctcatccagaatcctctccgaagtgggtatcaagcaagaccagtcagcctagcacctccgtccccttggctcgcccacttaggaccagtgaagaaccctataccgaaaccgagttaaattcacgggggaaagaggatgatgaaaccaagtttgaagtgaaaagcgaggagatcttcgagagtcatcatgagagaggcaatcctgagcttgagcagcaggcccggttgggcgatttgtcccccagacggaggattatcagagatcttctagagacggaggagatctacattaaggagatcaaatccataattgatgggtatatcacgcccatggattttatctggctgaagcacctgattcctgatgtgcttcagaacaataaggactttctgtttggaaatattagggagctgtacgagtttcacaaccggacgtttctgaaagaactggaaaaatgcgcagaaaaccccgagctcctggcccactgctttctcaaaagaaaagaggacctgcagatttactttaagtaccataagaatctccctagagcccgggcgatttggcaagaatgtcaggattgcgcatatttcggggtctgtcagcgccagctggaccataaccttcctctctttaaatatttaaaaggaccgagtcagaggcttatcaaataccaaatgctgctgaagggcctgctggacttcgagtctcccgaggatatggagattgacccaggtgagctcggaggcagtgctaaggatggtcccaagcgaaccaaggactccgcgttctctactgaattacaacaggcattggccgttattgaggacctcatcaaaagctgtgaactagccgttgatctggccgcggtcaccgagtgtccagatgacataggtaagcttggcaagctcctcctgcacgggcccttctccgtgtggacaattcacaaagatcgctacaagatgaaagatctgattagatttaaacctagtcaacggcagatttatttgtttgaaagagggatagtcttttgcaaaatcagaatggagcctggtgaccaaggcctgagtccccactacagtttcaagaaaacaatgaaacttatgaccttgtcaatccgccagttggggaggggatcacaccgaaaatttgaaatcgcaagtcggaacgggctagagaagtatattttgcaggccgcgtctaaagaaattagggactgctggttctctgaaatatcaaagctgctaatggaacaacagaacaatatcaaggatcaggggaaccctcagttcgagatgtccacaagtaagggttcaggggccggcagtggtccttggattaaaaacatggagagagctaccaccagcaaagaggatcccgcatcgtcaactggcggtattaaggggtgttcgtcccgcgagttttcttccatggacacctttgaagactgtgagggggctgaggacatggagaaagaatcgagcgctctctctcttgcggggctgtttcagtccgatgacagccatgaaacttgcagctctaagtccgcctttctggagcgcggggagagttcacagggtgaaaaggaggaacgggacgaggaggaaacctag

SEQ ID NO: 184260 - DNA, 3345 bp, Artificial Sequence
  derived and/or modified sequence
atgctgagctgcctgaaggaggagatgccaccccaggagctgacccggcggctggccaccgtcatcacccacgtggatgagatcatgcagcaggaggtgcggcccctgatggctgtggagatcatcgagcagctgcaccggcagtttgccatcctgagcggcggccgcggggaggatggagcccccatcatcaccttccctgagttcagcggcttcaagcacatcccagatgaggacttcctgaatgtgatgacctacctgaccagcatccccagcgtggaggccgccagcatcggcttcatcgtggtgattgacagaagaagagacaagtggagctctgtgaaggccagcctgaccagaattgctgtggccttccctggcaacctgcagctgatcttcatcctgcggcccagccgcttcatccagaggaccttcacagacatcggcatcaagtactacagaaatgagttcaagaccaaggtgcccatcatcatggtgaacagcgtgtctgacctgcacggctacatcgacaagagccagctgacccgggagctgggcggcaccctggagtacagacatggccagtgggtgaaccacaggacagccatcgagaactttgccctgaccctgaagaccacagcccagatgctgcagaccttcggcagctgcctggccacagctgagctgcccaggtccatgctgagcacagaggacctgctgatgagccacacccggcagagggacaagctgcaggatgagctgaagctgctgggcaagcagggcaccaccctgctgagctgcatccaggagcccgccaccaagtgccccaacagcaagctgaacctgaaccagctggagaatgtgaccaccatggagcggctgctggtgcagctggatgaaacagagaaggccttcagccacttctggagcgagcaccacctgaagctgaaccagtgcctgcagctgcagcactttgaacatgacttctgcaaggccaagctggccctggacaacctgctggaggagcaggccgagttcaccggcattggagacagcgtgatgcacgtggagcagatcctgaaggagcacaagaagctggaggagaagagccaggagcccctggagaaggcccagctgctggccctggtgggggaccagctgatccagagccaccactacgccgcagatgccatccggccccgctgtgtggagctgcggcacctgtgtgatgacttcatcaatggaaacaagaagaagtgggacatcctgggcaagagcctggagttccaccggcagctggacaaggtgtcccagtggtgtgaggccggcatctacctgctggccagccaggccgtggacaagtgccagagccgggagggcgtggacatcgccctgaatgacatcgccaccttcctgggcaccgtgaaggagtaccccctgctgagccccaaggagttctacaatgaatttgagctgctgctgaccctggatgccaaggccaaggcccagaaggtgctgcagaggctggatgatgtgcaggagatcttccacaagaggcaggtgtccctgatgaagctggccgccaagcagaccaggcctgtgcagcctgtggccccccaccctgagagcagccccaagtgggtgagcagcaagaccagccagcccagcacctctgtgcccctggcccggcccctgcggaccagcgaggagccctacacagaaacagagctgaacagccggggcaaggaggatgatgagaccaagtttgaggtgaagtctgaggagatctttgagagccaccacgagcggggcaaccctgagctggagcagcaggcccggctgggggacctgagcccccggcggcgcatcatccgggacctgctggagacagaggagatctacatcaaggagatcaagagcatcattgatggctacatcacccccatggacttcatctggctgaagcacctgatcccagatgtgctgcagaacaacaaggacttcctgtttggaaacatccgggagctgtatgagttccacaacagaaccttcctgaaggagctggagaagtgtgctgaaaatcctgagctgctggcccactgcttcctgaagaggaaagaagacctgcagatctacttcaagtaccacaagaacctgccccgggcccgggccatctggcaggagtgccaggactgtgcctactttggagtgtgccagaggcagctggaccacaacctgcccctcttcaagtacctgaagggccccagccagaggctcatcaagtaccagatgctgctgaagggcctgctggactttgagagccctgaggacatggagattgaccccggggagctgggcggcagcgccaaggatggccccaagaggaccaaggacagcgccttcagcacagagctgcagcaggccctggccgtgattgaagatctcatcaagagctgtgagctggccgtggacctggccgctgtgacagagtgcccagatgacatcggcaagctgggcaagctgctgctgcacggccccttctctgtgtggaccatccacaaggaccgctacaagatgaaggacctgatccgcttcaagcccagccagaggcagatctacctgtttgagcggggcatcgtgttctgcaagatccgcatggagcccggggaccagggcctgagcccccactacagcttcaagaagaccatgaagctgatgaccctgagcatccggcagctgggccggggcagccacaggaagtttgaaattgccagcagaaatggcctggagaagtacatcctgcaggccgccagcaaggagatccgggactgctggttcagcgagatcagcaagctgctgatggagcagcagaacaacatcaaggaccagggcaacccccagtttgagatgagcaccagcaagggcagcggggccggcagcggcccctggatcaagaacatggagcgggccaccaccagcaaagaagatcctgccagcagcactggaggcatcaagggctgcagcagccgggagttcagctccatggacacctttgaggactgtgagggcgctgaggacatggagaaggagagcagcgccctgagcctggccggcctcttccagagtgatgacagccatgagacctgcagcagcaagagcgccttcctggagcggggggagagcagccagggcgagaaggaggagagagatgaggaggagacagccaccaggagcacagaggaggagcgggccggggccagcacaggccgcctggccccagctggggccacagctggcttccaggcccgggccctgcggcccaggaccagcgcccaggagagctag

SEQ ID NO: 184261 - DNA, 1887 bp, Artificial Sequence
  derived and/or modified sequence
atgctgagctgcctgaaggaggagatgccaccccaggagctgacccggcggctggccaccgtcatcacccacgtggatgagatcatgcagcaggaggtgcggcccctgatggctgtggagatcatcgagcagctgcaccggcagtttgccatcctgagcggcggccgcggggaggatggagcccccatcatcaccttccctgagttcagcggcttcaagcacatcccagatgaggacttcctgaatgtgatgacctacctgaccagcatccccagcgtggaggccgccagcatcggcttcatcgtggtgattgacagaagaagagacaagtggagctctgtgaaggccagcctgaccagaattgctgtggccttccctggcaacctgcagctgatcttcatcctgcggcccagccgcttcatccagaggaccttcacagacatcggcatcaagtactacagaaatgagttcaagaccaaggtgcccatcatcatggtgaacagcgtgtctgacctgcacggctacatcgacaagagccagctgacccgggagctgggcggcaccctggagtacagacatggccagtgggtgaaccacaggacagccatcgagaactttgccctgaccctgaagaccacagcccagatgctgcagaccttcggcagctgcctggccacagctgagctgcccaggtccatgctgagcacagaggacctgctgatgagccacacccggcagagggacaagctgcaggatgagctgaagctgctgggcaagcagggcaccaccctgctgagctgcatccaggagcccgccaccaagtgccccaacagcaagctgaacctgaaccagctggagaatgtgaccaccatggagcggctgctggtgcagctggatgaaacagagaaggccttcagccacttctggagcgagcaccacctgaagctgaaccagtgcctgcagctgcagcactttgaacatgacttctgcaaggccaagctggccctggacaacctgctggaggagcaggccgagttcaccggcattggagacagcgtgatgcacgtggagcagatcctgaaggagcacaagaagctggaggagaagagccaggagcccctggagaaggcccagctgctggccctggtgggggaccagctgatccagagccaccactacgccgcagatgccatccggccccgctgtgtggagctgcggcacctgtgtgatgacttcatcaatggaaacaagaagaagtgggacatcctgggcaagagcctggagttccaccggcagctggacaaggtgtcccagtggtgtgaggccggcatctacctgctggccagccaggccgtggacaagtgccagagccgggagggcgtggacatcgccctgaatgacatcgccaccttcctgggcaccgtgaaggagtaccccctgctgagccccaaggagttctacaatgaatttgagctgctgctgaccctggatgccaaggccaaggcccagaaggtgctgcagaggctggatgatgtgcaggagatcttccacaagaggcaggtgtccctgatgaagctggccgccaagcagaccaggcctgtgcagcctgtggccccccaccctgagagcagccccaagtgggtgagcagcaagaccagccagcccagcacctctgtgcccctggcccggcccctgcggaccagcgaggagccctacacagaaacagagctgaacagccggggcaaggaggatgatgagaccaagtttgaggtgaagtctgaggagatctttgagagccaccacgagcggggcaaccctgagctggagcagcaggcccggctgggggacctgagcccccggcgctacagcagccagtacttcaagtag

SEQ ID NO: 184262 - DNA, 2136 bp, Artificial Sequence
  derived and/or modified sequence
atgctgagctgcctgaaggaggagatgccaccccaggagctgacccggcggctggccaccgtcatcacccacgtggatgagatcatgcagcaggaggtgcggcccctgatggctgtggagatcatcgagcagctgcaccggcagtttgccatcctgagcggcggccgcggggaggatggagcccccatcatcaccttccctgagttcagcggcttcaagcacatcccagatgaggacttcctgaatgtgatgacctacctgaccagcatccccagcgtggaggccgccagcatcggcttcatcgtggtgattgacagaagaagagacaagtggagctctgtgaaggccagcctgaccagaattgctgtggccttccctggcaacctgcagctgatcttcatcctgcggcccagccgcttcatccagaggaccttcacagacatcggcatcaagtactacagaaatgagttcaagaccaaggtgcccatcatcatggtgaacagcgtgtctgacctgcacggctacatcgacaagagccagctgacccgggagctgggcggcaccctggagtacagacatggccagtgggtgaaccacaggacagccatcgagaactttgccctgaccctgaagaccacagcccagatgctgcagaccttcggcagctgcctggccacagctgagctgcccaggtccatgctgagcacagaggacctgctgatgagccacacccggcagagggacaagctgcaggatgagctgaagctgctgggcaagcagggcaccaccctgctgagctgcatccaggagcccgccaccaagtgccccaacagcaagctgaacctgaaccagctggagaatgtgaccaccatggagcggctgctggtgcagctggatgaaacagagaaggccttcagccacttctggagcgagcaccacctgaagctgaaccagtgcctgcagctgcagcactttgaacatgacttctgcaaggccaagctggccctggacaacctgctggaggagcaggccgagttcaccggcattggagacagcgtgatgcacgtggagcagatcctgaaggagcacaagaagctggaggagaagagccaggagcccctggagaaggcccagctgctggccctggtgggggaccagctgatccagagccaccactacgccgcagatgccatccggccccgctgtgtggagctgcggcacctgtgtgatgacttcatcaatggaaacaagaagaagtgggacatcctgggcaagagcctggagttccaccggcagctggacaaggtgtcccagtggtgtgaggccggcatctacctgctggccagccaggccgtggacaagtgccagagccgggagggcgtggacatcgccctgaatgacatcgccaccttcctgggcaccgtgaaggagtaccccctgctgagccccaaggagttctacaatgaatttgagctgctgctgaccctggatgccaaggccaaggcccagaaggtgctgcagaggctggatgatgtgcaggagatcttccacaagaggcaggtgtccctgatgaagctggccgccaagcagaccaggcctgtgcagcctgtggccccccaccctgagagcagccccaagtgggtgagcagcaagaccagccagcccagcacctctgtgcccctggcccggcccctgcggaccagcgaggagccctacacagaaacagagctgaacagccggggcaaggaggatgatgagaccaagtttgaggtgaagtctgaggagatctttgagagccaccacgagcggggcaaccctgagctggagcagcaggcccggctgggggacctgagcccccggcggcgcatcatccgggacctgctggagacagaggagatctacatcaaggagatcaagagcatcattgatggctacatcacccccatggacttcatctggctgaagcacctgatcccagatgtgctgcagaacaacaaggacttcctgtttggaaacatccgggagctgtatgagttccacaacagaaccttcctgaaggagctggagaagtgtgctgaaaatcctgagctgctggcccactgcttcctgaagagggtgtccctgtacagccagtag

SEQ ID NO: 184263 - DNA, 3225 bp, Artificial Sequence
  derived and/or modified sequence
atgctgagctgcctgaaggaggagatgccaccccaggagctgacccggcggctggccaccgtcatcacccacgtggatgagatcatgcagcaggaggtgcggcccctgatggctgtggagatcatcgagcagctgcaccggcagtttgccatcctgagcggcggccgcggggaggatggagcccccatcatcaccttccctgagttcagcggcttcaagcacatcccagatgaggacttcctgaatgtgatgacctacctgaccagcatccccagcgtggaggccgccagcatcggcttcatcgtggtgattgacagaagaagagacaagtggagctctgtgaaggccagcctgaccagaattgctgtggccttccctggcaacctgcagctgatcttcatcctgcggcccagccgcttcatccagaggaccttcacagacatcggcatcaagtactacagaaatgagttcaagaccaaggtgcccatcatcatggtgaacagcgtgtctgacctgcacggctacatcgacaagagccagctgacccgggagctgggcggcaccctggagtacagacatggccagtgggtgaaccacaggacagccatcgagaactttgccctgaccctgaagaccacagcccagatgctgcagaccttcggcagctgcctggccacagctgagctgcccaggtccatgctgagcacagaggacctgctgatgagccacacccggcagagggacaagctgcaggatgagctgaagctgctgggcaagcagggcaccaccctgctgagctgcatccaggagcccgccaccaagtgccccaacagcaagctgaacctgaaccagctggagaatgtgaccaccatggagcggctgctggtgcagctggatgaaacagagaaggccttcagccacttctggagcgagcaccacctgaagctgaaccagtgcctgcagctgcagcactttgaacatgacttctgcaaggccaagctggccctggacaacctgctggaggagcaggccgagttcaccggcattggagacagcgtgatgcacgtggagcagatcctgaaggagcacaagaagctggaggagaagagccaggagcccctggagaaggcccagctgctggccctggtgggggaccagctgatccagagccaccactacgccgcagatgccatccggccccgctgtgtggagctgcggcacctgtgtgatgacttcatcaatggaaacaagaagaagtgggacatcctgggcaagagcctggagttccaccggcagctggacaaggtgtcccagtggtgtgaggccggcatctacctgctggccagccaggccgtggacaagtgccagagccgggagggcgtggacatcgccctgaatgacatcgccaccttcctgggcaccgtgaaggagtaccccctgctgagccccaaggagttctacaatgaatttgagctgctgctgaccctggatgccaaggccaaggcccagaaggtgctgcagaggctggatgatgtgcaggagatcttccacaagaggcaggtgtccctgatgaagctggccgccaagcagaccaggcctgtgcagcctgtggccccccaccctgagagcagccccaagtgggtgagcagcaagaccagccagcccagcacctctgtgcccctggcccggcccctgcggaccagcgaggagccctacacagaaacagagctgaacagccggggcaaggaggatgatgagaccaagtttgaggtgaagtctgaggagatctttgagagccaccacgagcggggcaaccctgagctggagcagcaggcccggctgggggacctgagcccccggcggcgcatcatccgggacctgctggagacagaggagatctacatcaaggagatcaagagcatcattgatggctacatcacccccatggacttcatctggctgaagcacctgatcccagatgtgctgcagaacaacaaggacttcctgtttggaaacatccgggagctgtatgagttccacaacagaaccttcctgaaggagctggagaagtgtgctgaaaatcctgagctgctggcccactgcttcctgaagaggaaagaagacctgcagatctacttcaagtaccacaagaacctgccccgggcccgggccatctggcaggagtgccaggactgtgcctactttggagtgtgccagaggcagctggaccacaacctgcccctcttcaagtacctgaagggccccagccagaggctcatcaagtaccagatgctgctgaagggcctgctggactttgagagccctgaggacatggagattgaccccggggagctgggcggcagcgccaaggatggccccaagaggaccaaggacagcgccttcagcacagagctgcagcaggccctggccgtgattgaagatctcatcaagagctgtgagctggccgtggacctggccgctgtgacagagtgcccagatgacatcggcaagctgggcaagctgctgctgcacggccccttctctgtgtggaccatccacaaggaccgctacaagatgaaggacctgatccgcttcaagcccagccagaggcagatctacctgtttgagcggggcatcgtgttctgcaagatccgcatggagcccggggaccagggcctgagcccccactacagcttcaagaagaccatgaagctgatgaccctgagcatccggcagctgggccggggcagccacaggaagtttgaaattgccagcagaaatggcctggagaagtacatcctgcaggccgccagcaaggagatccgggactgctggttcagcgagatcagcaagctgctgatggagcagcagaacaacatcaaggaccagggcaacccccagtttgagatgagcaccagcaagggcagcggggccggcagcggcccctggatcaagaacatggagcgggccaccaccagcaaagaagatcctgccagcagcactggaggcatcaagggctgcagcagccgggagttcagctccatggacacctttgaggactgtgagggcgctgaggacatggagaaggagagcagcgccctgagcctggccggcctcttccagagtgatgacagccatgagacctgcagcagcaagagcgccttcctggagcggggggagagcagccagggcgagaaggaggagagagatgaggaggagacctag

SEQ ID NO: 184264 - DNA, 4980 bp, Artificial Sequence
  derived and/or modified sequence
cggggcgcggttccggcgagattggcgacttgcttccttttgcagaacggccgctcctctctcggtccagctgcgacgctgggaaagcgccagacttggtctgtcacgggagcccccgcggggcgtggcgagggagagctggcctaggctgcgagggactctcgtttcttgcctggagagccaggaagagggcgagggcagagcatccttgggcggagatgcctttaaaaaatcatccaccgcagcggtagaaacagttttgtttggctttatttatacggaatggtttttcagtgaaatgctgtcttgcttaaaagaagagatgcctccccaggagctcacccggcgactggccacagtgatcactcatgtcgatgaaattatgcagcaggaagtcagacccctgatggcggtggagataatagaacaacttcacagacaatttgccattctttcaggaggccgaggggaggatggcgcccccatcatcacgttcccagagttttcggggttcaaacacatcccagatgaagacttcctgaatgtcatgacctacctgactagcatccccagtgtggaggctgccagcattggattcattgttgttatcgacagacgaagagacaagtggagctccgtaaaggcatccttgacacgaatagctgtggcatttccaggaaacttacagctcatattcatccttcgtccatctcgctttatccagaggacattcactgacattggcattaaatactatcgaaatgagtttaaaacgaaagtgccgatcatcatggtaaactctgtctctgaccttcacggctacatcgacaaaagccaactgacccgggaattaggggggactttggaatatcgccacggtcagtgggtaaatcaccgcactgccatcgaaaactttgccttgaccttgaagaccactgcccagatgctgcagacgtttgggtcctgcctggccacagcagagctgcccagaagcatgctatccacggaagaccttctcatgtcccacacaaggcagcgggacaagctgcaggatgagctgaaattacttggaaagcaggggaccacattgctgtcatgcatccaagaaccagcaaccaaatgtcccaacagcaaactcaatctcaaccaacttgagaatgtaactaccatggaaaggttattagttcaactggatgaaacagaaaaagcctttagtcacttttggtctgagcatcatctgaagcttaaccagtgcctacaactacagcattttgagcacgatttttgtaaggctaagcttgccctggataatttgctggaagagcaagcagagtttacaggcattggagacagcgtgatgcacgtggagcagattcttaaggaacacaaaaaactggaggaaaaaagccaggagcccctggaaaaggcccagctgctggcactggttggggaccagctcatccaaagccaccattatgcagcagatgccatcaggccccggtgtgtggagctcaggcacctctgtgacgatttcatcaatggaaacaagaaaaaatgggacattttaggaaagtccttagagtttcatagacagctggacaaggtcagccaatggtgtgaggcaggaatctacctcttggcttcccaagctgtagacaagtgccagtctcgagaaggggttgatatcgccttgaacgacattgcgacattcctgggcacagtcaaggagtacccgttgctcagccccaaggagttttacaacgagtttgagttgctgctcaccctcgatgcaaaggccaaagcccagaaagttttgcagaggctggatgatgtccaggaaatatttcacaagaggcaagtgagtctgatgaaactggcagccaaacagactcgtccagtgcaacctgtggccccacatcctgagtcttcaccaaaatgggtgtcatcaaaaaccagccagccctccacctcggtccctctagctcgtcctctgagaacgtctgaggaaccttatacggagacagagttgaactcccggggaaaggaagatgatgagactaaatttgaagtcaagagtgaagaaatctttgaaagccatcatgaaagggggaaccctgagctggagcagcaggccaggctcggagacctttccccccgcaggcgcattatacgtgacttgcttgagactgaagagatttacataaaagagattaaaagcataattgatggatatatcactccaatggattttatttggctaaagcatctaattccagatgttcttcagaataacaaggactttctctttgggaatattagagaactttacgaatttcacaacaggacttttctaaaagagttggaaaagtgtgctgagaaccctgaacttctggcacattgctttctcaagagaaaagaagatcttcagatatattttaaataccataagaatctgccccgagctagggcaatctggcaagagtgtcaagactgcgcctactttggggtatgccagcgccaactggatcacaatctccctctttttaagtatctcaaaggaccaagccagagacttataaaataccagatgctgttgaagggtctgctggatttcgagtctcctgaagatatggagatagacccaggtgaactaggaggctcggctaaggatgggccaaagagaaccaaagattcagcattctcaactgaactacaacaagctttggcagtgatagaggatttgatcaagtcctgtgagttggctgtggacctagcagcagtgactgaatgtccggacgatattggaaaactaggcaagctgttgctgcacggccctttcagcgtctggacaattcacaaggatcgttataaaatgaaggatttgattcgatttaaacccagccagaggcaaatctacctatttgaaaggggaatagtgttctgtaagatacgaatggagcctggggaccagggattatctcctcattacagcttcaagaagaccatgaagctgatgacactttcaattcgccagcttggaagggggagccatagaaagtttgagattgccagtcgaaatggacttgagaaatacatcctgcaggcagcttcaaaagaaatcagagactgttggttttcagaaataagtaaattattgatggaacaacaaaataatatcaaagaccaaggaaatccacagtttgaaatgagcacgagcaaaggcagtggagcaggatccggaccatggattaaaaatatggaaagagctaccactagcaaggaagacccggcctccagcacaggagggattaaaggctgctccagcagggagtttagctccatggacacctttgaagactgtgaaggcgcagaagacatggaaaaggagagcagtgctctgagtctcgcgggccttttccagtcggacgacagtcacgaaacctgttcctccaaatctgctttcctggagaggggagaaagcagccagggagaaaaagaagaacgcgatgaggaggaaacggcgacccgcagcaccgaggaggagcgcgctggggcgtccacgggccggctggctcctgcgggggcgacggctggtttccaggcgagggcgctgcgcccgaggacctccgcccaggagagctgacctccctgcggacgcccccgctcctcggctccagagcgcccgcattcccgggagaggcggtgtgggggcccgggccctgcccagctacgcagaaagcagccggagcctcggcggcggcagaaaggggacaaccagggcctcctccgaggagcccgaggggtgtcctgggtgcgcgcctagctccgcacgggggacctcggagctgctctaaggcgcctgcagaggcgagcagagcccgcagcccacgccttctcgaccgcgcacttcgatattcggagccgggcaattctttgctgcgtgggcttctctgtgctcccacggtaggatgtttagtagcacccctggcctctacccactaggtgccaggaatgcgccaccccatcctccaccccgcccccaaatcgtgacaatcaaaaatgcctgcagacacgcccgcatttctccagggcggggtgggaatcggttgagagccgcttagcccgagccttggaggagccggagccgctccaacccggcgggggccgcagactgggagctcccggtccgcctcccagcatccctgcgagcgttcatggggtgttcgtgttagtgccaagattgcttcgttgtagagagagttcgttccaagttactttctgaggtattttatgtatcgatttattagtttttaaatgagttttgttagtttcagttgtattttatttttagttttattagttgattttcatttctttgtagctttctggttatttaattttatagtttcagttactggtttatagttactttattttcaaagttatttagttgttcattttcagttatttatatgtagttgttttgttttaggagttacagatgttcaaattaatttgcttggaatttatttatttatttatttatttatttttcgagacggagtctcgctctgtcgcccaggctggagtgcagtggtgtgatctcggctcactgcaaaccgcctcccgggttcacgccattctcctgcctcagcctcctgagtagctgggactacaggcgcccgccaccacgcccggctaattttttatttggatttttagtagagacggggtttccccgtgttagccaggatggtctcgatctcctgacctcgtgatccccctgcctcggcctcccaaagtgctgggattacaggcgtgagccaccgcgcccagccggaatttatttttaattatctttacaattattatctgagttatttaccttcatagttatttcactttatcttattggagtttttgagttatttatttttacagtaacttatttgactattaaacactcactggaagttcatg

SEQ ID NO: 184265 - DNA, 3031 bp, Artificial Sequence
  derived and/or modified sequence
ggagagccaggaagagggcgagggcagagcatccttgggcggagatgcctttaaaaaatcatccaccgcagcggtagaaacagttttgtttggctttatttatacggaatggtttttcagtgaaatgctgtcttgcttaaaagaagagatgcctccccaggagctcacccggcgactggccacagtgatcactcatgtcgatgaaattatgcagcaggaagtcagacccctgatggcggtggagataatagaacaacttcacagacaatttgccattctttcaggaggccgaggggaggatggcgcccccatcatcacgttcccagagttttcggggttcaaacacatcccagatgaagacttcctgaatgtcatgacctacctgactagcatccccagtgtggaggctgccagcattggattcattgttgttatcgacagacgaagagacaagtggagctccgtaaaggcatccttgacacgaatagctgtggcatttccaggaaacttacagctcatattcatccttcgtccatctcgctttatccagaggacattcactgacattggcattaaatactatcgaaatgagtttaaaacgaaagtgccgatcatcatggtaaactctgtctctgaccttcacggctacatcgacaaaagccaactgacccgggaattaggggggactttggaatatcgccacggtcagtgggtaaatcaccgcactgccatcgaaaactttgccttgaccttgaagaccactgcccagatgctgcagacgtttgggtcctgcctggccacagcagagctgcccagaagcatgctatccacggaagaccttctcatgtcccacacaaggcagcgggacaagctgcaggatgagctgaaattacttggaaagcaggggaccacattgctgtcatgcatccaagaaccagcaaccaaatgtcccaacagcaaactcaatctcaaccaacttgagaatgtaactaccatggaaaggttattagttcaactggatgaaacagaaaaagcctttagtcacttttggtctgagcatcatctgaagcttaaccagtgcctacaactacagcattttgagcacgatttttgtaaggctaagcttgccctggataatttgctggaagagcaagcagagtttacaggcattggagacagcgtgatgcacgtggagcagattcttaaggaacacaaaaaactggaggaaaaaagccaggagcccctggaaaaggcccagctgctggcactggttggggaccagctcatccaaagccaccattatgcagcagatgccatcaggccccggtgtgtggagctcaggcacctctgtgacgatttcatcaatggaaacaagaaaaaatgggacattttaggaaagtccttagagtttcatagacagctggacaaggtcagccaatggtgtgaggcaggaatctacctcttggcttcccaagctgtagacaagtgccagtctcgagaaggggttgatatcgccttgaacgacattgcgacattcctgggcacagtcaaggagtacccgttgctcagccccaaggagttttacaacgagtttgagttgctgctcaccctcgatgcaaaggccaaagcccagaaagttttgcagaggctggatgatgtccaggaaatatttcacaagaggcaagtgagtctgatgaaactggcagccaaacagactcgtccagtgcaacctgtggccccacatcctgagtcttcaccaaaatgggtgtcatcaaaaaccagccagccctccacctcggtccctctagctcgtcctctgagaacgtctgaggaaccttatacggagacagagttgaactcccggggaaaggaagatgatgagactaaatttgaagtcaagagtgaagaaatctttgaaagccatcatgaaagggggaaccctgagctggagcagcaggccaggctcggagacctttccccccgcagatactcttctcagtactttaagtaagtgtgatgaaggaatcatctagcaacttccttcttagaaaaaaaggaagtgccttcatatttccttgaaatttaaacttgttccattctattctaagcaaaaattaaaaggacacagttcagaagagctctttcagcaaataaataattgtttcacaaaagcactgctgtaaacaagatcactttgatggccagagacacttatgttttcaaccaatggcaaccttaaacacttccaagtatagatacacagggtatatatgggcaaaaggcaatacatcattaatcaatcaactaataaaaattaattataagcttgttgcttggtcaaatatgcttttgttctctatgtttttttaattggtcagaaaacttaaactgtaatgatctaaaaccctgtatctactctgaaagtaactacaacctagaatgtttgacactgtagttttgacattagttaaaaattctaaattatctaagcaatgtaaacaagcctcaaatttcaaaatagaaaaaaattaaaatttctgtaaacattaaaaagctacctgctaaaaattgtaagtatcatcattcagttgtgtatactgagaaatcttttttcgttttgttttgcgtgtttccgacatcaccttattatatgagacatctgattttccctaacaggtgcctctgcagtcaaaggccttagagtgagttcagtcactcttgctgaagtcattattttggccttcatataatctccctagcagtagacaccacctagttctttctgtagtgaagggaggtagtgtgtattatagccacatttttatcctgctttgtaaaataaatgtaacttactctattagatctcagacacatctctttgattacaaggaacatgcagctttaaaaatgctttaaccccaaactggcaacttttctatcacttttttactctgttttcaagtttgaaatatttagaaaataaagatcacctctgacagttattgatgaaaaataaattgttttagatatt

SEQ ID NO: 184266 - DNA, 957 bp, Artificial Sequence
  derived and/or modified sequence
tatatggatgcctgtggaaatgaatgctaacctaacatcactttctcattctttcttgaaaggttattagttcaactggatgaaacagaaaaagcctttagtcacttttggtctgagcatcatctgaagcttaaccagtgcctacaactacagcattttgagcacgatttttgctaagcttgccctggataatttgctggaagagcaagcagagtttacaggcattggagacagcgtgatgcacgtggagctcaggcacctctgtgacgatttcatcaatggaaacaagaaaaaatgggacattttaggaaagtccttagagtttcatagacagctggacaaggccaaagcccagaaagttttgcagaggctggatgatgtccaggaaatatttcacaagaggcaagtgagtctgatgaaactggcagccaaacagactcgtccagtgcaacctgtggccccacatcctgagtcttcaccaaaatgggtgtcatcaaaaaccagccagccctccacctcggtccctctagctcgtcctctgagaacgtctgaggaaccttatacggagacagagttgaactcccggggaaaggaagatgatgagactaaatttgaagtcaagagtgaagaaatctttgaaagccatcatgaaagggggaaccctgagctggagcagcaggccaggctcggagacctttccccccgcagtgtgatcacagtgtgcgtttgtgagatgctgaccttgggtgttcaatagaacagaatgaactgaccagaaactaagtaggcgcattatacgtgacttgcttgagactgaagagatttacataaaagagattaaaagcataattgatggatatatcactccaatggattttatttggctaaagcatctaattccagatgttcttcagaataacaaggactttctctttgggaatattagagaactttacg

SEQ ID NO: 184267 - DNA, 2394 bp, Artificial Sequence
  derived and/or modified sequence
ggcgagggcagagcatccttgggcggagatgcctttaaaaaatcatccaccgcagcggtagaaacagttttgtttggctttatttatacggaatggtttttcagtgaaatgctgtcttgcttaaaagaagagatgcctccccaggagctcacccggcgactggccacagtgatcactcatgtcgatgaaattatgcagcaggaagtcagacccctgatggcggtggagataatagaacaacttcacagacaatttgccattctttcaggaggccgaggggaggatggcgcccccatcatcacgttcccagagttttcggggttcaaacacatcccagatgaagacttcctgaatgtcatgacctacctgactagcatccccagtgtggaggctgccagcattggattcattgttgttatcgacagacgaagagacaagtggagctccgtaaaggcatccttgacacgaatagctgtggcatttccaggaaacttacagctcatattcatccttcgtccatctcgctttatccagaggacattcactgacattggcattaaatactatcgaaatgagtttaaaacgaaagtgccgatcatcatggtaaactctgtctctgaccttcacggctacatcgacaaaagccaactgacccgggaattaggggggactttggaatatcgccacggtcagtgggtaaatcaccgcactgccatcgaaaactttgccttgaccttgaagaccactgcccagatgctgcagacgtttgggtcctgcctggccacagcagagctgcccagaagcatgctatccacggaagaccttctcatgtcccacacaaggcagcgggacaagctgcaggatgagctgaaattacttggaaagcaggggaccacattgctgtcatgcatccaagaaccagcaaccaaatgtcccaacagcaaactcaatctcaaccaacttgagaatgtaactaccatggaaaggttattagttcaactggatgaaacagaaaaagcctttagtcacttttggtctgagcatcatctgaagcttaaccagtgcctacaactacagcattttgagcacgatttttgtaaggctaagcttgccctggataatttgctggaagagcaagcagagtttacaggcattggagacagcgtgatgcacgtggagcagattcttaaggaacacaaaaaactggaggaaaaaagccaggagcccctggaaaaggcccagctgctggcactggttggggaccagctcatccaaagccaccattatgcagcagatgccatcaggccccggtgtgtggagctcaggcacctctgtgacgatttcatcaatggaaacaagaaaaaatgggacattttaggaaagtccttagagtttcatagacagctggacaaggtcagccaatggtgtgaggcaggaatctacctcttggcttcccaagctgtagacaagtgccagtctcgagaaggggttgatatcgccttgaacgacattgcgacattcctgggcacagtcaaggagtacccgttgctcagccccaaggagttttacaacgagtttgagttgctgctcaccctcgatgcaaaggccaaagcccagaaagttttgcagaggctggatgatgtccaggaaatatttcacaagaggcaagtgagtctgatgaaactggcagccaaacagactcgtccagtgcaacctgtggccccacatcctgagtcttcaccaaaatgggtgtcatcaaaaaccagccagccctccacctcggtccctctagctcgtcctctgagaacgtctgaggaaccttatacggagacagagttgaactcccggggaaaggaagatgatgagactaaatttgaagtcaagagtgaagaaatctttgaaagccatcatgaaagggggaaccctgagctggagcagcaggccaggctcggagacctttccccccgcaggcgcattatacgtgacttgcttgagactgaagagatttacataaaagagattaaaagcataattgatggatatatcactccaatggattttatttggctaaagcatctaattccagatgttcttcagaataacaaggactttctctttgggaatattagagaactttacgaatttcacaacaggacttttctaaaagagttggaaaagtgtgctgagaaccctgaacttctggcacattgctttctcaagagagtaagtctgtactcccagtaaataatcatgttaaagtcagcccttacatttctgcgttaagtggcaaggacaaatggaaacatcaatggtctaaaaacatatctgcttccctccgactccaagctttactgaagtataattggtaaataaaaattgcatatattcaaacta

SEQ ID NO: 184268 - DNA, 4748 bp, Artificial Sequence
  derived and/or modified sequence
atgctgtcttgcttaaaagaagagatgcctccccaggagctcacccggcgactggccacagtgatcactcatgtcgatgaaattatgcagcaggaagtcagacccctgatggcggtggagataatagaacaacttcacagacaatttgccattctttcaggaggccgaggggaggatggcgcccccatcatcacgttcccagagttttcggggttcaaacacatcccagatgaagacttcctgaatgtcatgacctacctgactagcatccccagtgtggaggctgccagcattggattcattgttgttatcgacagacgaagagacaagtggagctccgtaaaggcatccttgacacgaatagctgtggcatttccaggaaacttacagctcatattcatccttcgtccatctcgctttatccagaggacattcactgacattggcattaaatactatcgaaatgagtttaaaacgaaagtgccgatcatcatggtaaactctgtctctgaccttcacggctacatcgacaaaagccaactgacccgggaattaggggggactttggaatatcgccacggtcagtgggtaaatcaccgcactgccatcgaaaactttgccttgaccttgaagaccactgcccagatgctgcagacgtttgggtcctgcctggccacagcagagctgcccagaagcatgctatccacggaagaccttctcatgtcccacacaaggcagcgggacaagctgcaggatgagctgaaattacttggaaagcaggggaccacattgctgtcatgcatccaagaaccagcaaccaaatgtcccaacagcaaactcaatctcaaccaacttgagaatgtaactaccatggaaaggttattagttcaactggatgaaacagaaaaagcctttagtcacttttggtctgagcatcatctgaagcttaaccagtgcctacaactacagcattttgagcacgatttttgtaaggctaagcttgccctggataatttgctggaagagcaagcagagtttacaggcattggagacagcgtgatgcacgtggagcagattcttaaggaacacaaaaaactggaggaaaaaagccaggagcccctggaaaaggcccagctgctggcactggttggggaccagctcatccaaagccaccattatgcagcagatgccatcaggccccggtgtgtggagctcaggcacctctgtgacgatttcatcaatggaaacaagaaaaaatgggacattttaggaaagtccttagagtttcatagacagctggacaaggtcagccaatggtgtgaggcaggaatctacctcttggcttcccaagctgtagacaagtgccagtctcgagaaggggttgatatcgccttgaacgacattgcgacattcctgggcacagtcaaggagtacccgttgctcagccccaaggagttttacaacgagtttgagttgctgctcaccctcgatgcaaaggccaaagcccagaaagttttgcagaggctggatgatgtccaggaaatatttcacaagaggcaagtgagtctgatgaaactggcagccaaacagactcgtccagtgcaacctgtggccccacatcctgagtcttcaccaaaatgggtgtcatcaaaaaccagccagccctccacctcggtccctctagctcgtcctctgagaacgtctgaggaaccttatacggagacagagttgaactcccggggaaaggaagatgatgagactaaatttgaagtcaagagtgaagaaatctttgaaagccatcatgaaagggggaaccctgagctggagcagcaggccaggctcggagacctttccccccgcaggcgcattatacgtgacttgcttgagactgaagagatttacataaaagagattaaaagcataattgatggatatatcactccaatggattttatttggctaaagcatctaattccagatgttcttcagaataacaaggactttctctttgggaatattagagaactttacgaatttcacaacaggacttttctaaaagagttggaaaagtgtgctgagaaccctgaacttctggcacattgctttctcaagagaaaagaagatcttcagatatattttaaataccataagaatctgccccgagctagggcaatctggcaagagtgtcaagactgcgcctactttggggtatgccagcgccaactggatcacaatctccctctttttaagtatctcaaaggaccaagccagagacttataaaataccagatgctgttgaagggtctgctggatttcgagtctcctgaagatatggagatagacccaggtgaactaggaggctcggctaaggatgggccaaagagaaccaaagattcagcattctcaactgaactacaacaagctttggcagtgatagaggatttgatcaagtcctgtgagttggctgtggacctagcagcagtgactgaatgtccggacgatattggaaaactaggcaagctgttgctgcacggccctttcagcgtctggacaattcacaaggatcgttataaaatgaaggatttgattcgatttaaacccagccagaggcaaatctacctatttgaaaggggaatagtgttctgtaagatacgaatggagcctggggaccagggattatctcctcattacagcttcaagaagaccatgaagctgatgacactttcaattcgccagcttggaagggggagccatagaaagtttgagattgccagtcgaaatggacttgagaaatacatcctgcaggcagcttcaaaagaaatcagagactgttggttttcagaaataagtaaattattgatggaacaacaaaataatatcaaagaccaaggaaatccacagtttgaaatgagcacgagcaaaggcagtggagcaggatccggaccatggattaaaaatatggaaagagctaccactagcaaggaagacccggcctccagcacaggagggattaaaggctgctccagcagggagtttagctccatggacacctttgaagactgtgaaggcgcagaagacatggaaaaggagagcagtgctctgagtctcgcgggccttttccagtcggacgacagtcacgaaacctgttcctccaaatctgctttcctggagaggggagaaagcagccagggagaaaaagaagaacgcgatgaggaggaaacgtgagtgtgagcgaggaaagactaagcgcctctttgggccacggcgtctctgactttcttctcggaattgcagggcgacccgcagcaccgaggaggagcgcgctggggcgtccacgggccggctggctcctgcgggggcgacggctggtttccaggcgagggcgctgcgcccgaggacctccgcccaggagagctgacctccctgcggacgcccccgctcctcggctccagagcgcccgcattcccgggagaggcggtgtgggggcccgggccctgcccagctacgcagaaagcagccggagcctcggcggcggcagaaaggggacaaccagggcctcctccgaggagcccgaggggtgtcctgggtgcgcgcctagctccgcacgggggacctcggagctgctctaaggcgcctgcagaggcgagcagagcccgcagcccacgccttctcgaccgcgcacttcgatattcggagccgggcaattctttgctgcgtgggcttctctgtgctcccacggtaggatgtttagtagcacccctggcctctacccactaggtgccaggaatgcgccaccccatcctccaccccgcccccaaatcgtgacaatcaaaaatgcctgcagacacgcccgcatttctccagggcggggtgggaatcggttgagagccgcttagcccgagccttggaggagccggagccgctccaacccggcgggggccgcagactgggagctcccggtccgcctcccagcatccctgcgagcgttcatggggtgttcgtgttagtgccaagattgcttcgttgtagagagagttcgttccaagttactttctgaggtattttatgtatcgatttattagtttttaaatgagttttgttagtttcagttgtattttatttttagttttattagttgattttcatttctttgtagctttctggttatttaattttatagtttcagttactggtttatagttactttattttcaaagttatttagttgttcattttcagttatttatatgtagttgttttgttttaggagttacagatgttcaaattaatttgcttggaatttatttatttatttatttatttatttttcgagacggagtctcgctctgtcgcccaggctggagtgcagtggtgtgatctcggctcactgcaaaccgcctcccgggttcacgccattctcctgcctcagcctcctgagtagctgggactacaggcgcccgccaccacgcccggctaattttttatttggatttttagtagagacggggtttccccgtgttagccaggatggtctcgatctcctgacctcgtgatccccctgcctcggcctcccaaagtgctgggattacaggcgtgagccaccgcgcccagccggaatttatttttaattatctttacaattattatctgagttatttaccttcatagttatttcactttatcttattggagtttttgagttatttatttttacagtaacttatttgactattaaacactcactggaa

SEQ ID NO: 184269 - DNA, 3345 bp, Artificial Sequence
  derived and/or modified sequence
atgctgagctgcctgaaggaggagatgcccccccaggagctgacccgcaggctcgcgaccgtgattactcacgtggatgagatcatgcaacaagaggtccgtccacttatggcagtggaaatcattgaacagctccaccggcaattcgcgattctgtccggcggaaggggagaagacggagctcctattattactttcccagaattttctgggttcaaacacattcccgacgaagatttcctgaatgtaatgacctacctgacttctatcccttctgtcgaggccgcctccatcggattcatcgttgtgattgacaggcggcgcgataagtggtctagtgtcaaagctagtctgacaagaattgcggtagccttccctggcaatctgcagctgatctttatcttgcgcccctcgcggttcatacaaagaacctttacagacattgggattaaatattaccgcaatgagtttaaaaccaaggtgcctatcattatggtaaactccgttagtgatttgcacggatacattgataaaagccaactgacacgagagttgggaggtactttggaatatcgtcatggacagtgggttaatcaccgtaccgccatagaaaattttgctcttaccttaaagacgactgcccagatgttgcagaccttcggatcttgcctggccacggccgaattaccacggtctatgctgagcaccgaggacctcctcatgtcccatactagacagagagacaagctccaggatgagcttaagctgctcggcaaacaggggactaccttgcttagctgcatccaggaacccgccacaaagtgtcccaacagcaagcttaatctcaaccagttagagaatgtgacaaccatggagcggctgctggtacaactggacgagactgaaaaagcttttagccacttttggagtgagcaccacctcaagctcaaccaatgcctgcagctacaacattttgaacacgatttttgcaaagccaagctggccctggacaacctcctggaagagcaggctgagttcactggcatcggcgatagcgtgatgcacgtggagcagattctaaaggagcataaaaaactagaggaaaagagccaggagccactggagaaggcgcaactacttgcactagtgggggatcaactgatccagagtcatcactacgcggctgacgctatacgcccgagatgcgttgaactgaggcatctgtgcgacgattttatcaatgggaacaaaaagaagtgggacatacttggaaaaagtctggaattccacaggcagctggataaagtgagccagtggtgtgaggctggcatctacctcctcgccagtcaggccgtggataaatgtcagagccgcgaaggggtcgacattgcactcaatgacatcgcgaccttcctcggaactgtgaaagagtatccactactaagtccgaaggaattttacaacgagtttgagctgctactcactctggatgctaaggccaaggcccagaaggtccttcaacggttagacgatgttcaagaaatttttcacaaacggcaggtgagcttaatgaagctggcggccaagcagacccgccccgtgcagcctgtagctcctcaccccgaatctagcccaaaatgggtgagttcaaagacttctcagccttccacttccgttccgcttgcgaggccactccgtaccagcgaagaaccgtacactgaaacggaactgaatagcagaggtaaggaagacgacgagacgaagttcgaggtcaagtccgaagagatatttgaatctcatcatgagcgcgggaatcccgagcttgaacaacaagcccggctgggcgacctgtccccccggcggcggataatccgtgacctcctggaaacagaagaaatctacataaaagaaattaagagcattattgatgggtatatcactcctatggactttatttggttgaaacacctcatccccgacgttctgcagaataataaggactttcttttcggaaatattcgggagctttatgaatttcataatcgcacatttctcaaagaactggaaaaatgcgcagagaatcccgagcttctggctcattgcttcctgaaacggaaggaagatctgcaaatttattttaaataccataaaaaccttcccagagcgcgagccatatggcaggagtgccaggactgtgcatatttcggtgtgtgccaaaggcagctggaccataaccttcccctgttcaagtatttgaaaggccccagtcagcgactcattaagtaccagatgttgcttaaggggttgctcgatttcgaaagcccagaggatatggaaatagacccaggggaactcggcgggtcggcgaaggatggcccaaagcgcaccaaagactcagcttttagtactgagctgcagcaggcgttggccgttatcgaagacctgataaagtcctgcgagctggctgttgacttggccgctgtgaccgaatgccccgatgatatcggcaagttgggcaaattgctgctccatggcccgttttcagtttggacaatacacaaagatagatacaagatgaaagacctcatcagattcaagccttctcaacgccaaatatacctgtttgagaggggaatcgtattttgtaaaatccgtatggaaccaggcgatcaggggctctcaccacattacagtttcaagaagaccatgaaactgatgaccctgtcgatcagacagctaggtagagggagccacaggaagtttgagattgcttcacgaaatggtctggaaaaatatattctccaggccgcatcaaaggaaattcgtgactgttggttcagtgaaatcagtaagctcctcatggaacaacagaacaacatcaaagaccaggggaacccccagtttgagatgtcaacaagcaaagggagtggtgccggatcaggtccctggataaaaaacatggaaagggccactacatccaaagaggaccccgcatcctctactggggggattaagggatgttctagtagagagttctcttctatggacactttcgaagactgcgaaggtgcagaggatatggaaaaagagagttccgcactgtctctggccggactgttccagtccgacgattctcacgagacatgctcatcgaagtcagcctttcttgagcgaggcgagtcttcacagggcgagaaagaggagcgagatgaggaagaaactgccacacgatcaacagaggaggagagggccggagcctccaccggacggctcgctcccgctggtgccaccgctggctttcaggccagagccttacgccccaggacgtctgcacaggagagttag

SEQ ID NO: 184270 - DNA, 1887 bp, Artificial Sequence
  derived and/or modified sequence
atgctgagctgcctgaaggaggagatgcccccccaggagctgacccgtcgccttgcaacagttatcactcacgttgatgaaattatgcagcaagaggtgagaccattgatggctgttgaaatcatagagcaattgcaccgtcagttcgccatcctgagcggggggcggggcgaagatggcgccccaatcattacctttccagaattctctggtttcaaacacattcccgacgaggattttctgaacgtcatgacctatttgactagcatacctagtgtcgaggccgccagcatcggtttcatcgtggtcattgatcgcagacgggataagtggtcgagcgtcaaggccagtctgacccgcatcgctgtggcctttccaggcaatcttcaactcatattcatactgcgcccatcgaggttcattcagagaacatttactgacataggtattaagtactacaggaacgaattcaagactaaggtgcccattatcatggtcaactctgtctctgaccttcatggatatatcgataaaagtcaactgacccgcgagttaggcggcactctggagtaccgacatggacagtgggtgaatcatcgcacagctattgagaattttgcactgaccttaaagaccaccgcccagatgcttcaaacattcggttcctgtctggcaacagcggagcttccgcggtcgatgctgtctactgaagacctactcatgagccataccagacagagagataaacttcaggacgagctgaaactgctaggaaagcaaggcacgaccctgctgtcatgtattcaggagccagccacgaagtgtccaaactctaaactcaacctgaaccagcttgagaatgtgactaccatggagcgactcctggtgcagttggacgaaacagagaaagcattctcgcatttttggtcagagcaccacctgaaacttaatcaatgtctgcagctgcaacactttgagcacgacttctgtaaggcaaaattagctcttgacaatctgctcgaggaacaggctgagttcaccggtataggagatagtgtgatgcacgtcgaacagattttgaaagagcacaaaaaactggaggagaaatcacaggagccactcgagaaggcccagcttctggctctggttggcgaccaattgattcaaagtcaccactacgctgctgatgctataagaccccgatgtgtggagttgcggcacctttgtgatgatttcattaacggcaacaaaaagaaatgggatatcttgggaaaatcactcgaattccaccggcagttggacaaagtctcccagtggtgtgaagccgggatctaccttcttgccagccaagctgttgataagtgccagtcaagagagggggtcgacattgccctgaacgatattgcgaccttccttgggacagtcaaggagtatccgctgttgtcccccaaggagttttataatgaattcgagctgctgctgacactcgatgcgaaagccaaggcccagaaggttttgcagcgcctggacgacgtccaggagatcttccacaaacggcaggtgagtctgatgaagctggcagctaagcagactcggcctgttcagccagtggctccccatcctgaatcctctccaaaatgggtcagttccaaaaccagccagccttctacttccgtgcccctcgcacgccccctaagaacatcagaagagccttataccgagacagaactgaactcccggggcaaggaggacgacgagaccaagttcgaggtgaagagtgaagagatcttcgagtcacatcatgaacgggggaacccagagctggagcagcaggctagactgggcgacctcagcccaagaaggtatagcagccaatactttaaatag

SEQ ID NO: 184271 - DNA, 2136 bp, Artificial Sequence
  derived and/or modified sequence
atgctgagctgcctgaaggaggagatgcccccccaggagctgaccagacgcctcgccacggtgatcactcatgtggatgaaatcatgcagcaggaggtgaggccactcatggcagtagagatcatcgaacagttacacaggcaattcgccatcttatcaggcggccgcggggaggacggggcccccattatcacatttccagagttttctggatttaagcatatcccggatgaggactttctgaatgtcatgacctatcttacttcaattccctccgttgaagctgcatcaattggctttatcgtagtaattgaccgcaggcgtgacaaatggagctcagtcaaagccagtttgacacgaattgctgtggcttttcctggaaacctgcagctcatctttattctccgcccatctcgattcattcagcgtacttttaccgacatcggtatcaaatactatcggaacgaattcaagactaaggtccccattatcatggtgaacagtgtgtccgatctgcatggctacatcgacaagagccagctgacacgcgaactcggcgggactttggaataccggcatggccagtgggttaatcacaggacagcgatcgagaacttcgcactcacacttaagacgacagcccagatgttacaaacgttcggatcctgcttggccacagcagagctgccccgttccatgctgagcactgaggatctgcttatgagtcataccagacagagagataagcttcaggacgagttgaagctgctggggaaacagggcacaaccctcctgtcgtgcattcaggagcccgcgaccaaatgcccaaactccaagctgaacctcaaccaattggaaaatgtaaccactatggagagacttttggtgcagctggacgaaaccgagaaagctttctcacacttctggtcagagcaccacctgaagctgaatcagtgcctccagttacagcacttcgagcacgacttctgtaaggccaagctggctctggataatctcctagaggagcaggcagagttcacaggcattggggattcagttatgcatgtcgagcaaatactgaaggaacataagaaactggaggagaaatcccaggagcccctggagaaagcccagttactcgctctggtcggagatcagttgattcagtcccaccactacgccgccgacgccatccgcccccgctgcgtggagctgcgccacctttgtgatgacttcatcaatggcaacaagaagaaatgggatatcctgggcaaatccctcgagttccacaggcagttggataaagtttcacagtggtgtgaggcagggatttacctactggcttcccaggcagtggataagtgtcagtctagagagggagtggatattgccctcaacgatatagcgaccttcctgggcactgttaaagagtatccactcttgtctcctaaagagttttacaacgagttcgaattgttactgactctggacgccaaggcaaaagcccagaaggtgttgcagaggctggacgatgttcaggaaattttccacaaaagacaggtcagcctgatgaaactggcagcaaaacagactcggccggtccaaccagtagcaccacatccagaatcctccccaaagtgggtcagttccaagacaagccagccatccacaagtgtcccattggccaggcctctgagaacttcggaggagccctacacagagacagagctgaatagcagaggtaaggaagacgacgagactaagttcgaagtaaagtcagaggaaatatttgaaagccatcacgaaagaggaaatcccgagttggagcagcaggcccggttaggggacctaagcccaagacggcgcatcattagagatctgctcgaaaccgaagagatctatataaaggagattaagtcaataatagatggatatatcacacctatggatttcatctggcttaaacatttgatccctgatgtcctccaaaacaacaaggacttcctgttcggaaacatccgtgaactttatgaatttcataatcgaaccttcctcaaagaactagagaagtgtgcagaaaatccagagctgctggcccactgctttctcaagcgggtaagcttatacagccagtag

SEQ ID NO: 184272 - DNA, 3225 bp, Artificial Sequence
  derived and/or modified sequence
atgctgagctgcctgaaggaggagatgcccccccaggagctgacccggcgcttagctacagttataacccatgtggatgagataatgcagcaggaagtgcgacccctgatggccgtggagattatcgagcagctacatagacagttcgccattctaagcggcgggagaggcgaagatggcgcacccattattaccttccccgagttttctggcttcaaacacatcccagatgaggatttcctgaacgtgatgacttacctaacgtctattccctccgtggaggccgcatctatcggcttcattgtggtgatcgataggcggcgcgataagtggtccagtgtaaaagctagccttacgagaatcgctgtggcatttcccggaaatctccagcttatcttcatcctcaggcccagcagattcattcagcggacatttaccgatatcggaattaagtattataggaacgagtttaaaaccaaggtgccaatcatcatggtgaacagtgtgtcggacctgcacggctatatcgacaagtcccagcttactcgggagctggggggaacactggaatatcggcacgggcaatgggttaatcatcgaaccgccatcgagaactttgcgctgactctgaaaaccactgcccaaatgctccagacattcggttcctgtttggcaaccgccgagctgcctcggtccatgctgtccaccgaagatctgctgatgtcccacaccagacagcgcgataagctccaggacgaactgaagctgctggggaaacaaggcaccaccctgctatcttgtattcaggagcccgcgacgaagtgcccaaactccaaactgaaccttaatcagctggagaacgtcactaccatggagagattgctggtgcaactggatgaaactgaaaaggcctttagccatttttggagcgagcaccacctaaagcttaatcagtgcctgcagctccagcattttgaacatgatttctgcaaagcgaaattagcattagacaacttactggaagaacaggccgagttcaccggtatcggcgacagtgtgatgcacgtggaacaaattctgaaagaacataaaaaactggaagagaagtcacaagaacccttggagaaagcccagttacttgcgctggtgggcgatcagttgatccagagccaccactatgccgccgacgctatccgcccacgctgtgttgagttgaggcacctgtgtgacgattttataaacggaaacaaaaaaaagtgggatattctgggcaagtcactggagttccatcggcagctggataaggtttctcaatggtgtgaggccggcatctacctgctagcctcgcaggcagtggacaagtgtcagtctagagaaggagttgatattgccttgaatgacattgctacttttctgggtacagtgaaagagtatcccctcctcagccccaaggagttttacaatgaatttgaactcctgctgaccttggatgccaaggccaaagctcagaaagtgctccagagactcgatgatgtgcaagagatctttcacaagcgccaggtgagcttaatgaagcttgcggctaagcaaacacggcctgtgcagcctgtggcaccacacccagagagctccccgaaatgggtcagttcaaaaacaagccagccctcaacctccgtgcctctcgcccggccactcagaaccagcgaagagccctacactgagacagaactcaattccagagggaaggaggacgacgagaccaagttcgaggttaagtcagaagagattttcgagtcacatcacgaaagaggtaaccccgagctggaacagcaggcgcgcctcggagacctcagccccagaagaaggattatacgggatctcctggagactgaagagatttatatcaaggaaattaagtccatcattgacggctatattaccccaatggactttatctggcttaaacatctgattccagatgtgctacagaacaacaaagatttcctgtttggaaatattcgtgagctctatgaattccataataggaccttcctaaaagaattggagaaatgcgcagaaaaccccgaactgctggcacactgtttcctcaaaaggaaggaagatctgcagatatactttaaatatcacaaaaatttaccaagagcccgggctatttggcaggaatgccaggattgcgcctacttcggagtgtgccagaggcagttagatcacaaccttccgctcttcaaataccttaaaggacccagccaaaggcttattaagtaccagatgctccttaagggtttgctggactttgagagtccggaagatatggaaattgacccaggggagttaggcggaagtgccaaggacggccctaagcggacaaaagactcggccttctccaccgaacttcaacaagccctggcggtgatcgaggacttaatcaagtcatgtgaactggcagtcgacttggccgcagtgaccgaatgccccgatgacatagggaagttagggaaattactgttgcatggccctttctcagtgtggaccatccataaggaccgttacaaaatgaaggacctgatccgatttaaacctagccagaggcagatctacctgttcgaaagggggatcgttttctgtaaaattaggatggagcctggcgaccagggtctgagtccacactatagttttaagaagacaatgaagctcatgaccttgtctattagacagttggggcgcggttcccacaggaagttcgaaatagcttcacgcaatggcctggaaaagtatattttacaggccgccagtaaggagataagagactgctggttttccgagatcagtaagctgcttatggagcaacagaataacatcaaagaccaaggaaacccgcagttcgaaatgagcacttcaaaggggtccggcgctgggagtgggccatggatcaaaaatatggaacgcgcgaccacaagcaaagaagatccagcctcgtcaacaggcgggattaaggggtgttctagccgggaattctccagcatggacacttttgaggactgtgaaggggctgaggacatggagaaagagagctcagcattgagcttggccggcctttttcagagcgacgactcacacgaaacctgtagctccaagtctgcattcctggaaaggggtgaaagctcgcagggagagaaagaagaaagggacgaggaggaaacctag

SEQ ID NO: 184273 - DNA, 3345 bp, Artificial Sequence
  derived and/or modified sequence
atgctttcgtgcctgaaagaagaaatgcctccccaggagctgaccaggagattggctacagtgatcacccacgtcgatgaaatcatgcagcaggaagttcgaccgctcatggctgttgagatcatcgagcagttgcatcgccagttcgcaatcttgtctggcggacgcggtgaagatggggctcccattattacgttcccagaattttccggctttaagcacatcccagacgaggattttctcaatgtcatgacctacctgacctccataccgtcagttgaggcagcttctattggctttatcgtggtgatcgacaggcgacgcgataagtggagcagtgtcaaggcctccttgactagaatcgcagtggcgtttcccggtaaccttcagctgatcttcatcctccgaccttccaggttcattcaaagaacatttacagatatcgggatcaagtattacaggaacgagtttaagaccaaagtgcccatcatcatggttaatagcgttagtgacctgcacggttacattgataagtcccagttgaccagggagcttggtggtaccctcgaatacaggcacgggcagtgggtgaaccacagaactgcgatcgagaactttgcgctcacactaaagacgacggcacagatgctccagactttcggtagctgcctggccacagccgaactccctcgcagcatgctgagtaccgaggatctgctgatgtctcacacgcggcaacgcgataagctgcaggacgagctgaagctactcgggaagcaggggacaaccctcctgtcttgtatccaggaaccagctactaaatgccctaattccaaactgaaccttaaccagctggagaatgtgactactatggagaggctcctcgtgcagctcgatgagaccgagaaagctttcagccacttctggtccgagcaccacctaaaactaaaccagtgcctgcaacttcagcatttcgagcacgacttctgcaaggctaagctcgccctcgacaacctgctggaggagcaggccgaattcaccggtattggagactcagtcatgcacgtggagcagatactgaaggaacacaagaaactcgaagaaaagtcccaggagccgctcgaaaaagcgcaactcctggctctggtgggggaccagctgatccagagccaccattacgccgcagatgctatcagacctcgatgtgtcgaactccggcatttatgcgatgacttcatcaacggcaacaagaagaagtgggatatactgggtaaaagcttggaatttcatagacagctcgacaaggtaagtcagtggtgtgaggccggaatttatctgcttgcgtcccaagcagttgacaagtgtcaaagcagagaaggtgtagacatcgctcttaatgatattgcaacgttcctgggaactgtgaaagagtacccccttctaagccccaaagaattttacaacgagttcgagctgttgctaactctagatgctaaggcaaaggcgcaaaaagtccttcagcggctggacgacgtgcaggaaatcttccacaaaagacaggtgagcctaatgaagcttgccgctaagcagacccggccagttcagcctgttgccccacaccccgagagcagcccaaagtgggtatccagcaaaacgagtcaaccaagcacaagcgttccattggcccgaccccttcggacgtccgaggagccttatactgaaactgaactaaatagccggggtaaggaggatgatgagacaaagtttgaggtcaaatctgaggagatatttgagtcccatcacgagaggggaaacccagaactggaacagcaagccagactcggcgacctgagccccaggaggagaattatcagggatctgctggagacagaggagatttatattaaagagataaagagtatcatagacggctatattaccccaatggatttcatttggctcaagcatctgatacctgatgtgctccagaataataaggattttttgttcggcaacatccgggagttatacgagttccacaatagaaccttcttgaaggaactggagaagtgtgctgagaaccccgagctccttgcccattgctttctcaagagaaaagaagacctgcagatctattttaagtaccacaaaaatcttccgcgagcccgagcgatctggcaggaatgccaagattgtgcgtacttcggggtctgccagcgacagttggaccataacctgccgctgtttaaatacctaaaaggtcctagtcagcgcctgataaagtatcagatgctgctgaaaggactgttagacttcgagtcacctgaggacatggagatcgaccccggtgaactgggtgggtccgccaaagacggcccaaaaaggacgaaggacagcgcctttagcacagaactgcagcaagccctggcagtaattgaggacctgatcaagtcatgcgaacttgccgtggatctcgctgctgtaaccgagtgccccgacgatattggaaagctggggaaactgctgttacacggacctttttccgtgtggacaatccacaaggatcgttacaaaatgaaggatctgatcaggttcaaacctagccaacgccaaatttatctgttcgaacgaggaattgtattttgtaaaatccgcatggagcccggagatcagggactaagcccccattattcatttaagaaaaccatgaagctgatgaccttgtccattaggcagcttgggagggggtctcatcgtaagtttgaaatcgccagccgcaacggacttgagaaatacatcctccaagcggctagtaaggaaatcagagactgttggttttctgaaatttctaagttgctcatggagcaacaaaacaatattaaggatcagggaaatccccagttcgagatgtcaaccagcaagggaagtggagccggatctggtccatggataaagaatatggagcgcgcaactacatcgaaggaagatcccgcaagttcgacaggagggatcaaaggttgctcttcaagagagttctcgtccatggacacctttgaggactgtgagggagctgaagatatggaaaaagagtcatcagccctaagtttggcaggcttgttccagtcagacgacagccatgaaacatgctcatctaaatctgcttttcttgagagaggagagtcttcacagggagagaaagaggaacgggatgaggaagaaaccgctacacgatcaacagaggaggaacgggcaggggcatcaaccggtcgactcgcccctgccggagccacagcgggttttcaggccagggcgctccgcccacgaaccagtgctcaggaatcgtag

SEQ ID NO: 184274 - DNA, 1887 bp, Artificial Sequence
  derived and/or modified sequence
atgcttagctgtctcaaggaagagatgccacctcaggagcttactaggcgtcttgctactgtgattacccacgtcgatgagataatgcagcaggaggtccggccactgatggcagtggaaataattgagcaactgcatcggcaatttgcaatcctgtctggcggtcggggtgaagacggcgcacccatcatcacctttccagagttctctggtttcaagcacatcccagacgaggatttcctgaacgtgatgacatatctgacttcaataccttccgtggaagccgcaagtattggatttatcgtggtgatcgaccgcagacgtgacaagtggagtagtgttaaggctagtctgaccagaatcgctgtcgcctttcccggaaatctgcaactgattttcattctccgtccttcacgctttatccagaggactttcacggatatcggcatcaagtactatagaaatgaattcaaaactaaggtgccgatcataatggtaaattccgtctccgaccttcatggctatattgacaaatctcagctgacgagggagctggggggaaccctcgaatacagacacggccagtgggtgaaccaccggaccgccatcgagaactttgctctcacgctcaaaactacggcccaaatgttgcagacctttgggtcttgtcttgccaccgccgaactcccaagatctatgctgagtacggaagacttgctgatgagtcacactagacagcgcgataagctgcaggatgagctgaaactgttaggaaagcagggtacgaccctgcttagctgcatccaagagcccgctaccaaatgccctaacagtaagttgaacttgaatcagttggagaatgtaactacaatggagcgccttttggtccagcttgatgaaactgaaaaggctttcagccacttttggagcgagcaccacctcaaactgaaccagtgcctacagctgcagcacttcgaacatgatttttgtaaggcaaaactggctctcgataatttactagaagagcaggcagagtttaccgggatcggtgactctgtaatgcacgtggagcagatactgaaggagcataagaaacttgaagagaagagccaggagcccttggagaaggcccaattactagctctcgtgggcgaccagcttatccagtctcatcactacgccgcagatgcaatccgacccaggtgtgtggagctccgccacctctgtgacgatttcattaacgggaataaaaaaaaatgggatattctaggtaaatccctggaatttcatcgccagctagacaaagtctcccagtggtgcgaggccggaatttacctcttggcctcccaggcggtggacaagtgtcagtctagagaaggggtggatatcgctctgaatgatatcgctacctttctgggaaccgtgaaagagtacccgctcctatctcccaaagagttctataacgagtttgaattgctgttgacactggatgccaaggctaaggctcagaaggtgctgcagcgcctggacgacgtgcaggaaatcttccataaacgccaggtgagcctcatgaagcttgcagctaaacagacgagacccgtccagccggtggctccccaccccgagagctctcccaaatgggtgtctagtaaaacttcccaaccttctacttccgttcctctagctcgaccactgagaacatcagaggaaccttacaccgagacagagctaaactctcgcggtaaggaagacgacgagaccaagtttgaagttaaaagtgaagagatattcgaatcccaccacgaaaggggcaatcccgaacttgagcagcaggccaggctgggggacctctctccgcgacgctatagctctcagtacttcaagtag

SEQ ID NO: 184275 - DNA, 2136 bp, Artificial Sequence
  derived and/or modified sequence
atgctgagctgcttaaaagaggagatgcctccacaagagctgacacgcaggttagcaacagtcattacccatgtcgacgaaatcatgcaacaggaagtcagacctctgatggccgtggagatcatcgaacagctgcatcgtcagttcgctatcttatctgggggaagaggcgaagacggcgctccaatcattaccttcccagagttctcagggttcaagcatattccagatgaggactttttgaatgtcatgacttatctgacgtcgattccgagcgtagaagctgcgagtataggctttatcgtcgtgattgaccgacgaagggataagtggtcctcagtcaaggctagcttgactcggatcgccgtggccttccctggaaacctgcagctcatatttatcttgcggccaagtcgcttcatccaacgcaccttcacggatattgggatcaagtattatagaaatgagtttaaaaccaaggtccctatcattatggtcaattccgtgagcgacttacacggttatatagacaagtcacagctgactcgtgaactcggtggaaccctggaatacagacatgggcagtgggttaatcatagaaccgctatcgagaacttcgctctcacgctaaagacaactgcccaaatgcttcagacattcggtagctgcttagctacagctgagcttccacggtctatgctctccacggaggacctgttgatgtcacacacacgccaacgcgataagttgcaagatgagctaaaactcctgggcaaacaggggaccacgcttctgagctgcatacaggagcccgctactaagtgtccaaatagcaaactaaatttgaatcagctcgaaaacgtgactacgatggagcgcctcttagtgcaactggatgaaacagagaaagcattcagccacttttggtcagagcaccatcttaaactcaatcagtgtttgcagctgcagcactttgaacatgatttctgtaaagctaaactcgccttggacaacctgttggaagagcaggccgagttcactggcatcggggacagtgtgatgcatgtcgagcagatcctgaaagaacacaaaaaactggaggaaaagtctcaagaacccctcgagaaggcccaactcctggccctcgtgggtgaccagctgatccagagtcaccactacgcagcggatgctattagacccagatgtgttgagttgaggcatctttgcgatgattttattaacggcaacaagaaaaagtgggatattctaggtaagagcttggagttccatcggcagttagataaggtgtctcaatggtgtgaggccggaatctacctgctcgccagccaagccgtcgacaaatgtcagagccgggaaggggtggacattgcactaaatgatattgctacgtttctggggactgtgaaagagtacccactgttgtctcccaaggaattttacaacgagtttgagctcttactgaccctggatgctaaggctaaagctcagaaagtgctgcagcgcctcgacgatgtgcaggaaattttccataaacgccaggtctctctgatgaagctggcagcgaagcagacccgccctgttcagcccgtggcccctcaccccgaatcttccccaaagtgggtcagttcgaagacttcacagcccagtacttcagtccccttggccaggcccctgagaacctccgaggagccatacacagaaacggagctgaattcccggggaaaagaggatgatgagaccaaatttgaggtgaagagtgaagagatcttcgagagccatcacgagaggggcaacccagaactggagcaacaagccagactgggcgacctttcacctcgcaggagaatcatacgggacctcctcgagactgaggagatttacattaaggagatcaaaagcattatcgatggatacattacgcccatggactttatttggctcaagcatttgatacctgatgtgctacagaacaacaaggacttcctcttcgggaacatccgcgagttgtacgagttccataaccggacattcttgaaggagctcgagaagtgcgcagagaaccccgagttgctggcacattgtttcctgaaaagggtctccctctattctcagtag

SEQ ID NO: 184276 - DNA, 3225 bp, Artificial Sequence
  derived and/or modified sequence
atgctgtcttgtctcaaagaggagatgcctccacaagagctgacccggagattagcgactgtgatcactcacgtggatgaaattatgcagcaggaggttaggccattgatggccgtggaaatcattgagcaactgcaccggcaattcgccatcctgtctggaggacgcggagaggatggggctccaatcatcacattccctgaattttcaggattcaagcatatacctgatgaggatttcctgaacgttatgacatatctgacctcaatccccagcgtggaagccgcttccatcggcttcattgttgtaatcgaccgtaggagagataagtggtcatctgtgaaagctagcctgactcgaatagccgtggccttcccaggaaacctccagcttattttcatactaaggcccagccgcttcatccaaagaactttcacagacatcggaatcaagtactatcgtaacgagttcaaaacgaaggtgcccataatcatggtgaatagcgtgagcgacctgcacgggtacattgataaaagccaattaacgagggagctgggtgggaccttagagtaccggcacggccaatgggtgaatcacagaaccgctatcgagaatttcgcactgaccctgaagacaaccgctcagatgctgcagacgtttggatcttgccttgcaaccgctgaactgccgagatccatgctctctaccgaggatctgttgatgagtcatactcggcagcgcgataagcttcaggacgagctgaaactcctgggcaagcagggtaccactttactgtcctgtattcaggagcccgcaacaaagtgcccaaatagcaagctgaatctgaatcagttagaaaacgtgaccacaatggaaaggctcttagtgcagctggacgagactgagaaggccttttcacatttctggtcagaacatcatcttaagctgaatcagtgcttgcagctgcaacacttcgagcatgatttctgcaaagccaaacttgccctggacaatctgctcgaggagcaggcagaatttacaggcatcggcgactctgtgatgcatgtggagcaaatactgaaggaacataagaaactggaggagaaaagtcaggagcctttagagaaggcccagctgctcgcactggtgggcgaccagctaatacagtcccaccactacgctgcggacgcaattaggcctcggtgtgtcgaactgagacacttatgcgacgacttcattaacggcaacaagaaaaagtgggatatcctgggcaagagcttagagttccacaggcagctggacaaggtctctcagtggtgcgaggcgggtatctacctgcttgcctcacaggcggtggataagtgccaatcccgcgaaggggttgacattgctctgaatgatattgcaaccttcttgggtacagttaaggagtatccgcttctgtcaccaaaggagttttataatgaattcgagttgctgctgacgctcgacgcaaaagcaaaggcccagaaagtacttcagcggcttgacgatgtgcaggaaatattccataaacgccaggtctctttgatgaagctagcagcaaagcagactagacccgttcagcccgtggctcctcaccctgagtcaagtccaaagtgggtgagtagtaaaacttcccagccaagtactagcgtgcccttagccaggcctctgaggacctccgaggagccttacaccgaaaccgagttgaactcacgcggtaaggaagacgatgaaaccaagttcgaggtgaagtctgaagagatattcgagtcccaccatgaaagaggtaatcctgagctggagcagcaggctcgtctcggtgacctttcaccacgacggaggataattcgagacctccttgagaccgaagagatctacattaaagagataaagagtatcattgatggttacattacaccaatggatttcatttggctaaagcatcttatacctgatgtcctacaaaacaataaagactttctctttggcaacataagagaattatatgaatttcacaacaggacttttctgaaggaactcgaaaaatgtgccgaaaacccagagctactcgctcactgcttcctgaagaggaaggaagacttacaaatttattttaaataccataagaatttgcccagagctagggccatttggcaggagtgccaggattgcgcctatttcggtgtttgccagagacaactggatcataatcttccgttatttaagtatctgaagggtccatctcagaggctgatcaaataccaaatgctcttaaagggcttacttgactttgagtctcctgaggatatggaaatcgaccccggtgaactcgggggatctgccaaggatgggccaaaacggaccaaggactccgcgtttagtacagagttgcagcaagctctagcagtcatagaggacctgataaagtcctgcgaacttgcggtggacctggccgcagtgactgagtgccccgacgatattggcaaactgggaaagctcctgcttcacggcccattctcggtgtggacaatacataaggatcggtataagatgaaggatctcatacgttttaagcccagccaacgacagatttacctcttcgaacgcggaattgttttttgcaagattagaatggaacctggcgatcaaggactttcacctcactatagcttcaaaaaaaccatgaaactaatgaccctgtctatccggcagctgggtcgtgggtcacaccgcaagttcgagatcgcctcccgcaatggcctagaaaagtacatactccaggctgcgagtaaggaaattagagattgctggttctcagagatctccaagctcctcatggagcagcagaacaacatcaaagaccagggcaacccccagttcgaaatgagcactagtaaggggtcaggtgctggctccgggccttggatcaagaacatggagagggcaaccacttcgaaagaagatcctgcctcctcaaccgggggaataaaagggtgctccagcagggagtttagttctatggatacttttgaagattgcgagggtgcagaggatatggagaaagagagttctgccctgtccctagcaggcttgtttcagagtgatgatagccatgagacttgcagctctaaaagcgccttcctcgagagaggggagagcagccagggagagaaggaagagagggacgaagaagaaacatag

SEQ ID NO: 184277 - protein, 1712 aa, Artificial Sequence
  derived and/or modified sequence
MASGSRWRPTPPPLLLLLLLALAARADGLEFGGGPGQWARYARWAGAASSGELSFSLRTNATRALLLYLDDGGDCDFLELLLVDGRLRLRFTLSCAEPATLQLDTPVADDRWHMVLLTRDARRTALAVDGEARAAEVRSKRREMQVASDLFVGGIPPDVRLSALTLSTVKYEPPFRGLLANLKLGERPPALLGSQGLRGATADPLCAPARNPCANGGLCTVLAPGEVGCDCSHTGFGGKFCSEEEHPMEGPAHLTLNSEVGSLLFSEGGAGRGGAGDVHQPTKGKEEFVATFKGNEFFCYDLSHNPIQSSTDEITLAFRTLQRNGLMLHTGKSADYVNLSLKSGAVWLVINLGSGAFEALVEPVNGKFNDNAWHDVRVTRNLRQHAGIGHAMVNKLHYLVTISVDGILTTTGYTQEDYTMLGSDDFFYIGGSPNTADLPGSPVSNNFMGCLKDVVYKNNDFKLELSRLAKEGDPKMKLQGDLSFRCEDVAALDPVTFESPEAFVALPRWSAKRTGSISLDFRTTEPNGLLLFSQGRRAGGGAGSHSSAQRADYFAMELLDGHLYLLLDMGSGGIKLRASSRKVNDGEWCHVDFQRDGRKGSISVNSRSTPFLATGDSEILDLESELYLGGLPEGGRVDLPLPPEVWTAALRAGYVGCVRDLFIDGRSRDLRGLAEAQGAVGVAPFCSRETLKQCASAPCRNGGVCREGWNRFICDCIGTGFLGRVCEREATVLSYDGSMYMKIMLPNAMHTEAEDVSLRFMSQRAYGLMMATTSRESADTLRLELDGGQMKLTVNLDCLRVGCAPSKGPETLFAGHKLNDNEWHTVRVVRRGKSLQLSVDNVTVEGQMAGAHMRLEFHNIETGIMTERRFISVVPSNFIGHLSGLVFNGQPYMDQCKDGDITYCELNARFGLRAIVADPVTFKSRSSYLALATLQAYASMHLFFQFKTTAPDGLLLFNSGNGNDFIVIELVKGYIHYVFDLGNGPSLMKGNSDKPVNDNQWHNVVVSRDPGNVHTLKIDSRTVTQHSNGARNLDLKGELYIGGLSKNMFSNLPKLVASRDGFQGCLASVDLNGRLPDLIADALHRIGQVERGCDGPSTTCTEESCANQGVCLQQWDGFTCDCTMTSYGGPVCNDPGTTYIFGKGGALITYTWPPNDRPSTRMDRLAVGFSTHQRSAVLVRVDSASGLGDYLQLHIDQGTVGVIFNVGTDDITIDEPNAIVSDGKYHVVRFTRSGGNATLQVDSWPVNERYPAGNFDNERLAIARQRIPYRLGRVVDEWLLDKGRQLTIFNSQAAIKIGGRDQGRPFQGQVSGLYYNGLKVLALAAESDPNVRTEGHLRLVGEGPSVLLSAETTATTLLADMATTIMETTTTMATTTTRRGRSPTLRDSTTQNTDDLLVASAECPSDDEDLEECEPSTGGELILPIITEDSLDPPPVATRSPFVPPPPTFYPFLTGVGATQDTLPPPAARRPPSGGPCQAERDDSDCEEPIEASGFASGEVFDSSLPPTDDEDFYTTFPLVTDRTTLLSPRKPAPRPNLRTDGATGAPGVLFAPSAPAPNLPAGKMNHRDPLQPLLENPPLGPGAPTSFEPRRPPPLRPGVTSAPGFPHLPTANPTGPGERGPPGAVEVIRESSSTTGMVVGIVAAAALCILILLYAMYKYRNRDEGSYQVDQSRNYISNSAQSNGAVVKEKAPAAPKTPSKAKKNKDKEYYV

SEQ ID NO: 184278 - DNA, 5139 bp, Artificial Sequence
  derived and/or modified sequence
atggcatctggtagccggtggaggcctactccccctccacttctgttactcctccttctggctctcgccgcccgggccgacggtctggaattcggagggggaccaggacagtgggcacggtacgcacggtgggccggcgccgctagttcaggggagctgtcattctccctgcggacaaacgctactagagctctgttgctttacctcgacgatggcggtgactgtgactttctcgaactgctgctcgtagacggcaggctgcgactcagatttactcttagttgcgcagaacccgctacgctgcagttggatacgcccgtagcggatgatcgctggcacatggtgctgctaactcgcgatgctcggcgcactgcgctagccgtggacggcgaagcccgggccgcagaagtgcgctcaaaacggagggaaatgcaagtcgctagcgacctgtttgtcggtggaatcccccctgatgtgcggttgtccgccctaacactgtccaccgttaaatacgagccaccatttcggggactgctggccaacctgaagctgggagagcgcccgcccgcacttcttggctcccagggccttagaggtgcgactgccgacccactgtgtgcgccagctagaaatccttgcgcaaacggcggtctctgtaccgtcctcgccccaggcgaggtgggctgcgactgctctcacaccgggtttgggggaaagttttgttccgaagaagagcacccaatggagggccccgctcatcttacacttaactcggaagtcggttctctgctgttttcagagggaggagccggtcgaggtggtgcaggcgacgtgcaccagccaacaaagggcaaggaagaattcgttgcaacattcaaaggtaatgagtttttttgctatgacctcagccataaccccatacagtcctcgaccgacgagatcacccttgcatttagaacgttgcagcgaaatggtctcatgctccacacagggaagagtgccgattacgtcaatctctctctgaaaagcggggccgtctggctggtgattaatttgggatccggcgccttcgaggccctggtggagcctgtgaacggtaagtttaatgataacgcttggcacgacgtacgcgtgacccgcaacctgcggcagcacgcaggtatcgggcatgccatggtcaataagctgcactacctcgtgaccattagcgtggacggcatcttaacaacaactgggtatacacaggaggattacacaatgttgggtagcgacgactttttctatataggggggagccctaataccgccgacctccccggcagtcccgtgtcaaataactttatgggttgtctgaaggacgtagtgtacaagaacaacgactttaagctggaattatctcgcctggctaaagaaggggacccgaagatgaagctgcagggcgatctgtcctttcgctgtgaagacgtggccgcactggatcctgtcaccttcgagtccccagaggcgttcgttgccctccctagatggtccgcgaaaaggaccgggagtattagtttggactttcgaaccactgaacccaacggactgttgctgttttcccagggccgcagggcaggaggtggcgccggaagccactctagtgcccaaagggcagattacttcgccatggagctgctggatgggcatctgtacctgttgctggatatgggaagcggcgggataaaattgcgggcatctagtagaaaagtgaacgacggcgagtggtgccacgtggactttcagagagatgggcgtaaaggctcaatttcggtgaatagtaggtcgacacctttcttggccaccggcgattctgagatactggatttggaatctgaactatacttagggggcctgccagaaggtggtcgggttgatctgcccctccctcctgaggtatggaccgccgcacttcgcgccggttatgtgggctgcgtgagagaccttttcattgacggcaggtcaagggacctaaggggactggccgaggcacagggagcggtgggcgtggccccattttgtagcagggaaacactaaaacagtgtgcatccgccccttgccggaacgggggcgtatgccgagagggatggaacaggttcatctgcgactgtataggcaccgggttcctgggcagggtgtgcgagcgggaggctacagtgttgtcctacgatggtagcatgtacatgaaaattatgcttcctaatgccatgcataccgaggcggaggacgtaagtcttaggttcatgagtcagcgggcatatggacttatgatggctacaacttctcgggaatccgcagacaccctcaggctcgagctggatggtgggcagatgaagttgaccgttaaccttgactgcctccgggtcggctgtgccccctcgaaagggccagagaccctgttcgcaggacataaattgaatgataacgagtggcatactgtgcgggttgtgcgccgagggaagtcccttcaattatcggttgataatgtcaccgtggaaggtcagatggcgggcgcacacatgaggctggagtttcacaatattgagactggcattatgaccgagcgcaggttcatctccgtggtgccatccaactttattggacacctgagtgggttggtgtttaatggacagccttacatggaccagtgcaaagacggcgacatcacatactgtgagctcaatgccaggttcgggctgcgagctattgtggctgacccagttacttttaagagtcgctcctcttatctggcattggcaaccctccaggcctacgcgtccatgcacctcttcttccagttcaaaactaccgcgcccgacggactcctgctgttcaactccggcaacggcaacgatttcattgtgatagaattggtgaagggatacattcactacgttttcgatctagggaatggacctagcctgatgaaaggaaacagcgataaacccgttaacgacaatcagtggcacaatgtggtggtcagcagagacccagggaacgtgcatacattgaagatagacagccgaacagtcactcagcatagcaatggggctagaaatcttgatctgaaaggagagctgtacatcggcggtctgtccaagaacatgtttagcaacctgccaaagctggtggctagtcgcgatggcttccagggttgcctggcttccgtggatctgaatgggcggctgccagacctaatagcagacgccttgcaccggatagggcaggtggagagggggtgcgatggtccttccaccacgtgtactgaagaaagctgtgccaatcagggcgtgtgtctgcagcagtgggatggattcacttgtgattgtactatgaccagttatggcgggccagtgtgtaatgatcctggcaccacctacatttttggaaaaggtggggctttgatcacatatacctggccccctaacgatcggccctcgacgcgtatggatagactagcagttgggttttccacacatcagagatccgccgtactggtgcgggtagactccgccagcgggcttggcgactatctccagctgcacattgatcagggcaccgtaggagtgattttcaatgtgggaacagatgacatcactatagacgagcctaacgcaattgtgtccgacggaaagtatcacgtcgttcggttcacccgcagtggaggcaacgctactctccaagtggattcctggcctgttaacgaacggtacccagccggcaacttcgataacgaacggctggccatcgcgagacagcgaatcccatacagactaggacgagtggtggacgagtggcttctcgacaaagggcggcagctgaccattttcaattcacaagctgccatcaagattggtggccgggatcagggcagaccgttccaggggcaggtgagtggactgtactacaatggcttaaaagtgctagcattagcagcagaatcagacccaaatgtgcgaactgaaggacaccttagactggtgggggaaggcccttccgtgttactcagcgctgaaactaccgcaactacgctgttggctgacatggcaaccactatcatggagaccaccaccactatggcaactacaaccactcgccggggccgatcgcccaccttgagggatagtacgactcagaacaccgacgacctcctggtcgcctctgcggaatgcccatcagacgatgaggatctggaggagtgcgaacccagcaccgggggcgaattgatcctgcctattatcaccgaagattccctagaccctcctcctgtggcaactcggtccccttttgttccacctccccctacgttctacccattccttactggggtgggcgctacacaagacaccctgccacccccagccgcccggcgaccgcctagcggtggaccatgccaagccgaacgggatgattccgactgcgaggagccgattgaagcctccgggttcgcaagtggcgaggtttttgattcttctttacccccgaccgatgacgaggatttctatactacattccctctcgtgactgataggacaaccctgttgtctcccagaaagcccgctcctagacccaacttacggacggatggcgccaccggagctccaggcgtgctcttcgctccttcagccccagcgccaaacctccctgccggtaaaatgaatcacagagaccccctgcagccgttactggagaatcctcctcttggcccgggagctcccactagcttcgaaccccgccgaccgcctcccctgcggccaggggtgacctcagctccaggtttcccgcacctgcctactgccaatcctaccggtcccggagagagagggccacccggcgctgttgaggtgattcgagagagctcatctaccaccgggatggtcgtcggcatagtggccgccgcagccctgtgcatcctgatactcttgtacgccatgtataagtatagaaaccgcgacgagggcagctatcaagtggaccagtccagaaattatatttcaaattccgcccagagcaatggagccgtggtcaaggaaaaggcacctgcggcacccaagacaccttctaaggcaaagaagaacaaggataaagagtattacgtatag

SEQ ID NO: 184279 - DNA, 5139 bp, Artificial Sequence
  derived and/or modified sequence
atggctagcgggagtcgttggcgaccgacacccccgcccctcctgttgctcctcctgttagcgctggccgcgcgcgctgatggtctcgagttcggcgggggtcccgggcagtgggcgcgatatgccagatgggccggagccgcttccagtggagagttgagtttttcactccggacgaatgctacccgcgcccttcttctgtaccttgatgacggaggtgattgtgacttcttggaactcctgttagttgatggccggcttcgcctgcggttcactctgagttgcgctgagccagccaccttgcaactggacacccccgtggccgatgacaggtggcacatggtgttgcttactcgggatgccagaagaaccgcccttgcagtcgacggcgaggccagagctgcagaagtgaggtctaaaagacgcgaaatgcaggtagcgtccgatttgtttgtgggaggcattcctcctgacgtacgcctgtctgccttaacactctccactgtcaagtacgaacctcctttccgcggcctgctcgccaatctgaagctgggtgagcgaccccccgccctacttggatcccagggcctgcgaggtgccacggcagacccattatgtgctccagctcgcaatccttgtgctaacgggggcctgtgcactgtgctggcccctggagaggtggggtgtgattgcagccacaccggcttcggaggtaagttttgctcagaagaggagcaccccatggaaggcccggcgcacctaactctgaattcagaggttggctcccttctgtttagcgaaggcggggccgggcggggcggggcgggagacgtgcaccagccaaccaaaggcaaggaagagtttgttgccacctttaaggggaacgaatttttctgttacgacttgagtcataacccaatccaaagctcaacagacgagattaccctggcctttaggacactccaaaggaacgggcttatgttgcataccgggaaatctgccgattacgtcaacctttccctcaaatctggggcagtgtggctggtgatcaatttaggcagcggtgccttcgaagctctggtcgaaccggtgaacggaaagtttaatgataatgcgtggcatgatgttagggttaccagaaacctgaggcagcatgcgggcatcgggcacgctatggtgaacaaactccactacctcgtgaccattagtgttgacgggatcctcacaactacggggtacacgcaggaagactatactatgctcggcagtgacgattttttctacattggcggatctccgaacaccgcagatctgcccggatctcccgtctccaacaattttatgggttgtctgaaagatgtcgtgtacaaaaataatgacttcaaacttgaactttcccgtttggcaaaggaaggcgacccaaagatgaagctgcaaggggaccttagctttagatgcgaggatgtggccgctttagatccagttactttcgaaagcccggaagccttcgtggcgctacccaggtggagcgcaaaaaggactggctccatcagcttagatttcaggaccactgagcccaatggactcctcctgttttcgcagggcagaagagcagggggaggagcaggaagccacagctccgcacagagggccgattatttcgccatggagctgcttgatggtcacttgtatcttctcttggacatgggtagcggaggcattaagctgagagcaagcagcagaaaagtgaatgatggagaatggtgccacgtggacttccagcgcgacggaaggaaaggatctatttcagtcaactcaaggtcgactccttttctggcaaccggagatagcgagattctggacctcgagtctgagctgtatctcggggggctgcctgaaggagggcgcgtggatctgccgttgccccccgaggtgtggaccgctgccctgagagcgggatacgtggggtgcgtgcgggacctgtttatcgacggccggtccagggacttgagaggcctggctgaagcacagggcgcggtaggggtagcgcccttctgttctagggagacactcaagcagtgtgcttccgccccctgcaggaatggaggcgtctgccgggaaggctggaaccgattcatctgcgattgcataggaactggcttcctgggacgggtgtgtgagagggaagccacggtgctctcatacgacggtagtatgtatatgaagatcatgctcccaaatgctatgcatacagaagccgaagacgtctcattacgatttatgagtcagagggcatacggtctgatgatggccactactagcagagagtcagcagacactctgcggctcgaactcgacggcgggcagatgaagctcacagtcaatttggattgtttacgagtaggctgtgcccctagtaaaggacccgagaccttgttcgctgggcacaagcttaacgacaacgagtggcataccgtgcgcgtggtcagacgggggaaaagcctgcagttaagtgtagacaacgtgaccgtagagggacaaatggcaggggcccatatgaggctcgagtttcataatattgagaccggcataatgacagagcgcaggtttatttctgtcgtccctagtaatttcatcggacacttgtccggacttgtgttcaacgggcagccgtatatggatcaatgcaaggatggggacataacatactgcgagctaaacgcacgtttcggacttcgtgcaatcgtggccgaccctgtaaccttcaagtcaaggtcttcttaccttgcgctggctacactgcaggcatatgcttcaatgcacctctttttccagtttaaaacgacagcacctgatggactcctactgttcaattccggaaatgggaatgattttatagtgatcgagctggtaaaaggttacattcactacgtgttcgacctcggaaatggtccctctctcatgaagggtaacagcgataagcccgtcaacgataatcagtggcataatgtcgttgtctcgagagaccccggcaacgttcatacactcaagatagacagtcgtactgtcacacagcacagcaatggggcacgcaacctggacttgaagggggaactatacattggcggcctgagcaaaaatatgttttcaaacctacctaaattagtggcttctcgcgacggcttccagggctgtctcgcctctgtggacctgaacggaagactgcctgacctcattgcagacgccctgcataggattggccaagtcgagcgcggctgcgacggccctagtactacctgcactgaggaatcctgtgccaaccaaggcgtatgtctgcagcaatgggatggattcacgtgcgactgcaccatgacctcatatggtggcccagtctgcaacgatcctggcacaacctatatattcggaaagggtggggccctgataacctacacatggccacccaacgaccggccaagcactcgcatggataggctcgcggtaggattcagcacgcatcagcggagtgccgttcttgtaagggtggactcagccagcggccttggagactatctgcagctccacattgaccaaggcactgtgggggtaatcttcaacgtgggcacagacgatattacaatcgatgagcctaacgccatcgttagcgatgggaaatatcacgtggtgcggttcacccgatcagggggcaacgcgacactacaggttgactcctggcctgtcaatgagcgttatccagccggtaacttcgacaacgaacgacttgccatcgcccgacagcggatcccctaccgcctcgggagggtggtcgacgaatggctgctggacaagggacgacaattgaccattttcaactcgcaagctgccattaaaattggcggacgtgatcagggccggccctttcaagggcaagtctccgggttgtactataatgggctcaaggtactcgcgcttgcagccgagtccgatcctaacgtgcgtacagaggggcatctgagactagtcggggaaggaccgagcgtgctgctttccgccgaaactaccgccactacactgctggcagatatggctacaactattatggaaacaaccacgacaatggcaaccaccacaacacgtagggggaggtcccccacacttcgggattctactactcagaacacggatgacctgctcgtggcctctgccgagtgcccatcggatgatgaagacctcgaagagtgtgagccaagtaccggcggggaattgatcttgcctatcattacagaagatagtctggatccccccccagttgctacccgttctccctttgtgccgcccccaccgacattttacccttttttaaccggggttggcgcgacgcaagacaccctgcctcctccggccgccagacgcccaccctcaggtgggccatgccaggcagagagggacgattcagactgcgaagaaccgatcgaagcttcgggtttcgcgagtggagaggtttttgattcctctctgccccctaccgacgatgaggatttctacacaacattccctctagttactgatcggaccaccttgctgagcccaagaaaacctgctcctaggcccaacttgagaaccgatggggcaaccggagcacccggggtcctttttgccccatccgcaccagctcccaacctgccagctggcaaaatgaaccaccgggaccctctgcaacccctcctggagaatccacccctgggacctggggcccccactagcttcgagccgcggcgtccacctcccctgagaccgggtgttaccagtgcccccggcttcccgcatcttccgacggccaatccaaccggccctggggagcggggacctccgggcgcagtggaggtaattcgcgaaagcagcagcactaccggcatggtggttggaatcgtagcggctgcagcactgtgtatcctaattcttttgtatgccatgtataaataccggaaccgggatgagggaagctaccaggtcgatcagtctagaaattacattagcaactccgcgcagtctaatggagctgtagtcaaagaaaaggcccctgccgctccgaagacgccgagcaaagctaaaaagaacaaggacaaggagtactacgtttag

SEQ ID NO: 184280 - DNA, 5139 bp, Artificial Sequence
  derived and/or modified sequence
atggccagcggcagccgctggaggcccaccccaccacccctgctgctgctgctgctgctggccctggccgcccgggcagatggcctggagtttggaggcggccctggccagtgggcccgctatgcccgctgggccggggccgccagcagcggggagctgtccttcagcctgcggaccaatgccacccgggccctgctgctgtacctggatgatggaggagactgtgacttcctggagctgctgctggtggatggccgcctgcggctgcgcttcaccctgagctgtgccgagcccgccaccctgcagctggacacccctgtggctgatgaccgctggcacatggtgctgctgaccagagatgcccggaggacagccctggccgtggatggagaggcccgggctgctgaggtgcgcagcaagagaagagagatgcaggtggccagtgacctgtttgtgggcggcatccccccagatgtgcggctgagcgccctgaccctgagcacagtgaagtatgagccccccttccggggcctgctggccaacctgaagctgggggagcggcccccagccctgctgggcagccagggcctgcggggggccacagctgaccccctgtgtgccccagccaggaacccctgtgccaatggaggcctgtgcaccgtgctggcccctggagaggtgggctgtgactgcagccacacaggctttggaggcaagttctgcagcgaggaggagcaccccatggagggccctgcccacctgaccctgaacagcgaggtgggcagcctgctcttcagcgagggcggggccggccggggcggcgctggagatgtgcaccagcccaccaagggcaaggaggagtttgtggccaccttcaagggaaatgagttcttctgctatgacctgagccacaaccccatccagagcagcacagatgagatcaccctggccttccgcaccctgcagagaaatggcctgatgctgcacacaggcaagtctgctgactatgtgaacctgagcctgaagtctggagctgtgtggctggtgatcaacctgggcagcggggcctttgaggccctggtggagcctgtgaatggcaagttcaatgacaatgcctggcatgatgtgcgggtgaccaggaacctgcggcagcacgccggcatcggccacgccatggtgaacaagctgcactacctggtgaccatctctgtggatggcatcctgaccaccaccggctacacccaggaggactacaccatgctgggcagtgatgacttcttctacatcggcggcagccccaacacagctgacctgcccggcagccctgtgagcaacaacttcatgggctgcctgaaggatgtggtgtacaagaacaatgacttcaagctggagctgagccggctggccaaggagggggaccccaagatgaagctgcagggcgacctgtccttccgctgtgaagatgtggccgccctggaccctgtgacctttgagagccctgaggcctttgtggccctgccccgctggagcgccaagaggacaggcagcatcagcctggacttccgcaccacagagcccaacggcctgctgctcttcagccagggccggcgggccggcggcggggccggcagccacagcagcgcccagagagctgactactttgccatggagctgctggatggccacctgtacctgctgctggacatgggcagcggcggcatcaagctgcgggccagcagcaggaaggtgaatgatggagagtggtgccacgtggacttccagagagatggcaggaagggcagcatctctgtgaacagccgcagcacccccttcctggccaccggggacagcgagatcctggacctggagagcgagctgtacctgggcggcctgcctgagggcggccgggtggacctgcccctgcccccagaggtgtggacagctgccctgcgggccggctacgtgggctgtgtgcgggacctcttcattgatggccgcagccgggacctgcggggcctggccgaggcccagggcgctgtgggcgtggcccccttctgcagccgggagaccctgaagcagtgtgccagcgccccctgcagaaatggaggagtgtgccgggagggctggaaccgcttcatctgtgactgcattggaacaggcttcctgggccgggtgtgtgagcgggaggccaccgtgctgtcctatgatggctccatgtacatgaagatcatgctgcccaatgccatgcacacagaagcagaagatgtgtccctgcgcttcatgagccagagggcctacggcctgatgatggccaccaccagccgggagagcgctgacaccctgcggctggagctggatggcggccagatgaagctgactgtgaacctggactgcctgcgggtgggctgtgcccccagcaaaggacctgagaccctgtttgctggccacaagctgaatgacaatgagtggcacacagtgcgggtggtgcggcggggcaagagcctgcagctgtctgtggacaacgtgacagtggagggccagatggccggggcccacatgaggctggagttccacaacatcgagaccggcatcatgacagagcggcgcttcatctctgtggtgcccagcaacttcatcggccacctgagcggcctggtgttcaacggccagccctacatggaccagtgcaaggatggagacatcacctactgtgagctgaatgcccgcttcggcctgcgggccatcgtggccgaccctgtgaccttcaagagccgcagcagctacctggccctggccaccctgcaggcctatgcctccatgcacctgttcttccagttcaagaccacagccccagatggcctgctgctcttcaacagcggaaatggaaatgacttcatcgtcatcgagctggtgaagggctacatccactacgtgtttgacctgggcaatggccccagcctgatgaagggcaacagcgacaagcctgtgaatgacaaccagtggcacaacgtggtggtgtcccgggaccctggaaatgtgcacaccctgaagattgacagcaggacagtgacccagcacagcaatggagccaggaacctggacctgaagggggagctgtacatcggcggcctgagcaagaacatgttcagcaacctgcccaagctggtggccagcagagatggcttccagggctgcctggcctctgtggacctgaatggccgcctgcctgacctgattgctgatgccctgcaccgcatcggccaggtggagcggggctgtgatggccccagcaccacctgcacagaggagagctgtgccaaccagggcgtgtgcctgcagcagtgggatggcttcacctgtgactgcaccatgaccagctatggaggccctgtgtgcaatgaccccggcaccacctacatctttggaaaaggaggagccctgatcacctacacctggcccccaaatgaccggcccagcaccaggatggaccggctggccgtgggcttcagcacccaccagaggtctgctgtgctggtgcgggtggacagcgccagcggcctgggggactacctgcagctgcacatcgaccagggcaccgtgggcgtcatcttcaacgtgggcacagatgacatcaccattgatgagcccaatgccatcgtgtctgatggcaagtaccacgtggtgcgcttcaccaggtctggaggaaatgccaccctgcaggtggacagctggcctgtgaatgaaagatacccagctggcaactttgacaatgaaaggctggccatcgcccggcagaggatcccctaccgcctgggccgggtggtggatgagtggctgctggacaagggccggcagctgaccatcttcaacagccaggccgccatcaagattggaggccgggaccagggccggcccttccagggccaggtgtctggcctgtactacaacggcctgaaggtgctggccctggccgctgagagtgaccccaacgtgaggacagagggccacctgcggctggtgggggagggccccagcgtgctgctgtctgctgagaccacagccaccaccctgctggccgacatggccaccaccatcatggagaccaccaccaccatggccaccaccaccacccggcggggccgcagccccaccctgcgggacagcaccacccagaacacagatgacctgctggtggccagcgctgagtgccccagtgatgatgaggacctggaggagtgtgagcccagcactggaggagagctgatcctgcccatcatcacagaggacagcctggaccccccacctgtggccaccaggagcccctttgtgcccccaccacccaccttctaccccttcctgactggagtgggcgccacccaggacaccctgcccccacctgctgcccggcggcccccatctgggggcccctgccaggccgagagagatgacagcgactgtgaggagcccatcgaggccagcggctttgccagcggggaggtgtttgacagcagcctgcccccaacagatgatgaggacttctacaccaccttccccctggtgacagacaggaccaccctgctgagccccaggaagccagccccccggcccaacctgaggacagatggagccaccggggcccctggggtgctgtttgcccccagcgccccagcccccaacctgcctgctgggaagatgaaccaccgggaccccctgcagcccctgctggagaacccccccctgggccctggggcccccaccagctttgagccccggcggcccccacccctgcggcctggggtgaccagcgcccctggcttcccccacctgcccacagccaaccccactggacctggagagcggggccccccaggagctgtggaggtgatccgggagagcagcagcaccaccggcatggtggtgggcatcgtggccgccgccgccctgtgcatcctgatcctgctgtatgccatgtacaagtacagaaacagagatgagggcagctaccaggtggaccagagcaggaactacatcagcaacagcgcccagagcaatggagctgtggtgaaggagaaggccccagctgcccccaagacccccagcaaggccaagaagaacaaggacaaggagtactacgtgtag

SEQ ID NO: 184281 - DNA, 5139 bp, Artificial Sequence
  derived and/or modified sequence
atggccagcggcagccggtggcggcccacccccccccccctgctgcttcttcttctgcttgctctggccgctagagcagatggcctggagttcgggggcggtcccgggcagtgggcccgatatgctcggtgggccggcgccgccagcagtggagaattgagtttctctttaagaactaacgcaacaagggctctcctattatatctggacgatggcggcgattgtgatttcctggagcttctactagtggacgggagactcagactcaggttcaccttatcttgtgctgagccagcaactctgcagctcgacactcccgtggctgatgataggtggcatatggtactgctgactagggatgcaagacgcacggcactcgccgtagatggcgaagcccgagccgccgaggttagaagtaaacggcgcgaaatgcaggtggccagcgacctctttgtgggggggatcccccctgacgtgaggctatctgcgctgaccctgagtaccgtgaagtacgagcctcctttcaggggcctgcttgcgaatctgaaacttggagagcgaccaccggcactgctaggctcacaaggactgagaggcgcaacggccgaccctttgtgcgcccctgcacggaatccctgtgctaacggtggcctgtgtacggtcctcgctcctggtgaagtcggctgtgactgtagtcataccggattcggcggtaagttctgctccgaagaggagcatcccatggagggcccagctcatctgacactgaactctgaggttgggtccctgctcttcagtgaaggtggtgctggacggggaggagcgggcgacgtgcaccagccgacaaaagggaaagaagagttcgttgcaacatttaaggggaacgaatttttctgttacgatctgagtcacaatccgattcaaagcagcactgatgaaattaccctcgcatttcgtaccctccagcgcaatggcctaatgttgcacaccggaaagtctgcggattatgtaaatctcagcctgaaaagcggggcggtgtggctggtcatcaacctaggctccggcgcattcgaagccctggttgagccagtaaacggcaaatttaatgacaacgcatggcatgacgtgcgtgtgactagaaatcttaggcagcacgcaggaatcggtcacgctatggtaaacaagctgcattacctagtgaccatctctgttgacggcatcctgacaaccactgggtatacgcaagaagactataccatgctagggagcgacgattttttctatattgggggtagccctaacaccgcggaccttcccggcagccctgtgagtaataattttatgggttgcttgaaggatgtcgtctacaagaataatgatttcaaactggagctctcacggttagccaaagagggcgatccaaaaatgaagctgcaaggtgatctgagttttagatgtgaggacgtggccgcactggacccggtcacctttgagtcaccagaggccttcgttgcactaccccgctggtctgcaaagcgcaccgggtctatttcgctggactttcggacaactgaacccaatgggctgctgctgttctcgcaggggcgcagggccggggggggggccgggtcccattcctccgcgcagcgcgccgactattttgctatggaactgcttgacggccatttgtaccttctactggatatgggcagcggcggcattaagctgcgcgcttccagtagaaaggtgaatgatggagaatggtgtcacgttgatttccaacgtgatggacggaaagggtccatcagcgtgaatagtagatccacaccattcctggctaccggggactctgagatcctagacctggagtccgaactataccttgggggacttccagagggcggccgagtggacctaccgcttccaccagaggtgtggaccgcagcactgcgcgctgggtacgtcggatgtgtgcgcgatctgttcattgatgggcggtcacgcgatcttagagggcttgcggaggcacagggtgcggtcggagtggcaccattctgttcaagggaaacccttaaacagtgtgcgtcagctccgtgccgcaatggaggagtttgccgggaaggctggaaccgctttatttgtgactgcatcggaacaggtttcttgggaagggtgtgcgagcgggaggctactgttctctcctatgatgggagcatgtacatgaagattatgctgcctaatgccatgcacacagaggccgaagacgttagtctcaggtttatgtcccagcgggcctacgggctgatgatggctactacatctcgtgagagcgccgacacacttagattggaattggacggagggcaaatgaagttgaccgtcaacctggactgcctccgcgtgggatgcgccccttctaaggggcccgagaccctcttcgctggacacaagctgaacgacaacgagtggcataccgttcgagtagtccggaggggcaagtcactccagctgagtgttgataacgtcactgtggaagggcagatggccggcgcacatatgcgtctggaatttcacaatattgagaccggaatcatgaccgagagacgttttatttctgtagtgccaagtaacttcatcggacacctgagtgggctagtgttcaatggccagccatatatggaccaatgtaaagacggtgatattacatactgcgagctgaatgctcgctttggactgcgagctatagtggccgacccagtaacctttaaatctaggagcagctaccttgcccttgctacactgcaggcgtacgccagtatgcacctgttctttcagtttaaaacgactgcccccgacgggctgctactcttcaactctggaaatggcaatgactttatcgtgatcgagctcgtgaaaggctacattcactacgtctttgacctcggcaatgggccaagcctgatgaaaggaaacagcgacaagcccgtcaatgacaaccagtggcacaacgtagtggtgtcaagagaccctggcaacgtgcacacacttaagatcgacagtcgcactgtgacgcagcactccaacggagcgcgcaatctggacttaaaaggcgaattatacatcggtgggctgtccaagaatatgttttctaaccttcctaagctagtggcaagtcgagatggcttccaaggctgtctcgcctctgttgatctgaatggccgtctacccgatctgatcgctgacgcacttcaccgaattggtcaggtagaacgcggatgtgatggccccagcacaacttgcactgaagaaagttgcgcaaaccagggtgtgtgtctccagcagtgggatggattcacgtgcgattgcactatgacttcgtacgggggacccgtgtgtaatgacccaggcactacttacatcttcggcaagggtggagctttaatcacttatacatggcctcctaacgaccggcctagcacaagaatggataggttagccgtcggttttagtacccatcagcgcagcgctgtgctggtgcgggtagactccgcttccggattgggagactacctgcagctgcacatcgaccagggcaccgtgggggtgatcttcaacgtcggcaccgacgatataacgattgatgaacctaacgcgattgtgtccgatggcaagtatcacgtggttcgattcaccaggtccggaggtaatgctacgctgcaggtggattcttggcccgtcaacgaacggtaccccgctggtaattttgacaatgagcggctggcaatcgcccgacaaagaatcccatacaggctcgggagggtggtagatgagtggctgctggacaagggccggcagctgaccatattcaactcacaggccgcaatcaaaatcggaggaagagatcagggccgcccctttcaggggcaggtgtcaggactctattacaacggcctgaaggttctggcactcgcggccgagtctgacccaaatgttagaacggaaggccatctgagacttgtgggtgaaggtccgtccgtgctgctgagtgctgagaccaccgccactactctcctggccgacatggctaccacgatcatggaaaccacaaccactatggccacaaccactacacgccgggggcgttcaccaaccctacgtgactctacaactcagaataccgacgatctcctcgtcgcctcagcagaatgcccctccgacgacgaagatctcgaggaatgcgagccgagcacaggcggcgagctgatactgcccataattacagaggacagcttagatccaccaccagtggctactcgatctcccttcgtgccccctcctcctactttctatcctttcctgactggagtgggggccacccaggacaccctccctccacccgccgctcggaggcctccctctgggggcccctgtcaggctgagcgcgatgattccgattgtgaggagccgatcgaggcctcaggatttgcgagtggggaggttttcgactcatcacttccccccacagatgacgaagatttctataccaccttccctctcgttacagacaggactactctgctttctcccagaaagcctgcacctagacctaacttgagaacagatggcgctaccggtgcccctggtgtcctttttgccccgagtgcccccgctccgaatttgcccgcaggaaaaatgaatcatagagatccacttcaaccccttctggagaacccccctctcggtcccggcgcgcctacgagcttcgaaccccggagaccccctcccctacgccctggggtcacgagcgccccagggttcccacaccttcccactgccaaccccacgggtcccggcgaaagaggaccaccgggagcagttgaggtgattagagaatcttcttcaaccaccggcatggtcgtgggcatcgtagctgccgctgccctgtgcatcctcatcctactttatgccatgtacaaatatcgcaatagagacgaaggatcatatcaggttgatcaatctcgtaactatatttccaatagcgcacagagtaacggagctgtagtgaaagaaaaggcccccgctgctcctaaaacaccttccaaagccaagaaaaataaagataaagaatactatgtgtag

SEQ ID NO: 184282 - DNA, 5139 bp, Artificial Sequence
  derived and/or modified sequence
atggccagcggcagccggtggcggcccacccccccccccctgctgctgcttctcctcctggccctcgctgccagggctgatggtttggaattcggaggtggcccggggcagtgggcccgttacgctaggtgggccggagccgcgagttccggcgagctgtcctttagcctgcggacaaatgcgactagggccttattattataccttgacgacgggggggactgcgattttctcgaactgctgctagtcgacggccgcctgaggcttcgttttaccctgtcgtgcgccgaaccagccacgttacagctggacacgccagtggcagatgatcggtggcatatggttctattaacacgggacgcccggagaactgcacttgccgttgatggagaggcacgggccgcagaagtgaggtccaaacggcgggagatgcaggtcgcttctgatctgttcgttggcggaataccacccgatgtccgactttcagcccttacgctcagcaccgtgaagtatgagcctcccttccgaggcctcctcgcaaacttaaaactgggagagcgcccgccggcattgctgggttctcaaggccttcggggggcaaccgctgatccgctatgcgcacctgcaaggaacccttgtgccaatggtggtctctgcactgtgctggccccgggggaagtgggctgcgattgctctcacaccggtttcggcggcaaattctgttctgaggaagagcaccctatggagggaccagcacatctaacactgaatagcgaagtgggttcgctgctgttcagtgaagggggcgctggccggggcggggcaggcgatgtccatcagcctactaaaggcaaagaggagtttgtcgccacattcaaaggcaacgaatttttctgctacgacctgtcccacaaccccatccagtcatctactgacgaaataaccttggccttccgcaccttacagcgcaacggactcatgcttcacacaggcaagagcgctgactacgtaaatctgtctctaaagagcggggccgtgtggcttgttataaacttaggtagcggtgctttcgaggccctcgttgaaccagtgaacggcaaattcaatgataatgcctggcacgatgttagagttacacggaacctgcggcagcacgctggcatcggccacgcaatggtcaataaactccactatctggtcaccatttctgtagatggtattctgaccactactggatacacacaggaagactacacaatgctcggttctgacgatttcttttacattggggggagtcccaacaccgcagatctgccaggatcacccgtcagtaacaacttcatggggtgtctgaaagatgttgtctacaagaacaatgactttaagttagaactttcccgcctcgccaaagagggagatccgaagatgaagctccaaggagacctgtccttccgttgcgaggatgtggctgcacttgacccagtgacatttgaatcccccgaggcttttgtggcactgccccgatggtcagcaaaacgtacagggtctatatccctggattttaggaccaccgagcctaacggtctgctccttttctcccagggcagaagagccggcgggggggctggctcccatagcagcgcccaaagggctgactatttcgccatggagctcttagatggacatctttacctgttactcgacatgggatcggggggcattaaactgagagcctccagccgcaaagtcaatgacggggagtggtgtcacgtcgatttccagcgtgatggccgcaaggggagcatctccgtcaactccagatcaacccctttcctggcaactggagatagcgagatccttgacctagagtcagaattgtacctcggcgggttgccagagggcggcagggttgatctgcctctgccccctgaagtttggacagcagcactgcgcgctggttacgtgggatgtgtgcgcgacctcttcatcgacggtaggtccagggacctgcgaggcctcgccgaagcccaaggggcggtcggcgtggcaccattttgctcccgcgagaccttgaagcagtgtgcaagtgcaccttgtagaaacggcggcgtgtgtcgcgagggctggaacagattcatttgtgattgcattggcacgggcttcctgggcagagtatgtgagagggaggccacagtgttgtcctacgacggcagtatgtatatgaagattatgctgccaaatgccatgcataccgaggccgaggatgtgtccttgagattcatgtctcagagggcctacgggctgatgatggcaaccacctcacgggaaagtgccgatactcttcgactggagctggacgggggccagatgaaactgaccgtcaacctcgattgcctgcgtgtaggttgtgcaccttccaagggacccgagacgctcttcgcaggccacaaactgaatgacaatgagtggcatactgttcgggttgtgcggcggggaaaatctctgcagctctccgtcgataatgtgaccgtcgaggggcagatggcgggagcacacatgcggttggagtttcacaatattgaaacaggcattatgactgaacgtcgcttcataagtgtagtgccttccaactttattggccacctgagcgggctcgtgtttaacggccagccctacatggaccagtgtaaggacggcgatataacatactgtgagctgaatgctaggttcggactcagggccatagtggccgatccagttacctttaagagccgcagcagctatttagctttagccacattgcaggcctatgcttctatgcatttgttcttccagttcaaaaccaccgcccctgacggactgttattgttcaactccggaaacggtaatgatttcatcgtaatagaacttgtaaagggatatatccattatgtgttcgatcttggcaatggtccctcactgatgaaaggtaactcggataaaccagtgaatgataatcagtggcacaatgtggtggtctcccgggacccaggtaacgtccataccctgaagatcgatagtcggacagtgacacaacatagcaatggcgcccggaaccttgatttgaaaggggagctctacattgggggcctatccaaaaacatgttcagcaatttacctaagttggttgcctcacgcgacggctttcaggggtgcttagcctctgttgatttaaatgggagacttccagatctaatcgctgacgccttacacagaattggccaggtagaacgcggttgtgatggtccgtctaccacgtgtacggaggagtcttgcgccaaccaaggcgtgtgcttgcagcagtgggacggctttacctgtgactgtactatgacgagctatggcggtcccgtctgtaacgatcccggtactacctacatttttgggaagggcggcgccctgattacctacacttggccaccaaatgaccgaccgagtactaggatggacagactagctgtagggttctccactcaccagagatctgccgtgctggtgagagtcgactcggccagcggacttggtgattacctgcagctgcatattgatcaggggaccgtcggggtgatctttaacgtggggacggacgatatcacaatcgacgaacctaatgcaatagttagtgatggcaagtaccatgtggtgcgtttcacaagatccggcgggaacgccactcttcaggtagacagttggccggtgaatgagaggtacccagctggaaactttgacaatgagcggcttgccattgcccgtcaacgaatcccctatcgcctaggacgagtggtcgacgagtggctgctggacaaaggacgccagctgactattttcaactcccaggctgccattaaaatcggggggagagatcaggggagaccttttcagggacaagtgagtggattgtattacaacggattaaaggtgctcgctttggcagccgagagcgatcctaatgtccgaacagagggccacctgcgacttgtcggcgaggggcccagtgtactgctttccgccgaaacgacagccactacactcctcgccgatatggcaaccacgataatggagacaacgacaaccatggcaaccacaaccaccagacgtggaagatcaccaaccctgcgggattcaaccacccaaaacacagacgatctcctggtagcaagtgctgaatgtccaagcgacgacgaggacctggaggagtgcgaaccctccaccggaggtgaactgatattgcccatcattactgaggatagcctagacccacctccggtggcgacaaggagcccattcgtccctcctccacccaccttttaccccttcctcacaggcgttggcgcgacacaggatactcttccgccacctgcagctaggcgacccccgagtggtggcccttgccaggccgagcgcgacgatagtgactgtgaagaacctattgaggcctctggattcgcctccggtgaagttttcgattccagcctcccacccacggacgatgaagacttctacactacctttcctctagtcacagacagaacgacactcctgtcaccacgcaaacccgctccccggcctaatcttcgtacagatggcgcaacaggtgcccccggtgtgctcttcgcgccctcagcccctgctcccaacctgcctgccggaaagatgaatcatcgtgaccctttgcaaccgctcctcgagaacccgcccctgggccctggagcaccaacgtcatttgagcctagacgtccccctcctttgaggcccggcgtgacctccgcaccgggcttcccccatttgcccacagctaatcctaccggccctggggagaggggccccccaggcgcagtggaagttatacgtgaaagctcaagcaccacaggtatggtagttggaattgtcgcagccgccgccttgtgtattcttatactgttatatgctatgtacaaataccggaacagagacgagggatcctatcaggtggaccagtcacggaattatatcagtaactctgcacagagtaatggagctgtggtgaaggaaaaggctcctgccgcaccaaaaactccctctaaggcaaagaaaaataaggacaaggagtattatgtgtag

SEQ ID NO: 184283 - DNA, 6621 bp, Artificial Sequence
  derived and/or modified sequence
tgcagggatgcggcggcgggagcagccgccctgactcgcggagcatcctcctcggagaggcaccgcggcggggcgggcgggcgggcggggacgcggcggggagggagagaggcgcgaggcggcagacaccgctagccctggctctgccacccgtcggagacggggcggccctgtagctctgctacccaccctccagcttctggcgccccgagaaccaggcatccctccctgctcttctgtcggagcccgcggcgggggaggggcgccgccgccgccgcctgagggaagccggcatctgggcctctgcgcgcctcgccccgcggccgggcccatggcactgtgagcctgcaagggagccccgctcagcgcggggagcgcccggccccctcccgccccatgcgcccgcggctctgaagcctgagcgggggccgggggccgggcggggccggggccgccgtaggcatggcgtccgggagccggtggcggccgacaccgccgccgctgctgttgctgctgctgctggcgctggcggcgcgcgcggacggcctggagttcggcggcggccccgggcagtgggctcgctacgcgcgctgggcgggcgcggcgagcagcggcgagctcagcttcagcctgcgcaccaacgccacgcgcgcgctgctgctctacctggacgacggcggcgactgcgacttcctggagctgctgctggtggacggccgcctgcggctgcgcttcacgctttcgtgcgccgagccggccacgctgcagctggacacgccggtggccgacgaccgctggcacatggtgctgctgacccgcgacgcgcgccgcacggcgctggcggtggacggcgaggcccgcgccgccgaggtgcgctccaagcggcgcgagatgcaggtggccagcgacctgttcgtgggcggcatcccgcccgacgtgcgcctctcggcgcttacgctgagcaccgtcaagtacgagccgcccttccgcggcctcttggccaacctgaagctgggcgagcggccccccgcgctgctgggcagccagggcctgcgcggcgccaccgccgacccgctgtgcgcgcccgcgcgcaacccctgcgccaacggcggcctctgcaccgtgctggcccccggcgaggtgggctgcgactgcagccacacgggcttcggcggcaagttctgcagcgaagaggagcaccccatggaaggtccggctcacctgacgttaaacagcgaagtagggtccttactgttctccgaggggggggccgggagaggaggagccggcgatgtgcaccagccaacaaaaggcaaggaggagtttgtggcgaccttcaaaggcaatgagttcttctgctacgacctgtcacacaaccccatccagagcagcactgatgagatcacactggccttccgcaccctgcaacgcaacggcctgatgctgcatacaggcaagtcggccgactacgtcaacctgtccctcaagtctggggctgtctggctggtcatcaacctaggctcaggtgccttcgaggcccttgtggaacccgtcaatggcaagttcaacgacaacgcctggcacgacgtccgggtcacccgaaacctgcgccagcacgcagggattggacacgctatggtaaacaaactgcattatctggtgaccatctcggtggacgggatcctgaccaccacaggctacacgcaggaggattacaccatgctgggctctgatgacttcttctacattgggggcagccccaacacagctgacctgccgggctcgcccgtcagcaacaacttcatgggctgcctcaaggacgtggtctataagaacaatgacttcaaattggaactatcccgcctggcaaaggaaggggaccccaagatgaagctgcagggggacttgtcattccgctgtgaggatgtggctgccctggaccctgtgacctttgagagtcccgaggcctttgtggcgctgccccgctggagcgctaagcgcactggctccatctccctagacttccgcaccaccgagcccaatgggctgctgctcttcagccagggccggcgggctgggggtggagctggcagccacagctctgctcagcgggccgactactttgccatggagctattggacggccacctctatcttctgctggacatgggatctgggggcatcaagctgcgggcatccagccgcaaggtcaatgatggcgagtggtgtcacgtggacttccagagggatgggcgaaaaggctccatctcagtgaatagtcgcagcacgccgttcttggccactggagacagcgagattctggacctggagagtgagctgtacctgggcggtctccctgaggggggccgggtggacctgcccctgcccccagaggtgtggacagcagcactccgggcaggctacgtgggctgtgtgcgggacctcttcatagatgggcgtagccgagacctccggggcctggctgaggctcagggggctgtgggcgttgcccccttttgctcccgggagacgctgaagcagtgtgcatctgccccctgtcgcaatgggggcgtctgtcgagaaggctggaaccgcttcatctgtgactgcatcgggaccggctttcttgggcgggtctgtgagagagaggccacggtcctgagctacgatggctccatgtacatgaagatcatgctgcctaacgccatgcacacggaggcagaggatgtgtccctgcgtttcatgtcccagcgggcctacggactcatgatggccaccacttccagggagtctgccgacaccctacgcctggagctggatggggggcagatgaagctcactgtcaacctcgactgcctgcgcgtcggctgcgcacccagtaaaggccccgaaacgctgtttgcggggcacaagctcaatgacaatgagtggcacacggtgagggtggtccggcgtggcaagagcctgcagctgtctgtggacaacgtgactgtggagggacagatggcaggagcccatatgcggctggagttccacaacattgagacgggcatcatgacggagcggcggtttatctccgtggtgccctccaacttcatcgggcatctgagtgggctcgtgttcaatggccagccctacatggaccagtgcaaggatggtgacatcacctactgtgagctcaatgctcgctttggcctgcgtgccatcgtggccgatcccgtcaccttcaagagtcgcagcagctacctggcactcgccacgctccaagcctatgcttccatgcacctcttcttccagttcaagaccacggcccctgatgggcttcttctgttcaactcgggcaacggcaatgacttcattgtcatcgagctggtcaaggggtacatccactacgtgtttgacctggggaatggcccgtccttgatgaaggggaactcagacaaaccagtcaatgacaaccagtggcacaacgtggtggtgtccagggacccaggcaacgtgcacacgctcaagattgactcccgcactgtcacgcagcactccaatggcgcccgaaacctcgatctcaaaggggagttgtacattggcggtctgagcaagaatatgttcagcaacctgcccaagctggtggcctcccgggatggctttcagggctgcctggcctcagtggacctcaacggacgtctcccagacctcatcgccgacgccctgcaccgcattgggcaggtggagaggggctgtgatggccccagcaccacctgcactgaagagtcctgtgccaaccagggcgtctgcttgcagcagtgggatggcttcacctgcgactgcaccatgacttcctatggaggccctgtctgcaatgatcccgggaccacatacatctttgggaaggggggagcgctcatcacctacacgtggccccccaatgacaggcccagcacgaggatggatcgcctggccgtgggcttcagcacccaccagcggagcgctgtgctggtgcgggtggacagcgcctccggccttggagactacctgcagctgcacatcgaccagggcaccgtgggggtgatctttaacgtgggcacggacgacattaccatcgacgagcccaacgccatagtaagcgacggcaaataccacgtggtgcgcttcactcgaagcggcggcaacgccaccctgcaggtggacagctggccggtcaacgagcggtacccggcaggaaactttgataacgagcgcctggcgattgctagacagagaatcccctaccggcttggtcgagtagtagatgagtggctgctcgacaaaggccgccagctgaccatcttcaacagccaggctgccatcaagatcgggggccgggatcagggccgccccttccagggccaggtgtccggcctctactacaatgggctcaaggtgctggcgctggccgccgagagcgaccccaatgtgcggactgagggtcacctgcgcctggtgggggaggggccgtccgtgctgctcagtgcggagaccacggccaccaccctgctggctgacatggccaccaccatcatggagactaccaccaccatggccactaccaccacgcgccggggccgctcccccacactgagggacagcaccacccagaacacagatgacctgctggtggcctctgctgagtgtccaagcgatgatgaggacctggaggagtgtgagcccagtactggaggagagttaatattgcccattatcacggaggactccttagacccccctcccgtggccacccgatcccccttcgtgcccccgccccctaccttctaccccttcctcacgggagtgggcgccacccaagacacgctgcccccgcccgccgcgcgccgcccgccctctgggggcccgtgccaggccgagcgggacgacagcgactgcgaggagcccatcgaggcctcgggcttcgcctccggggaggtctttgactccagcctcccccccacggacgacgaggacttttacaccacctttcccctggtcacggaccgcaccaccctcctgtcaccccgcaaacccgctccccggcccaacctcaggacagatggggccacgggcgcccctggggtgctgtttgccccctccgccccggcccccaacctgccggcgggcaaaatgaaccaccgagacccgcttcagcccttgctggagaacccgcccttggggcccggggcccccacgtcctttgagccgcggaggccccctcccctgcgccccggcgtgacctcagcccccggcttcccccatctgcccacagccaaccccacagggcctggggagcggggcccgccgggcgcagtggaggtgatccgggagtccagcagcaccacgggcatggtggtgggcattgtggcggcggcggcgctctgcatcctcatcctcctctacgccatgtataagtaccgcaatcgtgatgagggctcctaccaggtggaccagagccgaaactacatcagtaactcggcccagagcaatggggcggtggtgaaagagaaggccccggctgcccccaagacgcccagcaaggccaagaagaacaaagacaaggagtattatgtctgagcccccggcactgcgccccactgccagctgcccctcctgggagggcccgggaggagggtgccaccctctccctgccaggggcctggggaccctctccctggctgcctcaggcttctcttacgaagaggaaacgcaaaaaaagaaaaggaaaaaccccgtgctcgcccccttcctcctgccgtccactgcgcggcctcgtcagtcccggggctgactgtccctctcagctctgcgcctgccaggcagggcacgtgctcacagccctgggttgatttatttttttaagggggtagttttattttggtggggttgggtgggaaggaaggctgggggttttgtaaagtgtccactgctcgtcctgttaattttcctcaatttttcttcttcttccttctgtccctcctgccttccttctcttcccaagccctccaatccccatcccaggcttgctgtgtctcactgtccccaccctccttccctacttctttttttgtgtgtctggtttctcccttcctttcctccctttgggtttccagagtcggtgggagaagggcgggagggtgggcccgagtggcccagtgggtgggtggggtggggtggggcaagtgccccaactcccctcaccaggagaggcacctgcttggtgccgcccagggaaggggctcaggcctgacggaaggcctgttctgtgtgtgccgccgggcgacgtgcattgatggggaagctgctggaggagcaggggtggggggtgggagggaggggaaaggcaaatgcagatatatattacagacaaatactctagattccacgagcagcagcctgtggcacccgctgggcgcgggcagcagggaagagggagcaaggcattgtccacagactgctggggtcacttctttgcccacgggctccctgctcccccagttttttttctctctttgttaacaaatgtgtctgagtcttggaaaacaccccaaccccggaaatgtgtgggaaaaagaaaacaaaaactttccaaattcc

SEQ ID NO: 184284 - DNA, 6373 bp, Artificial Sequence
  derived and/or modified sequence
ggcgggggaggggcgccgccgccgccgcctgagggaagccggcatctgggcctctgcgcgcctcgccccgcggccgggcccatggcactgtgagcctgcaagggagccccgctcagcgcggggagcgcccggccccctcccgccccatgcgcccgcggctctgaagcctgagcgggggccgggggccgggcggggccggggccgccgtaggcatggcgtccgggagccggtggcggccgacaccgccgccgctgctgttgctgctgctgctggcgctggcggcgcgcgcggacggcctggagttcggcggcggccccgggcagtgggctcgctacgcgcgctgggcgggcgcggcgagcagcggcgagctcagcttcagcctgcgcaccaacgccacgcgcgcgctgctgctctacctggacgacggcggcgactgcgacttcctggagctgctgctggtggacggccgcctgcggctgcgcttcacgctttcgtgcgccgagccggccacgctgcagctggacacgccggtggccgacgaccgctggcacatggtgctgctgacccgcgacgcgcgccgcacggcgctggcggtggacggcgaggcccgcgccgccgaggtgcgctccaagcggcgcgagatgcaggtggccagcgacctgttcgtgggcggcatcccgcccgacgtgcgcctctcggcgcttacgctgagcaccgtcaagtacgagccgcccttccgcggcctcttggccaacctgaagctgggcgagcggccccccgcgctgctgggcagccagggcctgcgcggcgccaccgccgacccgctgtgcgcgcccgcgcgcaacccctgcgccaacggcggcctctgcaccgtgctggcccccggcgaggtgggctgcgactgcagccacacgggcttcggcggcaagttctgcagcgaagaggagcaccccatggaaggtccggctcacctgacgttaaacagcgaagtagggtccttactgttctccgaggggggggccgggagaggaggagccggcgatgtgcaccagccaacaaaaggcaaggaggagtttgtggcgaccttcaaaggcaatgagttcttctgctacgacctgtcacacaaccccatccagagcagcactgatgagatcacactggccttccgcaccctgcaacgcaacggcctgatgctgcatacaggcaagtcggccgactacgtcaacctgtccctcaagtctggggctgtctggctggtcatcaacctaggctcaggtgccttcgaggcccttgtggaacccgtcaatggcaagttcaacgacaacgcctggcacgacgtccgggtcacccgaaacctgcgccagcacgcagggattggacacgctatggtaaacaaactgcattatctggtgaccatctcggtggacgggatcctgaccaccacaggctacacgcaggaggattacaccatgctgggctctgatgacttcttctacattgggggcagccccaacacagctgacctgccgggctcgcccgtcagcaacaacttcatgggctgcctcaaggacgtggtctataagaacaatgacttcaaattggaactatcccgcctggcaaaggaaggggaccccaagatgaagctgcagggggacttgtcattccgctgtgaggatgtggctgccctggaccctgtgacctttgagagtcccgaggcctttgtggcgctgccccgctggagcgctaagcgcactggctccatctccctagacttccgcaccaccgagcccaatgggctgctgctcttcagccagggccggcgggctgggggtggagctggcagccacagctctgctcagcgggccgactactttgccatggagctattggacggccacctctatcttctgctggacatgggatctgggggcatcaagctgcgggcatccagccgcaaggtcaatgatggcgagtggtgtcacgtggacttccagagggatgggcgaaaaggctccatctcagtgaatagtcgcagcacgccgttcttggccactggagacagcgagattctggacctggagagtgagctgtacctgggcggtctccctgaggggggccgggtggacctgcccctgcccccagaggtgtggacagcagcactccgggcaggctacgtgggctgtgtgcgggacctcttcatagatgggcgtagccgagacctccggggcctggctgaggctcagggggctgtgggcgttgcccccttttgctcccgggagacgctgaagcagtgtgcatctgccccctgtcgcaatgggggcgtctgtcgagaaggctggaaccgcttcatctgtgactgcatcgggaccggctttcttgggcgggtctgtgagagagaggccacggtcctgagctacgatggctccatgtacatgaagatcatgctgcctaacgccatgcacacggaggcagaggatgtgtccctgcgtttcatgtcccagcgggcctacggactcatgatggccaccacttccagggagtctgccgacaccctacgcctggagctggatggggggcagatgaagctcactgtcaacctcgactgcctgcgcgtcggctgcgcacccagtaaaggccccgaaacgctgtttgcggggcacaagctcaatgacaatgagtggcacacggtgagggtggtccggcgtggcaagagcctgcagctgtctgtggacaacgtgactgtggagggacagatggcaggagcccatatgcggctggagttccacaacattgagacgggcatcatgacggagcggcggtttatctccgtggtgccctccaacttcatcgggcatctgagtgggctcgtgttcaatggccagccctacatggaccagtgcaaggatggtgacatcacctactgtgagctcaatgctcgctttggcctgcgtgccatcgtggccgatcccgtcaccttcaagagtcgcagcagctacctggcactcgccacgctccaagcctatgcttccatgcacctcttcttccagttcaagaccacggcccctgatgggcttcttctgttcaactcgggcaacggcaatgacttcattgtcatcgagctggtcaaggggtacatccactacgtgtttgacctggggaatggcccgtccttgatgaaggggaactcagacaaaccagtcaatgacaaccagtggcacaacgtggtggtgtccagggacccaggcaacgtgcacacgctcaagattgactcccgcactgtcacgcagcactccaatggcgcccgaaacctcgatctcaaaggggagttgtacattggcggtctgagcaagaatatgttcagcaacctgcccaagctggtggcctcccgggatggctttcagggctgcctggcctcagtggacctcaacggacgtctcccagacctcatcgccgacgccctgcaccgcattgggcaggtggagaggggctgtgatggccccagcaccacctgcactgaagagtcctgtgccaaccagggcgtctgcttgcagcagtgggatggcttcacctgcgactgcaccatgacttcctatggaggccctgtctgcaatgatcccgggaccacatacatctttgggaaggggggagcgctcatcacctacacgtggccccccaatgacaggcccagcacgaggatggatcgcctggccgtgggcttcagcacccaccagcggagcgctgtgctggtgcgggtggacagcgcctccggccttggagactacctgcagctgcacatcgaccagggcaccgtgggggtgatctttaacgtgggcacggacgacattaccatcgacgagcccaacgccatagtaagcgacggcaaataccacgtggtgcgcttcactcgaagcggcggcaacgccaccctgcaggtggacagctggccggtcaacgagcggtacccggcaggaaactttgataacgagcgcctggcgattgctagacagagaatcccctaccggcttggtcgagtagtagatgagtggctgctcgacaaaggccgccagctgaccatcttcaacagccaggctgccatcaagatcgggggccgggatcagggccgccccttccagggccaggtgtccggcctctactacaatgggctcaaggtgctggcgctggccgccgagagcgaccccaatgtgcggactgagggtcacctgcgcctggtgggggaggggccgtccgtgctgctcagtgcggagaccacggccaccaccctgctggctgacatggccaccaccatcatggagactaccaccaccatggccactaccaccacgcgccggggccgctcccccacactgagggacagcaccacccagaacacagatgacctgctggtggcctctgctgagtgtccaagcgatgatgaggacctggaggagtgtgagcccagtactggaggagagttaatattgcccattatcacggaggactccttagacccccctcccgtggccacccgatcccccttcgtgcccccgccccctaccttctaccccttcctcacgggagtgggcgccacccaagacacgctgcccccgcccgccgcgcgccgcccgccctctgggggcccgtgccaggccgagcgggacgacagcgactgcgaggagcccatcgaggcctcgggcttcgcctccggggaggtctttgactccagcctcccccccacggacgacgaggacttttacaccacctttcccctggtcacggaccgcaccaccctcctgtcaccccgcaaacccgctccccggcccaacctcaggacagatggggccacgggcgcccctggggtgctgtttgccccctccgccccggcccccaacctgccggcgggcaaaatgaaccaccgagacccgcttcagcccttgctggagaacccgcccttggggcccggggcccccacgtcctttgagccgcggaggccccctcccctgcgccccggcgtgacctcagcccccggcttcccccatctgcccacagccaaccccacagggcctggggagcggggcccgccgggcgcagtggaggtgatccgggagtccagcagcaccacgggcatggtggtgggcattgtggcggcggcggcgctctgcatcctcatcctcctctacgccatgtataagtaccgcaatcgtgatgagggctcctaccaggtggaccagagccgaaactacatcagtaactcggcccagagcaatggggcggtggtgaaagagaaggccccggctgcccccaagacgcccagcaaggccaagaagaacaaagacaaggagtattatgtctgagcccccggcactgcgccccactgccagctgcccctcctgggagggcccgggaggagggtgccaccctctccctgccaggggcctggggaccctctccctggctgcctcaggcttctcttacgaagaggaaacgcaaaaaaagaaaaggaaaaaccccgtgctcgcccccttcctcctgccgtccactgcgcggcctcgtcagtcccggggctgactgtccctctcagctctgcgcctgccaggcagggcacgtgctcacagccctgggttgatttatttttttaagggggtagttttattttggtggggttgggtgggaaggaaggctgggggttttgtaaagtgtccactgctcgtcctgttaattttcctcaatttttcttcttcttccttctgtccctcctgccttccttctcttcccaagccctccaatccccatcccaggcttgctgtgtctcactgtccccaccctccttccctacttctttttttgtgtgtctggtttctcccttcctttcctccctttgggtttccagagtcggtgggagaagggcgggagggtgggcccgagtggcccagtgggtgggtggggtggggtggggcaagtgccccaactcccctcaccaggagaggcacctgcttggtgccgcccagggaaggggctcaggcctgacggaaggcctgttctgtgtgtgccgccgggcgacgtgcattgatggggaagctgctggaggagcaggggtggggggtgggagggaggggaaaggcaaatgcagatatatattacagacaaatactctagattccacgagcagcagcctgtggcacccgctgggcgcgggcagcagggaagagggagcaaggcattgtccacagactgctggggtcacttctttgcccacgggctccctgctcccccagttttttttctctctttgttaacaaatgtgtctgagtcttggaaaacaccccaaccccggaaatgtgtgggaaaaagaaaacaaaaactttccaaattccaa

SEQ ID NO: 184285 - DNA, 5139 bp, Artificial Sequence
  derived and/or modified sequence
atggctagcggatcccggtggcggccaacgccccctcctctgctgttgttgctgcttctggcactggcagcccgagctgatggcctggaatttgggggtggtcccggtcaatgggcgcgatatgctaggtgggcaggcgcagcttcaagtggagaactgtcatttagcctgcgtactaatgcaacgcgggctctgctgttgtatctggatgacggcggtgactgtgattttctggagctgctgttagtcgacggtcggcttcgattacgctttaccctgtcctgcgctgagcccgcaacattgcaactggatactccagtggccgacgatagatggcacatggtcctactaactcgagatgcccgacggactgctctggccgtggacggggaggcacgggctgcagaagtccgttcgaaacgccgagaaatgcaagtggcttctgacctattcgtagggggtatacctccagacgtcaggttgagcgccttgactctgtcgacggtgaagtacgagccgccattccgaggattgctcgcaaatttgaaactgggagagcgacctcctgcactgttgggctcccagggactgaggggagccacagctgacccactgtgcgccccagcccgaaatccgtgtgccaatggtggtttgtgcaccgtgctcgcacctggcgaggtgggctgtgactgttcacacacaggcttcggaggcaaattctgttccgaagaagaacatccaatggagggcccagcccatctcaccctgaattctgaagtcggatccctgctctttagcgaaggcggagctggccgtggaggtgccggtgacgtccatcagccgactaaagggaaggaggaattcgtcgcaacattcaaaggcaatgagtttttctgttatgatctttcccacaacccaatacagtctagcaccgatgagatcacgttggctttccggacactccagaggaatgggctaatgttgcatacaggtaaatccgcggactacgtgaacctttcactgaaatcgggggcagtgtggcttgtcatcaatctgggatctggtgccttcgaggcactcgtggagcctgtgaatggcaagtttaacgacaatgcgtggcacgacgtgagggtgacccgcaatcttcgccaacacgccggtatcggccatgcaatggtaaataagctgcactatctcgttactatatctgtggatggcatactgacaacaactggctacacacaggaagactacactatgctggggagcgacgatttcttctacatcggagggtccccgaacactgcagaccttccagggtctccggtgagcaacaatttcatgggatgtctcaaggatgtcgtgtacaaaaacaatgacttcaaactggaactgagtcgcctggccaaagaaggcgaccccaagatgaaactgcaaggcgatttaagtttcagatgtgaggatgtcgccgctctggaccccgtcaccttcgaatccccagaggcctttgtggcactccctaggtggagcgccaagaggactggatccattagtctggacttccgtactacggaacctaatggcctgctccttttctcccagggcaggcgagccggtggaggcgctggctcccattcctctgcccaaagggctgactatttcgccatggagctgctggacggacacctgtatctattgttggatatggggagcggcggaattaaacttagggctagctcgagaaaagtgaatgatggcgagtggtgccatgtggacttccagcgggacggaaggaaggggtcgatttccgtgaatagccggtccacccctttcctggctaccggcgattccgagattctcgacctcgagtctgagctgtacttgggtggccttcccgaaggcggacgcgtagatctgcccctccctccagaggtgtggaccgccgctctccgggctggttatgtgggctgcgtacgggacctattcatagatgggaggagtagagacctgcggggactggcagaagctcagggagccgtgggcgtggcccctttttgcagcagagagactctgaagcagtgtgcctccgccccttgtagaaatggcggagtgtgtcgagagggatggaaccggttcatatgcgactgcatcggcacaggctttctcggtcgcgtgtgtgaacgtgaagctacagtgctgtcatacgatggctccatgtatatgaagatcatgctgcctaacgccatgcataccgaggcggaagacgtcagtctgagatttatgtctcaaagggcctacggacttatgatggccacaacctctcgcgaatcagctgacactcttaggttagaactggacggaggccagatgaaactgacagtcaatctcgactgtctgcgggtggggtgcgctcccagcaagggaccagaaactctttttgccggacataaattgaacgataacgaatggcacaccgtgcgcgtcgtgagacgtggtaaaagtctgcagctctccgtggacaatgtgacagtggaggggcagatggccggtgcccacatgaggttagagtttcacaacatcgaaactggtattatgactgagagacgcttcatcagtgtcgtgccatccaactttatcggtcatctgtcagggttggttttcaatggacagccctacatggaccaatgcaaagatggggacattacatattgcgaattgaacgctagattcgggctcagggcaattgtggcagaccccgtgactttcaaatcacgcagttcttacctcgccctggccaccctgcaagcatatgcctcgatgcacctgttcttccagttcaagaccaccgctccagacgggctgctcctgtttaactcaggcaatggcaatgattttatcgtcatcgaactcgttaaagggtatatacattacgtattcgatctgggtaatggcccaagcctcatgaaaggcaacagcgataagccagtgaacgacaaccaatggcacaacgtcgtagtgagtagggaccccggtaacgtccacacacttaagatcgactcccgaactgtaactcagcactcaaacggagcccgtaatctcgaccttaagggagaactctatattggaggactgtccaaaaacatgttctcaaaccttccaaagctggtggcgtcaagagatggattccagggatgcttggcctctgtcgatctgaatggcagattgcctgatttgatcgcagacgcactgcatcgcatcgggcaggtcgagcggggttgcgatgggccatcgacaacctgtacagaggaaagctgcgccaatcaaggtgtgtgcctgcagcagtgggatggtttcacatgtgactgcacaatgacatcatacgggggtccagtttgtaacgatcccggaacaacctatatcttcggtaaaggtggagcgttgataacttacacatggcctcctaatgatagaccctccacaagaatggaccgactggccgtcggcttcagtacacatcagcggagcgccgtgctcgttcgcgtcgacagtgcttcggggttgggcgattatctccaactccatatcgatcaggggaccgttggtgttatcttcaacgttggcaccgacgatatcaccatcgacgagccgaatgccatcgtgagcgacggaaagtatcacgttgtccggttcactcgatctggaggcaatgctactctacaggtcgactcttggcctgtgaacgagagataccccgcaggcaacttcgacaatgagaggttggctattgccagacagcgcattccttatagactcgggagggttgtagacgagtggctactcgataagggccgacaactgaccattttcaattcccaggccgcaatcaagattggcggtcgggatcaaggccgaccatttcaggggcaagtcagtgggttatactacaatggattaaaagtgctggccctagcagccgagagcgatcctaatgttcggacggaggggcatctgagactcgtcggggaagggccaagtgtgttgctgagcgctgaaactactgctaccacactcctagctgacatggccaccaccatcatggaaaccactacaacaatggccacaaccactactagaagggggaggtcccctacactgcgcgacagtactacgcagaacactgatgacctgctcgtggcatctgctgagtgtcccagcgacgacgaggacctggaggagtgtgagccatccaccgggggtgagctgatactacccatcatcaccgaagactctctggacccaccccctgtcgccacaaggagtccttttgtcccccctcctccgacattttatcccttcttaacaggagtcggcgcaactcaagacacactgccacctcccgctgccaggcgcccaccgtctggcggtccctgccaggccgagcgcgatgacagcgattgcgaagagccgattgaggcaagcggcttcgcatccggtgaggtcttcgactcttctctgccacctaccgatgacgaggacttttatacgaccttcccactggtaaccgataggactacacttctttccccgaggaaaccagcacctaggccaaatcttagaacggatggagcaaccggcgctccaggggtactgttcgcaccttctgcgccagctcccaacctgcccgctggaaaaatgaaccaccgcgaccccctgcagcctctattggagaacccccctctggggccaggggctccaaccagttttgagccacgaaggcctccgcctctgcgtcctggcgtgactagcgctccaggatttcctcacttgcccacagccaatccgactgggcctggcgaaaggggacctccaggcgctgtggaggtcatccgtgagtcctccagcacaacaggcatggtggtcggcattgtggctgccgcagctctctgtatattgatactgctctacgcaatgtacaagtaccgcaacagagacgagggttcctatcaggttgatcaatcacgcaactacatctctaatagcgctcagtccaatggagccgtggtgaaggagaaggccccagctgcccctaaaacccccagcaaggccaaaaaaaataaggacaaagaatactatgtgtaa

SEQ ID NO: 184286 - DNA, 5138 bp, Artificial Sequence
  derived and/or modified sequence
atggcaagtggttctagatggcgtccaacaccaccaccgctattgcttttgctcttgctggccctcgccgcaagagcagacggtctggaatttggtggtggtccgggacagtgggctcggtatgcaagatgggccggagcggcttcgagcggagaactctctttcagcctccggacaaatgccacccgagctcttctgctctacctggatgacggcggtgattgcgatttcttggaattgctgctggtcgacggtagactcagactgaggttcaccttatcatgcgcagaacccgcaacactccagctggacacgcccgtcgcagatgaccgttggcatatggtgctgctgacccgcgatgctaggagaacagcacttgccgtggatggggaagcgagggccgctgaagttagatctaagagacgggaaatgcaggtggcctcagatctatttgttggaggcataccaccggatgtgagactgtctgcactgacactttccacagtcaaatatgagccccctttccggggtcttctggctaacctgaaattaggggaaaggcccccagccttattggggagccagggactgcggggtgcaacggcagatccattgtgtgcccctgccaggaacccgtgcgccaacgggggtctatgcactgtgcttgcacccggagaggtcggttgtgactgcagccacactgggtttgggggaaagttctgcagcgaggaggagcacccaatggaaggacccgctcatttgactctaaatagcgaggtggggtcgctgctgtttagtgaaggtggggctggacgaggtggcgcaggagacgtgcaccaacccaccaaagggaaagaggagttcgtagccacgtttaaaggcaatgagtttttctgttacgacctgtcccataacccgatccagtcctccacagatgaaattactcttgcctttaggaccctgcagaggaatggcttgatgcttcatactgggaagtctgccgattatgttaacctgagtcttaagagtggggcagtgtggttggttattaacttaggaagcggagcctttgaggcgctggtcgagcctgttaatggcaagttcaacgacaatgcgtggcatgacgtaagagtgacaagaaatttgaggcagcatgccggaatcggtcatgcaatggttaataagctgcattacctggtgactatttcagtggacggtattctgactactaccgggtatactcaggaagactataccatgctcggctcggatgactttttctacatcggaggtagtcctaacactgccgacctgcccggtagcccagtgtccaacaatttcatggggtgtctgaaagatgtggtgtataaaaataacgatttcaagttggaactgtctcggctggcaaaggagggcgatcccaaaatgaagctgcagggggatctctcctttcggtgtgaagatgtggcggcattagaccccgtcacattcgagtctccggaggcattcgtcgcgctccctagatggagcgcgaaacgtactggttctatctcacttgattttcgtaccactgagcctaatggccttctgctgttctcacagggaaggcgcgctggtggcggtgctggctctcatagctccgcacagcgggcagactacttcgccatggaactgcttgacggtcatctgtacttgctgctcgacatgggctctggcggtattaagctgagggccagttccagaaaagtaaatgacggcgaatggtgccacgttgactttcaaagggatgggaggaagggtagtatctcggttaattctcgatcaaccccgtttttagctacaggtgattcagagatccttgacctggagagcgagctctatctaggcggtttgcccgaagggggacgggttgatttgcctcttccacctgaagtgtggacggccgctctccgagccggatatgtgggttgcgtgcgcgacctctttatagatgggaggagccgggacctcagggggctggccgaggcgcaaggcgctgtcggcgtcgcccctttttgttctcgagagacattaaaacagtgcgcatcagccccttgtaggaacgggggtgtatgccgtgagggctggaaccgctttatttgcgactgtatcggtaccggtttcctggggagagtgtgcgagcgggaggctaccgtgctctcctacgatgggtccatgtatatgaagataatgttgcccaacgcaatgcacacagaagctgaggatgtgtctttgagattcatgtcacagcgtgcttatggtctcatgatggcaaccacaagccgtgaatctgcagataccttgaggctggagctcgatggcggtcagatgaagctgaccgtcaaccttgattgtctccgggtagggtgcgctccttctaagggccctgaaaccctgttcgcaggacataagctcaacgacaacgaatggcatactgtgcgggtggttcgacgcggtaagtccttgcagctgtccgtggacaacgtgacagtcgaaggacagatggccggtgcccatatgcgcctagagtttcacaatattgaaactgggattatgacggagagaagatttatctccgtggttccttccaatttcatcggccatctgagtggcctggtctttaatggccagccttacatggatcagtgtaaggacggggacatcacctattgtgagcttaatgcccgtttcggcctaagagcaattgttgcagatccagtcaccttcaaaagtaggagctcttacctggccttggcaaccctgcaggcctatgcttcgatgcacctcttcttccagtttaaaacaactgctccagacggcctccttttgttcaattctggaaatggaaacgacttcattgttatcgagctggtaaagggatacatccattacgtattcgatctgggaaacggtcccagtctcatgaagggaaacagcgataagcccgtcaatgataaccagtggcacaatgtggtagtgagcagagatccaggaaacgtgcataccctgaagatcgacagccgcacagtgactcaacacagcaatggggctagaaacctggacctaaagggtgagctttacatcggagggttgtctaagaacatgttcagcaatctgcccaaacttgtcgcctctagggacggatttcaaggttgcctggcaagcgttgaccttaacggtcgcttgcccgatttgatcgcagacgcgttgcaccggattggccaggtggagcggggatgcgacggcccttccacaacctgcaccgaggagtcttgtgccaatcaaggggtgtgtctgcagcagtgggacgggttcacttgtgattgtaccatgacctcctacggagggcctgtgtgcaacgatcctggaaccacctacatctttggtaagggtggagccctcatcacttatacttggcctccaaacgatcgcccttccacacggatggacagactagctgtgggctttagcacccaccagaggagcgccgtactggtgagagtggacagtgcctctgggttgggcgactatctgcaactgcacatcgaccaaggcacagtaggtgtcatctttaacgtaggcacggatgatatcacaattgacgagcctaacgcaatcgtgtctgatgggaaatatcatgtcgtccgattcacgcgcagcggtggcaatgctactctgcaggttgactcatggccagttaacgagaggtacccagcgggaaactttgataatgagcgattagccattgcccgtcaaaggattccctaccgcttaggaagagttgttgatgaatggctgctggacaaggggagacagctcactatattcaactcccaggctgcgatcaaaatcggagggagagatcaggggaggcccttccaaggacaagttagtggcctctactataacggtcttaaagtcttggcgttggccgctgagtccgaccctaacgttaggaccgagggccacctgcgtctggtgggtgaaggacccagcgtccttcttagtgcggagacaactgctaccacgctgctggctgatatggccacgaccattatggaaaccaccactactatggctaccaccacgactagacgtgggagatccccaacactcagagactccaccactcaaaataccgacgacctgctcgtcgcttccgctgagtgtccatccgatgatgaggatctggaagaatgcgaaccctccaccgggggagagctcattctccccattatcaccgaggattcgctcgacccccctcccgtggcaacacgctcaccgttcgtcccccctccacctactttctatcctttcctcacaggcgttggcgcaactcaggatacgttaccccctcctgcagctaggaggccgcctagtggagggccttgccaggccgagagggatgattccgactgcgaagaacctattgaggcatccgggttcgcttcaggggaggtctttgattcctcgctacccccaacagacgatgaggacttctataccacatttcctctggtgactgatcgaacgaccttgctcagcccaagaaagcccgctcccagacctaatctccgcactgatggtgctactggggctcctggagtattgtttgccccttccgctccagccccaaacctccctgcaggtaagatgaatcacagagatcccctccagcctttactggagaatccgccattaggaccaggggctcctacttccttcgagccccgacgcccaccaccattgcggccaggagtgacaagcgcacccggttttcctcatttgcccactgctaaccccacaggtccgggtgagagagggcctcccggagcagtagaggtgatcagagagagttcgtctactacaggcatggtagtgggtatagtagctgctgctgctttatgcatactgatcttactttacgctatgtacaaataccggaatagggacgagggcagctatcaggtcgaccaaagtagaaactacatttcaaacagcgcacagagcaatggagcggtggtaaaagaaaaggcccctgctgcgccaaagaccccatctaaagccaaaaaaaataaggacaaggaatactacgttta

SEQ ID NO: 184287 - DNA, 5139 bp, Artificial Sequence
  derived and/or modified sequence
atggccagcggcagcagatggagacccacccccccccccctgctgctgctgctgctgctggccctggccgccagagccgacggcctggagttcggcggcggccccggccagtgggccagatacgccagatgggccggcgccgccagcagcggcgagctgagcttcagcctgagaaccaacgccaccagagccctgctgctgtacctggacgacggcggcgactgcgacttcctggagctgctgctggtggacggcagactgagactgagattcaccctgagctgcgccgagcccgccaccctgcagctggacacccccgtggccgacgacagatggcacatggtgctgctgaccagagacgccagaagaaccgccctggccgtggacggcgaggccagagccgccgaggtgagaagcaagagaagagagatgcaggtggccagcgacctgttcgtgggcggcatcccccccgacgtgagactgagcgccctgaccctgagcaccgtgaagtacgagccccccttcagaggcctgctggccaacctgaagctgggcgagagaccccccgccctgctgggcagccagggcctgagaggcgccaccgccgaccccctgtgcgcccccgccagaaacccctgcgccaacggcggcctgtgcaccgtgctggcccccggcgaggtgggctgcgactgcagccacaccggcttcggcggcaagttctgcagcgaggaggagcaccccatggagggccccgcccacctgaccctgaacagcgaggtgggcagcctgctgttcagcgagggcggcgccggcagaggcggcgccggcgacgtgcaccagcccaccaagggcaaggaggagttcgtggccaccttcaagggcaacgagttcttctgctacgacctgagccacaaccccatccagagcagcaccgacgagatcaccctggccttcagaaccctgcagagaaacggcctgatgctgcacaccggcaagagcgccgactacgtgaacctgagcctgaagagcggcgccgtgtggctggtgatcaacctgggcagcggcgccttcgaggccctggtggagcccgtgaacggcaagttcaacgacaacgcctggcacgacgtgagagtgaccagaaacctgagacagcacgccggcatcggccacgccatggtgaacaagctgcactacctggtgaccatcagcgtggacggcatcctgaccaccaccggctacacccaggaggactacaccatgctgggcagcgacgacttcttctacatcggcggcagccccaacaccgccgacctgcccggcagccccgtgagcaacaacttcatgggctgcctgaaggacgtggtgtacaagaacaacgacttcaagctggagctgagcagactggccaaggagggcgaccccaagatgaagctgcagggcgacctgagcttcagatgcgaggacgtggccgccctggaccccgtgaccttcgagagccccgaggccttcgtggccctgcccagatggagcgccaagagaaccggcagcatcagcctggacttcagaaccaccgagcccaacggcctgctgctgttcagccagggcagaagagccggcggcggcgccggcagccacagcagcgcccagagagccgactacttcgccatggagctgctggacggccacctgtacctgctgctggacatgggcagcggcggcatcaagctgagagccagcagcagaaaggtgaacgacggcgagtggtgccacgtggacttccagagagacggcagaaagggcagcatcagcgtgaacagcagaagcacccccttcctggccaccggcgacagcgagatcctggacctggagagcgagctgtacctgggcggcctgcccgagggcggcagagtggacctgcccctgccccccgaggtgtggaccgccgccctgagagccggctacgtgggctgcgtgagagacctgttcatcgacggcagaagcagagacctgagaggcctggccgaggcccagggcgccgtgggcgtggcccccttctgcagcagagagaccctgaagcagtgcgccagcgccccctgcagaaacggcggcgtgtgcagagagggctggaacagattcatctgcgactgcatcggcaccggcttcctgggcagagtgtgcgagagagaggccaccgtgctgagctacgacggcagcatgtacatgaagatcatgctgcccaacgccatgcacaccgaggccgaggacgtgagcctgagattcatgagccagagagcctacggcctgatgatggccaccaccagcagagagagcgccgacaccctgagactggagctggacggcggccagatgaagctgaccgtgaacctggactgcctgagagtgggctgcgcccccagcaagggccccgagaccctgttcgccggccacaagctgaacgacaacgagtggcacaccgtgagagtggtgagaagaggcaagagcctgcagctgagcgtggacaacgtgaccgtggagggccagatggccggcgcccacatgagactggagttccacaacatcgagaccggcatcatgaccgagagaagattcatcagcgtggtgcccagcaacttcatcggccacctgagcggcctggtgttcaacggccagccctacatggaccagtgcaaggacggcgacatcacctactgcgagctgaacgccagattcggcctgagagccatcgtggccgaccccgtgaccttcaagagcagaagcagctacctggccctggccaccctgcaggcctacgccagcatgcacctgttcttccagttcaagaccaccgcccccgacggcctgctgctgttcaacagcggcaacggcaacgacttcatcgtgatcgagctggtgaagggctacatccactacgtgttcgacctgggcaacggccccagcctgatgaagggcaacagcgacaagcccgtgaacgacaaccagtggcacaacgtggtggtgagcagagaccccggcaacgtgcacaccctgaagatcgacagcagaaccgtgacccagcacagcaacggcgccagaaacctggacctgaagggcgagctgtacatcggcggcctgagcaagaacatgttcagcaacctgcccaagctggtggccagcagagacggcttccagggctgcctggccagcgtggacctgaacggcagactgcccgacctgatcgccgacgccctgcacagaatcggccaggtggagagaggctgcgacggccccagcaccacctgcaccgaggagagctgcgccaaccagggcgtgtgcctgcagcagtgggacggcttcacctgcgactgcaccatgaccagctacggcggccccgtgtgcaacgaccccggcaccacctacatcttcggcaagggcggcgccctgatcacctacacctggccccccaacgacagacccagcaccagaatggacagactggccgtgggcttcagcacccaccagagaagcgccgtgctggtgagagtggacagcgccagcggcctgggcgactacctgcagctgcacatcgaccagggcaccgtgggcgtgatcttcaacgtgggcaccgacgacatcaccatcgacgagcccaacgccatcgtgagcgacggcaagtaccacgtggtgagattcaccagaagcggcggcaacgccaccctgcaggtggacagctggcccgtgaacgagagataccccgccggcaacttcgacaacgagagactggccatcgccagacagagaatcccctacagactgggcagagtggtggacgagtggctgctggacaagggcagacagctgaccatcttcaacagccaggccgccatcaagatcggcggcagagaccagggcagacccttccagggccaggtgagcggcctgtactacaacggcctgaaggtgctggccctggccgccgagagcgaccccaacgtgagaaccgagggccacctgagactggtgggcgagggccccagcgtgctgctgagcgccgagaccaccgccaccaccctgctggccgacatggccaccaccatcatggagaccaccaccaccatggccaccaccaccaccagaagaggcagaagccccaccctgagagacagcaccacccagaacaccgacgacctgctggtggccagcgccgagtgccccagcgacgacgaggacctggaggagtgcgagcccagcaccggcggcgagctgatcctgcccatcatcaccgaggacagcctggaccccccccccgtggccaccagaagccccttcgtgccccccccccccaccttctaccccttcctgaccggcgtgggcgccacccaggacaccctgcccccccccgccgccagaagaccccccagcggcggcccctgccaggccgagagagacgacagcgactgcgaggagcccatcgaggccagcggcttcgccagcggcgaggtgttcgacagcagcctgccccccaccgacgacgaggacttctacaccaccttccccctggtgaccgacagaaccaccctgctgagccccagaaagcccgcccccagacccaacctgagaaccgacggcgccaccggcgcccccggcgtgctgttcgcccccagcgcccccgcccccaacctgcccgccggcaagatgaaccacagagaccccctgcagcccctgctggagaacccccccctgggccccggcgcccccaccagcttcgagcccagaagacccccccccctgagacccggcgtgaccagcgcccccggcttcccccacctgcccaccgccaaccccaccggccccggcgagagaggcccccccggcgccgtggaggtgatcagagagagcagcagcaccaccggcatggtggtgggcatcgtggccgccgccgccctgtgcatcctgatcctgctgtacgccatgtacaagtacagaaacagagacgagggcagctaccaggtggaccagagcagaaactacatcagcaacagcgcccagagcaacggcgccgtggtgaaggagaaggcccccgccgcccccaagacccccagcaaggccaagaagaacaaggacaaggagtactacgtgtag

SEQ ID NO: 184288 - protein, 842 aa, Artificial Sequence
  derived and/or modified sequence
MKPGGFWLHLTLLGASLPAALGWMDPGTSRGPDVGVGESQAEEPRSFEVTRREGLSSHNELLASCGKKFCSRGSRCVLSRKTGEPECQCLEACRPSYVPVCGSDGRFYENHCKLHRAACLLGKRITVIHSKDCFLKGDTCTMAGYARLKNVLLALQTRLQPLQEGDSRQDPASQKRLLVESLFRDLDADGNGHLSSSELAQHVLKKQDLDEDLLGCSPGDLLRFDDYNSDSSLTLREFYMAFQVVQLSLAPEDRVSVTTVTVGLSTVLTCAVHGDLRPPIIWKRNGLTLNFLDLEDINDFGEDDSLYITKVTTIHMGNYTCHASGHEQLFQTHVLQVNVPPVIRVYPESQAQEPGVAASLRCHAEGIPMPRITWLKNGVDVSTQMSKQLSLLANGSELHISSVRYEDTGAYTCIAKNEVGVDEDISSLFIEDSARKTLANILWREEGLSVGNMFYVFSDDGIIVIHPVDCEIQRHLKPTEKIFMSYEEICPQREKNATQPCQWVSAVNVRNRYIYVAQPALSRVLVVDIQAQKVLQSIGVDPLPAKLSYDKSHDQVWVLSWGDVHKSRPSLQVITEASTGQSQHLIRTPFAGVDDFFIPPTNLIINHIRFGFIFNKSDPAVHKVDLETMMPLKTIGLHHHGCVPQAMAHTHLGGYFFIQCRQDSPASAARQLLVDSVTDSVLGPNGDVTGTPHTSPDGRFIVSAAADSPWLHVQEITVRGEIQTLYDLQINSGISDLAFQRSFTESNQYNIYAALHTEPDLLFLELSTGKVGMLKNLKEPPAGPAQPWGGTHRIMRDSGLFGQYLLTPARESLFLINGRQNTLRCEVSGIKGGTTVVWVGEV

SEQ ID NO: 184289 - DNA, 2529 bp, Artificial Sequence
  derived and/or modified sequence
atgaaacccggtgggttttggctccacctgacactgttaggggcatctcttcctgccgcactcggttggatggatccgggaacatctaggggcccagatgtgggtgtgggagagagccaggctgaggaaccacggagtttcgaagtgaccagaagagaggggctgtcgtctcacaacgagctgttagcaagctgcgggaagaaattttgttctagaggaagtcggtgtgtcctgtcgcgtaaaaccggagaacctgagtgtcaatgcctcgaggcttgtcgcccaagctacgtccctgtgtgtgggtccgacggacgcttctacgagaaccactgcaaacttcaccgtgctgcgtgtttgcttggtaagagaataaccgtgatccattcaaaagactgctttctgaagggggatacttgtactatggccggatacgcccgtctgaagaatgtgctgctggccctccagaccagactgcagcccttgcaggaaggggattctagacaggatcctgcctcacaaaagcgcctcttggtggaatccctcttccgtgatctagacgccgatggaaacgggcaccttagctctagcgagctcgcgcagcacgtgctgaagaaacaggacctggacgaggacttactagggtgtagccctggggacctactccggttcgacgattataattctgattccagcctcaccctgagagagttctatatggcctttcaggtcgtgcagttaagcctggccccagaagatcgcgtctctgtcaccaccgtcaccgtcggactgagtacagtcctgacttgcgccgtccatggggatcttagacctcccatcatttggaagcgaaacggcctaaccctgaatttcctggacctggaagacattaatgattttggggaggacgattcactctatattacaaaggtcactacaatccacatgggcaactacacctgccacgcatctggccatgaacagctgttccagactcatgtgctccaggtgaatgtgcccccagtgatccgtgtgtaccccgaatctcaggcgcaggaacccggagtcgcagcgtccttacggtgccatgcagagggcattcctatgcctagaatcacatggctgaaaaacggtgtggatgtctctacccagatgagcaaacagctgtccctcctggcgaacggctccgagttgcacattagtagcgtacgttatgaagacactggagcgtatacatgtattgcaaaaaacgaggtcggggtcgacgaggacatctcatccctcttcatcgaagacagcgcgcgaaaaacactagccaatatcctctggcgagaagaaggtctaagcgtgggcaacatgttttacgtgttttccgacgatggcatcattgtgattcatcctgttgactgcgaaattcaaagacatctgaagcctaccgagaaaatcttcatgtcatatgaggaaatctgcccgcagagggagaagaatgctacccagccatgtcagtgggtctccgccgtcaacgttcgaaatcgctacatctacgtggcacagcccgcactctccagggttcttgttgtagatattcaggcgcagaaggtcctacagagcataggggttgaccctcttcccgctaagttgtcatacgataaatcacatgaccaagtgtgggtactaagctggggcgacgtccataagagtaggcccagcttgcaggtaatcaccgaagcttctacgggccaaagccaacacttgatcagaacacctttcgccggagtggacgattttttcatcccacctactaatctgatcataaatcacatccggttcggttttatttttaacaagagcgacccggcagtccataaggtggatctagaaaccatgatgccactcaagacaatcggcctgcatcaccacggatgcgtacctcaggcaatggctcatacccacttagggggttatttttttatccagtgtcggcaggactcacccgcttccgcagcaagacagctgcttgtggattctgtcaccgactctgttctgggacccaatggggacgtgaccggcacccctcatacttccccagacgggcgttttatagtgtcggctgctgctgattcgccgtggcttcatgttcaagagataacagtaagaggggaaattcagaccctctatgatctgcagattaatagcggcatatctgatcttgcttttcagagatctttcacagagtcaaaccagtacaatatatacgctgccctacacaccgagcctgatctactgttcttggaactgtccacgggaaaggtgggaatgctcaaaaatcttaaagagcctcccgcaggaccagcacagccctggggcggaactcatagaattatgcgcgatagtggcctgttcggacaatacttactgacccccgcacgtgagagcttgtttttaataaacggccgtcaaaatacgttaagatgcgaagtgtccgggattaaaggtggaacaacggttgtttgggtcggcgaggtgtag

SEQ ID NO: 184290 - DNA, 2022 bp, Artificial Sequence
  derived and/or modified sequence
atgaaacctggcggattttggctgcatctgactctgctgggggctagtttacccgctgccttagggtggatggatcctggtacatcccggggtcctgacgttggtgtgggcgagtctcaggcggaggaacccaggtcgtttgaagttacaaggcgtgaaggtctaagttctcacaacgagctgctggccagttgtgggaagaagttctgtagccgcggatcccggtgtgtactctccctggctcctgaggaccgggtgtccgtgaccactgttaccgtggggctgtccactgttctcacctgtgcggtgcatggagatctcaggccccctattatctggaagcgcaatggccttacactgaactttctggatctggaagacatcaatgactttggcgaagatgattcactctatatcacgaaagtgacgacaatccacatgggcaactatacatgccatgcttccggccacgagcagctgttccaaacacatgtactgcaggtcaacgtcccccctgtgataagagtttacccagagagccaggcgcaggaacccggtgtggccgcttctctgcgttgccacgccgaagggattcccatgcctcggataacttggctgaaaaacggagtagacgtgtccacccagatgtccaagcaactatctctgctcgcaaacggtagcgagctacacatctcgtccgttcgatatgaggatacaggtgcctatacttgtatcgctaagaacgaggttggagtcgacgaggacatcagcagtctttttattgaagatagtgcaagaaagaccctcgcgaacatcctttggagggaagagggcctgtccgtcgggaacatgttttacgtattttccgacgatggcataatagtgatccaccctgtggactgcgaaatccagcggcatcttaagcccaccgaaaagatctttatgtcctacgaggagatttgcccccagcgggagaaaaatgcaacccagccttgccagtgggtcagcgctgtgaacgtgcggaaccgatatatttacgtcgcccagccagcactatcccgcgtgctggtggtggacatccaggcacagaaggtcttgcagagtattggagttgatccgctcccagctaagttgagttacgacaagtcccacgaccaagtatgggtgcttagttggggagacgtacataagtctagaccttctctccaggtgatcacagaggcaagtacaggccagtcacaacatctcataaggaccccgttcgcaggcgtagatgactttttcattcctcctaccaatttgatcattaaccacattcgatttggcttcatcttcaacaagtctgaccccgctgtgcacaaggtggatctcgaaaccatgatgcctcttaagacgattgggctgcaccatcacggttgcgtacctcaggccatggctcacacccatctaggtggatatttttttatacaatgccggcaagacagccccgcatccgcggctagacagctcctggtcgacagcgtgactgatagcgtcttggggcctaatggcgatgtgacaggtaccccccacacgagcccggatggcagattcatcgtcagcgcagcggcagattctccttggttgcacgtgcaggagataactgtcaggggagagatccagacactctacgacctccagatcaacagcggtatcagtgaccttgcctttcagcgtagcttcaccgaaagcaatcagtacaatatctatgcagccctccataccgagcccgacctgctattcttagagctgagcacaggtaaagtgggtatgctgaagaatttgaaggagcctcctgctggccctgcacagccttggggtggaacccacaggataatgcgggatagcgggctttttggccagtatctattaacccctgccagagagagtttattcctcattaacggacgccaaaatactctgcggtgtgaagtcagtggcattaagggcggaactaccgtggtttgggtgggcgaggtctag

SEQ ID NO: 184291 - DNA, 2529 bp, Artificial Sequence
  derived and/or modified sequence
atgaagcctggtggtttttggctccacctgacactactcggagcatccttaccagcagccctcggatggatggatccaggcacttctaggggtcctgacgtgggcgtgggagagtcacaggcagaagaacccaggtcattcgaagtgacccggagggaaggtctgtccagccataatgagctccttgcatcttgcggcaaaaagttctgctcccggggaagtagatgcgtgttgtctcggaaaacaggggaaccagagtgccaatgtcttgaagcctgtaggccatcatacgtccctgtttgtggaagcgacggccgcttctatgagaaccactgcaagctgcaccgagccgcttgtcttttggggaagcgcattacagtgattcactccaaagactgtttccttaaaggagacacctgtaccatggcaggttatgcccgtctgaaaaacgtactgttagcactgcagactcggctccagcccctgcaggagggcgacagtaggcaagatcctgcctcccaaaagagactgctcgtggagtctctgtttcgcgatctggacgctgatggaaatggtcacttgagcagttccgaactggcacaacacgttttgaagaagcaggatctggatgaggacctgctgggatgtagcccaggcgatttgctcagattcgacgattataactccgactcatctctgacactccgcgaattttacatggcatttcaggtagttcagttatctctcgctccagaagacagggtgagcgtcacaactgtgaccgtggggctgtccaccgtccttacgtgcgccgtgcatggcgatctgcgtccacccatcatctggaaaaggaatgggctcactctcaattttctggacctcgaagatatcaacgatttcggcgaggatgactctctatatattaccaaagttaccacaatccatatgggaaactacacctgccacgcctcaggccatgaacaactgtttcagactcatgtgctacaagtcaacgtaccaccggtgatcagagtgtaccctgaatctcaggcacaggagcctggggtggccgcaagtctgagatgtcacgcagaaggtataccgatgccccgaatcacttggctcaagaatggcgtcgacgtttccactcagatgagcaaacagctgtccctgctggctaatggctccgagctccacatctccagtgttcggtacgaagacaccggagcctacacgtgtatcgccaagaacgaggttggcgtggacgaggacatcagctcattgttcatcgaggattctgctcgtaagacgcttgcaaacattttatggagggaggagggattgtcagtggggaacatgttttatgtcttctctgacgacggtatcatagtgatccatcccgtggactgtgagatccaaaggcatctcaagcccacagaaaaaattttcatgagttacgaagaaatctgcccccagcgcgagaagaacgctacgcagccatgccagtgggtgtcagctgtcaatgttcggaatcggtacatttatgtggcccagccagccctctcccgggtgctcgtggtggacattcaggcccagaaggtgttgcaatctatcggcgtcgaccccctgcctgcaaagttgtcttacgataaatcacacgatcaggtatgggtgctttcttggggagatgtacacaaaagccgaccaagcctccaggtcattaccgaagcctcaactggacaatctcagcatctaataagaaccccctttgcgggggtggacgatttctttattcccccaactaacctgattattaatcatatccggttcgggtttatattcaacaaaagcgaccctgcagtgcataaggtcgatcttgagacaatgatgccattaaagacaatcggcttacaccaccacgggtgcgtgccgcaggcgatggcccacacccacctgggtggatacttttttattcagtgcagacaggactctcccgcctcagcagcccgccagctcctggtcgattcggtgacagattctgtccttggtcccaatggcgacgtgaccggaacgcctcacacatcccccgacggacgcttcatcgtgtctgccgcagccgacagcccatggttgcacgtgcaagaaattaccgttaggggagagatccagaccttgtatgacctgcagatcaatagcggaatcagcgaccttgcctttcagcgctccttcaccgaatccaatcagtacaatatttacgctgccctgcacactgagccagatctcctgttcctcgagttaagcacaggtaaggtaggcatgttaaagaacctgaaggaacccccggcgggccctgctcagccatggggcggtacccacaggataatgagagactcggggctgtttggtcagtatttactcacacctgcaagggagagcctttttctcatcaatggcaggcagaatacccttcgatgtgaagtgagcggcattaagggtggcactaccgtggtatgggtcggtgaagtctag

SEQ ID NO: 184292 - DNA, 2022 bp, Artificial Sequence
  derived and/or modified sequence
atgaagcccggtgggttctggctgcacctgacgctgctcggcgccagtctgcctgccgccctgggatggatggaccccggaacctcccgtggacctgacgtcggcgttggagagtcccaagccgaagagccaagatctttcgaagtgacgcgaagggagggcctgtctagccacaacgaactgctggcgagctgcgggaaaaagttttgcagccgcgggtctagatgtgtgctttccttggcccccgaagaccgagtgagcgtgaccactgtcactgttggactgagcaccgttttaacatgtgctgtacatggcgacctgagacccccaatcatctggaagcgcaacggcctgaccctgaactttctggatctcgaggatattaacgatttcggagaggatgattctctgtacatcacaaaagtaactaccatccatatgggaaactacacttgtcatgccagcgggcacgagcagctgtttcaaacccatgtgctgcaggtgaacgtgccccctgtgattcgggtgtaccctgagtctcaagcacaagaacccggggttgctgcctcccttaggtgtcacgccgagggaattcctatgcccaggattacctggcttaagaatggagtcgacgtgagtacacagatgagcaagcaactttcactgttggctaacggatccgaactgcacatctcttctgtgaggtatgaggacaccggggcctatacttgtattgctaagaatgaggtcggggtcgacgaggatatctcttccctttttatagaggactctgctcgcaaaacgctggctaacatcctttggcgtgaagaaggattgagtgtcggcaacatgttctatgtcttttctgatgatgggatcatcgtgatccaccctgttgattgcgagatccagagacaccttaagcccacggagaaaatttttatgagttatgaagagatctgcccgcaacgtgaaaagaacgcgacccagccatgtcaatgggtgagtgcagttaacgtaaggaacagatacatttacgtggcacagcccgcactgagtcgcgtgcttgtcgtcgatatccaagctcagaaggtgctgcagtctataggggttgaccccttgcccgctaaactctcatacgacaaatcgcacgatcaagtctgggtgttaagctggggcgacgttcacaaaagccgtccctccctccaggtgattacagaagcatccactggacagagtcagcatctgattcgaaccccatttgcgggagtggatgatttctttatcccccctacaaacctgataattaatcacatccgatttggatttatcttcaataaaagtgatcccgctgtgcataaggtcgatctggagacaatgatgcccctgaagacgatcggccttcatcatcatggatgcgtgccccaggctatggctcacacacacctaggtggttatttcttcatccaatgtagacaagacagccccgcgtccgccgcccgacagcttctcgtggacagcgtgactgattcggtcctcggacctaacggcgatgtgacaggaaccccccatacatctcctgatgggaggtttattgtgagtgcagccgccgactcaccttggctccatgtacaggaaatcacagtgaggggtgaaatccagacattatacgacctgcagatcaactcgggtatttccgacctggcctttcaacgtagtttcaccgaatccaatcaatataacatctacgctgcactccatacagagcctgaccttctcttcttggaactgtccactggcaaggttggaatgctcaagaacttgaaggagcctcctgccggccccgcacagccatgggggggcacacatagaattatgagagactctggactctttggccagtaccttctgactcctgcaagagagagtttattccttattaatggtagacagaacacactgaggtgtgaagtaagtggtataaagggtgggaccacagtggtttgggtcggcgaggtgtag

SEQ ID NO: 184293 - DNA, 2529 bp, Artificial Sequence
  derived and/or modified sequence
atgaagccgggcggtttctggctgcatttaaccctcttaggggcttccttaccagcagcactcggatggatggatcccggaacatctaggggtcccgatgtgggcgtcggcgagtctcaggccgaagagcctaggagtttcgaagtgacaagaagggaggggctgtcttctcataatgagttgcttgcaagctgtggcaaaaaattctgtagtagaggatcccgatgcgtgctcagtagaaaaaccggagaaccagagtgccaatgtctcgaagcatgccgcccctcttacgttccagtgtgcggaagcgacggaagattttacgagaatcactgcaaactgcacagggccgcttgtctactaggaaagcggattacagtaatacacagcaaagactgcttcctgaaaggggatacttgcactatggccgggtatgctagactcaaaaatgttctgcttgctttgcagactagacttcagccgcttcaagagggggatagccgtcaggatcctgcaagccagaaacgacttctcgtggagagcctttttagggacctggatgccgatggcaatggccaccttagtagcagcgaactcgctcagcatgtgttaaagaagcaggatctagacgaagacttgctaggctgctccccaggcgatctgttaagatttgacgactacaattcagacagctcactgactctccgcgagttctatatggctttccaggtagtacaactgtcattagcaccagaggacagggtatctgtcacaaccgtgactgtaggattgtctaccgttttgacatgtgctgtgcacggcgaccttaggcctcccataatctggaagaggaacggacttacattaaacttcctcgatttagaagatattaatgactttggcgaggacgatagcctgtatataaccaaagtgaccacaattcatatgggtaactacacatgccatgcctcgggacacgaacagctctttcagactcacgtgcttcaggttaacgtccctccagtcatcagggtctatcccgaatctcaagcccaggaacccggagttgccgcatcactgaggtgtcatgcagaagggataccgatgcccaggatcacctggcttaagaatggtgtagacgtatccactcagatgagtaaacaattgtcccttctcgcaaatggaagtgagctccacatttcgtctgttagatacgaggacacaggcgcctacacttgcattgcaaaaaatgaagtcggcgtggacgaagatataagctcactgttcattgaggacagcgcaagaaagacactggctaacatcctttggcgcgaggaggggctctctgtaggtaatatgttctatgtgttctccgacgatggtatcatcgtgattcatcccgtcgactgcgaaatacagaggcacctaaaaccaaccgaaaaaatatttatgtcttacgaggagatttgcccccaacgagaaaagaatgccacccaaccttgccagtgggtgtcagctgtcaatgttcggaatcggtacatttatgtggcccagccagccctctcccgggtgctcgtggtggacattcaggcccagaaggtgttgcaatctatcggcgtcgaccccctgcctgcaaagttgtcttacgataaatcacacgatcaggtatgggtgctttcttggggagatgtacacaaaagccgaccaagcctccaggtcattaccgaagcctcaactggacaatctcagcatctaataagaaccccctttgcgggggtggacgatttctttattcccccaactaacctaattattaaccatattcgctttggctttatttttaacaagtccgaccctgccgtgcataaggtcgatctggaaactatgatgccacttaagactatcgggcttcaccaccacgggtgcgtgccccaggcaatggcccacacccacctgggaggatactttttcatccaatgccgccaggactcacccgcctccgcagccagacaattgttggtagactcagtcaccgactccgtcctcggaccaaatggcgatgtcaccggcactccccatacttcaccagacggcagattcatcgtgtccgctgcggccgattcgccatggcttcacgttcaggaaataacagtacggggtgaaatccaaacattatacgatctgcaaattaattccggcatcagcgatctcgcattccagagaagtttcacagagagcaatcagtataacatatacgccgccctgcacaccgagccagacctcctttttttggagctatcaacaggaaaggtcgggatgctgaaaaacctcaaagagccaccagccggaccagcccagccatggggaggcactcataggattatgcgggattctggactttttggccagtatttactaacaccagctcgcgaatcactgtttctcataaatggaaggcaaaataccctgcggtgcgaagtgtctggaatcaaaggcggaaccactgttgtgtgggtgggagaggtttag

SEQ ID NO: 184294 - DNA, 2022 bp, Artificial Sequence
  derived and/or modified sequence
atgaagcccggaggattctggctacatttaactctgttgggtgcctcactccctgcagcacttggctggatggaccccggaacttcacgcggccctgacgtgggagtcggagagtctcaagccgaggagccacgaagttttgaagtaacaaggagagagggacttagtagccacaacgagctcctggccagctgtggtaagaagttctgtagtcgcgggtctcgatgtgttctgtccctggctcctgaagatcgtgtgtcagttaccaccgtcactgtaggtctgagtaccgtgctaacatgcgccgtgcacggcgaccttcggcccccaatcatctggaaacgcaacggactgaccctgaactttctcgacctggaagacatcaacgatttcggtgaagacgacagcttgtatatcacaaaggtaaccacaatacacatgggtaactacacatgtcacgcgtctgggcacgagcagctctttcaaacacacgtactgcaggtgaatgtccctccggtgatcagggtataccccgagtctcaggcacaggagccaggcgttgccgcttcattacgttgtcacgcagaaggcatcccgatgccaagaatcacatggttaaagaacggggtggatgtaagcactcagatgtcaaagcagcttagtctgttggccaatggctccgaattgcacatttccagcgtgcgatatgaagataccggggcgtatacttgtattgctaagaacgaagtgggtgttgatgaggacataagcagtctgtttatcgaggatagtgcacgcaaaacacttgctaacattttgtggagggaggaagggctatctgtcggaaacatgttctacgtattttcggacgatgggatcatcgtaatacatccggtggactgtgaaatacaaagacatctaaagcccaccgaaaagatttttatgtcatatgaagagatttgtcctcaacgggagaagaacgcaactcagccctgccaatgggtgagcgccgtgaatgtgcggaacagatacatatatgtagcgcagccagctctgtctagagtcctagtcgtcgatatacaggcccagaaagtgctacaatccataggcgttgatcctttgcccgctaaattaagctacgataaatcccatgatcaggtttgggtcctctcttggggggacgtgcacaagtcaagaccttcactgcaggtgatcacagaagccagcaccggtcagtctcagcatctcattagaaccccattcgccggcgtcgatgattttttcatccccccgacaaatttgattattaaccacattcggttcggatttatttttaacaaatcggaccccgctgtccacaaggtagatctggaaacaatgatgcccctaaaaaccatcggattgcaccaccacggctgcgtgcctcaagcaatggcacatacacacttaggaggttacttcttcatccagtgcagacaggatagtcctgcaagtgctgcacgtcaacttctggtcgattcagtcactgatagtgtgctcggaccaaacggcgacgtcactgggaccccgcacacctccccggatgggcgtttcatcgtgagtgcagctgcagatagcccctggttgcacgtgcaggaaattactgtcagaggtgaaattcagacactctacgacttgcagattaactccggaatctccgatctggcgttccaacggtccttcaccgagtctaaccaatacaacatatatgccgccctacatactgaacccgacctgctattcctggagctgagcactggaaaggttggaatgctcaagaacttgaaggagcctcctgccggccccgcacagccatgggggggcacacatagaattatgagagactctggactctttggccagtaccttctgactcctgcaagagagagtttattccttattaatggtagacagaacacactgaggtgtgaagtaagtggtataaagggtgggaccacagtggtttgggtcggcgaggtgtag

SEQ ID NO: 184295 - DNA, 5419 bp, Artificial Sequence
  derived and/or modified sequence
tcacgggctccggtcccggcggcagaaatagggcagccgcggcggcggtggcacagcagcgggcagcggcggctcagggagctggagcctcaacagcctccagcgagcccgggacccgccgacagcccgagaaaccagccgaaggacgcggggcggggtcgccgccgccgccacggggtgctccctccctcccgcccaagtccggccacctggtcttcccctcggccccggccgtctcagactcatcaaaatgaaaccaggaggcttttggctgcatctcacactgctcggagcctccctgccggctgcgctgggatggatggacccaggaaccagcagaggcccggatgtgggtgtgggggagtcacaggcagaggagcccagaagctttgaagtcacaagaagagaagggctttccagccacaacgagctgctggcctcctgcgggaagaagttctgcagccgagggagccggtgcgtgctcagcaggaagacaggggagcccgaatgccagtgcctggaggcatgcaggcccagctacgtgcctgtgtgcggctctgatgggaggttttatgaaaaccactgtaagctccaccgtgctgcttgcctcctgggaaagaggatcaccgtcatccacagcaaggactgtttcctcaaaggtgacacgtgcaccatggccggctacgcccgcttgaagaatgtccttctggcactccagacccgtctgcagccactccaagaaggagacagcagacaagaccctgcctcccagaagcgcctcctggtggaatctctgttcagggacttagatgcagatggcaatggccacctcagcagctccgaactggctcagcatgtgctgaagaagcaggacctggatgaagacttacttggttgctcaccaggtgacctcctccgatttgacgattacaacagtgacagctccctgaccctccgcgagttctacatggccttccaagtggttcagctcagcctcgcccccgaggacagggtcagtgtgaccacagtgaccgtggggctgagcacagtgctgacctgcgccgtccatggagacctgaggccaccaatcatctggaagcgcaacgggctcaccctgaacttcctggacttggaagacatcaatgactttggagaggatgattccctgtacatcaccaaggtgaccaccatccacatgggcaattacacctgccatgcttccggccacgagcagctgttccagacccacgtcctgcaggtgaatgtgccgccagtcatccgtgtctatccagagagccaggcacaggagcctggagtggcagccagcctaagatgccatgctgagggcattcccatgcccagaatcacttggctgaaaaacggcgtggatgtctcaactcagatgtccaaacagctctcccttttagccaatgggagcgaactccacatcagcagtgttcggtatgaagacacaggggcatacacctgcattgccaaaaatgaagtgggtgtggatgaagatatctcctcgctcttcattgaagactcagctagaaagacccttgcaaacatcctgtggcgagaggaaggcctcagcgtgggaaacatgttctatgtcttctccgacgacggtatcatcgtcatccatcctgtggactgtgagatccagaggcacctcaaacccacggaaaagattttcatgagctatgaagaaatctgtcctcaaagagaaaaaaatgcaacccagccctgccagtgggtatctgcagtcaatgtccggaaccggtacatctatgtggcccagccagcactgagcagagtccttgtggtcgacatccaagcccagaaagtcctacagtccataggtgtggaccctctgccggctaagctgtcctatgacaagtcacatgaccaagtgtgggtcctgagctggggggacgtgcacaagtcccgaccaagtctccaggtgatcacagaagccagcaccggccagagccagcacctcatccgcacaccctttgcaggagtggatgatttcttcattcccccaacaaacctcatcatcaaccacatcaggtttggcttcatcttcaacaagtctgatcctgcagtccacaaggtggacctggaaacaatgatgcccctcaagaccatcggcctgcaccaccatggctgcgtgccccaggccatggcacacacccacctgggcggctacttcttcatccagtgccgacaggacagccccgcctctgctgcccgacagctgctcgttgacagtgtcacagactctgtgcttggccccaatggtgatgtaacaggcaccccacacacatcccccgacgggcgcttcatagtcagtgctgcagctgacagcccctggctgcacgtgcaggagatcacagtgcggggcgagatccagaccctgtatgacctgcaaataaactcgggcatctcagacttggccttccagcgctccttcactgaaagcaatcaatacaacatctacgcggctctgcacacggagccggacctgctgttcctggagctgtccacggggaaggtgggcatgctgaagaacttaaaggagccacccgcagggccagctcagccctgggggggtacccacagaatcatgagggacagtgggctgtttggacagtacctcctcacaccagcccgagagtcactgttcctcatcaatgggagacaaaacacgctgcggtgtgaggtgtcaggtataaagggggggaccacagtggtgtgggtgggtgaggtatgaagggcccagagcagagccctgggccaaggaacaccccctagtcctgacactgcagcctcaagcaggtacgctgtacatttttacagacaaaagcaaaaacctgtactcgctttgtggttcaacactggtctccttgcaagtttcctagtataaggtatgcgctgctaccaagattggggttttttcgttaggaagtatgatttatgccttgagctacgatgagaacatatgctgctgtgtaaagggatcatttctgtgccaagctgcacaccgagtgacctggggacatcatggaaccaagggatcctgctctccaagcagacacctctgtcagttgccttcacatagtcattgtcccttactgccagacccagccagactttgccctgacggagtggcccggaagcagaggctgaccaggagcaggggcctccctcccgaactgaaagcccatccgtcctcgcgtgggaccgcatcttctccctcgcagctgcttcttgcttttctttccatttgacttgctgtaagcctgagggagagccaacaagacttactgcatcttgggggatggggaaatcactcactttattttggaaatttttgattaaaaaaaaattttataatctcaaatgctagtaagcagaaagatgctctccgaggtccaactatatccttccctgccttaggccgagtctcgggggtggtcacaaccccacatcccacagccagaaagaacaatggtcatctgagaatactggccctgtcgactattgccaccctgcttctccaagagcagaccaggccacctcatccgtaaggactcggttctgtgttgggaccccaaaaaaccagaacaagttctgtgtgcctcctttcagcacagaagggagacatctcattagtcaggtctggtaccccagattcagggcagactgggcttgcctggcaaggtatgggtggcctccaggctcaatgcagaaaccccaaggacacgagtggggccaggtgagttcctgaagctataccttttcaaaacagattttgttttcctacctgtggcccatccactcctctctggtaccccatccccgcatcagcactgcagagagaacacatttcggcgagggttttcttacccacattccccaatcaatacacacacactgcagaacccagaacagaaggccacaggctggcactactgcattctccttatgtgtctcaggctgtggtgactctcacatgggcatcgaagaagtacaacccacatagccctctggagaccgcctagatcagagactcagcaaaaacaggctcgccttccctctcccacatatgagtggaacttacatgtgtcctggtttgaatgatcattttgcaagccacacgggttgggagaggtggtctcaccacagacgtctttgctaatttggccaccttcacctactgacatgaccaggattttcctttgccattaaggaatgaactctttcaaggagaggaaaccctagactctgtgtcactctcaacacacacagctcctttcactcctgcctgactgccaagccacctgcatcccccgccccagatctcatgagatcaatcacttgtatgtctcacgcaacttggtccaccaaacgcctgtcccctgtaactcctaggggtgcgcctagacaggtacgtctgttttttattttaaaagatatgctatgtagatataagttgaggaagctcacctcaaaagcctagaatgcagtttcacagtagctgggatgcatggatgacccatctcacccctttttttttcctgcctcaatatcttgatatgttatgtttactcccaatctcccatttttaccactaaaattctccaactttcataaacttttttttggaaaaatttccattgtatcagcccctgacagaaaaaggatctctgagcctaaaggaggaaaagtcccaccaactaccagaccagaacacgagcccctctgggcagcaggattcctaagtcaaagaccagtttgacccaaactggccttttaaaataatcaggagtgacagagtcaacttctgcagcacctgcttctcccccactgtcccttccatcttggaatgtgtctaaaaaagcatagctgccctttgctgtcctcagagtgcatttcctggagacggcaggcttaggtctcactgacagcatgccagacacaactgaatcgaagcaggcctgaagcctaggtcagggtttcaggagtccagccccaggaggcaaagtcaccaatgcagggaggtaaatgccttttggcaggaaaaccaatagagttggttgggtggggagtcaggggtgggaggagaaggaggaagaggaggaaggccagactggcctgccctttctcccatacttcaccccagcagaggttcatgggacacagttggaaagccactgggaggaaatgcctcactacaggggggcctcctgtagcaagcccagccggtaatcctcctaatgaacccacaaggtcaattcacaactgatatcttagctattaaagaagtactgactttaccaaaagaatcatcaagaaagctatttatataaaccccctcagtcattttgaaataaaattaattttacaaaaa

SEQ ID NO: 184296 - DNA, 2529 bp, Artificial Sequence
  derived and/or modified sequence
atgaagcccggcggcttctggctgcacctgaccctgctgggcgccagcctgcccgccgccctgggctggatggaccccggcaccagcagaggccccgacgtgggcgtgggcgagagccaggccgaggagcccagaagcttcgaggtgaccagaagagagggcctgagcagccacaacgagctgctggccagctgcggcaagaagttctgcagcagaggcagcagatgcgtgctgagcagaaagaccggcgagcccgagtgccagtgcctggaggcctgcagacccagctacgtgcccgtgtgcggcagcgacggcagattctacgagaaccactgcaagctgcacagagccgcctgcctgctgggcaagagaatcaccgtgatccacagcaaggactgcttcctgaagggcgacacctgcaccatggccggctacgccagactgaagaacgtgctgctggccctgcagaccagactgcagcccctgcaggagggcgacagcagacaggaccccgccagccagaagagactgctggtggagagcctgttcagagacctggacgccgacggcaacggccacctgagcagcagcgagctggcccagcacgtgctgaagaagcaggacctggacgaggacctgctgggctgcagccccggcgacctgctgagattcgacgactacaacagcgacagcagcctgaccctgagagagttctacatggccttccaggtggtgcagctgagcctggcccccgaggacagagtgagcgtgaccaccgtgaccgtgggcctgagcaccgtgctgacctgcgccgtgcacggcgacctgagaccccccatcatctggaagagaaacggcctgaccctgaacttcctggacctggaggacatcaacgacttcggcgaggacgacagcctgtacatcaccaaggtgaccaccatccacatgggcaactacacctgccacgccagcggccacgagcagctgttccagacccacgtgctgcaggtgaacgtgccccccgtgatcagagtgtaccccgagagccaggcccaggagcccggcgtggccgccagcctgagatgccacgccgagggcatccccatgcccagaatcacctggctgaagaacggcgtggacgtgagcacccagatgagcaagcagctgagcctgctggccaacggcagcgagctgcacatcagcagcgtgagatacgaggacaccggcgcctacacctgcatcgccaagaacgaggtgggcgtggacgaggacatcagcagcctgttcatcgaggacagcgccagaaagaccctggccaacatcctgtggagagaggagggcctgagcgtgggcaacatgttctacgtgttcagcgacgacggcatcatcgtgatccaccccgtggactgcgagatccagagacacctgaagcccaccgagaagatcttcatgagctacgaggagatctgcccccagagagagaagaacgccacccagccctgccagtgggtgagcgccgtgaacgtgagaaacagatacatctacgtggcccagcccgccctgagcagagtgctggtggtggacatccaggcccagaaggtgctgcagagcatcggcgtggaccccctgcccgccaagctgagctacgacaagagccacgaccaggtgtgggtgctgagctggggcgacgtgcacaagagcagacccagcctgcaggtgatcaccgaggccagcaccggccagagccagcacctgatcagaacccccttcgccggcgtggacgacttcttcatcccccccaccaacctgatcatcaaccacatcagattcggcttcatcttcaacaagagcgaccccgccgtgcacaaggtggacctggagaccatgatgcccctgaagaccatcggcctgcaccaccacggctgcgtgccccaggccatggcccacacccacctgggcggctacttcttcatccagtgcagacaggacagccccgccagcgccgccagacagctgctggtggacagcgtgaccgacagcgtgctgggccccaacggcgacgtgaccggcaccccccacaccagccccgacggcagattcatcgtgagcgccgccgccgacagcccctggctgcacgtgcaggagatcaccgtgagaggcgagatccagaccctgtacgacctgcagatcaacagcggcatcagcgacctggccttccagagaagcttcaccgagagcaaccagtacaacatctacgccgccctgcacaccgagcccgacctgctgttcctggagctgagcaccggcaaggtgggcatgctgaagaacctgaaggagccccccgccggccccgcccagccctggggcggcacccacagaatcatgagagacagcggcctgttcggccagtacctgctgacccccgccagagagagcctgttcctgatcaacggcagacagaacaccctgagatgcgaggtgagcggcatcaagggcggcaccaccgtggtgtgggtgggcgaggtgtag

SEQ ID NO: 184297 - DNA, 2022 bp, Artificial Sequence
  derived and/or modified sequence
atgaagcccggcggcttctggctgcacctgaccctgctgggcgccagcctgcccgccgccctgggctggatggaccccggcaccagcagaggccccgacgtgggcgtgggcgagagccaggccgaggagcccagaagcttcgaggtgaccagaagagagggcctgagcagccacaacgagctgctggccagctgcggcaagaagttctgcagcagaggcagcagatgcgtgctgagcctggcccccgaggacagagtgagcgtgaccaccgtgaccgtgggcctgagcaccgtgctgacctgcgccgtgcacggcgacctgagaccccccatcatctggaagagaaacggcctgaccctgaacttcctggacctggaggacatcaacgacttcggcgaggacgacagcctgtacatcaccaaggtgaccaccatccacatgggcaactacacctgccacgccagcggccacgagcagctgttccagacccacgtgctgcaggtgaacgtgccccccgtgatcagagtgtaccccgagagccaggcccaggagcccggcgtggccgccagcctgagatgccacgccgagggcatccccatgcccagaatcacctggctgaagaacggcgtggacgtgagcacccagatgagcaagcagctgagcctgctggccaacggcagcgagctgcacatcagcagcgtgagatacgaggacaccggcgcctacacctgcatcgccaagaacgaggtgggcgtggacgaggacatcagcagcctgttcatcgaggacagcgccagaaagaccctggccaacatcctgtggagagaggagggcctgagcgtgggcaacatgttctacgtgttcagcgacgacggcatcatcgtgatccaccccgtggactgcgagatccagagacacctgaagcccaccgagaagatcttcatgagctacgaggagatctgcccccagagagagaagaacgccacccagccctgccagtgggtgagcgccgtgaacgtgagaaacagatacatctacgtggcccagcccgccctgagcagagtgctggtggtggacatccaggcccagaaggtgctgcagagcatcggcgtggaccccctgcccgccaagctgagctacgacaagagccacgaccaggtgtgggtgctgagctggggcgacgtgcacaagagcagacccagcctgcaggtgatcaccgaggccagcaccggccagagccagcacctgatcagaacccccttcgccggcgtggacgacttcttcatcccccccaccaacctgatcatcaaccacatcagattcggcttcatcttcaacaagagcgaccccgccgtgcacaaggtggacctggagaccatgatgcccctgaagaccatcggcctgcaccaccacggctgcgtgccccaggccatggcccacacccacctgggcggctacttcttcatccagtgcagacaggacagccccgccagcgccgccagacagctgctggtggacagcgtgaccgacagcgtgctgggccccaacggcgacgtgaccggcaccccccacaccagccccgacggcagattcatcgtgagcgccgccgccgacagcccctggctgcacgtgcaggagatcaccgtgagaggcgagatccagaccctgtacgacctgcagatcaacagcggcatcagcgacctggccttccagagaagcttcaccgagagcaaccagtacaacatctacgccgccctgcacaccgagcccgacctgctgttcctggagctgagcaccggcaaggtgggcatgctgaagaacctgaaggagccccccgccggccccgcccagccctggggcggcacccacagaatcatgagagacagcggcctgttcggccagtacctgctgacccccgccagagagagcctgttcctgatcaacggcagacagaacaccctgagatgcgaggtgagcggcatcaagggcggcaccaccgtggtgtgggtgggcgaggtgtag

SEQ ID NO: 184298 - DNA, 2529 bp, Artificial Sequence
  derived and/or modified sequence
atgaaaccaggaggattctggttgcatctcacccttctgggggcatctctgcctgccgcactcggatggatggatcctgggacgtcccggggtcctgatgtcggggtcggggaaagccaggccgaagaaccacgcagcttcgaggtgacaaggcgagaggggctgtcatcacacaacgagttgctggcctcgtgtggcaagaagttctgtagcaggggatctcgctgcgtgctgagccggaagaccggggaaccagaatgccagtgcctggaagcatgcagaccttcttacgttccggtgtgcgggtctgatggcagattttacgaaaaccactgtaaactgcaccgcgctgcctgccttctgggcaagcgcatcaccgtgattcactcaaaggattgcttcttgaaaggggacacatgtaccatggccggctacgcaaggttaaaaaacgtgctgctggcgctgcaaacccgactgcagcctcttcaggagggggattcccgccaagaccccgccagtcagaaacgtctgctggtcgaatcactgtttagagatttggatgctgatggtaatggacacctctcatcttctgagctggcacaacacgttctcaagaagcaggatctggacgaagatctcctggggtgttctcctggggacttgctccgctttgatgattataactctgattccagtttgaccctgagggagttctatatggctttccaggttgttcagctgagtctcgcgcctgaagatcgggtcagtgtgactactgtgaccgtgggcctgtcgactgtattaacttgtgccgtgcatggggacctgaggccgcctattatctggaaacgaaatggcctaacactcaatttccttgatctcgaggatataaacgattttggagaagatgacagcctctatatcactaaggttacaacgatacatatgggaaactacacatgccacgcgtccggacatgaacagttatttcagacccatgtcctgcaggtcaacgtgccaccggtgatcagagtatatcctgagtcacaggcacaggaaccaggagtcgctgcttctctgaggtgccacgctgagggtattcctatgccgagaattacctggctgaagaatggagtggacgtctccacccagatgagtaagcaactgtctctcctggcgaatggctccgagctccacatcagctcagtacgctacgaagataccggggcttatacatgtattgccaaaaatgaggtaggagtagatgaggacattagcagcctgttcatcgaggattcagcccgcaagaccctagcaaatattctgtggcgcgaggagggcctttcagtgggcaatatgttctacgtgttttccgatgatggcattattgtcatccatcccgtcgattgtgaaattcagaggcatctgaagccaacagagaagatatttatgagctacgaggagatctgcccgcagcgggagaaaaatgctacacaaccctgtcagtgggtgagcgccgtcaatgtgcgcaatcgatacatatatgtggctcaaccagcactctcacgcgtgctcgtggtggacatccaagcccagaaggtattgcaaagtattggggtggatcctctcccagcaaaactgtcctacgataaaagccacgaccaggtttgggtactatcttggggagatgtacacaaatctcggccgtcacttcaggtgatcaccgaggcttccactgggcagagccaacacctcatacgaacccctttcgcaggggtcgacgattttttcatcccccctacaaacttgattataaaccacatacggttcggattcatctttaataaatccgatcccgcggtgcacaaagtagacttagagaccatgatgcccctaaagacaatagggctacatcaccacggctgcgtgccgcaagctatggctcatacacatctgggtgggtatttcttcattcaatgccgccaggatagcccggcttctgcagcaagacaactgctcgtggattcagtgactgattcagtgctgggccccaatggggatgttacgggtacgcctcatacatccccagacggaaggtttattgtgagcgctgctgcagatagtccttggctgcacgtgcaggagatcacggtaagaggcgaaatccagacgctgtatgacttgcagattaactcgggaatatctgatttggccttccaacgcagttttacggagagcaatcagtacaacatatatgccgcactgcataccgagccagacctcctgtttctggagttgtcgacaggaaaggtcggaatgctcaaaaatctcaaagaacctccagctggaccagctcaaccctggggcgggacccatcggatcatgcgagacagcggactcttcgggcagtatctgttgacaccggcacgggagagtctctttctcatcaacggcagacagaatactctgagatgcgaagtaagcgggatcaaaggtggcaccacagtggtatgggtgggagaagtatag

SEQ ID NO: 184299 - DNA, 2022 bp, Artificial Sequence
  derived and/or modified sequence
atgaaaccgggcggtttctggctgcacctcacgctgctgggagcctccctgccagctgccctcggatggatggacccaggtacaagtagagggcccgatgtcggcgtcggagaatcacaggctgaagagccaagaagtttcgaggtgacaaggcgagaaggactttcttcccacaatgaactgttggcatcctgcggaaaaaagttctgctcccggggatcccggtgcgtgctgagtctggcccctgaggacagggtgtccgtgactaccgtgacagtagggctgagtaccgtgctgacctgcgcagtgcacggggaccttcggcccccaatcatctggaaaagaaacggactcactctgaatttcctcgatttggaagacatcaacgacttcggggaagatgacagcctctacatcaccaaggtcacaacaatacacatggggaactacacttgccacgcttcagggcatgagcagctgtttcagacccacgtgctacaggtgaacgttccccctgtcatccgtgtctatcccgagagccaagcacaggaacccggagttgccgcctccttgcgctgtcatgcagaaggtattccaatgcctaggatcacctggctgaaaaacggggtggatgtatccactcaaatgagcaagcagctctctctgctcgccaacggatccgagctgcacatctcatcagtcaggtatgaggacactggcgcctatacatgcatcgcaaagaacgaggtgggagttgatgaggatatttccagtcttttcatagaagatagtgccagaaagaccctggccaacatcctgtggcgcgaagaaggcttgtccgtgggaaacatgttttacgttttctcagacgacggcattattgtcattcatccggtggattgcgaaatccagcgccacctgaaaccaacggagaagatatttatgtcctacgaggagatttgcccgcagagagagaagaatgccactcagccttgccagtgggtaagcgcagtgaacgtgcgcaatagatatatttacgtcgcccagcctgctctatcacgcgttcttgttgtagacatccaagcccagaaggtgttgcagtccatcggagtggaccccctgccagccaaactgtcttatgacaagagccatgaccaggtttgggtattatcctggggagacgttcataagtctagaccatcactgcaggtgatcacagaggcttccaccggacaatcccagcacctcatccggactcccttcgcgggagtggacgactttttcatcccaccaaccaatctcattatcaatcatatacgatttgggtttatcttcaataaaagtgacccggctgtccacaaggtggacctcgagacgatgatgcccttaaagacaatcggactgcaccatcatggatgtgtgcctcaggccatggcccacacccatcttggtggctactttttcatccagtgcagacaagatagccctgcctctgccgccagacaactcttagtggacagcgtgacagatagcgtgcttgggccaaacggcgatgtgacgggaaccccccacacttcacctgacggccgctttatcgtctctgccgccgctgacagtccatggttgcacgtgcaggagataacagtccgcggagaaatccagactttgtacgacctgcagattaactctggcataagcgatctggcttttcagcgctcttttacggagtcaaaccagtacaatatatatgcggcattgcatacagaaccggatcttctgttcctggagctcagcaccggaaaagtcggcatgctaaagaaccttaaagagcctcctgctgggcccgctcagccctggggagggacacatcgcatcatgagagactccggactgtttggccagtacttactcacacctgcccgagaatccctctttctgattaatggccgccagaatactctgcggtgcgaggtgtccggtatcaaggggggcactacggtggtctgggtgggagaggtgtag

SEQ ID NO: 184300 - DNA, 4875 bp, Artificial Sequence
  derived and/or modified sequence
gcagccgcggcggcggtggcacagcagcgggcagcggcggctcagggagctggagcctcaacagcctccagcgagcccgggacccgccgacagcccgagaaaccagccgaaggacgcggggcggggtcgccgccgccgccacggggtgctccctccctcccgcccaagtccggccacctggtcttcccctcggccccggccgtctcagactcatcaaaatgaaaccaggaggcttttggctgcatctcacactgctcggagcctccctgccggctgcgctgggatggatggacccaggaaccagcagaggcccggatgtgggtgtgggggagtcacaggcagaggagcccagaagctttgaagtcacaagaagagaagggctttccagccacaacgagctgctggcctcctgcgggaagaagttctgcagccgagggagccggtgcgtgctcagcctcgcccccgaggacagggtcagtgtgaccacagtgaccgtggggctgagcacagtgctgacctgcgccgtccatggagacctgaggccaccaatcatctggaagcgcaacgggctcaccctgaacttcctggacttggaagacatcaatgactttggagaggatgattccctgtacatcaccaaggtgaccaccatccacatgggcaattacacctgccatgcttccggccacgagcagctgttccagacccacgtcctgcaggtgaatgtgccgccagtcatccgtgtctatccagagagccaggcacaggagcctggagtggcagccagcctaagatgccatgctgagggcattcccatgcccagaatcacttggctgaaaaacggcgtggatgtctcaactcagatgtccaaacagctctcccttttagccaatgggagcgaactccacatcagcagtgttcggtatgaagacacaggggcatacacctgcattgccaaaaatgaagtgggtgtggatgaagatatctcctcgctcttcattgaagactcagctagaaagacccttgcaaacatcctgtggcgagaggaaggcctcagcgtgggaaacatgttctatgtcttctccgacgacggtatcatcgtcatccatcctgtggactgtgagatccagaggcacctcaaacccacggaaaagattttcatgagctatgaagaaatctgtcctcaaagagaaaaaaatgcaacccagccctgccagtgggtatctgcagtcaatgtccggaaccggtacatctatgtggcccagccagcactgagcagagtccttgtggtcgacatccaagcccagaaagtcctacagtccataggtgtggaccctctgccggctaagctgtcctatgacaagtcacatgaccaagtgtgggtcctgagctggggggacgtgcacaagtcccgaccaagtctccaggtgatcacagaagccagcaccggccagagccagcacctcatccgcacaccctttgcaggagtggatgatttcttcattcccccaacaaacctcatcatcaaccacatcaggtttggcttcatcttcaacaagtctgatcctgcagtccacaaggtggacctggaaacaatgatgcccctcaagaccatcggcctgcaccaccatggctgcgtgccccaggccatggcacacacccacctgggcggctacttcttcatccagtgccgacaggacagccccgcctctgctgcccgacagctgctcgttgacagtgtcacagactctgtgcttggccccaatggtgatgtaacaggcaccccacacacatcccccgacgggcgcttcatagtcagtgctgcagctgacagcccctggctgcacgtgcaggagatcacagtgcggggcgagatccagaccctgtatgacctgcaaataaactcgggcatctcagacttggccttccagcgctccttcactgaaagcaatcaatacaacatctacgcggctctgcacacggagccggacctgctgttcctggagctgtccacggggaaggtgggcatgctgaagaacttaaaggagccacccgcagggccagctcagccctgggggggtacccacagaatcatgagggacagtgggctgtttggacagtacctcctcacaccagcccgagagtcactgttcctcatcaatgggagacaaaacacgctgcggtgtgaggtgtcaggtataaagggggggaccacagtggtgtgggtgggtgaggtatgaagggcccagagcagagccctgggccaaggaacaccccctagtcctgacactgcagcctcaagcaggtacgctgtacatttttacagacaaaagcaaaaacctgtactcgctttgtggttcaacactggtctccttgcaagtttcctagtataaggtatgcgctgctaccaagattggggttttttcgttaggaagtatgatttatgccttgagctacgatgagaacatatgctgctgtgtaaagggatcatttctgtgccaagctgcacaccgagtgacctggggacatcatggaaccaagggatcctgctctccaagcagacacctctgtcagttgccttcacatagtcattgtcccttactgccagacccagccagactttgccctgacggagtggcccggaagcagaggctgaccaggagcaggggcctccctcccgaactgaaagcccatccgtcctcgcgtgggaccgcatcttctccctcgcagctgcttcttgcttttctttccatttgacttgctgtaagcctgagggagagccaacaagacttactgcatcttgggggatggggaaatcactcactttattttggaaatttttgattaaaaaaaaattttataatctcaaatgctagtaagcagaaagatgctctccgaggtccaactatatccttccctgccttaggccgagtctcgggggtggtcacaaccccacatcccacagccagaaagaacaatggtcatctgagaatactggccctgtcgactattgccaccctgcttctccaagagcagaccaggccacctcatccgtaaggactcggttctgtgttgggaccccaaaaaaccagaacaagttctgtgtgcctcctttcagcacagaagggagacatctcattagtcaggtctggtaccccagattcagggcagactgggcttgcctggcaaggtatgggtggcctccaggctcaatgcagaaaccccaaggacacgagtggggccaggtgagttcctgaagctataccttttcaaaacagattttgttttcctacctgtggcccatccactcctctctggtaccccatccccgcatcagcactgcagagagaacacatttcggcgagggttttcttacccacattccccaatcaatacacacacactgcagaacccagaacagaaggccacaggctggcactactgcattctccttatgtgtctcaggctgtggtgactctcacatgggcatcgaagaagtacaacccacatagccctctggagaccgcctagatcagagactcagcaaaaacaggctcgccttccctctcccacatatgagtggaacttacatgtgtcctggtttgaatgatcattttgcaagccacacgggttgggagaggtggtctcaccacagacgtctttgctaatttggccaccttcacctactgacatgaccaggattttcctttgccattaaggaatgaactctttcaaggagaggaaaccctagactctgtgtcactctcaacacacacagctcctttcactcctgcctgactgccaagccacctgcatcccccgccccagatctcatgagatcaatcacttgtatgtctcacgcaacttggtccaccaaacgcctgtcccctgtaactcctaggggtgcgcctagacaggtacgtctgttttttattttaaaagatatgctatgtagatataagttgaggaagctcacctcaaaagcctagaatgcagtttcacagtagctgggatgcatggatgacccatctcacccctttttttttcctgcctcaatatcttgatatgttatgtttactcccaatctcccatttttaccactaaaattctccaactttcataaacttttttttggaaaaatttccattgtatcagcccctgacagaaaaaggatctctgagcctaaaggaggaaaagtcccaccaactaccagaccagaacacgagcccctctgggcagcaggattcctaagtcaaagaccagtttgacccaaactggccttttaaaataatcaggagtgacagagtcaacttctgcagcacctgcttctcccccactgtcccttccatcttggaatgtgtctaaaaaagcatagctgccctttgctgtcctcagagtgcatttcctggagacggcaggcttaggtctcactgacagcatgccagacacaactgaatcgaagcaggcctgaagcctaggtcagggtttcaggagtccagccccaggaggcaaagtcaccaatgcagggaggtaaatgccttttggcaggaaaaccaatagagttggttgggtggggagtcaggggtgggaggagaaggaggaagaggaggaaggccagactggcctgccctttctcccatacttcaccccagcagaggttcatgggacacagttggaaagccactgggaggaaatgcctcactacaggggggcctcctgtagcaagcccagccggtaatcctcctaatgaacccacaaggtcaattcacaactgatatcttagctattaaagaagtactgactttaccaaaagaatcatcaagaaagctatttatataaaccccctcagtcattttgaaataaaattaattttac

SEQ ID NO: 184301 - DNA, 2529 bp, Artificial Sequence
  derived and/or modified sequence
atgaagccaggcggcttctggctgcacctgaccctgctgggcgccagcctgcctgctgccctgggctggatggaccccggcaccagccggggcccagatgtgggcgtgggggagagccaggccgaggagcccaggagctttgaggtgacccggcgggagggcctgagcagccacaatgagctgctggccagctgtgggaagaagttctgcagccggggcagccgctgtgtgctgagcaggaagacaggagagcctgagtgccagtgcctggaggcctgccggcccagctatgtgcctgtgtgtggcagtgatggccgcttctatgagaaccactgcaagctgcacagagctgcctgcctgctgggcaagaggatcaccgtcatccacagcaaggactgcttcctgaagggggacacctgcaccatggccggctacgcccggctgaagaatgtgctgctggccctgcagacccggctgcagcccctgcaggagggggacagccggcaggaccctgccagccagaagaggctgctggtggagagcctcttccgggacctggatgctgatggaaatggccacctgagcagcagcgagctggcccagcacgtgctgaagaagcaggacctggatgaggacctgctgggctgcagccctggggacctgctgcgctttgatgactacaacagcgacagcagcctgaccctgcgggagttctacatggccttccaggtggtgcagctgagcctggcccctgaggacagagtgtctgtgaccaccgtgacagtgggcctgagcacagtgctgacctgtgctgtgcatggagacctgcggccccccatcatctggaagagaaatggcctgaccctgaacttcctggacctggaggacatcaatgactttggagaagatgacagcctgtacatcaccaaggtgaccaccatccacatgggcaactacacctgccacgccagcggccacgagcagctgttccagacccacgtgctgcaggtgaatgtgccccctgtgatccgggtgtacccagagagccaggcccaggagcccggggtggccgccagcctgcgctgccacgccgagggcatccccatgccccgcatcacctggctgaagaatggagtggatgtgtccacccagatgagcaagcagctgagcctgctggccaacggcagcgagctgcacatcagctctgtgcgctatgaggacaccggggcctacacctgcatcgccaagaatgaggtgggcgtggatgaggacatcagcagcctcttcattgaagattctgccaggaagaccctggccaacatcctgtggagggaggagggcctgtctgtgggcaacatgttttatgtgttcagtgatgatggcatcatcgtcatccaccctgtggactgtgagatccagaggcacctgaagcccacagagaagatcttcatgtcctatgaggagatctgcccccagcgggagaagaatgccacccagccctgccagtgggtgtctgctgtgaatgtgaggaaccgctacatctacgtggcccagcctgccctgagccgggtgctggtggtggacatccaggcccagaaggtgctgcagagcattggagtggaccccctgcctgccaagctgtcctatgacaagagccatgaccaggtgtgggtgctgtcctggggagatgtgcacaagagccggcccagcctgcaggtgatcacagaggccagcacaggccagagccagcacctgatccgcaccccatttgctggggtggatgacttcttcatcccccccaccaacctgatcatcaaccacatccgcttcggcttcatcttcaacaagagtgaccctgctgtgcacaaggtggacctggagaccatgatgcccctgaagaccatcggcctgcaccaccacggctgtgtgccccaggccatggcccacacccacctgggcggctacttcttcatccagtgccggcaggacagccctgccagcgctgcccggcagctgctggtggacagcgtgacagacagcgtgctgggccccaatggagatgtgacaggcaccccccacaccagcccagatggccgcttcatcgtgtctgctgctgctgacagcccctggctgcacgtgcaggagatcaccgtgcggggggagatccagaccctgtatgacctgcagatcaacagcggcatcagtgacctggccttccagaggagcttcacagagagcaaccagtacaacatctatgctgccctgcacacagagccagacctgctcttcctggagctgagcacaggcaaggtgggcatgctgaagaacctgaaggagcccccagctggccctgcccagccctggggcggcacccaccgcatcatgagggacagcggcctgtttggccagtacctgctgaccccagcccgggagagcctcttcctgatcaatggccggcagaacaccctgcgctgtgaggtgtctggcatcaagggcggcaccaccgtggtgtgggtgggggaggtgtag

SEQ ID NO: 184302 - DNA, 2022 bp, Artificial Sequence
  derived and/or modified sequence
atgaagccaggcggcttctggctgcacctgaccctgctgggcgccagcctgcctgctgccctgggctggatggaccccggcaccagccggggcccagatgtgggcgtgggggagagccaggccgaggagcccaggagctttgaggtgacccggcgggagggcctgagcagccacaatgagctgctggccagctgtgggaagaagttctgcagccggggcagccgctgtgtgctgagcctggccccagaagatagagtgtctgtgaccaccgtgacagtgggcctgagcacagtgctgacctgtgctgtgcacggggacctgcggccccccatcatctggaagagaaatggcctgaccctgaacttcctggacctggaggacatcaatgactttggagaagatgacagcctgtacatcaccaaggtgaccaccatccacatgggcaactacacctgccacgccagcggccacgagcagctgttccagacccacgtgctgcaggtgaatgtgccccctgtgatccgggtgtacccagagagccaggcccaggagcccggggtggccgccagcctgcgctgccacgccgagggcatccccatgccccgcatcacctggctgaagaatggagtggatgtgtccacccagatgagcaagcagctgagcctgctggccaatggaagtgagctgcacatcagctctgtgcgctatgaagatactggagcctacacctgcatcgccaagaatgaggtgggcgtggatgaggacatcagcagcctcttcatcgaggacagcgccaggaagaccctggccaacatcctgtggagggaggagggcctgtctgtgggcaacatgttctacgtgttcagtgatgatggcatcatcgtcatccaccctgtggactgtgagatccagaggcacctgaagcccacagagaagatcttcatgtcctatgaggagatctgcccccagcgggagaagaatgccacccagccctgccagtgggtgtctgctgtgaatgtgaggaaccgctacatctacgtggcccagcctgccctgagccgggtgctggtggtggacatccaggcccagaaggtgctgcagagcattggagtggaccccctgcctgccaagctgtcctatgacaagagccatgaccaggtgtgggtgctgtcctggggagatgtgcacaagagccggcccagcctgcaggtgatcacagaggccagcacaggccagagccagcacctgatccgcaccccatttgctggggtggatgacttcttcatcccccccaccaacctgatcatcaaccacatccgcttcggcttcatcttcaacaagagtgaccctgctgtgcacaaggtggacctggagaccatgatgcccctgaagaccatcggcctgcaccaccacggctgtgtgccccaggccatggcccacacccacctgggcggctacttcttcatccagtgccggcaggacagccctgccagcgctgcccggcagctgctggtggacagcgtgacagattctgtgctgggccccaatggagatgtgacaggcaccccccacaccagcccagatggccgcttcatcgtgtctgctgctgctgacagcccctggctgcacgtgcaggagatcaccgtgcggggggagatccagaccctgtatgacctgcagatcaacagcggcatcagtgacctggccttccagaggagcttcacagagagcaaccagtacaacatctatgctgccctgcacacagagccagacctgctcttcctggagctgagcacaggcaaggtgggcatgctgaagaacctgaaggagcccccagctggccctgcccagccctggggcggcacccaccgcatcatgagggacagcggcctgtttggccagtacctgctgaccccagcccgggagagcctcttcctgatcaatggccggcagaacaccctgcgctgtgaggtgtctggcatcaagggcggcaccaccgtggtgtgggtgggggaggtgtag

SEQ ID NO: 184303 - DNA, 2529 bp, Artificial Sequence
  derived and/or modified sequence
atgaagcccggcggcttctggctgcacctgaccctgctgggcgccagtctgcctgccgcgttgggctggatggatcctgggacaagtcggggtcctgatgttggagtgggtgagagtcaggcagaagaaccaaggagctttgaggttacccgccgcgaggggctctcaagccacaatgaactccttgctagctgcggaaaaaagttttgttcacgagggagcagatgtgttctgtctcggaaaactggggagcccgagtgtcagtgcctggaggcctgtcggccttcttacgtgccagtgtgcggctctgatggccggttttacgagaatcattgtaaactacacagagccgcctgcttgctgggtaaacgaatcactgtaatccattccaaagattgtttccttaagggcgacacatgtactatggctggctacgccagactgaagaatgtgctcttggcgttacaaacgagactgcagcccctgcaggaaggggacagcaggcaagaccccgcctctcagaaacggctgttggtagagagtttgttcagagacctcgacgcagatggcaacggccacctgtcgtcttctgagctggcccagcatgtgctcaaaaagcaagacctcgatgaagatctgttgggatgttctccaggggatcttctaagattcgatgattacaacagcgacagttccctcacgctccgtgagttttacatggcttttcaagtagtccaactatctctggctccagaagacagggtctctgtgacgacagtgaccgtgggattgagcactgtgctcacttgtgcagtccacggagacctgaggccccccatcatttggaagcggaacggactcacacttaacttcctggacctcgaggatatcaacgatttcggcgaagatgattcgctttacataaccaaagtcactaccatccatatgggtaattacacctgtcacgcgagtggccatgagcagctgttccaaacacatgtccttcaagtcaacgtgcccccagtaatcagagtctacccagagtcacaggcacaagaaccaggagttgcagcaagcctgcgatgtcacgctgagggaatccccatgccgagaattacgtggctaaagaatggtgtggacgtgagcacccagatgtccaagcagctgagtcttctcgccaatgggagcgagctgcacatctcttctgtgaggtatgaggatactggcgcctacacctgcatagcaaaaaacgaggttggcgttgacgaagacatatccagcctgttcatcgaggattccgccaggaagacactggccaacatcctatggagggaggaaggtctgagcgtcggcaacatgttttacgtgttctcggatgatgggataattgtgatccacccagtggactgcgaaatccagcggcatcttaaaccaacagaaaaaatattcatgtcctatgaggagatttgtccacagagggaaaagaatgcgactcaaccttgccaatgggtcagcgctgttaacgtgaggaatagatacatctacgtcgctcaaccagctctatctagggtgttggtggtagacatccaagcccagaaagtactgcagtctatcggggtcgaccctctccctgcaaaattaagctatgataagagtcatgaccaggtttgggtcctttcctggggtgatgtccacaagtcaaggccatctcttcaggtaataactgaggcttctaccggtcagtcccaacaccttattcggacacctttcgccggtgttgatgacttctttatccccccaacaaatctgatcattaaccatatccgctttggctttatctttaacaaaagtgatccagcagttcacaaagtcgatctagagaccatgatgccactgaaaactattgggctgcatcatcacggttgtgtcccgcaggccatggctcatacgcatctcggaggctattttttcatacagtgtcgacaagacagccctgccagtgctgcacggcagctcctggtcgacagtgtaactgacagtgttcttggcccgaacggtgacgtcacgggaacccctcacacatcaccagatggaagattcattgtttcagcggcagctgattcaccgtggctccatgtgcaggagattacagtgaggggcgagatccagactttgtacgacctgcagatcaattccgggatctcagacttggcattccagagatcattcactgagagtaaccagtacaacatctacgcggccctgcacacagagccggacctcctgtttctggagctgagcactggcaaagtaggtatgctaaagaatttgaaggaaccacctgccggccccgcacagccatggggaggcacacacagaataatgagggatagcggactctttggtcagtacttgttgaccccagcccgggaatcactgttcctgatcaatggccgccagaataccctccgctgcgaggtgtcgggtattaaggggggcacgaccgtggtgtgggtcggcgaagtgtag

SEQ ID NO: 184304 - DNA, 2022 bp, Artificial Sequence
  derived and/or modified sequence
atgaagcccggcggcttctggctgcacctgaccctgctgggcgcctctctcccagcggctctgggttggatggacccaggaactagccgggggcccgacgtcggcgtgggagaatctcaggctgaagagcccaggagttttgaggtgacccgtcgagaaggactgtcctcgcataatgagctgctcgcttcttgtggaaaaaaattctgtagcaggggctcaagatgtgttcttagcctggcccccgaggatagggtttccgtgaccacagtcaccgtcggtttatcaaccgtgttgacctgtgcagtgcatggagacctacgaccccctatcatttggaagcggaatggattgactcttaactttcttgacttggaagatattaacgacttcggcgaggatgacagcctctacatcaccaaagtgacaacgattcacatggggaattatacttgccatgcttctggtcatgaacaattattccagacccatgtgttgcaggtgaatgtcccaccggttatcagggtttacccagaatcccaggcccaagaacccggcgtcgctgcgagcctgaggtgccatgccgaagggatccctatgccccggataacttggctcaaaaatggggtcgacgtgtccactcaaatgtctaaacagttgagcttgctggctaatggttcagagttacatatttcatcagtgcgctatgaggatactggcgcttacacatgtattgctaaaaacgaggttggcgtggacgaagacattagctcactgtttatcgaagattctgcgcgtaaaactttagcaaatatcctgtggcgggaggaggggctctccgtgggaaatatgttttacgttttttcagacgacggcatcatcgtgatacaccccgtcgattgtgagatccagcggcacctgaaacctaccgagaagatcttcatgtcttatgaggaaatctgccctcagcgtgagaagaacgcgactcagccatgccaatgggtgtctgccgtgaacgtaaggaatcgatatatctatgtggcacaacctgctctttccagggtcctggtggtggatatccaggctcagaaggttctgcaatccatcggtgtcgaccccctgcccgccaaattatcctacgacaaatcacacgatcaggtctgggtactgagttggggtgacgtccacaaaagcagaccctccttgcaggtcattaccgaggcatctaccggtcagtctcagcatctgatcagaactcctttcgccggggttgacgatttcttcataccacccacaaacttaatcatcaaccacatcaggtttggcttcattttcaacaagtctgacccggccgtgcacaaggtcgatttggaaacaatgatgcccctcaaaaccatcggattacatcaccatggctgcgtgcctcaggccatggcacacacccatttgggaggatattttttcatccagtgccgccaggattctcccgcttcagccgctcgccagctcctggtggactctgtcactgattccgtgctggggccaaatggggatgtcaccggaaccccccataccagtcctgatggtcggttcatagtttcagctgcggcagattcaccgtggctgcatgtccaggaaatcacagtgcggggcgaaatccagaccctgtatgacctgcagattaacagcggcatatctgacttggcgtttcaaagatccttcaccgaatctaatcagtataatatttatgccgcactgcataccgaacccgatctccttttcctggagctctcaaccgggaaagtgggcatgcttaagaaccttaaagagccacctgcaggacctgcccaaccctggggtgggacacatcggatcatgcgagacagcggcctgttcggtcagtacttgctaactcctgctcgggaaagtctgtttctgattaatggtcggcagaatacgttgaggtgcgaggtgagtgggatcaaaggtggcacaaccgtggtttgggttggagaggtgtag

SEQ ID NO: 184305 - RNA, 2529 nt, Artificial Sequence
  derived and/or modified sequence
augaagccuggugguuuuuggcuccaccugacacuacucggagcauccuuaccagcagcccucggauggauggauccaggcacuucuagggguccugacgugggcgugggagagucacaggcagaagaacccaggucauucgaagugacccggagggaaggucuguccagccauaaugagcuccuugcaucuugcggcaaaaaguucugcucccggggaaguagaugcguguugucucggaaaacaggggaaccagagugccaaugucuugaagccuguaggccaucauacgucccuguuuguggaagcgacggccgcuucuaugagaaccacugcaagcugcaccgagccgcuugucuuuuggggaagcgcauuacagugauucacuccaaagacuguuuccuuaaaggagacaccuguaccauggcagguuaugcccgucugaaaaacguacuguuagcacugcagacucggcuccagccccugcaggagggcgacaguaggcaagauccugccucccaaaagagacugcucguggagucucuguuucgcgaucuggacgcugauggaaauggucacuugagcaguuccgaacuggcacaacacguuuugaagaagcaggaucuggaugaggaccugcugggauguagcccaggcgauuugcucagauucgacgauuauaacuccgacucaucucugacacuccgcgaauuuuacauggcauuucagguaguucaguuaucucucgcuccagaagacagggugagcgucacaacugugaccguggggcuguccaccguccuuacgugcgccgugcauggcgaucugcguccacccaucaucuggaaaaggaaugggcucacucucaauuuucuggaccucgaagauaucaacgauuucggcgaggaugacucucuauauauuaccaaaguuaccacaauccauaugggaaacuacaccugccacgccucaggccaugaacaacuguuucagacucaugugcuacaagucaacguaccaccggugaucagaguguacccugaaucucaggcacaggagccugggguggccgcaagucugagaugucacgcagaagguauaccgaugccccgaaucacuuggcucaagaauggcgucgacguuuccacucagaugagcaaacagcugucccugcuggcuaauggcuccgagcuccacaucuccaguguucgguacgaagacaccggagccuacacguguaucgccaagaacgagguuggcguggacgaggacaucagcucauuguucaucgaggauucugcucguaagacgcuugcaaacauuuuauggagggaggagggauugucaguggggaacauguuuuaugucuucucugacgacgguaucauagugauccaucccguggacugugagauccaaaggcaucucaagcccacagaaaaaauuuucaugaguuacgaagaaaucugcccccagcgcgagaagaacgcuacgcagccaugccagugggugucagcugucaauguucggaaucgguacauuuauguggcccagccagcccucucccgggugcucgugguggacauucaggcccagaagguguugcaaucuaucggcgucgacccccugccugcaaaguugucuuacgauaaaucacacgaucagguaugggugcuuucuuggggagauguacacaaaagccgaccaagccuccaggucauuaccgaagccucaacuggacaaucucagcaucuaauaagaacccccuuugcggggguggacgauuucuuuauucccccaacuaaccugauuauuaaucauauccgguucggguuuauauucaacaaaagcgacccugcagugcauaaggucgaucuugagacaaugaugccauuaaagacaaucggcuuacaccaccacgggugcgugccgcaggcgauggcccacacccaccuggguggauacuuuuuuauucagugcagacaggacucucccgccucagcagcccgccagcuccuggucgauucggugacagauucuguccuuggucccaauggcgacgugaccggaacgccucacacaucccccgacggacgcuucaucgugucugccgcagccgacagcccaugguugcacgugcaagaaauuaccguuaggggagagauccagaccuuguaugaccugcagaucaauagcggaaucagcgaccuugccuuucagcgcuccuucaccgaauccaaucaguacaauauuuacgcugcccugcacacugagccagaucuccuguuccucgaguuaagcacagguaagguaggcauguuaaagaaccugaaggaacccccggcgggcccugcucagccauggggcgguacccacaggauaaugagagacucggggcuguuuggucaguauuuacucacaccugcaagggagagccuuuuucucaucaauggcaggcagaauacccuucgaugugaagugagcggcauuaaggguggcacuaccgugguaugggucggugaagucuag

SEQ ID NO: 184306 - RNA, 2022 nt, Artificial Sequence
  derived and/or modified sequence
augaagcccgguggguucuggcugcaccugacgcugcucggcgccagucugccugccgcccugggauggauggaccccggaaccucccguggaccugacgucggcguuggagagucccaagccgaagagccaagaucuuucgaagugacgcgaagggagggccugucuagccacaacgaacugcuggcgagcugcgggaaaaaguuuugcagccgcgggucuagaugugugcuuuccuuggcccccgaagaccgagugagcgugaccacugucacuguuggacugagcaccguuuuaacaugugcuguacauggcgaccugagacccccaaucaucuggaagcgcaacggccugacccugaacuuucuggaucucgaggauauuaacgauuucggagaggaugauucucuguacaucacaaaaguaacuaccauccauaugggaaacuacacuugucaugccagcgggcacgagcagcuguuucaaacccaugugcugcaggugaacgugcccccugugauucggguguacccugagucucaagcacaagaacccgggguugcugccucccuuaggugucacgccgagggaauuccuaugcccaggauuaccuggcuuaagaauggagucgacgugaguacacagaugagcaagcaacuuucacuguuggcuaacggauccgaacugcacaucucuucugugagguaugaggacaccggggccuauacuuguauugcuaagaaugaggucggggucgacgaggauaucucuucccuuuuuauagaggacucugcucgcaaaacgcuggcuaacauccuuuggcgugaagaaggauugagugucggcaacauguucuaugucuuuucugaugaugggaucaucgugauccacccuguugauugcgagauccagagacaccuuaagcccacggagaaaauuuuuaugaguuaugaagagaucugcccgcaacgugaaaagaacgcgacccagccaugucaaugggugagugcaguuaacguaaggaacagauacauuuacguggcacagcccgcacugagucgcgugcuugucgucgauauccaagcucagaaggugcugcagucuauagggguugaccccuugcccgcuaaacucucauacgacaaaucgcacgaucaagucuggguguuaagcuggggcgacguucacaaaagccgucccucccuccaggugauuacagaagcauccacuggacagagucagcaucugauucgaaccccauuugcgggaguggaugauuucuuuauccccccuacaaaccugauaauuaaucacauccgauuuggauuuaucuucaauaaaagugaucccgcugugcauaaggucgaucuggagacaaugaugccccugaagacgaucggccuucaucaucauggaugcgugccccaggcuauggcucacacacaccuaggugguuauuucuucauccaauguagacaagacagccccgcguccgccgcccgacagcuucucguggacagcgugacugauucgguccucggaccuaacggcgaugugacaggaaccccccauacaucuccugaugggagguuuauugugagugcagccgccgacucaccuuggcuccauguacaggaaaucacagugaggggugaaauccagacauuauacgaccugcagaucaacucggguauuuccgaccuggccuuucaacguaguuucaccgaauccaaucaauauaacaucuacgcugcacuccauacagagccugaccuucucuucuuggaacuguccacuggcaagguuggaaugcucaagaacuugaaggagccuccugccggccccgcacagccaugggggggcacacauagaauuaugagagacucuggacucuuuggccaguaccuucugacuccugcaagagagaguuuauuccuuauuaaugguagacagaacacacugaggugugaaguaagugguauaaagggugggaccacagugguuugggucggcgagguguag

SEQ ID NO: 184307 - RNA, 2529 nt, Artificial Sequence
  derived and/or modified sequence
augaagccgggcgguuucuggcugcauuuaacccucuuaggggcuuccuuaccagcagcacucggauggauggaucccggaacaucuaggggucccgaugugggcgucggcgagucucaggccgaagagccuaggaguuucgaagugacaagaagggaggggcugucuucucauaaugaguugcuugcaagcuguggcaaaaaauucuguaguagaggaucccgaugcgugcucaguagaaaaaccggagaaccagagugccaaugucucgaagcaugccgccccucuuacguuccagugugcggaagcgacggaagauuuuacgagaaucacugcaaacugcacagggccgcuugucuacuaggaaagcggauuacaguaauacacagcaaagacugcuuccugaaaggggauacuugcacuauggccggguaugcuagacucaaaaauguucugcuugcuuugcagacuagacuucagccgcuucaagagggggauagccgucaggauccugcaagccagaaacgacuucucguggagagccuuuuuagggaccuggaugccgauggcaauggccaccuuaguagcagcgaacucgcucagcauguguuaaagaagcaggaucuagacgaagacuugcuaggcugcuccccaggcgaucuguuaagauuugacgacuacaauucagacagcucacugacucuccgcgaguucuauauggcuuuccagguaguacaacugucauuagcaccagaggacaggguaucugucacaaccgugacuguaggauugucuaccguuuugacaugugcugugcacggcgaccuuaggccucccauaaucuggaagaggaacggacuuacauuaaacuuccucgauuuagaagauauuaaugacuuuggcgaggacgauagccuguauauaaccaaagugaccacaauucauauggguaacuacacaugccaugccucgggacacgaacagcucuuucagacucacgugcuucagguuaacgucccuccagucaucagggucuaucccgaaucucaagcccaggaacccggaguugccgcaucacugaggugucaugcagaagggauaccgaugcccaggaucaccuggcuuaagaaugguguagacguauccacucagaugaguaaacaauugucccuucucgcaaauggaagugagcuccacauuucgucuguuagauacgaggacacaggcgccuacacuugcauugcaaaaaaugaagucggcguggacgaagauauaagcucacuguucauugaggacagcgcaagaaagacacuggcuaacauccuuuggcgcgaggaggggcucucuguagguaauauguucuauguguucuccgacgaugguaucaucgugauucaucccgucgacugcgaaauacagaggcaccuaaaaccaaccgaaaaaauauuuaugucuuacgaggagauuugcccccaacgagaaaagaaugccacccaaccuugccagugggugucagcugucaauguucggaaucgguacauuuauguggcccagccagcccucucccgggugcucgugguggacauucaggcccagaagguguugcaaucuaucggcgucgacccccugccugcaaaguugucuuacgauaaaucacacgaucagguaugggugcuuucuuggggagauguacacaaaagccgaccaagccuccaggucauuaccgaagccucaacuggacaaucucagcaucuaauaagaacccccuuugcggggguggacgauuucuuuauucccccaacuaaccuaauuauuaaccauauucgcuuuggcuuuauuuuuaacaaguccgacccugccgugcauaaggucgaucuggaaacuaugaugccacuuaagacuaucgggcuucaccaccacgggugcgugccccaggcaauggcccacacccaccugggaggauacuuuuucauccaaugccgccaggacucacccgccuccgcagccagacaauuguugguagacucagucaccgacuccguccucggaccaaauggcgaugucaccggcacuccccauacuucaccagacggcagauucaucguguccgcugcggccgauucgccauggcuucacguucaggaaauaacaguacggggugaaauccaaacauuauacgaucugcaaauuaauuccggcaucagcgaucucgcauuccagagaaguuucacagagagcaaucaguauaacauauacgccgcccugcacaccgagccagaccuccuuuuuuuggagcuaucaacaggaaaggucgggaugcugaaaaaccucaaagagccaccagccggaccagcccagccauggggaggcacucauaggauuaugcgggauucuggacuuuuuggccaguauuuacuaacaccagcucgcgaaucacuguuucucauaaauggaaggcaaaauacccugcggugcgaagugucuggaaucaaaggcggaaccacuguugugugggugggagagguuuag

SEQ ID NO: 184308 - RNA, 2022 nt, Artificial Sequence
  derived and/or modified sequence
augaagcccggaggauucuggcuacauuuaacucuguugggugccucacucccugcagcacuuggcuggauggaccccggaacuucacgcggcccugacgugggagucggagagucucaagccgaggagccacgaaguuuugaaguaacaaggagagagggacuuaguagccacaacgagcuccuggccagcugugguaagaaguucuguagucgcgggucucgauguguucugucccuggcuccugaagaucgugugucaguuaccaccgucacuguaggucugaguaccgugcuaacaugcgccgugcacggcgaccuucggcccccaaucaucuggaaacgcaacggacugacccugaacuuucucgaccuggaagacaucaacgauuucggugaagacgacagcuuguauaucacaaagguaaccacaauacacauggguaacuacacaugucacgcgucugggcacgagcagcucuuucaaacacacguacugcaggugaaugucccuccggugaucaggguauaccccgagucucaggcacaggagccaggcguugccgcuucauuacguugucacgcagaaggcaucccgaugccaagaaucacaugguuaaagaacgggguggauguaagcacucagaugucaaagcagcuuagucuguuggccaauggcuccgaauugcacauuuccagcgugcgauaugaagauaccggggcguauacuuguauugcuaagaacgaaguggguguugaugaggacauaagcagucuguuuaucgaggauagugcacgcaaaacacuugcuaacauuuuguggagggaggaagggcuaucugucggaaacauguucuacguauuuucggacgaugggaucaucguaauacauccgguggacugugaaauacaaagacaucuaaagcccaccgaaaagauuuuuaugucauaugaagagauuuguccucaacgggagaagaacgcaacucagcccugccaaugggugagcgccgugaaugugcggaacagauacauauauguagcgcagccagcucugucuagaguccuagucgucgauauacaggcccagaaagugcuacaauccauaggcguugauccuuugcccgcuaaauuaagcuacgauaaaucccaugaucagguuuggguccucucuuggggggacgugcacaagucaagaccuucacugcaggugaucacagaagccagcaccggucagucucagcaucucauuagaaccccauucgccggcgucgaugauuuuuucauccccccgacaaauuugauuauuaaccacauucgguucggauuuauuuuuaacaaaucggaccccgcuguccacaagguagaucuggaaacaaugaugccccuaaaaaccaucggauugcaccaccacggcugcgugccucaagcaauggcacauacacacuuaggagguuacuucuucauccagugcagacaggauaguccugcaagugcugcacgucaacuucuggucgauucagucacugauagugugcucggaccaaacggcgacgucacugggaccccgcacaccuccccggaugggcguuucaucgugagugcagcugcagauagccccugguugcacgugcaggaaauuacugucagaggugaaauucagacacucuacgacuugcagauuaacuccggaaucuccgaucuggcguuccaacgguccuucaccgagucuaaccaauacaacauauaugccgcccuacauacugaacccgaccugcuauuccuggagcugagcacuggaaagguuggaaugcucaagaacuugaaggagccuccugccggccccgcacagccaugggggggcacacauagaauuaugagagacucuggacucuuuggccaguaccuucugacuccugcaagagagaguuuauuccuuauuaaugguagacagaacacacugaggugugaaguaagugguauaaagggugggaccacagugguuugggucggcgagguguag

SEQ ID NO: 184309 - protein, 1481 aa, Artificial Sequence
  derived and/or modified sequence
MPNSERHGGKKDGSGGASGTLQPSSGGGSSNSRERHRLVSKHKRHKSKHSKDMGLVTPEAASLGTVIKPLVEYDDISSDSDTFSDDMAFKLDRRENDERRGSDRSDRLHKHRHHQHRRSRDLLKAKQTEKEKSQEVSSKSGSMKDRISGSSKRSNEETDDYGKAQVAKSSSKESRSSKLHKEKTRKERELKSGHKDRSKSHRKRETPKSYKTVDSPKRRSRSPHRKWSDSSKQDDSPSGASYGQDYDLSPSRSHTSSNYDSYKKSPGSTSRRQSVSPPYKEPSAYQSSTRSPSPYSRRQRSVSPYSRRRSSSYERSGSYSGRSPSPYGRRRSSSPFLSKRSLSRSPLPSRKSMKSRSRSPAYSRHSSSHSKKKRSSSRSRHSSISPVRLPLNSSLGAELSRKKKERAAAAAAAKMDGKESKGSPVFLPRKENSSVEAKDSGLESKKLPRSVKLEKSAPDTELVNVTHLNTEVKNSSDTGKVKLDENSEKHLVKDLKAQGTRDSKPIALKEEIVTPKETETSEKETPPPLPTIASPPPPLPTTTPPPQTPPLPPLPPIPALPQQPPLPPSQPAFSQVPASSTSTLPPSTHSKTSAVSSQANSQPPVQVSVKTQVSVTAAIPHLKTSTLPPLPLPPLLPGDDDMDSPKETLPSKPVKKEKEQRTRHLLTDLPLPPELPGGDLSPPDSPEPKAITPPQQPYKKRPKICCPRYGERRQTESDWGKRCVDKFDIIGIIGEGTYGQVYKAKDKDTGELVALKKVRLDNEKEGFPITAIREIKILRQLIHRSVVNMKEIVTDKQDALDFKKDKGAFYLVFEYMDHDLMGLLESGLVHFSEDHIKSFMKQLMEGLEYCHKKNFLHRDIKCSNILLNNSGQIKLADFGLARLYNSEESRPYTNKVITLWYRPPELLLGEERYTPAIDVWSCGCILGELFTKKPIFQANLELAQLELISRLCGSPCPAVWPDVIKLPYFNTMKPKKQYRRRLREEFSFIPSAALDLLDHMLTLDPSKRCTAEQTLQSDFLKDVELSKMAPPDLPHWQDCHELWSKKRRRQRQSGVVVEEPPPSKTSRKETTSGTSTEPVKNSSPAPPQPAPGKVESGAGDAIGLADITQQLNQSELAVLLNLLQSQTDLSIPQMAQLLNIHSNPEMQQQLEALNQSISALTEATSQQQDSETMAPEESLKEAPSAPVILPSAEQTTLEASSTPADMQNILAVLLSQLMKTQEPAGSLEENNSDKNSGPQGPRRTPTMPQEEAAEKRPPEPPGPPPPPPPPPLVEGDLSSAPQELNPAVTAALLQLLSQPEAEPPGHLPHEHQALRPMEYSTRPRPNRTYGNTDGPETGFSAIDTDERNSGPALTESLVQTLVKNRTFSGSLSHLGESSSYQGTGSVQFPGDQDLRFARVPLALHPVVGQPFLKAEGSSNSVVHAETKLQNYGELGPGTTGASSSGAGLHWGGPTQSSAYGKLYRGPTRVPPRGGRGRGVPY

SEQ ID NO: 184310 - DNA, 4446 bp, Artificial Sequence
  derived and/or modified sequence
atgccaaactctgagcgccacgggggtaagaaggacggctccggaggggcctccgggaccttgcagcccagctcagggggtgggtcatcaaactccagagaacggcatcgtttggtgagtaagcataaaaggcacaagtctaagcattccaaggatatgggactagtaacacccgaggctgcctcacttggaactgtaatcaagccactggtcgagtacgacgatatctccagtgatagcgacaccttttccgatgatatggcttttaagctcgaccgccgcgaaaatgatgagagacgggggagcgatcgatccgaccgtctgcacaagcatagacaccaccaacaccgacggagccgggatctcctgaaagcaaagcagacggagaaagaaaagtctcaggaggtgtcatccaagtccggatctatgaaagacaggatttcagggagtagtaagcgctcaaacgaggagacagacgactatggtaaggcacaagttgccaagtcctcctcaaaggagtcgaggtcctcaaagctgcataaagaaaagacccggaaagaacgcgaactgaagtcgggccacaaagataggtctaaatcgcatagaaaacgggagacaccaaagtcctacaaaactgttgactcacctaaaagacgttcacggagcccccacaggaagtggtccgactcatctaagcaagatgactctccttcgggggccagctacggccaggactatgatctgagccccagtaggtcacacaccagcagcaactatgacagctacaagaaatcccctggttcgacgtctagaagacagtctgtgagcccaccttacaaagaaccatcagcctatcaatcctcgaccagaagcccatcaccatactcccggcggcagaggagcgtgtcgccatactcccgtcgcaggtcctcttcctatgaacgctcgggctcctatagcgggcgcagccccagcccatacggacggaggaggtcttcgtccccattcctgagcaagcgctccctgtctagatctccccttccaagtcgcaaaagtatgaaatctcggagtcgctcccccgcatatagcagacattcatcttctcactcgaagaaaaagaggtcctcaagccgttctcgacactcttctatttccccggtccgcctgccattgaattcgagcctcggagccgaactctccagaaaaaaaaaagagagggcagccgctgccgcagcggcaaaaatggacggaaaggagtccaagggcagtcccgtgttcctccctagaaaggagaatagttccgttgaagctaaggattccggactagagtccaagaagttgcctagatcagttaaattagagaaatcagcacccgacactgaacttgtcaacgttacccacctcaatacagaagtgaaaaactcgtccgataccgggaaagtgaaacttgacgaaaattctgagaagcatctggtaaaggacctcaaggcccagggtacccgggattctaagccaattgctctgaaggaagaaatcgtcacacccaaagagacagagacttcagagaaggaaaccccaccacccctcccaacgatagcctccccaccgccacctttgccaaccactacgccgcccccacagaccccacctctgccaccactgccacctattccagctcttccccagcagccacctctgccgcccagccagcctgcctttagtcaggtaccagctagctccacatcaacactaccacctagcacccactctaagacaagtgctgtctcaagtcaggcaaattctcaaccacccgtgcaggtcagcgtgaaaactcaggtttctgtaactgctgctatcccacacctaaagacatcaactctcccacccctgcccctcccacctcttctgcccggcgatgacgatatggattctcctaaggagaccctgcctagcaagcccgtcaagaaggaaaaggagcagcggacacgacatctgttgaccgacctccctctcccccctgagctgccaggcggggacctgagtccccccgacagcccagaacccaaggcaattacaccaccccagcagccatataaaaagcggcccaagatttgttgcccacggtacggcgagcggaggcagaccgaaagcgattgggggaaaagatgtgtggacaaattcgacatcattggtattatcggcgagggaacatatggacaggtgtataaagccaaggacaaagatactggagagctggtcgcactaaaaaaggttcgcctggacaatgaaaaagaggggtttccaattacagccattcgtgaaattaagatcctgcgtcagctgatccatcgcagcgtcgtcaacatgaaggaaatcgtgactgacaagcaagacgcccttgacttcaagaaggacaagggcgccttctatttggtgtttgaatacatggatcacgacctgatgggtttgctggagtccggactcgttcactttagcgaagatcatatcaagagttttatgaaacaactgatggaaggcctagaatattgtcacaagaagaactttttgcatagggacataaaatgtagtaatatacttttaaataacagtgggcagattaaattggccgatttcggcttggcccggctgtataattcagaggaaagccggccatacaccaacaaggtcatcacgctctggtacaggccgccggagttgctactgggcgaggagcggtacacgccggcaattgacgtctggtcgtgcggctgtatcctgggcgaattattcacaaagaagccaatctttcaggccaacctggaactggcccagctggagctgatatccaggttatgcggctccccatgccccgcggtctggccagacgttattaagcttccatacttcaacacaatgaagccgaaaaaacaatacaggcggcgcttacgagaagagttctcgttcataccctcggccgctctggacctactggaccatatgcttactctagacccctctaagcgctgcactgcagagcagaccctgcagtcagacttcctgaaggatgtggagctgagcaaaatggccccccctgacttgccccactggcaggattgtcatgagctctggtcgaaaaaaaggagaaggcagcggcagagtggagttgtcgtcgaggaacccccacctagcaagacttccaggaaagaaactacttccggcacctccacggagcccgtaaagaactccagtccagcccccccacaaccagccccaggcaaggttgagtccggggccggagacgcaattggactggcggacataactcagcagctgaaccagtctgagctagctgtgctgctgaatttgctgcagagtcagacggatctctccatcccccagatggcacagcttctaaatatacacagtaaccctgaaatgcagcaacagcttgaggcattgaaccagtctataagtgctcttaccgaggcaactagccagcagcaggactccgagacgatggcaccggaagagagccttaaggaggcgcccagtgccccagtcattctgccttctgctgagcagaccaccctggaggcatcttctacccctgcagacatgcagaacattctcgctgtgcttctctcgcagctcatgaagactcaggagccggctggaagtcttgaagagaacaactctgataagaacagtggtccacaaggtccgcggcggactcctaccatgcctcaagaggaggctgctgaaaagcggcctcccgaacctcctggtcccccaccacctcctcccccaccacctctcgttgagggtgacttgagttctgctccacaggagctgaaccctgccgttacagcagcccttttgcagctactgagtcagccagaggctgagccccccgggcacttgcctcacgagcaccaggcgttacgaccaatggaatattctacacgcccaaggccaaatcgtacgtacggcaatacagacggccctgaaacaggatttagcgccatcgataccgacgagcggaatagcggtccggcattgaccgaatcattagtgcagaccttggttaagaacagaaccttttcagggtccttgagtcacctgggtgagtcctcctcataccagggcaccggcagcgtgcagttccccggcgatcaggaccttagatttgcccgcgtgccgctggcactgcatcctgttgtagggcagcccttccttaaggcagaaggaagttcaaactccgtggtgcatgccgaaactaagctgcagaactatggcgagcttggcccaggaacaacaggcgcaagctcctctggcgccggacttcattggggtggccctacccagtcttcagcctacggcaaactatatagaggacccacaagggtccctccccggggtggaaggggacgtggcgtaccgtactag

SEQ ID NO: 184311 - DNA, 4446 bp, Artificial Sequence
  derived and/or modified sequence
atgcccaacagcgagagacatggaggcaagaaggatggcagcggcggggccagcggcaccctgcagcccagcagcggcggcggcagcagcaacagccgggagcggcaccggctggtgtccaagcacaagaggcacaagagcaagcacagcaaggacatgggcctggtgaccccagaggccgccagcctgggcaccgtcatcaagcccctggtggagtatgatgacatcagcagtgacagcgacaccttcagtgatgacatggccttcaagctggacagaagagaaaatgatgaaagaagaggaagtgacagaagtgaccggctgcacaagcaccgccaccaccagcacagaagaagccgggacctgctgaaggccaagcagacagagaaggagaagagccaggaggtgagcagcaagagcggctccatgaaggaccgcatcagcggcagcagcaagaggagcaatgaggagacagatgattatggcaaggcccaggtggccaagagcagcagcaaggagagccgcagcagcaagctgcacaaggagaagaccaggaaggagcgggagctgaagagcggccacaaggacaggagcaagagccacaggaagcgggagacccccaagagctacaagacagtggacagccccaagaggaggagccgcagcccccacaggaagtggagcgacagcagcaagcaggatgacagccccagcggggccagctatggccaggactatgacctgagccccagccgcagccacaccagcagcaactatgacagctacaagaagagccctggcagcaccagccggcggcagagcgtgtccccaccctacaaggagcccagcgcctaccagagcagcaccaggagccccagcccctacagccggcggcagaggtctgtgagcccctacagcagaagaagaagcagcagctatgaaagaagtggcagctacagcggccgcagccccagcccctatggaagaagaagaagcagcagccccttcctgagcaagaggagcctgagccgcagccccctgcccagcaggaagtccatgaagagccgcagccgcagccctgcctacagccgccacagcagcagccacagcaagaagaagaggagcagcagccgcagccgccacagcagcatcagccctgtgcggctgcccctgaacagcagcctgggcgctgagctgagcaggaagaagaaggagagagctgctgctgctgctgctgccaagatggatggcaaggagagcaagggcagccctgtgttcctgcccaggaaagaaaacagctctgtggaggccaaggacagcggcctggagagcaagaagctgcccaggtctgtgaagctggagaagagcgccccagacacagagctggtgaatgtgacccacctgaacacagaggtgaagaacagcagtgacaccgggaaggtgaagctggatgaaaattctgagaagcacctggtgaaggacctgaaggcccagggcacccgggacagcaagcccatcgccctgaaggaggagatcgtgacccccaaggagacagagaccagcgagaaggagaccccaccacccctgcccaccatcgccagccccccaccacccctgcccaccaccaccccaccaccccagaccccacccctgccccccctgccccccatcccagccctgccccagcagccccccctgccccccagccagcctgccttcagccaggtgcctgccagcagcaccagcaccctgccccccagcacccacagcaagaccagcgctgtgagcagccaggccaacagccagccccctgtgcaggtgtctgtgaagacccaggtgtctgtgacagctgccatcccccacctgaagaccagcaccctgccccccctgcccctgccccccctgctgcctggagatgatgacatggacagccccaaggagaccctgcccagcaagcctgtgaagaaggagaaggagcagaggaccaggcacctgctgacagacctgcccctgcccccagagctgcccggcggggacctgagccccccagacagccctgagcccaaggccatcaccccaccccagcagccctacaagaagaggcccaagatctgctgccccaggtatggagagcggcggcagacagaaagtgactggggcaagagatgtgtggacaagtttgacatcatcggcatcattggagagggcacctacggccaggtgtacaaggccaaggacaaggacacaggagagctggtggccctgaagaaggtgcggctggacaatgagaaggagggcttccccatcacagccatccgggagatcaagatcctgcggcagctgatccacaggtctgtggtgaacatgaaggagatcgtgacagacaagcaggatgccctggacttcaagaaggacaagggggccttctacctggtgtttgagtacatggaccatgacctgatgggcctgctggagagcggcctggtgcacttcagcgaggaccacatcaagagcttcatgaagcagctgatggagggcctggagtactgccacaagaagaacttcctgcaccgggacatcaagtgcagcaacatcctgctgaacaacagcggccagatcaagctggccgactttggcctggcccggctgtacaacagcgaggagagccggccctacaccaacaaggtgatcaccctgtggtacagacctcctgagctgctgctgggggaggagcgctacaccccagccattgatgtgtggagctgtggctgcatcctgggggagctgttcaccaagaagcccatcttccaggccaacctggagctggcccagctggagctgatcagccggctgtgtggcagcccctgcccagctgtgtggccagatgtgatcaagctgccctacttcaacaccatgaagcccaagaagcagtacagaagaaggctgcgggaggagttctccttcatccccagcgctgccctggacctgctggaccacatgctgaccctggaccccagcaagcgctgcacagctgagcagaccctgcagagcgacttcctgaaggatgtggagctgagcaagatggcccccccagacctgccccactggcaggactgccacgagctgtggagcaagaagagaagacggcagaggcagagcggcgtggtggtggaggagcccccacccagcaagaccagcaggaaggagaccaccagcggcaccagcacagagcctgtgaagaacagcagccctgccccaccccagcctgcccctgggaaggtggagagcggggctggagatgccatcggcctggccgacatcacccagcagctgaaccagagcgagctggccgtgctgctgaacctgctgcagagccagacagacctgagcatcccccagatggcccagctgctgaacatccacagcaaccctgagatgcagcagcagctggaggccctgaaccagagcatcagcgccctgacagaggccaccagccagcagcaggacagcgagaccatggcccctgaggagagcctgaaggaggcccccagcgcccctgtgatcctgcccagcgctgagcagaccaccctggaggccagcagcaccccagctgacatgcagaacatcctggccgtgctgctgagccagctgatgaagacccaggagcccgccggcagcctggaggagaacaacagcgacaagaacagcggcccccagggccccaggaggacccccaccatgccccaggaggaggccgctgagaagaggcctcctgagcccccaggccccccacctcctcctcctcctccacccctggtggagggggacctgagcagcgccccccaggagctgaacccagctgtgacagctgccctgctgcagctgctgagccagcctgaggccgagcccccaggccacctgccccatgagcaccaggccctgcggcccatggagtacagcacccggccccggcccaacagaacctacggcaacacagatggccctgagaccggcttcagcgccatcgacacagatgaaagaaattctggccctgccctgacagagagcctggtgcagaccctggtgaagaacagaaccttcagcggcagcctgagccacctgggggagagcagcagctaccagggcactggatctgtgcagtttcctggggaccaggacctgcgctttgcccgggtgcccctggccctgcaccctgtggtgggccagcccttcctgaaggccgagggcagcagcaacagcgtggtgcacgccgagaccaagctgcagaactatggagagctgggccctggcaccactggagccagcagcagcggggccggcctgcactggggcggccccacccagagcagcgcctacggcaagctgtaccggggccccaccagggtgcccccccggggcggccggggccggggcgtgccctactag

SEQ ID NO: 184312 - DNA, 4446 bp, Artificial Sequence
  derived and/or modified sequence
atgcccaacagcgagcggcacggcggcaagaaggacggcagcggcggcgcaagcggaaccttgcaaccttcatctggtggaggttcgagcaatagtagggagcggcataggttagtcagcaaacataagagacacaagagcaagcactctaaggacatgggcctcgtgaccccggaagccgcgtctctggggacagtgattaagcccttggttgagtacgacgatatctcgtcagattctgacacattcagtgacgatatggcttttaaactagaccgacgcgaaaacgacgagaggaggggcagcgaccgttcagaccggctgcacaagcataggcatcatcagcatcgcagaagcagagacctgttgaaggctaagcagactgagaaggagaaatcccaagaggtgtcttctaaatccggctcaatgaaggatcggatcagtggaagttcaaagagaagtaacgaggaaactgacgactatggtaaagcccaggttgccaagagctcatctaaggaaagcaggtcttcgaaactgcacaaggagaagacaaggaaggaaagggagttgaaatctggacataaagataggagcaagtctcacagaaaacgagaaacacccaagtcctacaagaccgtggactcgccaaagaggcgctcacggagtccgcaccgaaaatggtccgattcttcaaagcaggacgatagcccttcaggagctagctacggtcaggattacgacctgtccccaagccgttctcacactagctcaaattatgactcttataagaagtctcctggatccacaagccggcggcagagtgtttcgcccccctacaaagagccctcagcctatcagagctctacccgttcgccctccccttactcaagacgtcaaagaagcgttagcccatactcgcggcggcggtcttcgagctacgagcgctcagggtcctattccgggcgttctcccagcccctacggacggcgaaggtcatcctcaccttttctgtccaagaggagcctcagccggagcccactgccttcccggaagtccatgaaatccaggagccgctctccagcctacagtcggcattcatccagccactcgaaaaaaaagcgctccagttctcgctctcggcacagcagcataagtcccgtccgtctgccacttaactcatctctcggcgcggaactctctaggaagaaaaaagagagggcagctgcagctgctgccgccaaaatggatggaaaagaaagtaaagggtcaccagtcttcctgccaagaaaagagaactcatctgtcgaggcaaaggattccggcctggaatcgaaaaagttgccgcgctctgtgaaactggaaaaaagtgcaccagacacagagctagtgaatgtcacacaccttaacaccgaggttaagaatagcagcgatacaggcaaggttaagctggatgagaacagtgagaaacacctggtgaaggatttaaaagctcagggtaccagagacagcaagcccattgccctgaaagaagagattgtgactccaaaagagaccgagacttccgaaaaggagactcctccccctctgccaactatcgcttcgccaccaccaccactgcctaccacaaccccccccccgcagacaccccccttacccccactgccccccatcccagccctgccccaacagccccctctgcccccatcccagcctgctttcagtcaggtgccagcttccagtacttcaaccttgccccctagcacacattccaaaacatctgccgtgagcagccaggccaacagccagccccctgttcaggtaagtgtgaagacacaggtgagtgttacagccgccattccacatctgaagacgagcactttgccccccctacctctcccgcctctgctgcccggcgatgacgatatggacagtcccaaagagacactgccatctaagcccgtaaaaaaggaaaaagagcagagaactcgccatttactgaccgatctgcccctccctcccgaattaccaggcggcgatctatcacctcccgatagccctgaacccaaggctatcacgccgccccagcagccgtataaaaagcgcccgaagatatgctgcccccgatatggtgaaaggaggcaaaccgaatccgactggggaaaacggtgcgtggacaagtttgacattattggaattatcggagaaggcacatacggccaggtatataaagccaaagataaagataccggggaactcgtggctctcaagaaggtccggctcgacaacgaaaaggaaggtttcccgattaccgccatcagagagatcaaaatcctgaggcaactcattcaccggtctgtcgtaaacatgaaagaaatcgtgacagataagcaggacgccctggacttcaagaaggacaaaggcgctttttacttggtcttcgaatatatggatcacgatttaatggggttgttggagtccggtctcgtgcacttctcagaagatcatattaaatcttttatgaaacagctaatggagggcctcgaatattgtcataaaaagaacttcctgcacagggatatcaaatgcagcaatattcttcttaacaactctggacaaattaaacttgcggactttggcttggctaggttatacaattcagaggagtccagaccctataccaacaaagtgatcacactgtggtatagacctccagagctgctgcttggcgaagaaagatatactccagcgatagatgtgtggagttgcggctgcattctgggcgaactctttacgaagaaaccaatttttcaggctaacctcgaactagcacagctcgagctgatctcccggctctgcggttccccttgccccgcagtgtggcccgacgtgataaaactcccctactttaacacaatgaagccgaaaaaacagtatagaagaagactccgtgaggagttctctttcatcccctcagcagcgctagatctgctggaccacatgctgacgctggacccttcaaaacgctgcaccgccgaacagactttacagagcgattttctgaaagatgtggagctctcaaaaatggcaccccctgatttgcctcactggcaggattgtcatgagctctggtccaagaagcgaaggagacagcgccaatccggcgttgtcgtggaagaaccgccacccagcaaaacgtctagaaaggagacaacatccggcacgagtaccgagcccgtgaaaaattctagtcccgcccccccccagccagcccccggaaaggttgagtcgggcgcaggggatgccatcggcctggccgatataacccagcaactcaatcaatcggagctcgccgtgctcctgaacctactccagtctcagacagacctttcaatcccacaaatggctcaactgctgaacatccactctaaccctgaaatgcagcagcagctggaggcattgaaccagtccatctccgcattaacggaggctacatcccaacagcaggattcagagacaatggccccagaagagtctctgaaagaggcaccttccgctcccgtcattctgccaagcgcagaacaaactaccctcgaagctagctcaactcccgccgatatgcagaatattctggctgtcttactgtcccagttgatgaaaacccaagagccagcagggtcccttgaagaaaacaatagcgacaaaaatagcgggccccaaggaccccggcgcactcctactatgccccaggaagaagccgcggaaaagcggccacctgaaccacctggcccgcctccacccccacctcctccccccttggtagagggcgatctgtctagcgccccccaagaacttaaccccgccgtcaccgcggcattactacagttgcttagccagcccgaggccgaaccccctgggcatctaccacatgagcatcaggccctgcgacccatggaatactctacccgtccccgtcccaatagaacctacggaaatactgatggccccgagaccggctttagcgccatcgacaccgacgaaaggaactccggccctgctctgactgagagtctcgtgcaaacactcgtgaagaatcggaccttttccggatccctgtcccatttgggagaatcctcttcttaccagggaactggatctgtgcagttccccggggaccaggacctgcggtttgcacgggtccccctggcgttgcatcccgtggttgggcaacctttccttaaagcagaggggtcaagtaactcagtggtacacgcggaaactaaactgcagaattatggcgagcttggaccaggcacaacgggagcctcaagctccggggcagggttacattggggcggaccaacccagtcctctgcatatggcaaactctaccggggccccacacgggtgcctccacgaggaggtcggggccgtggtgtgccttactag

SEQ ID NO: 184313 - DNA, 4446 bp, Artificial Sequence
  derived and/or modified sequence
atgcctaactcagaacggcacgggggtaagaaagacggctctggtggcgcatcaggcaccttgcagccatcctctggcggagggtctagtaattcgcgggaacgccacaggctcgtgagtaaacacaagcgccataagagtaagcacagcaaggatatggggttggtcactcctgaagctgcctccttgggtactgttattaagcctctggtggaatacgacgatatttcctcagatagtgacaccttttctgacgacatggcattcaaattggaccgcagggagaatgacgagaggagaggctcagaccgctcagataggctccataaacatcggcatcaccagcatcgcaggtcccgcgacctccttaaagccaaacagacagagaaagaaaagtcacaggaagttagctctaagagcggttccatgaaagacagaattagcgggagcagtaagcggtcaaacgaagagaccgacgactacggcaaggctcaagtggctaagagctcttcaaaggaatctcgatcaagcaagttgcacaaggaaaaaactcgcaaagagcgtgagttgaaatcagggcataaagacagatcaaaaagtcatcgtaaaagagagacaccgaagtcctacaaaaccgtcgattcccctaaaagacgatcaagaagtccacacaggaagtggtcagactctagtaagcaggatgacagtcccagtggtgccagctatggacaggattacgacctgagcccatcccgatcccacacatcttctaactacgatagctataagaaatcccccggatccacctctcggcgacagagcgtcagtccaccatacaaagaaccatcggcctaccaatccagcacccgcagtccctccccttacagcaggagacagcggtcggtctccccatactctcggcgaagatcatcatcatacgaaagaagcggaagctatagcggccgttctcccagtccatatgggaggcgacgcagcagtagccccttcctgagtaagagaagcctgagtcggtctcccctcccctccagaaaaagcatgaaaagccgtagcagaagtccggcatacagccgtcactcatcatcccactctaaaaaaaagcggagtagttctcgatctcgacacagttcaatctccccagtgaggctgccactgaactccagcttgggggcagaactctctagaaagaaaaaagaacgagcagcggcagctgctgctgcaaagatggatggcaaggaatctaaaggttctcctgttttcttgcccagaaaagagaattcctctgtagaagctaaagatagtggtctggaaagcaagaaactgccccgaagcgtaaagttagaaaaatcggcaccagacactgagctggtgaacgtcactcatctgaacaccgaggtcaagaactcttccgacaccgggaaagtcaagctggacgaaaacagcgagaagcacctggttaaggatttgaaggcccaaggcactcgggattccaaacccatagctcttaaagaggagatagttactccaaaagagactgagaccagtgaaaaagagaccccaccccctctaccaacaattgctagccctccacctcccctcccgactaccacgcctcctcctcagacaccacctctgccaccactgcctcctatccctgcgctgcctcagcagccacctcttcccccaagtcaacctgctttttctcaggtccccgcttcttcaacgtctaccctgccgccaagtactcacagtaagacgtctgctgtatcgtcccaggctaacagccagcctccggttcaggtgagtgtgaaaactcaggtgagcgttacagccgcaatcccacatctgaagacaagcaccctgcctcccctgcccttgccccctctattgccaggagacgacgacatggacagccccaaagaaaccttgcccagtaaacctgtcaaaaaggagaaggaacagaggacaaggcacctgttgacggacctacccttaccgcctgagctgcctgggggtgatttaagcccccctgatagcccagaaccgaaggccattactcccccacaacaaccctacaaaaagcgcccaaaaatatgttgcccacggtacggtgaaagacgtcagactgagagcgactggggcaaacgctgtgtggataagtttgatatcataggaatcattggtgaagggacctacggacaggtctacaaagctaaagataaggacaccggggaactggttgcacttaaaaaagtcagattagacaatgaaaaggagggattccccattactgctatccgggaaatcaaaattcttcgccagctcatccacagatccgtagtgaacatgaaagagatagttacagataagcaggatgccctggactttaagaaagataagggcgctttctatcttgtgttcgagtacatggatcacgacctcatgggcctcctcgaatcaggcctggtgcactttagcgaggaccatattaagagcttcatgaagcagttaatggaagggttggagtactgccacaagaaaaacttccttcaccgcgacatcaaatgcagcaatatccttctgaacaactcaggacagataaaattagcggactttggtttggcaaggttatacaactccgaagaaagtcgcccatataccaacaaagtgattacattatggtaccggccaccagagctgctgctgggagaggagcggtacaccccagcgatcgacgtttggtcgtgtggatgtattctcggagaactttttacaaagaagccaatcttccaagccaacttggaactagcccaattggagctgatctccagactgtgcgggtcaccctgccccgcagtgtggccagatgtgatcaagttaccctacttcaacaccatgaaacctaaaaagcagtatcgccgtcggctgcgcgaggaatttagtttcattccatccgccgctctggacctcctggatcatatgctgaccctggacccgtcaaagcggtgtaccgccgagcagaccctgcaatccgatttcctcaaggacgtggaactctccaagatggcccctcccgacctaccgcattggcaggattgccacgagctgtggtcaaaaaagcgtaggcgccagcggcagtcaggtgtggtggtcgaagagccgcctccctctaagacaagtagaaaagagaccacatctggcactagcactgaacccgtcaagaattcatctcccgctcctccacagccagcacctggcaaggtagagtcaggcgcaggagatgctataggcctcgccgacattacacaacagctgaaccaatctgaactggcagtgttactgaacctgttgcaatcccagaccgatctcagcatcccccaaatggcccagctgctgaacatccatagcaatcctgaaatgcagcaacagcttgaagcccttaaccagagcatctcagctctgacggaggccacctctcagcagcaagattctgagacgatggctccggaagaaagtcttaaggaggccccaagtgcccctgtcattttgccatccgctgagcagacaaccctggaagcatccagcacaccagccgatatgcagaatatactggcagttttgctgtcacagctgatgaaaacacaggagccggctgggtcactggaggaaaataatagtgataaaaactctggcccacagggcccacggaggacaccaacgatgccccaggaggaggccgctgaaaagcgcccacccgaacctcccggacctcccccaccacctccccctccacccctggtggagggcgatctgagttcggccccacaagagttgaatcctgccgtgaccgctgctctgctccaattgctcagtcagcccgaagcagaaccgccaggccatctgccccatgagcaccaggccctgagacccatggagtatagcactagaccccgacctaatcgaacttatggtaacaccgatgggcctgaaacaggattttccgccatcgatactgatgagcggaactctggcccagcactgacagaatctctggtccagacactggtaaagaatcggacctttagtgggtctctttctcacctcggcgagtcttcttcctatcagggtaccggaagtgtccagtttcccggtgatcaggatcttcgattcgcgcgagtgcccttggcacttcaccctgtggtcggacaaccttttctgaaggccgagggcagctcaaatagcgtggtgcacgcggaaacgaaactgcagaattacggagagctgggccctggaaccacaggcgctagctcctcaggcgctggactacattgggggggtcccacgcagtccagcgcatatggtaaactctatcggggtcctactcgagtacctccacggggtggcagaggccgaggtgtgccttattag

SEQ ID NO: 184314 - DNA, 8262 bp, Artificial Sequence
  derived and/or modified sequence
aagtgccgtttcggtttaatctagtgtgtgactgggtctgtgtgagggagagagtgtgtgtggtgtggaggtgaaacggaggcaagaaagggggctacctcaggagcgagggacaaagggggcgtgaggcacctaggccgcggcaccccggcgacaggaagccgtcctgaaccgggctaccgggtaggggaagggcccgcgtagtcctcgcagggccccagagctggagtcggctccacagccccgggccgtcggcttctcacttcctggacctccccggcgcccgggcctgaggactggctcggcggagggagaagaggaaacagacttgagcagctccccgttgtctcgcaactccactgccgaggaactctcatttcttccctcgctccttcaccccccacctcatgtagaagggtgctgaggcgtcgggagggaggaggagcctgggctaccgtccctgccctccccacccccttcccggggcgctttggtgggcgtggagttggggttgggggggtgggtgggggttgctttttggagtgctggggaacttttttcccttcttcaggtcaggggaaagggaatgcccaattcagagagacatgggggcaagaaggacgggagtggaggagcttctggaactttgcagccgtcatcgggaggcggcagctctaacagcagagagcgtcaccgcttggtatcgaagcacaagcggcataagtccaaacactccaaagacatggggttggtgacccccgaagcagcatccctgggcacagttatcaaacctttggtggagtatgatgatatcagctctgattccgacaccttctccgatgacatggccttcaaactagaccgaagggagaacgacgaacgtcgtggatcagatcggagcgaccgcctgcacaaacatcgtcaccaccagcacaggcgttcccgggacttactaaaagctaaacagaccgaaaaagaaaaaagccaagaagtctccagcaagtcgggatcgatgaaggaccggatatcgggaagttcaaagcgttcgaatgaggagactgatgactatgggaaggcgcaggtagccaaaagcagcagcaaggaatccaggtcatccaagctccacaaggagaagaccaggaaagaacgggagctgaagtctgggcacaaagaccggagtaaaagtcatcgaaaaagggaaacacccaaaagttacaaaacagtggacagcccaaaacggagatccaggagcccccacaggaagtggtctgacagctccaaacaagatgatagcccctcgggagcttcttatggccaagattatgaccttagtccctcacgatctcatacctcgagcaattatgactcctacaagaaaagtcctggaagtacctcgagaaggcagtcggtcagtcccccttacaaggagccttcggcctaccagtccagcacccggtcaccgagcccctacagtaggcgacagagatctgtcagtccctatagcaggagacggtcgtccagctacgaaagaagtggctcttacagcgggcgatcgcccagtccctatggtcgaaggcggtccagcagccctttcctgagcaagcggtctctgagtcggagtccactccccagtaggaaatccatgaagtccagaagtagaagtcctgcatattcaagacattcatcttctcatagtaaaaagaagagatccagttcacgcagtcgtcattccagtatctcacctgtcaggcttccacttaattccagtctgggagctgaactcagtaggaaaaagaaggaaagagcagctgctgctgctgcagcaaagatggatggaaaggagtccaagggttcacctgtatttttgcctagaaaagagaacagttcagtagaggctaaggattcaggtttggagtctaaaaagttacccagaagtgtaaaattggaaaaatctgccccagatactgaactggtgaatgtaacacatctaaacacagaggtaaaaaattcttcagatacagggaaagtaaagttggatgagaactccgagaagcatcttgttaaagatttgaaagcacagggaacaagagactctaaacccatagcactgaaagaggagattgttactccaaaggagacagaaacatcagaaaaggagacccctccacctcttcccacaattgcttctcccccaccccctctaccaactactacccctccacctcagacaccccctttgccacctttgcctccaataccagctcttccacagcaaccacctctgcctccttctcagccagcatttagtcaggttcctgcttccagtacttcaactttgcccccttctactcactcaaagacatctgctgtgtcctctcaggcaaattctcagccccctgtacaggtttctgtgaagactcaagtatctgtaacagctgctattccacacctgaaaacttcaacgttgcctcctttgcccctcccacccttattacctggagatgatgacatggatagtccaaaagaaactcttccttcaaaacctgtgaagaaagagaaggaacagaggacacgtcacttactcacagaccttcctctccctccagagctccctggtggagatctgtctcccccagactctccagaaccaaaggcaatcacaccacctcagcaaccatataaaaagagaccaaaaatttgttgtcctcgttatggagaaagaagacaaacagaaagcgactgggggaaacgctgtgtggacaagtttgacattattgggattattggagaaggaacctatggccaagtatataaagccaaggacaaagacacaggagaactagtggctctgaagaaggtgagactagacaatgagaaagagggcttcccaatcacagccattcgtgaaatcaaaatccttcgtcagttaatccaccgaagtgttgttaacatgaaggaaattgtcacagataaacaagatgcactggatttcaagaaggacaaaggtgccttttaccttgtatttgagtatatggaccatgacttaatgggactgctagaatctggtttggtgcacttttctgaggaccatatcaagtcgttcatgaaacagctaatggaaggattggaatactgtcacaaaaagaatttcctgcatcgggatattaagtgttctaacattttgctgaataacagtgggcaaatcaaactagcagattttggacttgctcggctctataactctgaagagagtcgcccttacacaaacaaagtcattactttgtggtaccgacctccagaactactgctaggagaggaacgttacacaccagccatagatgtttggagctgtggatgtattcttggggaactattcacaaagaagcctatttttcaagccaatctggaactggctcagctagaactgatcagccgactttgtggtagcccttgtccagctgtgtggcctgatgttatcaaactgccctacttcaacaccatgaaaccgaagaagcaatatcgaaggcgtctacgagaagaattctctttcattccttctgcagcacttgatttattggaccacatgctgacactagatcctagtaagcggtgcacagctgaacagaccctacagagcgacttccttaaagatgtcgaactcagcaaaatggctcctccagacctcccccactggcaggattgccatgagttgtggagtaagaaacggcgacgtcagcgacaaagtggtgttgtagtcgaagagccacctccatccaaaacttctcgaaaagaaactacctcagggacaagtactgagcctgtgaagaacagcagcccagcaccacctcagcctgctcctggcaaggtggagtctggggctggggatgcaataggccttgctgacatcacacaacagctgaatcaaagtgaattggcagtgttattaaacctgctgcagagccaaaccgacctgagcatccctcaaatggcacagctgcttaacatccactccaacccagagatgcagcagcagctggaagccctgaaccaatccatcagtgccctgacggaagctacttcccagcagcaggactcagagaccatggccccagaggagtctttgaaggaagcaccctctgccccagtgatcctgccttcagcagaacagacgacccttgaagcttcaagcacaccagctgacatgcagaatatattggcagttctcttgagtcagctgatgaaaacccaagagccagcaggcagtctggaggaaaacaacagtgacaagaacagtgggccacaggggccccgaagaactcccacaatgccacaggaggaggcagcagagaagaggccccctgagccccccggacctccaccgccgccacctccaccccctctggttgaaggcgatctttccagcgccccccaggagttgaacccagccgtgacagccgccttgctgcaacttttatcccagcctgaagcagagcctcctggccacctgccacatgagcaccaggccttgagaccaatggagtactccacccgaccccgtccaaacaggacttatggaaacactgatgggcctgaaacagggttcagtgccattgacactgatgaacgaaactctggtccagccttgacagaatccttggtccagaccctggtgaagaacaggaccttctcaggctctctgagccaccttggggagtccagcagttaccagggcacagggtcagtgcagtttccaggggaccaggacctccgttttgccagggtccccttagcgttacacccggtggtcgggcaaccattcctgaaggctgagggaagcagcaattctgtggtacatgcagagaccaaattgcaaaactatggggagctggggccaggaaccactggggccagcagctcaggagcaggccttcactgggggggcccaactcagtcttctgcttatggaaaactctatcgggggcctacaagagtcccaccaagagggggaagagggagaggagttccttactaacccagagacttcagtgtcctgaaagattcctttcctatccatccttccatccagttctctgaatctttaatgaaatcatttgccagagcgaggtaatcatctgcatttggctactgcaaagctgtccgttgtattccttgctcacttgctactagcaggcgacttacgaaataatgatgttggcaccagttccccctggatgggctatagccagaacatttacttcaactctaccttagtagatacaagtagagaatatggagaggatcattacattgaaaagtaaatgttttattagttcattgcctgcacttactgatcggaagagagaaagaacagtttcagtattgagatggctcaggagaggctctttgatttttaaagttttggggtgggggattgtgtgtggtttctttcttttgaattttaatttaggtgttttgggtttttttcctttaaagagaatagtgttcacaaaatttgagctgctctttggcttttgctataagggaaacagagtggcctggctgatttgaataaatgtttctttcctctccaccatctcacattttgcttttaagtgaacactttttccccattgagcatcttgaacatactttttttccaaataaattactcatccttaaagtttactccactttgacaaaagatacgcccttctccctgcacataaagcaggttgtagaacgtggcattcttgggcaagtaggtagactttacccagtctctttccttttttgctgatgtgtgctctctctctctctttctctctctctctctctctctctctctctctctctctctctgtctcgcttgctcgctctcgctgtttctctctctttgaggcatttgtttggaaaaaatcgttgagatgcccaagaacctgggataattctttactttttttgaaataaaggaaaggaaattcagactcttacattgttctctgtaactcttcaattctaaaatgttttgttttttaaaccatgttctgatggggaagttgatttgtaagtgtggacagcttggacattgctgctgagctgtggttagagatgatgcctccattcctagagggctaataacagcatttagcatattgtttacacatatatttttatgtcaaaaaaaaaacaaaaacctttcaaacagagcattgtgatattgtcaaagagaaaaacaaatcctgaagatacatggaaatgtaacctagtttagggtgggtatttttctgaagatacatcaatacctgaccttttttaaaaaaataattttaaaacagcatactgtgaggaagaacagtattgacatacccacatcccagcatgtgtaccctgccagttcttttagggatttttcctccaaagagatttggatttggttttggtaaaaggggttaaattgtgcttccaggcaagaactttgccttatcataaacaggaaatgaaaaagggaagggctgtcaggatgggataatttgggaggcttctcattctggcttctatttctatgtgagtaccagcatatagagtgttttaaaaacagatacatgtcatataatttatctgcacagacttagaccttcaggaaacataggttaagcccccttttacaaagaaaaagtaaacatacttcagcatcttggagggtagttttcaaaactcaagtttcatgtttcaatgccaagttcttattttaaaaaataaaatctacttataagagaaaggtgcattacttaaaaaaaaaaaactttaaagaaatgaaagaagaaccctcttcagatacttacttgaagactgttttcccctgttaatgagatatagctagatatcggtgtgtgtatttctttattattctctggtttttgatctggccttgcctccagggccaaacactgatttagaaagagagccttctagctattttggcattgatggctttttataccagtgtgtccagttagatttactaggcttactgacatgctattggtaaatcgcattaaagttcatctgaaccttctgtctgttgacttcttagtcctcagacatgggcctttgtgttttagaatatttgaatttgagttattgggccccactccctgttttttattaaagaacgtgagcctgggatactttcagaagtatctgttcaatgaaaaaaagttggtttcccatcaaatatgaataaaattctctatatatttcattgtattttggttatcagcagtcatcaataatgtttttccctcccctctcccacctcttatttttaattatgccaaatatcctaaataatatacttaagcctccattccctcatccctactagggaagggggtgagtgtatgtgtgagtgtatgtgtatgtatgatcccatctcacccccacccccattttgggagtcttttaaaatgaaaacaaagtttggtagttttgactatttctaaaagcagaggagaaaaaaaaacttatttaaatatcctggaatctgtatggaggaagaaaaggtatttgttaatttttcagttacgttatctataaacatgatggaagtaaaggtttggcagaatttcaccttgactatttgaaaattacagacccaattaattccattcaaaagtggttttcgttttgttttaattattgtacaatgagagatattgtctattaaatacattattttgaacagatgagaaatctgattctgttcatgagtgggaggcaaaactggtttgaccgtgatcatttttgtggttttgaaaacaaatatacttgacccagtttccttagttttttcttcaactgtccataggaacgataagtatttgaaagcaacatcaaatctatacgtttaaagcagggcagttagcacaaatttgcaagtagaacttctattagcttatgccatagacatcacccaaccacttgtatgtgtgtgtgtatatataatatgcatatatagttaccgtgctaaaatggttaccagcaggttttgagagagaatgctgcatcagaaaagtgtcagttgccacctcattctccctgatttaggttcctgacactgattcctttctctctcgtttttgacccccattgggtgtatcttgtctatgtacagatattttgtaatatattaaatttttttctttcagtttataaaaatggaaagtggagattggaaaattaaatatttcctgttactatacc

SEQ ID NO: 184315 - DNA, 4446 bp, Artificial Sequence
  derived and/or modified sequence
atgcccaacagcgagagacacggcggcaagaaggacggcagcggcggcgccagcggcaccctgcagcccagcagcggcggcggcagcagcaacagcagagagagacacagactggtgagcaagcacaagagacacaagagcaagcacagcaaggacatgggcctggtgacccccgaggccgccagcctgggcaccgtgatcaagcccctggtggagtacgacgacatcagcagcgacagcgacaccttcagcgacgacatggccttcaagctggacagaagagagaacgacgagagaagaggcagcgacagaagcgacagactgcacaagcacagacaccaccagcacagaagaagcagagacctgctgaaggccaagcagaccgagaaggagaagagccaggaggtgagcagcaagagcggcagcatgaaggacagaatcagcggcagcagcaagagaagcaacgaggagaccgacgactacggcaaggcccaggtggccaagagcagcagcaaggagagcagaagcagcaagctgcacaaggagaagaccagaaaggagagagagctgaagagcggccacaaggacagaagcaagagccacagaaagagagagacccccaagagctacaagaccgtggacagccccaagagaagaagcagaagcccccacagaaagtggagcgacagcagcaagcaggacgacagccccagcggcgccagctacggccaggactacgacctgagccccagcagaagccacaccagcagcaactacgacagctacaagaagagccccggcagcaccagcagaagacagagcgtgagccccccctacaaggagcccagcgcctaccagagcagcaccagaagccccagcccctacagcagaagacagagaagcgtgagcccctacagcagaagaagaagcagcagctacgagagaagcggcagctacagcggcagaagccccagcccctacggcagaagaagaagcagcagccccttcctgagcaagagaagcctgagcagaagccccctgcccagcagaaagagcatgaagagcagaagcagaagccccgcctacagcagacacagcagcagccacagcaagaagaagagaagcagcagcagaagcagacacagcagcatcagccccgtgagactgcccctgaacagcagcctgggcgccgagctgagcagaaagaagaaggagagagccgccgccgccgccgccgccaagatggacggcaaggagagcaagggcagccccgtgttcctgcccagaaaggagaacagcagcgtggaggccaaggacagcggcctggagagcaagaagctgcccagaagcgtgaagctggagaagagcgcccccgacaccgagctggtgaacgtgacccacctgaacaccgaggtgaagaacagcagcgacaccggcaaggtgaagctggacgagaacagcgagaagcacctggtgaaggacctgaaggcccagggcaccagagacagcaagcccatcgccctgaaggaggagatcgtgacccccaaggagaccgagaccagcgagaaggagacccccccccccctgcccaccatcgccagcccccccccccccctgcccaccaccaccccccccccccagaccccccccctgccccccctgccccccatccccgccctgccccagcagccccccctgccccccagccagcccgccttcagccaggtgcccgccagcagcaccagcaccctgccccccagcacccacagcaagaccagcgccgtgagcagccaggccaacagccagccccccgtgcaggtgagcgtgaagacccaggtgagcgtgaccgccgccatcccccacctgaagaccagcaccctgccccccctgcccctgccccccctgctgcccggcgacgacgacatggacagccccaaggagaccctgcccagcaagcccgtgaagaaggagaaggagcagagaaccagacacctgctgaccgacctgcccctgccccccgagctgcccggcggcgacctgagcccccccgacagccccgagcccaaggccatcacccccccccagcagccctacaagaagagacccaagatctgctgccccagatacggcgagagaagacagaccgagagcgactggggcaagagatgcgtggacaagttcgacatcatcggcatcatcggcgagggcacctacggccaggtgtacaaggccaaggacaaggacaccggcgagctggtggccctgaagaaggtgagactggacaacgagaaggagggcttccccatcaccgccatcagagagatcaagatcctgagacagctgatccacagaagcgtggtgaacatgaaggagatcgtgaccgacaagcaggacgccctggacttcaagaaggacaagggcgccttctacctggtgttcgagtacatggaccacgacctgatgggcctgctggagagcggcctggtgcacttcagcgaggaccacatcaagagcttcatgaagcagctgatggagggcctggagtactgccacaagaagaacttcctgcacagagacatcaagtgcagcaacatcctgctgaacaacagcggccagatcaagctggccgacttcggcctggccagactgtacaacagcgaggagagcagaccctacaccaacaaggtgatcaccctgtggtacagaccccccgagctgctgctgggcgaggagagatacacccccgccatcgacgtgtggagctgcggctgcatcctgggcgagctgttcaccaagaagcccatcttccaggccaacctggagctggcccagctggagctgatcagcagactgtgcggcagcccctgccccgccgtgtggcccgacgtgatcaagctgccctacttcaacaccatgaagcccaagaagcagtacagaagaagactgagagaggagttcagcttcatccccagcgccgccctggacctgctggaccacatgctgaccctggaccccagcaagagatgcaccgccgagcagaccctgcagagcgacttcctgaaggacgtggagctgagcaagatggccccccccgacctgccccactggcaggactgccacgagctgtggagcaagaagagaagaagacagagacagagcggcgtggtggtggaggagcccccccccagcaagaccagcagaaaggagaccaccagcggcaccagcaccgagcccgtgaagaacagcagccccgcccccccccagcccgcccccggcaaggtggagagcggcgccggcgacgccatcggcctggccgacatcacccagcagctgaaccagagcgagctggccgtgctgctgaacctgctgcagagccagaccgacctgagcatcccccagatggcccagctgctgaacatccacagcaaccccgagatgcagcagcagctggaggccctgaaccagagcatcagcgccctgaccgaggccaccagccagcagcaggacagcgagaccatggcccccgaggagagcctgaaggaggcccccagcgcccccgtgatcctgcccagcgccgagcagaccaccctggaggccagcagcacccccgccgacatgcagaacatcctggccgtgctgctgagccagctgatgaagacccaggagcccgccggcagcctggaggagaacaacagcgacaagaacagcggcccccagggccccagaagaacccccaccatgccccaggaggaggccgccgagaagagaccccccgagccccccggccccccccccccccccccccccccccccctggtggagggcgacctgagcagcgccccccaggagctgaaccccgccgtgaccgccgccctgctgcagctgctgagccagcccgaggccgagccccccggccacctgccccacgagcaccaggccctgagacccatggagtacagcaccagacccagacccaacagaacctacggcaacaccgacggccccgagaccggcttcagcgccatcgacaccgacgagagaaacagcggccccgccctgaccgagagcctggtgcagaccctggtgaagaacagaaccttcagcggcagcctgagccacctgggcgagagcagcagctaccagggcaccggcagcgtgcagttccccggcgaccaggacctgagattcgccagagtgcccctggccctgcaccccgtggtgggccagcccttcctgaaggccgagggcagcagcaacagcgtggtgcacgccgagaccaagctgcagaactacggcgagctgggccccggcaccaccggcgccagcagcagcggcgccggcctgcactggggcggccccacccagagcagcgcctacggcaagctgtacagaggccccaccagagtgccccccagaggcggcagaggcagaggcgtgccctactag

SEQ ID NO: 184316 - protein, 730 aa, Artificial Sequence
  derived and/or modified sequence
MFGRKRSVSFGGFGWIDKTMLASLKVKKQELANSSDATLPDRPLSPPLTAPPTMKSSEFFEMLEKMQGIKLEEQKPGPQKNKDDYIPYPSIDEVVEKGGPYPQVILPQFGGYWIEDPENVGTPTSLGSSICEEEEEDNLSPNTFGYKLECKGEARAYRRHFLGKDHLNFYCTGSSLGNLILSVKCEEAEGIEYLRVILRSKLKTVHERIPLAGLSKLPSVPQIAKAFCDDAVGLRFNPVLYPKASQMIVSYDEHEVNNTFKFGVIYQKARQTLEEELFGNNEESPAFKEFLDLLGDTITLQDFKGFRGGLDVTHGQTGVESVYTTFRDREIMFHVSTKLPFTDGDAQQLQRKRHIGNDIVAIIFQEENTPFVPDMIASNFLHAYIVVQVETPGTETPSYKVSVTAREDVPTFGPPLPSPPVFQKGPEFREFLLTKLTNAENACCKSDKFAKLEDRTRAALLDNLHDELHAHTQAMLGLGPEEDKFENGGHGGFLESFKRAIRVRSHSMETMVGGQKKSHSGGIPGSLSGGISHNSMEVTKTTFSPPVVAATVKNQSRSPIKRRSGLFPRLHTGSEGQGDSRARCDSTSSTPKTPDGGHSSQEIKSETSSNPSSPEICPNKEKPFMKLKENGRAISRSSSSTSSVSSTAGEGEAMEEGDSGGSQPSTTSPFKQEVFVYSPSPSSESPSLGAAATPIIMSRSPTDAKSRNSPRSNLKFRFDKLSHASSGAGH

SEQ ID NO: 184317 - DNA, 2136 bp, Artificial Sequence
  derived and/or modified sequence
atgctggccagcctgaaggtgaagaagcaggagctggccaacagcagcgacgccaccctgcccgacagacccctgagcccccccctgaccgccccccccaccatgaagagcagcgagttcttcgagatgctggagaagatgcagggcatcaagctggaggagcagaagcccggcccccagaagaacaaggacgactacatcccctaccccagcatcgacgaggtggtggagaagggcggcccctacccccaggtgatcctgccccagttcggcggctactggatcgaggaccccgagaacgtgggcacccccaccagcctgggcagcagcatctgcgaggaggaggaggaggacaacctgagccccaacaccttcggctacaagctggagtgcaagggcgaggccagagcctacagaagacacttcctgggcaaggaccacctgaacttctactgcaccggcagcagcctgggcaacctgatcctgagcgtgaagtgcgaggaggccgagggcatcgagtacctgagagtgatcctgagaagcaagctgaagaccgtgcacgagagaatccccctggccggcctgagcaagctgcccagcgtgccccagatcgccaaggccttctgcgacgacgccgtgggcctgagattcaaccccgtgctgtaccccaaggccagccagatgatcgtgagctacgacgagcacgaggtgaacaacaccttcaagttcggcgtgatctaccagaaggccagacagaccctggaggaggagctgttcggcaacaacgaggagagccccgccttcaaggagttcctggacctgctgggcgacaccatcaccctgcaggacttcaagggcttcagaggcggcctggacgtgacccacggccagaccggcgtggagagcgtgtacaccaccttcagagacagagagatcatgttccacgtgagcaccaagctgcccttcaccgacggcgacgcccagcagctgcagagaaagagacacatcggcaacgacatcgtggccatcatcttccaggaggagaacacccccttcgtgcccgacatgatcgccagcaacttcctgcacgcctacatcgtggtgcaggtggagacccccggcaccgagacccccagctacaaggtgagcgtgaccgccagagaggacgtgcccaccttcggcccccccctgcccagcccccccgtgttccagaagggccccgagttcagagagttcctgctgaccaagctgaccaacgccgagaacgcctgctgcaagagcgacaagttcgccaagctggaggacagaaccagagccgccctgctggacaacctgcacgacgagctgcacgcccacacccaggccatgctgggcctgggccccgaggaggacaagttcgagaacggcggccacggcggcttcctggagagcttcaagagagccatcagagtgagaagccacagcatggagaccatggtgggcggccagaagaagagccacagcggcggcatccccggcagcctgagcggcggcatcagccacaacagcatggaggtgaccaagaccaccttcagcccccccgtggtggccgccaccgtgaagaaccagagcagaagccccatcaagagaagaagcggcctgttccccagactgcacaccggcagcgagggccagggcgacagcagagccagatgcgacagcaccagcagcacccccaagacccccgacggcggccacagcagccaggagatcaagagcgagaccagcagcaaccccagcagccccgagatctgccccaacaaggagaagcccttcatgaagctgaaggagaacggcagagccatcagcagaagcagcagcagcaccagcagcgtgagcagcaccgccggcgagggcgaggccatggaggagggcgacagcggcggcagccagcccagcaccaccagccccttcaagcaggaggtgttcgtgtacagccccagccccagcagcgagagccccagcctgggcgccgccgccacccccatcatcatgagcagaagccccaccgacgccaagagcagaaacagccccagaagcaacctgaagttcagattcgacaagctgagccacgccagcagcggcgccggccactag

SEQ ID NO: 184318 - DNA, 2193 bp, Artificial Sequence
  derived and/or modified sequence
atgtttggcagaaaaaggtccgtgtccttcggaggatttggatggatcgacaagaccatgcttgcaagtcttaaggtgaagaagcaggaactggctaacagtagtgacgccactttgccagaccgaccgctcagcccacccctaacagcacccccgacaatgaaatccagcgagttttttgagatgctcgaaaagatgcagggaattaaactagaagaacagaagccagggccccagaaaaacaaggatgactacattccctacccgtccatcgatgaggtggtggaaaaaggcgggccatatcctcaagttatcctgcctcagtttggcggctattggatcgaggaccctgaaaacgtgggaactcctactagtctgggcagcagtatttgcgaagaagaagaggaggacaatctctcccctaacacttttggatacaaacttgagtgtaaaggcgaggcccgagcgtatcgcagacattttctgggcaaggatcacctaaatttttactgcaccggctcttctctcggcaacctgattctgtcggttaaatgcgaggaggctgagggtatagaatatctgagagtaattctgagatcaaagctgaagacagtccatgaaagaatccctctcgcaggcctctcaaaactgccctccgtaccacaaatcgcaaaggcattttgcgacgatgccgtgggcctgagattcaaccccgttctataccccaaagctagccaaatgatagtgagctacgatgaacacgaagtcaataacacttttaagtttggtgtcatttaccagaaggcgcgacagacattggaagaagaactgttcgggaacaatgaggagtctcccgctttcaaagaatttctcgatctcctgggcgacaccataacactgcaggactttaaaggcttcagaggaggattggatgtgactcatgggcaaactggggttgagagcgtgtataccacattccgggatcgggagatcatgtttcacgtctctactaaattacctttcaccgacggggatgcccagcaactacagagaaaacgacatattgggaacgacattgtcgcaatcatttttcaagaagagaacacaccgttcgttccagacatgattgcttccaatttcttgcacgcttacattgtagtgcaggtcgagacaccaggtaccgagaccccgtcttacaaggtttctgttacagcccgtgaggacgtcccaaccttcggccctccactgcccagtcctcctgtgttccagaaggggcccgaatttagggagtttctgctcactaagctgaccaacgccgagaatgcatgttgtaaaagcgacaaattcgcgaaactcgaggatcggactcgagccgctctcctggataacttgcatgatgagctgcatgctcacacacaagcaatgctaggtcttggtcccgaggaggataagttcgagaacggggggcatgggggatttttagaatcgttcaaaagagcgatcagagtcaggagtcactcgatggagaccatggtcggcggccaaaagaagtcccactctggcggaatacctggctcactttctggcggcattagccacaatagcatggaagtgaccaagacaacattcagtccccccgtagtggctgctactgtgaaaaaccagagtagaagccccatcaaaaggaggagtgggctttttccccgtcttcacaccggtagtgaaggtcagggagatagtcgcgctagatgtgacagcacctcttcgaccccaaagacacctgacggaggtcacagcagccaggagatcaagtccgagacctcgtccaaccccagcagccctgaaatctgtcccaataaggaaaaaccctttatgaagcttaaggagaatggacgtgccattagtcgcagctcctcttctacatcgtccgtaagcagtactgccggcgagggagaggcaatggaggaaggagactccggtggtagccagccttccaccacgagccctttcaagcaagaggtgtttgtctactccccctctccatcaagcgaaagtccgtccctgggcgcggcagcgacccccattatcatgtctcgctcaccaaccgacgcaaaatcacgtaattctcctcggtctaacctgaagttccgttttgataaactgagccacgcttcatcaggagcagggcactag

SEQ ID NO: 184319 - DNA, 2136 bp, Artificial Sequence
  derived and/or modified sequence
atgctcgcctctctcaaagtgaagaaacaagagcttgctaacagctccgacgctacactgccagacagacctctgtcaccccccctgacagcaccaccgacgatgaaaagctccgagttttttgagatgctggagaagatgcaaggaattaagctggaggagcagaagccaggcccgcaaaaaaacaaagatgactacatcccttaccccagcatcgatgaggttgtcgagaaaggaggtccttatccacaagtaattctgccacagttcggcgggtattggatagaggatcctgaaaatgtcggaactccgacttctctggggtcttcaatatgtgaggaggaagaggaagacaacctgtcacctaacacgtttgggtataagctggagtgcaaaggagaggcaagagcctaccggcgccacttcctaggcaaagaccatttaaatttctattgtaccggttcctcgttgggaaacctgatattatctgtcaaatgtgaagaggcggagggcattgaatacttaagagtaattcttcgctctaagctgaaaactgtgcacgaaaggatccccctggctggactgagcaaacttccctctgtccctcagattgccaaggccttctgtgatgatgccgtcggtctgaggtttaaccctgtcctatacccgaaagcatcacaaatgatcgtgtcttatgatgagcacgaagtgaataacaccttcaaattcggtgtgatctaccagaaggcccgccaaactctggaggaggagcttttcgggaacaacgaggaaagtccggcttttaaggagttcctcgacctcctgggagataccattactctgcaggatttcaaaggctttagaggcgggctggacgtcacccatggtcagaccggggtcgagtcagtgtacacaacattccgcgatcgggaaatcatgtttcacgtgagcacaaaactcccgttcaccgacggagatgctcagcagctccagcggaagcgacacattgggaatgatatcgttgccatcatttttcaagaggagaataccccattcgtacctgacatgatcgcatccaattttctccatgcttacattgtcgtgcaggtggaaacccctgggacagagacaccctcctataaggtcagcgtgactgccagggaagacgtcccaacctttggcccacctctgccgtctccgcccgtcttccagaaaggccccgaatttcgagaattcctgctcacgaagctgaccaacgctgaaaacgcttgttgtaaatccgacaagttcgccaagttggaggatcgaaccagagccgctctccttgataatttgcacgatgagctacatgcccatacacaagccatgttgggcctcggcccggaggaggacaagttcgaaaacggtgggcatggcggcttcttggagtcgttcaaacgggcaatccgagttaggtctcacagtatggaaaccatggtgggaggtcaaaaaaagagccactcgggcgggatcccaggatcactttcgggcggaatctcccacaactctatggaggtaacgaaaaccaccttctcccccccagttgtggccgcaactgtgaagaatcagagtaggtctcctatcaagaggagatctggcctgttccctcggttacatacggggagcgaggggcaaggcgactctcgggccagatgtgactctacctcctcaactccgaaaacacctgacgggggacactctagccaggagattaagagcgagactagttctaacccgtcttcgccagaaatatgccctaataaagagaagccattcatgaagttaaaggagaatggacgggctatctctcgttcaagtagctctacatcctctgtatcgagtaccgcaggcgagggagaagctatggaggagggcgacagcggagggagccagccctctaccacaagcccctttaaacaagaggtgtttgtctacagtccaagcccttcgtccgaaagccccagccttggagcggccgccacacccattattatgagcaggtctccaacagatgcgaagtctagaaacagcccaaggtccaatttgaagttccgtttcgacaaactgagccacgccagttcaggcgccggacactag

SEQ ID NO: 184320 - DNA, 2193 bp, Artificial Sequence
  derived and/or modified sequence
atgttcggacggaagaggagcgtctctttcggtggcttcgggtggatcgataaaactatgctcgctagccttaaggtgaagaagcaggagctggcgaattcgagcgacgccacactgccagaccgccctctatcaccaccactgaccgcccctcctactatgaaatctagtgaatttttcgaaatgctggagaagatgcagggaatcaagctggaggagcaaaaacctggcccccagaagaacaaggacgattacatcccctacccaagcatagatgaggtggtagagaagggcggaccttatcctcaggtcatactcccgcagttcggcggatattggatcgaagatccagagaacgtgggaacaccaacaagcctggggtcaagtatctgcgaggaagaagaagaggataatctgtctcctaacaccttcggatacaagctggaatgtaagggtgaagcccgcgcctaccggagacactttctgggtaaagaccacctaaacttttattgtacagggagctccttgggcaacctgatcctgtctgtcaaatgtgaggaggcagaaggcatcgaataccttcgtgtgatcttgaggtcaaagctgaagacagtccacgaaaggattcccctggccggcctttccaaactgccatcagtgccccagatcgcgaaggcattctgtgacgacgctgtggggctaaggtttaatcccgtcctctacccaaaggcttcacagatgatagtctcctacgatgagcatgaggtcaataataccttcaagtttggtgtgatttatcaaaaagcacggcagacactggaggaggaactgttcggtaataacgaagaaagtcccgccttcaaggagttcttggatctccttggggatactattaccctgcaagacttcaaagggtttagaggcgggctggacgtgacgcacggccagaccggtgttgaatccgtttatacaacgttcagagacagagaaattatgttccatgtgtctacgaaactgcctttcacagacggcgatgcccagcagctgcagagaaagcggcacattggaaacgatattgttgccatcatatttcaggaagaaaatactccgtttgtgccggacatgattgcatcaaatttccttcacgcatacatagtggtgcaggtggagaccccaggtactgagacaccctcttacaaggtgtccgtcaccgcgagggaggatgttcctacctttggccccccactgccgtcaccacctgtctttcagaaaggtcccgagttccgagagtttctacttaccaagctgacaaatgccgagaatgcatgctgcaaaagcgacaagttcgctaagcttgaggacagaacccgggccgccctactggataacctgcacgacgaactgcatgcccacacccaggcaatgttagggctggggcctgaggaggacaagttcgagaatggaggccacggtggattcctcgagtcattcaagcgggctattcgcgttcgctcacactctatggaaaccatggtgggtggacagaaaaaatcccacagtggcggaatacccgggagtctgtccgggggaatctctcataattccatggaagttacaaagaccaccttctcgccaccagtggtcgctgctacggtgaaaaatcagtcgaggagtcctatcaaaagacggtcaggcctattcccaagactgcatacaggatctgagggccaaggagattctagggcccgctgtgatagcacgagttccacacctaaaacacctgacggtgggcacagttcgcaggaaataaagagtgagacctcgagcaatccctcaagtccagagatctgtcctaacaaggaaaagcccttcatgaagctgaaggagaacggccgcgccatttcccggagcagctcctctacctccagtgttagctccaccgctggtgagggggaggccatggaagagggcgatagcggaggttctcaaccgtcaacaactagtcctttcaagcaggaggtttttgtttactcacctagcccgagttcagagagcccaagccttggcgctgcggctacacccattatcatgagcaggagccccaccgacgccaagagcaggaattccccgagatcaaacttgaagttcaggtttgacaagctgagccatgcttcatcaggcgccggccattag

SEQ ID NO: 184321 - DNA, 2193 bp, Artificial Sequence
  derived and/or modified sequence
atgtttggaaggaagaggtctgtgtcctttggaggcttcggctggattgacaagaccatgctggccagcctgaaggtgaagaagcaggagctggccaacagcagtgatgccaccctgcctgaccggcccctgagcccccccctgacagccccacccaccatgaagagcagcgagttctttgagatgctggagaagatgcagggcatcaagctggaggagcagaagccaggcccccagaagaacaaggatgactacatcccctaccccagcattgatgaggtggtggagaagggcggcccctacccccaggtgatcctgccccagtttggaggctactggattgaagatcctgaaaatgtgggcacccccaccagcctgggcagcagcatctgtgaggaggaggaggaggacaacctgagccccaacaccttcggctacaagctggagtgcaagggggaggcccgggcctaccgccgccacttcctgggcaaggaccacctgaacttctactgcaccggcagcagcctgggcaacctgatcctgtctgtgaagtgtgaggaggccgagggcatcgagtacctgcgggtcatcctgcggagcaagctgaagacagtgcatgagcgcatccccctggccggcctgagcaagctgcccagcgtgccccagatcgccaaggccttctgtgatgatgctgtgggcctgcgcttcaaccctgtgctgtaccccaaggccagccagatgattgtgtcctatgatgagcacgaggtgaacaacaccttcaagtttggagtcatctaccagaaggcccggcagaccctggaggaggagctgtttggaaataatgaggagagccctgccttcaaggagttcctggacctgctgggggacaccatcaccctgcaggacttcaagggcttccggggcggcctggatgtgacccacggccagacaggagtggagagcgtgtacaccaccttccgggaccgggagatcatgttccacgtgtccaccaagctgcccttcacagatggagatgcccagcagctgcagaggaagaggcacatcggaaatgacatcgtggccatcatcttccaggaggagaacaccccatttgtgcctgacatgattgccagcaacttcctgcacgcctacatcgtggtgcaggtggagaccccaggcacagagacccccagctacaaggtgtctgtgacagccagagaagatgtgcccaccttcggcccccccctgcccagcccccctgtgttccagaagggccctgagttccgggagttcctgctgaccaagctgaccaatgcagaaaatgcctgctgcaagagtgacaagtttgccaagctggaggacaggacccgggccgccctgctggacaacctgcatgatgagctgcacgcccacacccaggccatgctgggcctgggccctgaggaggacaagtttgaaaatggaggccacggcggcttcctggagagcttcaagagggccatccgggtgcgcagccacagcatggagaccatggtgggcggccagaagaagagccacagcggcggcatccctggcagcctgagcggcggcatcagccacaacagcatggaggtgaccaagaccaccttcagcccccctgtggtggccgccaccgtgaagaaccagagccgcagccccatcaagaggaggagcggcctcttcccccggctgcacacaggcagcgagggccagggcgacagccgggcccgctgtgacagcaccagcagcacccccaagaccccagatggcggccacagcagccaggagatcaagtctgagaccagcagcaaccccagcagccctgagatctgccccaacaaggagaagcccttcatgaagctgaaggaaaatggccgggccatcagccgcagcagcagcagcaccagctctgtgagcagcacagctggggagggggaggccatggaggagggggacagcggcggcagccagcccagcaccaccagccccttcaagcaggaggtgtttgtgtacagccccagccccagcagcgagagccccagcctgggcgctgctgccacccccatcatcatgagccgcagccccacagatgccaagagcaggaacagccccaggagcaacctgaagttccgctttgacaagctgagccacgccagcagcggggccggccactag

SEQ ID NO: 184322 - DNA, 2136 bp, Artificial Sequence
  derived and/or modified sequence
atgctggccagcctgaaggtgaagaagcaggagctggccaacagcagtgatgccaccctgcctgaccggcccctgagcccccccctgacagccccacccaccatgaagagcagcgagttctttgagatgctggagaagatgcagggcatcaagctggaggagcagaagccaggcccccagaagaacaaggatgactacatcccctaccccagcattgatgaggtggtggagaagggcggcccctacccccaggtgatcctgccccagtttggaggctactggattgaggaccctgaaaatgtgggcacccccaccagcctgggcagcagcatctgtgaggaggaggaggaggacaacctgagccccaacaccttcggctacaagctggagtgcaagggggaggcccgggcctacagaagacacttcctgggcaaggaccacctgaacttctactgcaccggcagcagcctgggcaacctgatcctgtctgtgaagtgtgaggaggccgagggcatcgagtacctgcgggtcatcctgcggagcaagctgaagacagtgcatgagcgcatccccctggccggcctgagcaagctgcccagcgtgccccagatcgccaaggccttctgtgatgatgctgtgggcctgcgcttcaaccctgtgctgtaccccaaggccagccagatgattgtgtcctatgatgaacatgaggtgaacaacaccttcaagtttggagtcatctaccagaaggcccggcagaccctggaggaggagctgtttggaaataatgaggagagccctgccttcaaggagttcctggacctgctgggggacaccatcaccctgcaggacttcaagggcttccggggcggcctggatgtgacccacggccagacaggagtggagagcgtgtacaccaccttccgggaccgggagatcatgtttcatgtgtccaccaagctgcccttcacagatggagatgcccagcagctgcagaggaagaggcacatcggaaatgacatcgtggccatcatcttccaggaggagaacaccccatttgtgcctgacatgattgccagcaacttcctgcacgcctacatcgtggtgcaggtggagaccccaggcacagagacccccagctacaaggtgtctgtgacagcccgggaggatgtgcccacctttggaccacccctgcccagcccccctgtgttccagaagggccctgagttccgggagttcctgctgaccaagctgaccaatgcagaaaatgcctgctgcaagagtgacaagtttgccaagctggaggacaggaccagggctgccctgctggacaacctgcatgatgagctgcacgcccacacccaggccatgctgggcctgggccctgaggaggacaagtttgaaaatggaggccatggaggcttcctggagagcttcaagagggccatccgggtgcgcagccacagcatggagaccatggtgggcggccagaagaagagccacagcggcggcatccctggcagcctgagcggcggcatcagccacaacagcatggaggtgaccaagaccaccttcagcccccctgtggtggccgccaccgtgaagaaccagagccgcagccccatcaagagaagaagtggcctcttcccccggctgcacactggaagtgagggccagggcgacagccgggcccgctgtgacagcaccagcagcacccccaagaccccagatggcggccacagcagccaggagatcaagtctgagaccagcagcaaccccagcagccctgagatctgccccaacaaggagaagcccttcatgaagctgaaggaaaatggccgggccatcagccgcagcagcagcagcaccagctctgtgagcagcacagctggggagggggaggccatggaggagggggacagcggcggcagccagcccagcaccaccagccccttcaagcaggaggtgtttgtgtacagccccagccccagcagcgagagccccagcctgggcgccgccgccacccccatcatcatgagccgcagccccacagatgccaagagcaggaacagccccaggagcaacctgaagttccgctttgacaagctgagccacgccagcagtggagctggccactag

SEQ ID NO: 184323 - DNA, 2193 bp, Artificial Sequence
  derived and/or modified sequence
atgttcggccggaagcggagcgtgagcttcggcggcttcggctggattgacaagacgatgctggctagcctgaaggtgaagaaacaggaactagcaaattccagtgacgcgactctgcccgaccggcccttatcacctcccctgacagctcctcccaccatgaagagctctgagttttttgagatgctagaaaaaatgcaggggatcaaactggaggagcaaaaacctggaccacaaaagaataaagacgactatattccatatcccagtatcgatgaagtggtcgagaagggggggccttacccccaggtgattcttccccagtttggcggatattggatcgaagatcctgagaacgtaggcacccctacctcactaggatcatcaatatgcgaagaagaagaggaggacaacttgtcccctaacactttcgggtacaagctggagtgtaagggtgaagcccgggcttatcgtagacacttcctgggcaaagatcatttaaacttttactgtacgggtagctcactaggtaacctgattctctccgtaaagtgtgaggaagctgaagggattgagtatcttcgcgtgatactgcggagtaaacttaagacggtacatgagagaattcctctcgcaggcctcagcaaacttccctccgtccctcagatcgccaaagcgttttgcgacgacgcggtcggacttagatttaacccggtgttatatcccaaggcctctcagatgattgtgtcctacgacgaacatgaggtgaataacacgtttaagttcggtgtaatttatcaaaaagcccggcaaacactcgaggaggagctttttggcaacaacgaggagtctcctgcatttaaggaattcctcgacctgttgggtgacacaattactctgcaagactttaaggggttccgcggcgggctagatgtgacccacgggcagacgggagtcgaaagcgtttacaccacattcagggatcgcgagataatgttccacgtgtctaccaagctgccctttacggatggcgacgcccagcagctgcagcgcaaaagacacatcggcaacgacattgtggccattatctttcaggaggagaacacaccttttgttcccgacatgatcgcttctaattttctccacgcatatatcgttgtccaggtagagacccccggaacagagaccccctcttacaaggtgtctgtcacggcgagagaggatgtgcccacgtttggaccgcccctgccttcaccgccagtattccaaaaaggccctgagttccgagaattcctgctcaccaagcttacgaatgccgagaacgcatgttgtaagtctgataagtttgccaagcttgaggaccggacccgcgccgccttactggacaacctgcacgatgagctgcatgcccatacacaagccatgctgggtttgggtcccgaggaggacaagtttgaaaacgggggccacggtgggttcctggagtctttcaagagggccattcgcgtgcggtctcacagcatggagacgatggtgggtggtcaaaagaagtcgcattcaggaggaatcccgggaagcctcagcggcggtatatcacacaactcaatggaggtcacaaaaactaccttctcgcccccagtggttgcagccacagtgaaaaatcaatcgagatcaccgataaaacggcgcagcggcttgtttcctcgtctccacaccggatctgagggccagggagactcccgtgctcgttgtgactcaacctccagtactccaaagactcccgatggagggcacagctctcaggagatcaagagcgagacgtcaagcaatcctagctcccctgaaatctgccccaataaggaaaaaccatttatgaagttaaaggagaacggcagggctatctccagaagttcttcctccacatccagcgtgagcagcacagcgggcgagggcgaggccatggaagaaggagactcgggcgggagccagccgagcacaacctctcccttcaagcaggaggtgtttgtctattcaccatcaccctctagcgaaagtcctagcctcggagccgcagcgacaccaataatcatgagccggtcgcctacagacgccaaatccaggaactcacctcgctccaatttaaaattcagattcgataaactgtcacacgctagtagtggcgctggtcactag

SEQ ID NO: 184324 - DNA, 2136 bp, Artificial Sequence
  derived and/or modified sequence
atgctggccagcctgaaggtgaagaagcaggagctggccaacagcagcgacgccacgcttcctgatcggccactgtctccccccctcactgcccccccgactatgaagtcatcggagttttttgaaatgctcgaaaaaatgcagggcatcaagctggaggagcagaaaccggggccgcaaaagaataaggacgattacatcccttaccctagcatcgacgaggttgtcgagaagggtggaccctatccccaggtgattctgcctcagtttggcggctactggatcgaagaccctgaaaatgtgggcactcccaccagtctcggctcatcaatatgcgaggaggaggaagaggacaatctgtctcctaacacttttggttacaagcttgaatgcaagggcgaagccagagcatatcgacggcactttctgggcaaagaccacttaaacttctactgcacaggctccagcctggggaacctcattctgtctgtgaagtgcgaagaggccgaagggattgaatatctccgagtcattttgagatccaaacttaagacagtgcatgaaaggatccccttagctggactgtctaagcttccatccgtcccccagatagccaaagctttctgcgacgatgctgtgggattacgatttaatcccgtcctgtatcctaaagcttcacagatgatcgtgtcctacgacgaacacgaggtgaataatacgttcaagtttggcgttatatatcagaaagcaagacagaccctcgaggaagagctctttgggaacaatgaggagagccctgctttcaaagagtttctggacctactaggagacactattactttacaagattttaagggcttccgtggaggcctggatgtcacacacgggcagaccggtgttgagagtgtttacaccacattcagggacagagaaatcatgttccatgtcagcaccaaactgcccttcacagatggggatgctcaacaactccagcgaaaaagacatatcggaaatgacatcgtggctatcatcttccaggaagaaaacaccccatttgttcccgacatgatcgcatctaacttcctccacgcctatatcgtggtacaagtggagacgcccggcacggaaaccccgtcatataaagtctccgttacagcacgcgaagacgtgccgacctttggcccccccctcccatcccctccagtgtttcagaaaggccccgaattcagggagttcctgctgaccaaactgacaaatgccgagaacgcgtgctgcaagagcgacaaattcgccaaactggaggatcgaacgcgtgccgccttacttgataatctgcatgacgaacttcacgcccatacgcaggccatgctcggacttggacccgaggaggacaagttcgaaaatgggggccacggcggtttcctggagtccttcaaaagagcgatacgagtgaggagccactctatggagacgatggttggcggccagaagaagtcccactccggaggaatcccaggaagcttatcaggcggtatttcccacaacagcatggaggtcactaaaaccaccttcagccccccagtcgtagcggcaaccgtgaagaaccaaagtaggagtcctatcaagcggcgcagcggccttttcccccgccttcacactggatctgaaggccagggcgattctcgggcgcgttgcgactctacaagcagtactcctaagaccccggacggcggccattcaagccaggagattaagtccgagactagcagtaatccatcaagccctgagatttgtccaaataaagagaagcccttcatgaagctcaaggaaaacgggcgggcaatttctcgctcctcttcctctacctcctccgtgagtagcaccgctggggagggagaagcaatggaggaaggcgactcagggggctcccagccctccaccacctccccttttaagcaggaagtgttcgtctattccccctcccccagctccgaaagtccctcgctgggcgcggccgcaacacccattattatgagccgatctcctaccgacgctaaatcccgtaatagccctaggagcaacctgaagtttcgtttcgacaagctttcccatgcttccagcggcgccggccactag

SEQ ID NO: 184325 - DNA, 2193 bp, Artificial Sequence
  derived and/or modified sequence
atgttcggccggaagcggagcgtgagcttcggcggcttcggctggatcgacaagacgatgctggcctcactcaaagtgaagaagcaggagctcgccaactcttcagacgcaacacttccggaccgccctcttagcccacccttgaccgccccacccactatgaaatcttcggagtttttcgaaatgctggaaaaaatgcaggggatcaagctggaagagcagaaacccgggccgcaaaaaaacaaggatgactacattccatacccttctatagacgaggtggtggaaaaaggcggtccgtaccctcaagtcatccttcctcagttcggcgggtattggatagaggaccctgaaaatgttggaacacccacttcgctaggatcctcgatttgcgaagaggaagaagaggataacctaagtcctaacacttttggctacaagctggagtgcaagggtgaggccagagcgtatagacgccacttcctggggaaagaccacctcaatttctattgcactgggtcttccctcggcaatctcatccttagcgtaaagtgcgaagaagccgaaggaattgagtacctcagagtaattctcaggtccaaactgaaaaccgtgcacgagaggattccactagcgggtttgagcaagcttcccagcgtgccccaaattgcaaaagcattctgcgatgacgcagtgggacttcggtttaacccagtattgtatccaaaagccagtcaaatgattgtaagttacgacgaacatgaagtgaacaataccttcaagttcggcgtgatctatcaaaaggctcggcagacactggaagaggagcttttcggcaataatgaagaaagccccgcattcaaggagttcctcgacctgttaggtgacaccatcacactgcaggatttcaagggctttcggggaggtctggacgtgacacatgggcaaacgggcgtcgagtccgtgtataccaccttcagagatcgcgagataatgttccacgtttcaaccaagcttccatttaccgatggcgacgcgcaacagttgcagagaaaacgccatatcggaaatgacatcgtggccatcattttccaggaagagaacaccccttttgtacccgatatgattgcttccaactttttgcatgcctacatagtggttcaagtagagacccccgggaccgaaacaccgtcctataaggtgtccgtgacggcccgtgaagacgtccccacattcggcccacctctaccatctcctcctgtgttccaaaaaggccccgagttcagggagttcctgctgactaaactgaccaatgcagagaatgcatgttgtaagagcgataaattcgccaaacttgaagacaggaccagggccgcgctcctggataaccttcacgacgagttgcacgcacatacacaggctatgctgggtctcggccccgaggaagataagttcgaaaatgggggacatggaggtttcctcgagtccttcaaaagggctattcgcgtgcggagccactctatggagaccatggttggcggtcaaaagaaatcacacagcggggggattccagggtcactgtcggggggcatttcacacaactctatggaggtaaccaaaacaacattttccccgccggtagtggcagctacagtcaagaaccagtctagatctcctataaaacgacgttccggcctgttcccaaggttacacacagggtcggagggccagggggactccagagccaggtgtgacagcacttcctcaacacccaagacaccggatggcggacatagcagccaggagattaagagtgagacttccagtaacccttcctcccccgagatatgtccaaacaaggaaaagccctttatgaagctgaaagaaaatggtagagctatctctcgctcatcctcatcgacttcctcagtttcctccacggcaggtgagggcgaagccatggaggagggcgactctggtggaagtcaaccgtccaccacgtctccgttcaaacaggaggtctttgtgtattcgcctagccccagcagtgagtcacccagcctgggggctgccgctacccccattattatgtcccggtctccgacagacgccaaatccagaaatagcccacgcagtaacctgaagttccgcttcgacaaactgtcccatgcttcctctggcgctgggcactag

SEQ ID NO: 184326 - DNA, 2193 bp, Artificial Sequence
  derived and/or modified sequence
atgtttggcagaaagcggtccgtctcattcgggggttttggatggatcgataaaacaatgcttgcctccttgaaggtcaagaagcaggagctagctaattcgtcagacgcgactctaccagatagacccctgagtccacccctgaccgctcccccaactatgaaatcatccgagttcttcgagatgttggagaagatgcaggggatcaagttagaagagcagaagcctggtcctcagaagaataaagatgactatataccctacccttcaattgacgaagttgtggaaaagggcggtccctatccccaggtaatactccctcagtttggcggatattggattgaggatccggaaaatgtcggcacaccaacatcccttggaagcagcatatgcgaagaggaggaggaggataatctcagtcccaacacatttggatataaactggagtgtaaaggggaggcccgagcttatcggcgtcattttctgggtaaagaccaccttaatttctactgcaccgggtcttccctgggaaatctgatactgtcagtgaagtgcgaggaagccgagggcattgagtacctcagagtgatcctgcggtccaagcttaagaccgttcacgagagaattcctttggccggactgagtaagctgccctcagtaccccaaattgctaaagccttctgtgacgatgcggtgggacttcgcttcaatcccgtgctgtatccaaaggcctcacaaatgatcgtctcttatgatgagcatgaagtgaacaacacattcaagttcggcgtcatctatcagaaggctcgccagacgctggaggaagagctgttcggcaataacgaagagtcaccagcctttaaggaatttctcgacttgctcggagacaccataacccttcaggatttcaaggggtttcgcggaggtttggatgttactcatggacagactggggtcgaatctgtatacaccaccttccgagaccgggaaatcatgttccatgtcagcactaaactgcccttcaccgacggcgatgcgcagcagctgcagaggaagcgccacataggaaacgatattgtggccatcatcttccaggaggagaatacgccctttgttcccgacatgatcgcaagtaacttcctgcacgcctatattgtggtgcaggtcgagactccaggaaccgagactccatcttacaaggtgtcggtaactgcacgcgaggatgtcccaacctttggccctcctctgccttcacctccagtgttccaaaagggccctgagttccgagaatttctgctcactaagcttaccaatgccgaaaacgcctgctgcaaatcagacaaatttgcaaaacttgaagataggacccgtgcagccctgttagataacctgcatgatgagctccacgctcatacacaagctatgctgggtctgggtcccgaggaggataaattcgagaatgggggtcacggcggattcctggaatcatttaaacgtgctatccgggtccgcagtcactctatggagacgatggttggtggtcaaaaaaaatcgcactccggcggtatcccgggatccctgtctggcggtatctcacacaatagtatggaagtgacgaaaacgacgttctcaccaccagtcgttgccgctactgtcaaaaatcagagtaggagtcccattaaacgacgcagcgggctgttcccaaggctgcataccggatctgaaggccagggggactctcgggcacggtgtgactcaacaagctcaacccccaagactccagacggtgggcacagcagtcaggaaataaagtctgaaacatcatccaatccatcaagtcccgaaatctgtcccaacaaagaaaagccttttatgaagcttaaagagaacggcagggccatttctcggtcatcctccagcactagttctgtgagctccacagctggcgagggcgaagctatggaggaaggggactcaggcggatcacaaccaagcactacgtctcctttcaaacaagaagtgtttgtgtactccccctccccgagttcagagtccccatccctgggcgcagcagccactcctattatcatgtctaggtccccaaccgacgccaagtctcgaaatagcccaaggtcaaatttgaaattccgattcgataagctctcacacgccagttccggagcaggacactag

SEQ ID NO: 184327 - DNA, 2136 bp, Artificial Sequence
  derived and/or modified sequence
atgttagcttctttgaaagttaagaagcaagagcttgctaattcctccgatgctacgctgcccgacagacccttgagcccacccttgactgctccacccactatgaaatcttcagaattctttgagatgctcgagaagatgcagggcatcaagctggaggagcagaagcccggaccgcagaagaacaaagatgattacatcccttacccgtcaatagatgaggtggtggagaagggtggcccatacccgcaggtcatcctaccccagttcgggggttattggattgaggaccctgagaacgtcgggactccaacatccctgggatcaagtatttgcgaggaggaggaggaagacaacctctcacccaatacattcggctataagcttgaatgcaagggggaagctagggcctaccggcgtcacttcctcggaaaggatcatttaaatttctattgcacaggtagttctttgggcaacctgattttgtccgttaagtgcgaagaggccgaaggcatcgagtacctgcgtgtaatactgaggtcaaaactgaaaactgttcatgaaaggatccccctggccggtctttctaagctgccttcagtcccacagatcgccaaggccttctgtgacgatgcggtggggctacgctttaatcccgttctctaccccaaggcctcacaaatgatcgtgagctatgatgagcacgaggtgaacaataccttcaagttcggcgttatttaccaaaaggcacgacagacattggaggaggaactcttcggcaataacgaagaaagtccagcgtttaaagagttcctggacctcttgggtgacaccattactctccaggacttcaaagggttccggggaggacttgatgtgactcacggccagaccggggtggagtccgtgtataccactttccgcgaccgggagattatgtttcacgtatccacaaaactgccattcaccgatggagacgcccagcagctgcagcggaagcggcatatcggaaacgacatagtggccatcatctttcaggaagagaacacacctttcgttccagacatgatagccagcaatttcctgcacgcatacattgtagtccaggtcgaaacccccggaacagaaactccctcatacaaggtctccgtaactgctcgcgaagacgtgcccacctttggtccccctttaccgtctccgcctgttttccaaaagggcccagaattccgggagttccttttgacgaaactgactaatgctgagaacgcttgttgtaaatcggacaaatttgccaaattggaggatagaaccagggcagccctgcttgacaacctccacgatgaactgcatgctcacacacaggctatgctgggactgggtcctgaagaggacaaattcgagaacggtgggcacggcggatttttagaatctttcaagagagctatcagagtgcggagtcattctatggaaactatggtgggcggacagaagaagtcccactcaggcggaattcctggctctctgtccgggggaatctcccacaatagcatggaggttaccaagactacctttagtccccctgttgtagcagccaccgttaagaatcagtctagaagccctattaagcggagatccggtctgtttcctaggcttcacacaggctccgaagggcagggagactcccgcgctaggtgtgactccactagctctactcccaaaacacccgatggaggccactcctcccaggagattaagagcgaaacctcctccaacccctcatcccccgaaatctgccctaacaaggagaaaccatttatgaagcttaaagaaaatggcagagctatttcgcgatcatctagttcaaccagctccgtcagcagcaccgccggagagggcgaagcaatggaggagggtgattcgggcggatcccagccgagcactacatccccattcaagcaggaggtgttcgtctatagccccagtccttctagcgagtctccatccctcggagccgcagcaacaccaattataatgtccaggagtccaaccgatgccaagtcccgtaattctcccaggagtaatctgaaattccgttttgacaaactcagccatgcctcgtccggtgcaggccactag

SEQ ID NO: 184328 - DNA, 2193 bp, Artificial Sequence
  derived and/or modified sequence
atgttcggacggaagagatccgtctccttcggaggatttggatggattgacaagacaatgctggcaagccttaaggtcaagaaacaggaactagctaatagcagcgatgcaacccttcccgaccgcccactgtccccacctctgactgctcctcctaccatgaaaagctctgagttctttgaaatgctggagaagatgcagggcataaagctggaggagcagaaacctggccctcagaagaacaaagatgattatataccctacccctccattgatgaggtcgtggagaaaggcggaccgtacccccaggtgattctcccacaatttggcggatattggatcgaagatcccgagaacgtggggactccaacctcactgggcagcagtatttgcgaggaggaggaggaagataatttatcccccaataccttcgggtacaagctcgaatgtaagggtgaggcgagagcctaccggcgacacttcctaggaaaagatcaccttaacttctactgcaccggcagctctcttggaaaccttatcctatctgtcaagtgtgaagaagctgagggtattgaatacctaagggtcatccttaggagtaaactgaaaacagtgcacgagagaattcctttggctggactgagtaaattgccttccgtccctcagattgcaaaggcattttgtgacgatgcagtgggccttaggttcaacccagtcctttatccgaaggcctctcagatgatagtctcgtacgatgaacatgaagtgaataacacttttaagttcggcgtgatttaccaaaaggcccgtcagacccttgaggaggagttatttggtaacaacgaggaatcgcctgcattcaaggaattcctggacctgctaggagatactattactctccaggactttaaggggtttcggggtggcctcgacgtcacacacggacagacaggcgtagagagtgtgtacaccaccttccgcgacagagagattatgttccatgtttccacaaaactgccctttacagatggagacgcacagcaactacagcgcaaaagacacatcggaaatgacatagtcgcaatcatcttccaggaggaaaataccccctttgttccagatatgatcgcctctaactttttgcatgcctacattgtcgtgcaggtcgaaacgcccggtactgagactccgtcctacaaagtgtccgtcactgcaagggaggacgtacccacttttggcccacccctgccaagtcctccggtttttcagaaaggccctgaatttagagagtttctgctcacgaagcttacaaatgccgagaacgcctgttgtaagtctgataaattcgcaaaacttgaagacagaacacgggcagccctgctcgataacctgcacgacgaactccatgcccatacccaagccatgcttggtcttgggccagaggaagataaatttgagaatggtggccacgggggtttcctggaatcctttaagcgtgcaatcagggtgcgtagccactcaatggaaactatggtgggtgggcagaaaaaatcacactctggaggaatcccagggtcactcagcggaggtatctctcataacagcatggaggtgaccaaaaccacattctccccacctgtggtggctgcaacagtcaaaaatcagtcccgttcccctattaagaggcggagcggcctttttccacgtctgcatactggatctgagggacaaggcgactcccgcgctaggtgcgactctacttcaagcacgcctaagacccctgatggcggacacagctcgcaagaaatcaagagcgaaaccagctccaacccaagctcccctgagatttgccctaacaaggagaaaccattcatgaaactaaaggagaacgggcgtgccatctcccggagtagcagctctaccagcagtgtatcctccactgccggagaaggagaggccatggaggaaggggacagtggaggctcacagccttctaccacttctcctttcaagcaggaggtcttcgtttacagtccgtcaccttcatcggagtcgcccagtcttggcgcagcagctactcccatcataatgagtcgtagcccaacggacgcaaagagccgaaactccccccgaagcaatctgaaatttaggttcgataaacttagccacgctagtagtggagcaggccactag

SEQ ID NO: 184329 - DNA, 6662 bp, Artificial Sequence
  derived and/or modified sequence
actgaccccgctgtaccacggccctcttgcggacagccccggggacgtcgttgggacatcgctgggaccccgggctctgcagccacaaccatgtttggccggaagcgcagtgtctcctttgggggcttcggatggatcgacaagaccatgctggcaagtctgaaggtcaagaagcaggagctggccaacagctcggatgcgaccctcccagaccggccgctctcccctcctctcacggcacctcccaccatgaagtcgtcggagttctttgagatgctggagaaaatgcaggggatcaagcttgaagagcagaagccgggaccccagaagaacaaggacgactatatcccataccccagcatcgacgaggttgtggagaagggaggcccgtaccctcaggtcatcctgccacagtttgggggctattggatcgaggacccggagaacgtgggcaccccaacatcgctggggagcagcatctgtgaggaggaggaagaggacaacctcagccccaacacatttggctacaagctcgagtgcaagggtgaagccagggcctaccggaggcacttcctggggaaggatcatctaaacttttactgtaccggcagcagcctggggaacttgatcctgtccgtcaagtgcgaggaagcagaggggatcgagtacctccgggtcatccttaggtccaaactgaagacggtacatgagcggatccccttggctggactgagcaagcttcccagtgtccctcagattgcaaaggctttctgtgatgatgcagtgggactgagattcaatcctgtcctgtaccccaaggcctcccaaatgattgtgtcctatgatgagcatgaagtcaacaacacattcaaattcggagtcatttatcaaaaagccaggcagaccctggaggaggagctatttgggaacaatgaggagagcccagcttttaaggagttcttggacctgctgggggacacgatcacactgcaggatttcaaaggtttccgaggaggcctggacgtgacccacggacagacaggggtggaatcagtgtacacaacattccgggacagggagatcatgtttcacgtttccacaaagctgccatttaccgacggagacgcccagcagctccagagaaagagacacattggaaatgacatcgtggccatcatcttccaagaggaaaacacgccgtttgtcccagacatgatagcctccaatttcttacatgcctacatcgtcgtgcaggtcgagaccccaggcacagagaccccatcctacaaggtctctgtcactgcgcgggaagatgtgcccacctttggtccacctctgcccagtccccccgttttccagaagggcccggaattcagggagtttctgctcaccaagctcaccaatgccgagaacgcctgctgcaagtcggacaagtttgcaaagctggaggaccggaccagggctgccctcctggacaaccttcacgatgagctccacgcccacacacaggccatgctgggactgggcccagaggaggacaagtttgagaatggaggccacggggggttcctggagtcttttaagagggccatccgcgtacgcagccactccatggagaccatggtgggcggccagaagaagtcgcacagtgggggcatccctggcagcctcagcgggggcatctcccacaacagcatggaggtcaccaagaccaccttctcgcctccagtggtggcggcaacggtgaagaaccagtcacggagtcccatcaagcgacgctcggggctcttcccccgcctgcacacgggctcagaaggccagggcgacagccgggcacgatgtgacagcacatccagcacacccaagaccccagatggtggacactcctctcaggagataaagtctgagacctcatccaatcccagctctccggaaatctgccccaacaaggagaagcccttcatgaagttgaaggaaaacggccgtgccatctcccgctcctcctccagcaccagcagcgtcagcagcactgcaggggagggcgaggccatggaggagggcgacagtgggggcagccagccgtccacgacctcacccttcaagcaggaggtgtttgtctacagcccgtccccgagcagcgagagccccagcctgggggcagctgccaccccgatcatcatgagccggagtcccacagatgccaaaagcagaaactccccgagatcgaacctgaaattccgctttgacaagctcagccatgccagctctggtgcgggtcactaatgtgaaagtggagtccttcgcctgtccaagggaatcccctcttctgtcctggaaaaggctcctgtaccagcagtttgggagtgccgtccacgaccctgacagtcccagccctgctgccccatggccacgtgcccacagatgtgctgttggtccaggtgtcccagtctggccacagccctgcctccgccctcacctacatgccctcccagcccctcccatctctggacgaggcctccttcctcaggttcctcctgctcctgacctcccagtgtgatgtccgggtcctttatcatcctattcatcctggagaggaaaagtgtcgggcaaagggggatctggggggagctcagcagtgactggggagctggtctgcctcagagacagagtagggggtgggagcagagcctcggtgagggtcttggccacagggcagtgccttcctgaacgtggcaggctttactaccaggaacgcactcggtggtggaggccccatgttcccaggagccaagattcgtagcatccttgaggccatcctgataaaattcggcgctattgcccccgtagctctggagctctaaaccgtctatctgcttctgtgctgaacgcctttcccatctgctgacgtaggcccagggctgccctgcccctgctgccagtgtaccgtgagcggggctccagccagttcaagctcagagccagagctggacgggccagaactgcgctgcacacttcctggactgaggcggggactttgggtcccacccggtttctcctgattatggctgctgtggggtgaggggagggaggggcagccccgaggcagtctcttccctttgagaagatattttcccacaaaggggtgggaagccaggagtgagaaggaattcagggagagcaaaggagccagtgctgagatgctgctgtgttggttgaggaaaacctcgggcctgagggccaggccggagcccaggtctctgctgacaatgggggttcaaggaagacgtcgttatctcccctccccacttactcgaggagagaggtgagggggggatgacttgcgggttctgatcaggcccctgggtggggaaggggcacagtgtccctcagcagcttacgcccctggagtcttggggggcccagcctggccctggggccttttccagctactgtgcccttgggcagctgcgtctggggctcaaccccccaatcctgttcccctctccagctgcgggtctgtaggcagctgtcacatctgaagggtttctgcaacctggaccccatctgggtgtgggtcagaccctgtgacccacatgccacccccaccctccacagagcccccttgctgggacagccagctcacctccaaggacatcccctcctggcttctcccccttccgagtctgcagcgccgtgggcttctctgccgatgggcccgggttggggttaaggtgggcatcctccaggtacaacgagcctgaagagcccctttcagtgcagacggggctgcagagtgacactggctgggcacctgccccacgaccaatgacaaggatttccagctgaatgctttattcccatagggatctggacctgtgcccaagatataaatactacactttttttttttttttttaactgacattgtgaaattctccctatagcttttgccattcaagcaacattgtgatctttcttccccgccacgtgtgtgggaatgattgagtcctgtttgcaagctggagaggagctctccctttgctagtactttctctaaagtactagtctagtaaaatttattcttgttagaaggtcaacaaaatatctgtttagcttttatgaagagtcaccgtagcagcccccacggctggaaagaggcctgtacgttctggacgcgttttgttggctgggcttctggaggcactggcaaggtcaaactgcatttctttaagaacagttgcaggatctggctcgcctctgtgggaagccggcattacaggtgcttggtggatgggccgtgtcacattgccatctggggtcctttggggtttccaggttgtcaccatgctgtcccatttgggaatcccatacctgcctgtccccactgcgctggctgacccttgctgcctgctgcctcttgggagggctttgtccctgcctctgagctggtgggcaggatggctgggtggcccccagagaagcacagacctgagatggggtctccatgcccggtttgctgttggaatgatctgaacaggaccccaaatgcctcttccctctggtcatgcctcactatctctaggagctccatcctgtggcttccagagtgtgcacttccagcccacccgggcagtgctgagagggaggaggagaacaaggatggcccagcctcccctccctcccctagaccacggggcgggcagctcgggttcctggagggctgtttcccccacgctgtccctacatctgctctgatctaaaatgtctttccttttatgctgcgcccagtcttggggctcaaagatttgcccaaacctcattggccctcgtgactaggctcatctagatggtgctcacgctggtgtttgaggcatttccactgtgatctccacgaggggatgttttccgggacacatctctggctctgggaactgcctgactcactgaagaaactacttttcaggcactgtagggtcacccatatgcctccagctcagttgacgcttaaaaacaggtgcagaaaagctcgcgatggaaggtcttaatgagagtgtctgtctatgccaatcatgtaaaatgacgtttcttgaaaaagattcagtggttcagctttgtcagcatcatctcaacacaagcctgctggctctttttagcatctcatccaaccatgtcatcgtccagatgagaaatcttagcccaggtgaggggagtaacttgcttgaggtcacacagctggctgttggcaaagctgggattagaaccctcaacccagggtcccttcctctgcagcgcctacatggttggttgaataagtggctgcgtttcctggggccctgggttttggggaagccagttagctgctgctttggcactggcatggaggtgagcagtcaaggatgctggtgaggctgcagtttctgctctttttcatcaggggggatagtctctaggatttttcagtgaggacccttgggctttggatgcagcttgaaccaagaaaacgaggagggaaagggattcagtgaactattcctcagtgggatcggttcttcagctcctgatgggggctgtgtaatgggggcagaggccagggaaaaagatgctgttcacccaccctcagcttcccttttcctaaattaagaggaaaagtggtcaaagaaaaactcttcatttctccctgattcttaaacgaaggtggttaatagaaactcaggctcccgtgacaaggcaggacaagagcctgtttcgctttcctccctgaccctgccaggtgccaactcaaacactacctttctcattggtttctaagtcagtagagacagatctgttttaagcagttgggggttcgagtagatctcatgggtacaggaggccagcagggaccaggccagtcagccatgctcaggacccctcggctcctcccccagcctctagctaccctgtatcgaggcaaggggaggccagtaaagtttgccaagcctgatcctgcagcctggtggggctggctggggtattcttttaccaaactctgttttaccgccagccccttgtacaccccaatcccatgtctccctcccttcagctggaccgtgtgcccctttgggaggaagaagacaagccccactagggccaagggcagcagagccctgccgagtgagaggctgtggggcagcggctctgtcctgtgccttaccagccctggggaggggggcatttggctggaagactggaatttaattgccatcgtctttgattttgtgacatttctgcttggaagtgtgaactacccccccccccccgcttcctgctccttagcatgcgtgcagctctctcctgttttgggtgttccccttggacactccagctcggggactgctggcgtgtgaatgtgcagattcccctgtgtggtcgaacctaagaactgtggcttggaagtgatgctccatgtgacgacgactttgctttctttcctcttagtgaggaggtgattcgtagatcccaactgcctatgtaatgtaaataatgtacatttaatttattgctatggtagcacattgtatttgttaatgtacaaaacaaattctaaaaggttgacaaatgtatattttgttgcttaaatgtgtctttgcagaaattgacaataaataacatattttgtgtcc

SEQ ID NO: 184330 - DNA, 2280 bp, Artificial Sequence
  derived and/or modified sequence
actgaccccgctgtaccacggccctcttgcggacagccccggggacgtcgttgggacatcgctgggaccccgggctctgcagccacaaccatgtttggccggaagcgcagtgtctcctttgggggcttcggatggatcgacaagaccatgctggcaagtctgaaggtcaagaagcaggagctggccaacagctcggatgcgaccctcccagaccggccgctctcccctcctctcacggcacctcccaccatgaagtcgtcggagttctttgagatgctggagaaaatgcaggggatcaagcttgaagagcagaagccgggaccccagaagaacaaggacgactatatcccataccccagcatcgacgaggttgtggagaagggaggcccgtaccctcaggtcatcctgccacagtttgggggctattggatcgaggacccggagaacgtgggcaccccaacatcgctggggagcagcatctgtgaggaggaggaagaggacaacctcagccccaacacatttggctacaagctcgagtgcaagggtgaagccagggcctaccggaggcacttcctggggaaggatcatctaaacttttactgtaccggcagcagcctggggaacttgatcctgtccgtcaagtgcgaggaagcagaggggatcgagtacctccgggtcatccttaggtccaaactgaagacggtacatgagcggatccccttggctggactgagcaagcttcccagtgtccctcagattgcaaaggctttctgtgatgatgcagtgggactgagattcaatcctgtcctgtaccccaaggcctcccaaatgattgtgtcctatgatgagcatgaagtcaacaacacattcaaattcggagtcatttatcaaaaagccaggcagaccctggaggaggagctatttgggaacaatgaggagagcccagcttttaaggagttcttggacctgctgggggacacgatcacactgcaggatttcaaaggtttccgaggaggcctggacgtgacccacggacagacaggggtggaatcagtgtacacaacattccgggacagggagatcatgtttcacgtttccacaaagctgccatttaccgacggagacgcccagcagctccagagaaagagacacattggaaatgacatcgtggccatcatcttccaagaggaaaacacgccgtttgtcccagacatgatagcctccaatttcttacatgcctacatcgtcgtgcaggtcgagaccccaggcacagagaccccatcctacaaggtctctgtcactgcgcgggaagatgtgcccacctttggtccacctctgcccagtccccccgttttccagaagggcccggaattcagggagtttctgctcaccaagctcaccaatgccgagaacgcctgctgcaagtcggacaagtttgcaaagctggaggaccggaccagggctgccctcctggacaaccttcacgatgagctccacgcccacacacaggccatgctgggactgggcccagaggaggacaagtttgagaatggaggccacggggggttcctggagtcttttaagagggccatccgcgtacgcagccactccatggagaccatggtgggcggccagaagaagtcgcacagtgggggcatccctggcagcctcagcgggggcatctcccacaacagcatggaggtcaccaagaccaccttctcgcctccagtggtggcggcaacggtgaagaaccagtcacggagtcccatcaagcgacgctcggggctcttcccccgcctgcacacgggctcagaaggccagggcgacagccgggcacgatgtgacagcacatccagcacacccaagaccccagatggtggacactcctctcaggagataaagtctgagacctcatccaatcccagctctccggaaatctgccccaacaaggagaagcccttcatgaagttgaaggaaaacggccgtgccatctcccgctcctcctccagcaccagcagcgtcagcagcactgcaggggagggcgaggccatggaggagggcgacagtgggggcagccagccgtccacgacctcacccttcaagcaggaggtgtttgtctacagcccgtccccgagcagcgagagccccagcctgggggcagctgccaccccgatcatcatgagccggagtcccacagatgccaaaagcagaaactccccgagatcgaacctgaaattccgctttgacaagctcagccatgccagctctggtgcggggcac

SEQ ID NO: 184331 - DNA, 3110 bp, Artificial Sequence
  derived and/or modified sequence
acgtcgttgggacatcgctgggaccccgggctctgcagccacaaccatgtttggccggaagcgcagtgtctcctttgggggcttcggatggatcgacaagaccatgctggcaagtctgaaggtcaagaagcaggagctggccaacagctcggatgcgaccctcccagaccggccgctctcccctcctctcacggcacctcccaccatgaagtcgtcggagttctttgagatgctggagaaaatgcaggggatcaagcttgaagagcagaagccgggaccccagaagaacaaggacgactatatcccataccccagcatcgacgaggttgtggagaagggaggcccgtaccctcaggtcatcctgccacagtttgggggctattggatcgaggacccggagaacgtgggcaccccaacatcgctggggagcagcatctgtgaggaggaggaagaggacaacctcagccccaacacatttggctacaagctcgagtgcaagggtgaagccagggcctaccggaggcacttcctggggaaggatcatctaaacttttactgtaccggcagcagcctggggaacttgatcctgtccgtcaagtgcgaggaagcagaggggatcgagtacctccgggtcatccttaggtccaaactgaagacggtacatgagcggatccccttggctggactgagcaagcttcccagtgtccctcagattgcaaaggctttctgtgatgatgcagtgggactgagattcaatcctgtcctgtaccccaaggcctcccaaatgattgtgtcctatgatgagcatgaagtcaacaacacattcaaattcggagtcatttatcaaaaagccaggcagaccctggaggaggagctatttgggaacaatgaggagagcccagcttttaaggagttcttggacctgctgggggacacgatcacactgcaggatttcaaaggtttccgaggaggcctggacgtgacccacggacagacaggggtggaatcagtgtacacaacattccgggacagggagatcatgtttcacgtttccacaaagctgccatttaccgacggagacgcccagcagctccagagaaagagacacattggaaatgacatcgtggccatcatcttccaagaggaaaacacgccgtttgtcccagacatgatagcctccaatttcttacatgcctacatcgtcgtgcaggtcgagaccccaggcacagagaccccatcctacaaggtctctgtcactgcgcgggaagatgtgcccacctttggtccacctctgcccagtccccccgttttccagaagggcccggaattcagggagtttctgctcaccaagctcaccaatgccgagaacgcctgctgcaagtcggacaagtttgcaaagctggaggaccggaccagggctgccctcctggacaaccttcacgatgagctccacgcccacacacaggccatgctgggactgggcccagaggaggacaagtttgagaatggaggccacggggggttcctggagtcttttaagagggccatccgcgtacgcagccactccatggagaccatggtgggcggccagaagaagtcgcacagtgggggcatccctggcagcctcagcgggggcatctcccacaacagcatggaggtcaccaagaccaccttctcgcctccagtggtggcggcaacggtgaagaaccagtcacggagtcccatcaagcgacgctcggggctcttcccccgcctgcacacgggctcagaaggccagggcgacagccgggcacgatgtgacagcacatccagcacacccaagaccccagatggtggacactcctctcaggagataaagtctgagacctcatccaatcccagctctccggaaatctgccccaacaaggagaagcccttcatgaagttgaaggaaaacggccgtgccatctcccgctcctcctccagcaccagcagcgtcagcagcactgcaggggagggcgaggccatggaggagggcgacagtgggggcagccagccgtccacgacctcacccttcaagcaggaggtgtttgtctacagcccgtccccgagcagcgagagccccagcctgggggcagctgccaccccgatcatcatgagccggagtcccacagatgccaaaagcagaaactccccgagatcgaacctgaaattccgctttgacaagctcagccatgccagctctggtgcgggtcactaatgtgaaagtggagtccttcgcctgtccaagggaatcccctcttctgtcctggaaaaggctcctgtaccagcagtttgggagtgccgtccacgaccctgacagtcccagccctgctgccccatggccacgtgcccacagatgtgctgttggtccaggtgtcccagtctggccacagccctgcctccgccctcacctacatgccctcccagcccctcccatctctggacgaggcctccttcctcaggttcctcctgctcctgacctcccagtgtgatgtccgggtcctttatcatcctattcatcctggagaggaaaagtgtcgggcaaagggggatctggggggagctcagcagtgactggggagctggtctgcctcagagacagagtagggggtgggagcagagcctcggtgagggtcttggccacagggcagtgccttcctgaacgtggcaggctttactaccaggaacgcactcggtggtggaggccccatgttcccaggagccaagattcgtagcatccttgaggccatcctgataaaattcggcgctattgcccccgtagctctggagctctaaaccgtctatctgcttctgtgctgaacgcctttcccatctgctgacgtaggcccagggctgccctgcccctgctgccagtgtaccgtgagcggggctccagccagttcaagctcagagccagagctggacgggccagaactgcgctgcacacttcctggactgaggcggggactttgggtcccacccggtttctcctgattatggctgctgtggggtgaggggagggaggggcagccccgaggcagtctcttccctttgagaagatattttcccccttccgagtctgcagcgcc

SEQ ID NO: 184332 - DNA, 2193 bp, Artificial Sequence
  derived and/or modified sequence
atgttcggcagaaagagaagcgtgagcttcggcggcttcggctggatcgacaagaccatgctggccagcctgaaggtgaagaagcaggagctggccaacagcagcgacgccaccctgcccgacagacccctgagcccccccctgaccgccccccccaccatgaagagcagcgagttcttcgagatgctggagaagatgcagggcatcaagctggaggagcagaagcccggcccccagaagaacaaggacgactacatcccctaccccagcatcgacgaggtggtggagaagggcggcccctacccccaggtgatcctgccccagttcggcggctactggatcgaggaccccgagaacgtgggcacccccaccagcctgggcagcagcatctgcgaggaggaggaggaggacaacctgagccccaacaccttcggctacaagctggagtgcaagggcgaggccagagcctacagaagacacttcctgggcaaggaccacctgaacttctactgcaccggcagcagcctgggcaacctgatcctgagcgtgaagtgcgaggaggccgagggcatcgagtacctgagagtgatcctgagaagcaagctgaagaccgtgcacgagagaatccccctggccggcctgagcaagctgcccagcgtgccccagatcgccaaggccttctgcgacgacgccgtgggcctgagattcaaccccgtgctgtaccccaaggccagccagatgatcgtgagctacgacgagcacgaggtgaacaacaccttcaagttcggcgtgatctaccagaaggccagacagaccctggaggaggagctgttcggcaacaacgaggagagccccgccttcaaggagttcctggacctgctgggcgacaccatcaccctgcaggacttcaagggcttcagaggcggcctggacgtgacccacggccagaccggcgtggagagcgtgtacaccaccttcagagacagagagatcatgttccacgtgagcaccaagctgcccttcaccgacggcgacgcccagcagctgcagagaaagagacacatcggcaacgacatcgtggccatcatcttccaggaggagaacacccccttcgtgcccgacatgatcgccagcaacttcctgcacgcctacatcgtggtgcaggtggagacccccggcaccgagacccccagctacaaggtgagcgtgaccgccagagaggacgtgcccaccttcggcccccccctgcccagcccccccgtgttccagaagggccccgagttcagagagttcctgctgaccaagctgaccaacgccgagaacgcctgctgcaagagcgacaagttcgccaagctggaggacagaaccagagccgccctgctggacaacctgcacgacgagctgcacgcccacacccaggccatgctgggcctgggccccgaggaggacaagttcgagaacggcggccacggcggcttcctggagagcttcaagagagccatcagagtgagaagccacagcatggagaccatggtgggcggccagaagaagagccacagcggcggcatccccggcagcctgagcggcggcatcagccacaacagcatggaggtgaccaagaccaccttcagcccccccgtggtggccgccaccgtgaagaaccagagcagaagccccatcaagagaagaagcggcctgttccccagactgcacaccggcagcgagggccagggcgacagcagagccagatgcgacagcaccagcagcacccccaagacccccgacggcggccacagcagccaggagatcaagagcgagaccagcagcaaccccagcagccccgagatctgccccaacaaggagaagcccttcatgaagctgaaggagaacggcagagccatcagcagaagcagcagcagcaccagcagcgtgagcagcaccgccggcgagggcgaggccatggaggagggcgacagcggcggcagccagcccagcaccaccagccccttcaagcaggaggtgttcgtgtacagccccagccccagcagcgagagccccagcctgggcgccgccgccacccccatcatcatgagcagaagccccaccgacgccaagagcagaaacagccccagaagcaacctgaagttcagattcgacaagctgagccacgccagcagcggcgccggccactag

SEQ ID NO: 184333 - protein, 711 aa, Artificial Sequence
  derived and/or modified sequence
MLDGPLFSEGPDSPRELQDEESGSCLWVQKSKLLVIEVKTISCHYSRRAPSRQPMDFQASHWARGFQNRTCGPRPGSPQPPPRRPWASRVLQEATNWRAGPLAEVRAREQEKRKAASQEREAKETERKRRKAGGARRSPPGRPRPEPRNAPRVAQLAGLPAPLRPERLAPVGRAPRPSAQPQSDPGSAWAGPWGGRRPGPPSYEAHLLLRGSAGTAPRRRWDRPPPYVAPPSYEGPHRTLGTKRGPGNSQVPTSSAPAATPARTDGGRTKKRLDPRIYRDVLGAWGLRQGQGLLGGSPGCGAARARPEPGKGVVEKSLGLAAADLNSGSDSHPQAKATGSAGTEIAPAGSATAAPCAPHPAPRSRHHLKGSREGKEGEQIWFPKCWIPSPKKQPPRHSQTLPRPWAPGGTGWRESLGLGEGAGPETLEGWKATRRAHTLPRSSQGLSRGEGVFVIDATCVVIRSQYVPTPRTQQVQLLPSGVTRVVGDSPSQSKPGKEEGEGATVFPSPCQKRLSSSRLLHQPGGGRGGEAEGGRPGDSTLEERTFRILGLPAPEVNLRDAPTQPGSPEHQALGPAASGAQGRAEGSEVAVVQRRAGRGWARTPGPYAGALREAVSRIRRHTAPDSDTDEAEELSVHSGSSDGSDTEAPGASWRNERTLPEVGNSSPEEDGKTAELSDSVGEILDVISQTEEVLFGVRDIRGTQQGNRKRQ

SEQ ID NO: 184334 - DNA, 2136 bp, Artificial Sequence
  derived and/or modified sequence
atgctggacggtccactcttttccgaggggcctgactctcctcgcgaactgcaggatgaagagtcaggtagctgtctctgggtgcagaagtcaaagctgctggtgatcgaggttaagacaattagttgtcactatagcaggcgcgctccatctaggcagcctatggatttccaggcaagccattgggcccgggggtttcaaaaccgcacctgtggccccagacctggaagtccccagccccctcccagaaggccttgggcttcgagagtcttgcaggaggccacgaactggagggccggccccctggccgaggttagggcgcgggagcaggaaaaacgtaaagcagccagtcaggagcgggaagccaaggaaacagagagaaagcggaggaaagcgggaggcgcaaggcgaagccctccaggtcgccctaggcctgagccgcgtaatgcccctagggttgcccagctggcagggctgcctgcaccgcttcgcccagaaagactcgcaccagtgggccgcgccccccggcctagcgcccagcctcagtctgatccagggtcggcttgggctgggccctgggggggtcggaggccaggccctccaagttacgaggcacatctcctcctcagagggtcagccggaactgccccaaggagacgctgggaccgaccccccccatatgtggcccccccatcttacgaggggcctcacagaaccctaggcaccaagcggggacccggtaatagccaagttcccacatcctcagccccagcagcaacccctgcccggacggacggcggaagaaccaaaaaaaggctcgacccaagaatatatcgcgacgtgcttggagcttggggcctgaggcaaggacagggccttctgggggggagccctggttgtggagccgcaagagcgaggcctgaaccgggaaagggtgtggttgaaaaatctttggggctcgccgccgcggacctgaattcaggatccgactcccatccacaggcaaaagcaaccggcagcgcaggtacagaaatcgctcccgccggctccgccaccgctgcaccttgtgctcctcacccagccccaagaagtcggcatcatctgaagggatcacgcgaagggaaagagggggaacagatctggtttccaaagtgttggattccctcccctaagaagcagcccccccgccattcccagacactgcctcggccttgggctccaggaggcactggctggcgtgaaagtctcggcctaggagagggcgctgggcccgaaactttagaggggtggaaagccactcggcgagcacatactctgcctcgcagcagtcaaggactgagcaggggagagggcgtgttcgtgattgacgcaacgtgtgttgtgataaggagccagtacgtgcctacacccaggacacaacaggtgcagctcttgccctctggggtgacaagagttgttggagattcaccctcacagagcaagcctggcaaagaggagggtgaaggagccactgtgtttccctcaccttgtcaaaagcgcctgtcatcttcacggctgctccaccagccagggggcggaaggggaggtgaagctgagggcgggcgccctggcgacagcactctagaagagcgcacatttaggattctgggcttgcccgcgccagaggtgaatctgagggatgcacccacccagccaggtagtcctgaacaccaggccttggggccggctgcgagcggcgcgcaaggccgcgccgaagggtccgaagttgctgtggttcagaggcgggcaggccgaggctgggccaggactccgggaccttatgcaggggccttaagagaagccgtgtcccggattcggaggcacactgcccctgacagtgatactgatgaggcagaggaactgagcgtgcattcaggaagtagtgatggatctgacactgaggcgccaggtgcttcatggcggaacgaaaggaccctccctgaggtgggcaattcctcgcccgaggaagacggtaaaaccgcggaactgagtgattccgtgggcgaaatactcgatgtcatctcacagaccgaagaagtactgttcggagtgagagacatccgcggaactcaacaagggaacagaaagcgccagtag

SEQ ID NO: 184335 - DNA, 2136 bp, Artificial Sequence
  derived and/or modified sequence
atgctggatggccccctcttcagcgagggccctgacagcccccgggagctgcaggatgaggagagcggcagctgcctgtgggtgcagaagagcaagctgctggtgattgaggtgaagaccatcagctgccactacagcagaagagcccccagccggcagcccatggacttccaggccagccactgggcccggggcttccagaacagaacctgtggccccaggcctggcagcccccagcccccaccaagaagaccctgggccagccgggtgctgcaggaggccaccaactggagggctggccccctggccgaggtgcgggcccgggagcaggagaagaggaaggccgccagccaggagcgggaggccaaggagacagagaggaagaggaggaaggccggcggggcccggcgcagccccccaggccggcccaggcctgagcccagaaatgccccccgggtggcccagctggccggcctgcctgcccccctgcggcctgagcggctggcccctgtgggccgggccccccggcccagcgcccagccccagagcgaccccggcagcgcctgggccggcccctggggcggccggcggcccggcccccccagctatgaggcccacctgctgctgcggggcagcgctggaacagccccccggcggcgctgggaccggcccccaccctacgtggccccacccagctatgagggcccccacaggaccctgggcaccaagaggggccctggcaacagccaggtgcccaccagcagcgccccagctgccaccccagccaggacagatggcggccgcaccaagaagaggctggacccccgcatctacagagatgtgctgggcgcctggggcctgcggcagggccagggcctgctgggcggcagccctggctgtggggccgcccgggcccggcctgagcctggaaaaggagtggtggagaagagcctgggcctggccgctgctgacctgaacagcggcagtgacagccacccccaggccaaggccaccggcagcgctggaacagaaattgccccagctggcagcgccacagctgccccctgtgccccccacccagcccccaggagccgccaccacctgaagggcagccgggagggcaaggagggggagcagatctggttccccaagtgctggatccccagccccaagaagcagccccccaggcacagccagaccctgccccggccctgggcccctgggggcaccggctggagggagagcctgggcctgggggagggcgccggccctgagaccctggagggctggaaggccacccggcgggcccacaccctgcccaggagcagccagggcctgagcagaggagaaggagtgtttgtgattgatgccacctgtgtggtgatccgcagccagtatgtgcccacccccaggacccagcaggtgcagctgctgcccagcggcgtgaccagggtggtgggggacagccccagccagagcaagccaggcaaggaggagggggagggcgccaccgtcttccccagcccctgccagaagaggctgagcagcagccggctgctgcaccagcccggcggcggccggggcggggaggccgagggcggccggcctggggacagcaccctggaggagaggaccttccgcatcctgggcctgcctgcccctgaggtgaacctgagagatgcccccacccagcccggcagccctgagcaccaggccctgggccctgctgccagcggggcccagggccgggcagagggcagcgaggtggccgtggtgcagaggcgggccggccggggctgggcccggaccccaggcccctatgctggggccctgcgggaggccgtgagccgcatcagaagacacacagccccagacagcgacacagatgaagctgaggagctgtctgtgcacagcggcagcagtgatggcagtgacacagaggcccctggggcctcctggagaaatgaaagaaccctgcctgaggtgggcaacagcagcccagaagaagatggcaagacagctgagctgagtgacagcgtgggggagatcctggatgtgatcagccagacagaggaggtgctgtttggagtgcgggacatccggggcacccagcagggcaacaggaagaggcagtag

SEQ ID NO: 184336 - DNA, 2136 bp, Artificial Sequence
  derived and/or modified sequence
atgctggacggccccctgttcagcgagggccccgacagcccccgggaactccaagatgaggagagcggatcctgcctatgggttcagaagtccaagctcctcgtgatcgaggtcaaaaccatttcttgtcactattcccgaagagccccgagccggcagcccatggattttcaagcctctcattgggcacgaggatttcagaaccggacgtgtggacctagaccaggctctcctcagccgcctcctcgccgcccatgggcatcccgagtgctgcaggaagctaccaattggagagccggccccctggcagaagtaagggcacgcgagcaagagaagcgcaaagcggctagccaggagagagaggcaaaggagacggaacgcaaacgcaggaaggccggaggggcacgacgtagcccccccggtcggcctcgacctgaaccccggaacgcaccccgggttgcccagctcgccggcttacccgcccccttgagacctgagcgactggctcccgtgggccgagcacctcgaccgagtgcacaaccacagagtgaccctggaagcgcgtgggccggcccgtgggggggacggcgccctggccccccttcctacgaagctcacttgctgctccgcggtagcgccggcacagcaccacggcggagatgggacagaccccctccctacgtagcacctccttcgtacgaagggccccacaggactctaggaacgaaaaggggacctggcaattcacaggtgcctacctcctccgcccccgcagcgactccggcgagaaccgatggcggccgaacaaagaagcggctggatccaaggatatatcgtgatgtcctaggagcttggggcttgcggcagggccaggggcttctgggagggagtcccggctgcggagctgcgagggcgagaccagagccagggaaaggggtcgtggaaaagagcttaggcctcgccgccgctgacctcaacagtggatctgactcgcaccctcaggccaaagcgacgggctcagcaggcacagaaattgcccccgccgggtctgcaactgccgccccctgtgcaccgcaccccgcccctaggagccgccaccatctcaaaggttcaagagagggcaaagaaggcgaacaaatctggttccccaagtgttggattccctccccgaagaaacagccccctaggcactcccagaccctgcccaggccctgggctcctggaggaacgggctggagggaaagcctgggtcttggagaaggggccgggcccgagaccctcgagggctggaaggcaacacggcgcgctcacaccctgccgcgcagtagccagggcttgagccgcggtgagggcgtcttcgtcattgatgctacatgtgtcgtaataagaagtcagtatgtgccaacgccccgaactcagcaggtacagctgttgccatcaggggtgacacgagtggtcggagattctccatcacagtcaaagcccggcaaggaggaaggcgagggagcaacagtgttcccatcgccttgccagaaaaggttatccagctcacgactgctgcaccagcccgggggcgggcgtgggggcgaagccgaaggcggaaggcctggagactccaccctggaggaaaggaccttccggatcttaggtctccctgcccctgaggttaatctgcgggatgcgcctacccagcctgggtctccagagcatcaggctctgggacctgcggcctccggagcccagggacgcgctgagggatcggaggtagcagttgtgcagagacgcgccggaagaggctgggcccggactccgggaccctatgcaggagcactgcgggaggcggtctcccggatccggcgacatactgcgccggacagcgataccgatgaagccgaggagctttcagtccattcaggatcttcagacggcagcgacaccgaggcccccggcgcttcatggaggaacgagcggacattgcctgaggttggaaatagctccccagaggaagacggaaagaccgccgaacttagtgacagcgtgggggagatattggacgtgatcagccagacggaggaggtgttgtttggagttcgcgacattagaggtacacagcaggggaaccgaaagcgccagtag

SEQ ID NO: 184337 - DNA, 2136 bp, Artificial Sequence
  derived and/or modified sequence
atgctggatggtccactgtttagcgaggggcctgactccccacgcgagctgcaagatgaggagagcggttcatgcctgtgggtccaaaaatccaaattgcttgtgattgaggtgaagactatctcatgtcactatagcagacgggcaccatccaggcagcccatggatttccaggccagtcattgggcacgaggttttcagaataggacctgtggcccaagacccggatccccccagcctccacccagaaggccatgggcgtcgagggttctgcaggaggcgaccaattggcgggctggtcccttagctgaagtacgggctcgtgaacaggaaaagaggaaggccgctagccaggagcgcgaggcaaaggagacagagagaaagcggaggaaggccggtggagccagacggtcaccaccaggtcgacctaggcctgagcccaggaatgcacctcgagtggcacagttggcagggctgcctgctcccctgcgtccagagaggctggcccctgttgggagggcacccaggccctccgcccaacctcagtctgacccaggttccgcatgggccggaccttgggggggtcggaggcctgggccaccgtcctacgaagcccaccttttgctgcgcggatcggcagggacagccccacggcgaaggtgggaccggccacctccctatgtggcccctcccagctacgaggggcctcatagaactctggggacaaaacgcggacctggcaatagccaggttcccacctcctcagcccctgccgcaacaccggctcggaccgacggtgggagaaccaaaaaaagactcgaccctaggatctacagggacgttttgggggcttgggggctgcgccaaggccaggggcttctgggcggttctccgggatgcggggctgcgagagcaagacccgaacctgggaagggagttgtcgagaagagcctgggacttgccgctgcagacctgaatagcggcagcgattcccacccacaggctaaagccactggatcagcgggtaccgaaatcgccccagctggatccgcaactgccgcaccatgtgcaccacaccctgctccgcgttccaggcatcatctcaagggctcaagggagggtaaggaaggtgagcagatttggttccccaaatgctggataccatcccccaagaagcagcctccgaggcatagtcaaacccttccgcgaccatgggcgcctggtggaactggatggcgcgagtctctggggcttggagagggggctggtcctgaaactctggaagggtggaaagcaacaagacgggcacacactcttccacgatcctctcagggtctcagccgcggtgagggggtttttgtgatcgatgccacatgcgtcgttattagatcacagtatgtgccgaccccgaggacccagcaggtgcaattgctgccaagcggggtcacacgggtggtgggagactctccctctcaatcaaaacccggtaaagaggagggagaaggggcaacagtgttcccatccccctgccaaaaacggttatcttcatctaggctattgcatcagcccggagggggacgagggggagaggcagagggtggacggccaggagattctacattggaggaaaggactttccgaatattggggctgccagcacccgaagtcaatttgcgggacgctcctactcagcctggatcgccggagcatcaagcactgggtcccgcagcttccggtgctcaggggagggccgaagggtccgaagtggccgtggtccagcgcagggccggtcgcggatgggcgaggacccccggaccctatgccggagccctgcgcgaggctgtgtcccggattcgcaggcacacggcaccagatagtgacaccgatgaagccgaggaactctcggtgcattccggttcttctgatggctctgacacagaggccccaggcgcatcctggagaaacgagcggactttgcccgaagtcgggaacagttctccagaagaagatggtaagacggccgagctgtcagattccgtgggagagatccttgatgtcatctctcaaaccgaggaggtgctgtttggggtgagagacatcagagggacccagcaaggaaacaggaaacgacagtag

SEQ ID NO: 184338 - DNA, 2136 bp, Artificial Sequence
  derived and/or modified sequence
atgctggacggccccctgttcagcgagggccccgacagccccagagagctgcaggacgaggagagcggcagctgcctgtgggtgcagaagagcaagctgctggtgatcgaggtgaagaccatcagctgccactacagcagaagagcccccagcagacagcccatggacttccaggccagccactgggccagaggcttccagaacagaacctgcggccccagacccggcagcccccagcccccccccagaagaccctgggccagcagagtgctgcaggaggccaccaactggagagccggccccctggccgaggtgagagccagagagcaggagaagagaaaggccgccagccaggagagagaggccaaggagaccgagagaaagagaagaaaggccggcggcgccagaagaagcccccccggcagacccagacccgagcccagaaacgcccccagagtggcccagctggccggcctgcccgcccccctgagacccgagagactggcccccgtgggcagagcccccagacccagcgcccagccccagagcgaccccggcagcgcctgggccggcccctggggcggcagaagacccggcccccccagctacgaggcccacctgctgctgagaggcagcgccggcaccgcccccagaagaagatgggacagaccccccccctacgtggccccccccagctacgagggcccccacagaaccctgggcaccaagagaggccccggcaacagccaggtgcccaccagcagcgcccccgccgccacccccgccagaaccgacggcggcagaaccaagaagagactggaccccagaatctacagagacgtgctgggcgcctggggcctgagacagggccagggcctgctgggcggcagccccggctgcggcgccgccagagccagacccgagcccggcaagggcgtggtggagaagagcctgggcctggccgccgccgacctgaacagcggcagcgacagccacccccaggccaaggccaccggcagcgccggcaccgagatcgcccccgccggcagcgccaccgccgccccctgcgccccccaccccgcccccagaagcagacaccacctgaagggcagcagagagggcaaggagggcgagcagatctggttccccaagtgctggatccccagccccaagaagcagccccccagacacagccagaccctgcccagaccctgggcccccggcggcaccggctggagagagagcctgggcctgggcgagggcgccggccccgagaccctggagggctggaaggccaccagaagagcccacaccctgcccagaagcagccagggcctgagcagaggcgagggcgtgttcgtgatcgacgccacctgcgtggtgatcagaagccagtacgtgcccacccccagaacccagcaggtgcagctgctgcccagcggcgtgaccagagtggtgggcgacagccccagccagagcaagcccggcaaggaggagggcgagggcgccaccgtgttccccagcccctgccagaagagactgagcagcagcagactgctgcaccagcccggcggcggcagaggcggcgaggccgagggcggcagacccggcgacagcaccctggaggagagaaccttcagaatcctgggcctgcccgcccccgaggtgaacctgagagacgcccccacccagcccggcagccccgagcaccaggccctgggccccgccgccagcggcgcccagggcagagccgagggcagcgaggtggccgtggtgcagagaagagccggcagaggctgggccagaacccccggcccctacgccggcgccctgagagaggccgtgagcagaatcagaagacacaccgcccccgacagcgacaccgacgaggccgaggagctgagcgtgcacagcggcagcagcgacggcagcgacaccgaggcccccggcgccagctggagaaacgagagaaccctgcccgaggtgggcaacagcagccccgaggaggacggcaagaccgccgagctgagcgacagcgtgggcgagatcctggacgtgatcagccagaccgaggaggtgctgttcggcgtgagagacatcagaggcacccagcagggcaacagaaagagacagtag

SEQ ID NO: 184339 - DNA, 3749 bp, Artificial Sequence
  derived and/or modified sequence
ggccggggtggggtggggcaggatgctggatggcccactgttctccgaggggcctgacagcccccgggagctccaggatgaggagtctggcagctgcctctgggtgcagaagtccaagctattggtgatagaagtgaagactatttcctgtcattatagtcgccgcgccccttctcgacagcccatggacttccaggccagccactgggctcgcgggttccagaaccgcacgtgtgggccgcgcccgggatccccacagccgccgccccgccggccctgggcctccagggtgctgcaggaggcgaccaactggcgggcggggcccctggccgaggtccgagctcgggagcaagagaaaaggaaagcggcgtcgcaggagcgggaggccaaggagaccgagcgaaaaaggcgcaaggctggtggggcccgacggagccccccgggtcgaccccgcccggagccccgcaacgcccctcgggtggcccagctggcagggctccctgctcccttgcggccggagcgcctggcgcctgtggggcgagcgccccgtccatccgcgcagccgcagagcgacccagggtcggcgtgggcggggccctggggaggtcggcggcccgggcccccaagctacgaggctcacctgctgctgagaggttctgccgggaccgccccacgacgccgctgggaccggccgccaccctacgtggctccaccttcttacgaaggcccccataggaccttggggactaagagaggccccgggaactctcaggtgcccacttcatcagccccagctgcgactccagccaggacagacggagggcgcacaaagaagaggctggatcctcggatctaccgggacgtcctcggggcttggggtctccgacaggggcaaggtctcttggggggatccccaggctgtggagcggccagagcaaggccagagcccggcaagggggtcgtggagaaaagcctggggctggctgctgctgacctgaacagtggtagcgacagccatccccaagccaaagctacagggagcgcaggcaccgagatagctcctgcggggtctgcaactgcggctccctgtgccccgcatcccgctcccagatccaggcaccacctcaagggctcgagggaagggaaagaaggagaacagatctggtttcccaaatgctggattccctcccctaaaaagcagccgccccgccatagccagacactccccagaccctgggctcccggaggcaccggatggagagaatctctgggtcttggagagggggcaggaccggagaccctggagggttggaaggcgacccgccgtgcccacaccttgccccgcagttcccagggcctgtcccgtggggaaggcgtctttgtcattgacgccacgtgcgtagtgatacgatcccaatatgttccaaccccccgaacccagcaggtgcagcttttgccctctggggtgacacgcgtggtgggggattcccccagccaatcgaagcccggcaaggaggagggtgaaggggccacggtctttccttccccttgtcaaaagcggctgtcgagcagtcgccttttacaccagcccggcgggggccgcgggggcgaagctgagggcgggaggccgggggactccacactggaggagcgcactttccgcatcttggggctcccggcccccgaagtaaacctgcgggacgcccccacgcagccaggtagcccagagcaccaagccttaggcccagcagcttcgggagcccagggcagagccgaggggtcggaagtggcggtggtccagcggcgcgccggccggggctgggcgcggaccccagggccctacgccggggccctgcgagaagccgtgtcccgtatccgccgccacacagcccctgactcggacacggacgaagctgaggagctcagcgtccatagcggctcctctgatggaagcgacacagaagccccgggcgcctcctggcggaatgagaggaccctgcccgaggttggaaacagttcgccagaggaagatgggaagacagcggaactgagcgacagtgtcggggagatcctagatgtcataagccaaaccgaggaggtcctcttcggggtgagggacatcagagggacccaacagggaaataggaagaggcagtgagaggccccttcttgtatttgtgtccccaacgcatccatccttgggtccactggtccccattcttccccacagacttcctttgcttctcttttccttgtatctttacccatacctgttctcatccttgaaatataaatgaaaggaagggaagcatatgcccattaatgattttgtttcaggagaggtgagaatgagcagatttaattaatgtctgttatgttcagggcacaagggtgagctcttcgcaggggctgatgcactgggtgtggagctgagcagagaggcctaaccaggatcaggcaggagggcagggatggtggcagccataggagggcagggtagggtagggcctctgaggaggagggaaaaagtgaaggagaggctttggacctggtgacagagtgatcagatgacagaggggttcttgggagaagaggcataggtccagcaacaaccaacaaagcagaaggagggctcaccttggtgtcacaagtcttggatttcaatcccaactctgccactgagttgctggttgactgaggccagtcactttccctctccaggcctccaggcctcctggtatataaaatgatggtattctaaggtccatccttccgtctctgacattttgagatctttggaaaggactctatctcatcctcccctcgacaagccaagaatgagaattgggaataagtgaacagagtttgagggtttctgggcggcctccgtgtcacccaaagtcatgatcaattcaggagactgcccaaggcttgcagaagaggtaagggagtgaggcactcctatcccagtctcccaggtttggttgagggctccccaaggcagggcaagatagcggccctgtcactgaccctggcctgtggtggtctgagctggggagggaaggacaccaatgaatcagcttgggacctctttaggccttccccttttcctccaccccgatgctccttagtgatgctctgaggcgtggccacgatctccctcccaggtggtatcgcccacctgaaaaaatcctgagaatttctcccatcttggcctcttccagaaaccggccaggcaaggaaagaggccggtcaccagaagccagcaggcgtggggtgtgatactctctatagccactacagggcgcgcgcaggtcgcggatctccccagttgctaatcccggctctgccactcaatcctatccctagttcccgagcgcgggtcccccgccttgcagtctccagccgtgcggggccgggagcaggcctccggcctcccagacttctagagcccgccgggcccatctttgtactcatccaccccagccggcttgggactcagacaccgaagtctttttttttttctctccgatccttggacacctcctctgtctgccatttattagccatgtgaacttggccacatcacttcacctccctgagcctcagtttcctcatctgtcaaatgggggtttataaacacctacctcgcagggttgttgtgaggatttaatgcgataatgtatgtaaagcgccttgcacactgcctggcacacagtaggcgctcaataaatctaagcttcccttta

SEQ ID NO: 184340 - protein, 666 aa, Artificial Sequence
  derived and/or modified sequence
MEQEPQNGEPAEIKIIREAYKKAFLFVNKGLNTDELGQKEEAKNYYKQGIGHLLRGISISSKESEHTGPGWESARQMQQKMKETLQNVRTRLEILEKGLATSLQNDLQEVPKLYPEFPPKDMCEKLPEPQSFSSAPQHAEVNGNTSTPSAGAVAAPASLSLPSQSCPAEAPPAYTPQAAEGHYTVSYGTDSGEFSSVGEEFYRNHSQPPPLETLGLDADELILIPNGVQIFFVNPAGEVSAPSYPGYLRIVRFLDNSLDTVLNRPPGFLQVCDWLYPLVPDRSPVLKCTAGAYMFPDTMLQAAGCFVGVVLSSELPEDDRELFEDLLRQMSDLRLQANWNRAEEENEFQIPGRTRPSSDQLKEASGTDVKQLDQGNKDVRHKGKRGKRAKDTSSEEVNLSHIVPCEPVPEEKPKELPEWSEKVAHNILSGASWVSWGLVKGAEITGKAIQKGASKLRERIQPEEKPVEVSPAVTKGLYIAKQATGGAAKVSQFLVDGVCTVANCVGKELAPHVKKHGSKLVPESLKKDKDGKSPLDGAMVVAASSVQGFSTVWQGLECAAKCIVNNVSAETVQTVRYKYGYNAGEATHHAVDSAVNVGVTAYNINNIGIKAMVKKTATQTGHTLLEDYQIVDNSQRENQEGAANVNVRGEKDEQTKEVKEAKKKDK

SEQ ID NO: 184341 - DNA, 2001 bp, Artificial Sequence
  derived and/or modified sequence
atggagcaggagccccagaacggcgagcccgccgagatcaagatcatcagagaggcctacaagaaggccttcctgttcgtgaacaagggcctgaacaccgacgagctgggccagaaggaggaggccaagaactactacaagcagggcatcggccacctgctgagaggcatcagcatcagcagcaaggagagcgagcacaccggccccggctgggagagcgccagacagatgcagcagaagatgaaggagaccctgcagaacgtgagaaccagactggagatcctggagaagggcctggccaccagcctgcagaacgacctgcaggaggtgcccaagctgtaccccgagttcccccccaaggacatgtgcgagaagctgcccgagccccagagcttcagcagcgccccccagcacgccgaggtgaacggcaacaccagcacccccagcgccggcgccgtggccgcccccgccagcctgagcctgcccagccagagctgccccgccgaggccccccccgcctacaccccccaggccgccgagggccactacaccgtgagctacggcaccgacagcggcgagttcagcagcgtgggcgaggagttctacagaaaccacagccagcccccccccctggagaccctgggcctggacgccgacgagctgatcctgatccccaacggcgtgcagatcttcttcgtgaaccccgccggcgaggtgagcgcccccagctaccccggctacctgagaatcgtgagattcctggacaacagcctggacaccgtgctgaacagaccccccggcttcctgcaggtgtgcgactggctgtaccccctggtgcccgacagaagccccgtgctgaagtgcaccgccggcgcctacatgttccccgacaccatgctgcaggccgccggctgcttcgtgggcgtggtgctgagcagcgagctgcccgaggacgacagagagctgttcgaggacctgctgagacagatgagcgacctgagactgcaggccaactggaacagagccgaggaggagaacgagttccagatccccggcagaaccagacccagcagcgaccagctgaaggaggccagcggcaccgacgtgaagcagctggaccagggcaacaaggacgtgagacacaagggcaagagaggcaagagagccaaggacaccagcagcgaggaggtgaacctgagccacatcgtgccctgcgagcccgtgcccgaggagaagcccaaggagctgcccgagtggagcgagaaggtggcccacaacatcctgagcggcgccagctgggtgagctggggcctggtgaagggcgccgagatcaccggcaaggccatccagaagggcgccagcaagctgagagagagaatccagcccgaggagaagcccgtggaggtgagccccgccgtgaccaagggcctgtacatcgccaagcaggccaccggcggcgccgccaaggtgagccagttcctggtggacggcgtgtgcaccgtggccaactgcgtgggcaaggagctggccccccacgtgaagaagcacggcagcaagctggtgcccgagagcctgaagaaggacaaggacggcaagagccccctggacggcgccatggtggtggccgccagcagcgtgcagggcttcagcaccgtgtggcagggcctggagtgcgccgccaagtgcatcgtgaacaacgtgagcgccgagaccgtgcagaccgtgagatacaagtacggctacaacgccggcgaggccacccaccacgccgtggacagcgccgtgaacgtgggcgtgaccgcctacaacatcaacaacatcggcatcaaggccatggtgaagaagaccgccacccagaccggccacaccctgctggaggactaccagatcgtggacaacagccagagagagaaccaggagggcgccgccaacgtgaacgtgagaggcgagaaggacgagcagaccaaggaggtgaaggaggccaagaagaaggacaagtag

SEQ ID NO: 184342 - DNA, 2001 bp, Artificial Sequence
  derived and/or modified sequence
atggaacaagagcctcagaatggggagccagccgagattaaaataattcgcgaggcatataaaaaagcttttcttttcgtgaataaaggcctcaacacggacgaattgggccagaaagaggaagcgaaaaattactacaaacaggggatcgggcacctacttcgaggcatcagtatttctagtaaggaatctgaacacaccgggcccggatgggagtccgctaggcagatgcagcagaagatgaaggaaacgcttcagaatgtgagaactcgcctggagattcttgaaaaggggttagctacgagtttgcaaaatgaccttcaggaggtgccgaagctctatcccgagttcccccctaaggacatgtgtgagaagctgcctgagccacaatctttcagttcagctcctcaacacgcagaggtaaatggaaacacatccacgccgtctgctggtgcagtagcggctcctgcgagcctgagcctaccttcccagagctgccccgccgaagctcctcctgcatacacccctcaagcagctgaaggccattatactgtgagctatgggaccgattctggtgaattttcctctgtgggagaggagttttacagaaatcattctcagcccccccctctggaaacgctgggcttagatgcggacgagctgatcctcatccctaacggtgtgcaaatatttttcgttaaccctgccggcgaagtgtccgcgccgagttaccccgggtaccttcgcatcgtccgctttctcgacaacagtttggacacggtgctgaatagacctcccgggttcctgcaggtctgtgattggctttaccctctggtgccagatcgttccccagtccttaaatgtaccgcgggcgcatacatgttcccagatacgatgctgcaggccgctggctgttttgtaggggtcgtgctgtcaagtgagctcccagaggatgaccgggaattattcgaggacttacttcgacaaatgtccgatcttaggctacaggccaactggaaccgcgctgaagaagaaaacgaattccagattcccggccggacgaggccatctagtgatcaactgaaggaagcttccgggaccgatgtcaagcagctcgaccaggggaacaaggacgtgcgccacaaggggaagcgggggaagcgggccaaagatacatcgtcagaggaggttaacctgagccacatagtgccttgcgaaccagtaccagaagaaaaacctaaggaacttcctgaatggtcagagaaggtagcacacaatatcttgtccggggcctcatgggtctcatgggggcttgttaagggcgcagaaatcacaggcaaggctatccagaaaggggccagtaagctgagagagcgaatccagcccgaggaaaaacccgtcgaggtcagtcccgccgtgactaaaggcctctacatcgctaagcaagccactggcggcgcagccaaagtgagccagttcctcgtggatggcgtttgtactgtcgcgaactgtgtggggaaggaattggcccctcatgtaaaaaagcacggctcaaaactggtccccgagagtctcaagaaggacaaggacggcaaatccccgctcgacggggctatggtagtggctgcctcgagtgttcaaggtttcagtaccgtctggcaggggcttgagtgcgcagccaaatgcatcgtcaataacgttagtgccgagaccgtgcagacagtcagatacaaatatgggtacaatgctggggaggcaacccatcatgctgtggacagcgccgtgaatgtaggagttaccgcttataatattaacaatatcgggatcaaggcgatggtgaagaagaccgcaacacaaacaggtcatacgctgctggaagattaccagatcgtcgacaatagccaacgggaaaaccaggaaggggccgcgaatgttaatgtcagaggtgagaaagatgagcagacaaaggaagttaaggaggcaaaaaagaaagacaaatag

SEQ ID NO: 184343 - DNA, 2001 bp, Artificial Sequence
  derived and/or modified sequence
atggagcaagaacctcagaatggggagcccgcagaaatcaaaatcatcagggaagcatataagaaggcattcctgtttgttaacaaggggctaaataccgatgaacttggtcagaaggaggaggctaagaattattacaagcaaggcatcgggcatcttctcagaggtatatctatttcaagcaaagagtctgaacacactggccctgggtgggagtccgctagacagatgcagcaaaagatgaaggaaactctgcagaatgtgaggacaaggctcgaaatcttagaaaaggggttagctacatcattacagaatgatttgcaggaggtgcctaaactatatcccgaatttccccccaaggacatgtgtgaaaaattaccagagccccagtcgttctcatccgctccacagcacgcggaagtgaacggcaatacttccacacctagcgcgggggccgtcgcggcccccgcgagcctgagcctcccctcccaatcctgccccgccgaagcaccccccgcttataccccccaggccgccgaaggtcattacaccgtgtcttatggcacagactcgggggagtttagctctgtcggcgaagagttttacaggaaccatagccagccaccccccctggagacactgggtctggatgctgacgaacttattcttatccctaatggggtacagatcttctttgtgaatcccgccggtgaggtcagcgctccttcctaccccggatacctccgcattgtaagattccttgataacagcctcgacactgtgctgaatcggccaccaggctttttgcaggtgtgtgattggttatacccactggtgcctgacagaagtcccgtactgaagtgtactgctggtgcctacatgtttcccgataccatgttacaggcagccggttgcttcgttggagtcgtgctgagcagtgagctacccgaggacgaccgggaactctttgaagacctgctccgccaaatgtccgaccttagacttcaggccaattggaatcgcgcagaagaggaaaatgagtttcagatcccggggcgcacgcggccgtcatccgaccagctcaaagaggcttccggtacagacgtgaaacagttagatcagggaaataaagacgtacggcacaagggaaagcggggtaaacgagctaaggataccagctccgaggaggtcaacctctctcatattgtgccatgtgaacctgtccccgaggaaaaacctaaagagctgcctgaatggtcggagaaggttgcccacaacatcctctccggggccagctgggtctcatggggtctcgtgaaaggggcggagataactggtaaggccatccagaagggggcttctaaacttagagaaaggatccagccagaggagaaacccgtcgaagtcagtccagcggtcaccaaggggctttacattgccaagcaggcgaccgggggcgctgccaaggtgagtcagttccttgttgatggcgtgtgtaccgtagcaaactgcgtgggaaaggagctggcacctcacgtgaagaaacacggttctaaactggttcctgagtccctgaaaaaggacaaagatggtaaatctcctctggatggggccatggtcgttgcagcatccagcgtgcaaggcttctccaccgtatggcaaggtctagagtgcgccgccaaatgtattgtcaataacgtaagtgccgaaaccgtgcagaccgtgcggtataagtacggatacaacgcaggtgaggccactcatcacgctgtggacagcgccgtgaacgtaggcgtgaccgcatacaacattaataatatcggaatcaaggccatggtaaaaaagaccgccactcagactggtcacacccttctggaagactaccagattgttgataatagccagagggaaaaccaggagggggccgctaacgtgaacgtcaggggcgagaaagatgagcagaccaaggaggttaaagaagcaaaaaagaaagacaagtag

SEQ ID NO: 184344 - DNA, 2001 bp, Artificial Sequence
  derived and/or modified sequence
atggaacaggagccgcaaaatggggagcccgcggagattaaaatcattagagaggcatacaagaaagcgttcctgtttgtcaacaagggattgaacactgatgagctagggcagaaggaagaggcaaagaactattataagcagggaataggccacctccttaggggcatctccatatcatccaaggaatctgagcacacaggtccaggctgggagtccgcgcgccagatgcaacagaaaatgaaagaaactctgcagaacgtgcggacccgactcgaaattctggagaaagggcttgctactagcctgcaaaatgatttacaggaggtgcctaagctttacccggagtttcctccaaaagatatgtgcgaaaagcttcctgaaccgcagtccttcagtagcgcgccccaacatgctgaggtgaacggaaatacctctacccctagcgctggcgccgttgcggcccccgcctctctctctttacccagccagtcatgccccgccgaggcccccccagcgtacaccccccaggcggcagagggccactacaccgtcagttacggcactgattccggggagttcagtagcgttggtgaagaattttacagaaatcactcccagcccccacctttggaaacccttggccttgacgccgacgagctgatcctgatcccaaacggggttcagattttcttcgtcaatccagctggggaggtgtccgcacccagttaccccggctacctgcgtattgtgcggttcctcgacaactctttggacaccgttttgaacagacctcctggctttttgcaggtgtgtgactggctgtatcctctagttcccgaccggagtccagtgttaaagtgtacggcaggcgcctacatgttccctgacacaatgttgcaagccgccgggtgttttgtgggagtcgttctgtcctcggagcttccagaagacgacagagagctgtttgaggatctgctgaggcagatgtcagatttacgcctgcaagccaactggaaccgcgcagaagaagaaaacgaatttcagatccctggccggacccggccaagttcagaccaattaaaagaagccagcggaacagacgtcaagcagctggaccagggcaataaagacgtgcgccataaaggcaagaggggcaaacgggctaaggatacatccagcgaagaggttaacctatctcacatcgttccctgcgagcctgtgccagaagagaagcccaaggagctacctgagtggtcagagaaggtagcccataatattctgagtggtgcaagttgggtgtcttggggtttagttaaaggcgccgaaattacaggaaaggccattcaaaagggcgcctcgaagctgcgggagagaatccagccggaagagaaaccagttgaggtgagtcctgccgtgactaagggactgtatattgctaagcaggctactggtggcgcagccaaagtctctcaatttctggtagacggtgtttgcacagtggcaaattgcgtggggaaggagctcgcaccccacgtaaagaaacatgggagcaaactggtgcccgagtcacttaagaaagataaagacggcaaatcccccctcgatggcgcaatggtggtggctgccagttctgtgcagggtttcagcaccgtatggcagggcctcgaatgtgccgccaaatgcatcgtcaataatgtgtctgcggagaccgtgcagacagtcagatacaagtatgggtacaatgccggggaggccacacaccatgcggtcgattcagctgtcaacgttggcgttactgcttacaacatcaacaatatcgggataaaagctatggtgaagaaaacagccacacagaccgggcataccttactggaggattaccaaattgttgataactcacagagggaaaaccaggaaggagccgccaacgtcaatgtgcgtggagaaaaggatgagcagaccaaggaagtgaaagaagcaaagaaaaaggacaaatag

SEQ ID NO: 184345 - DNA, 2001 bp, Artificial Sequence
  derived and/or modified sequence
atggaacaagagcctcagaacggtgaacctgccgaaataaaaatcataagggaagcttataagaaagccttcctgttcgtcaataaagggcttaacaccgacgagctgggacaaaaagaggaagccaaaaactactacaagcaaggtatcgggcatctgctacgaggaataagcatctccagtaaagaaagtgagcacaccggacctggctgggagagcgccaggcaaatgcagcagaagatgaaggagaccctgcaaaacgtgagaacgagattagagatcctggagaaagggctggcaacttcactgcagaatgacctgcaagaggtgcctaagctgtaccccgaattcccaccaaaagatatgtgtgagaagctacctgaacctcagtctttttcctccgccccacagcatgctgaagtgaacgggaacacatccacaccctctgcaggagccgtggcagctccggctagtctgtctctgccatctcagtcgtgccccgctgaggcccctcccgcctacaccccgcaagcagcagaaggtcattacacagtctcttacggcacagactccggggagttttcctccgtgggcgaggaattctaccggaaccattcccaacctccccccttggaaactctgggtctggatgccgacgagctgattctgattccaaatggggtgcagattttttttgttaacccagcgggcgaagtttcagccccatcttaccctggttacttgcggatcgttagattcctggacaactcactcgacactgtgttgaatcggcctcccgggtttctgcaggtatgcgattggctgtatcccctggttcccgatcggtcacccgtactaaagtgcaccgcaggcgcctacatgttccccgacactatgctccaggccgctggttgctttgttggtgtggtgctgagctccgagctccctgaagatgaccgggaactctttgaagatctgctgcgacagatgtcggatcttcgtctccaggccaattggaatcgtgctgaagaagagaacgaattccagatacccgggcgcactagaccttcaagcgatcagcttaaagaggccagcggaacggatgtgaagcaacttgatcaggggaacaaggacgttagacataagggcaagagaggcaagcgagcgaaggacacctcaagcgaagaagtcaacttgtcacacattgtcccatgtgagcccgttcccgaggagaagccaaaggaacttccggagtggtccgagaaggtggcccataacatcctgagcggagcttcctgggtgagctggggtttggtgaagggcgcagagattactggtaaagctattcaaaaaggagcttcaaaactgagagagagaattcagcccgaggaaaagcctgtggaggtctcccccgccgtgactaaaggcctgtatatcgccaagcaagctaccggaggagccgctaaggtgagccaattcctcgtcgacggagtgtgtacagtcgccaattgcgtggggaaagaactggcaccgcacgttaagaagcatggatctaaacttgtccctgagagcctcaaaaaagacaaggatggtaagtcccccctagatggagcaatggtggtcgccgcgtccagtgtgcaaggcttttcaacagtatggcagggccttgagtgcgctgcaaagtgcattgtcaacaatgtgtccgccgaaaccgtgcagaccgtacgatataagtacgggtataatgccggagaagcaacgcatcacgctgtcgatagtgctgttaacgtcggcgtaacagcttataacattaataacataggcataaaggcaatggttaaaaagactgctactcagaccgggcacactctgctggaggattaccagattgtcgacaactctcagagggagaatcaggagggagctgcgaatgtgaacgtacgaggtgagaaagatgaacagacaaaagaggttaaagaagctaagaagaaagataagtag

SEQ ID NO: 184346 - DNA, 2001 bp, Artificial Sequence
  derived and/or modified sequence
atggagcaggagccccagaatggagagcctgctgagatcaagatcatccgggaggcctacaagaaggccttcctgtttgtgaacaagggcctgaacacagatgagctgggccagaaggaggaggccaagaactactacaagcagggcatcggccacctgctgcggggcatcagcatcagcagcaaggagagcgagcacactggacctggctgggagagcgcccggcagatgcagcagaagatgaaggagaccctgcagaatgtgaggacccggctggagatcctggagaagggcctggccaccagcctgcagaatgacctgcaggaggtgcccaagctgtacccagagttcccccccaaggacatgtgtgagaagctgcctgagccccagagcttcagcagcgccccccagcacgccgaggtgaatggaaacaccagcaccccatctgctggagctgtggccgccccagccagcctgagcctgcccagccagagctgcccagctgaggcccccccagcctacaccccccaggccgctgagggccactacacagtgtcctatggaacagattctggagagttcagctctgtgggggaggagttctacagaaaccacagccagcccccacccctggagaccctgggcctggatgctgatgagctgatcctgatccccaacggggtgcagatcttctttgtgaacccagctggggaggtgtctgcccccagctacccaggctacctgcgcatcgtgcgcttcctggacaacagcctggacacagtgctgaacagacctcctggcttcctgcaggtgtgtgactggctgtaccccctggtgcctgacaggagccctgtgctgaagtgcacagctggggcctacatgtttcctgacaccatgctgcaggccgccggctgctttgtgggcgtggtgctgagcagcgagctgcctgaagatgaccgggagctgtttgaggacctgctgcggcagatgtctgacctgcggctgcaggccaactggaacagagctgaggaggagaatgagttccagatccctggccgcacccggcccagcagtgaccagctgaaggaggccagcggcacagatgtgaagcagctggaccagggcaacaaggatgtgcgccacaagggcaagaggggcaagagggccaaggacaccagcagcgaggaggtgaacctgagccacatcgtgccctgtgagcctgtgcctgaggagaagcccaaggagctgcctgagtggagcgagaaggtggcccacaacatcctgagcggggcctcctgggtgtcctggggcctggtgaagggagctgagatcaccgggaaggccatccagaagggggccagcaagctgcgggagcgcatccagcctgaggagaagcctgtggaggtgtccccagctgtgaccaagggcctgtacatcgccaagcaggccaccggcggggccgccaaggtgtcccagttcctggtggatggagtgtgcaccgtggccaactgtgtgggcaaggagctggccccccacgtgaagaagcacggcagcaagctggtgcctgagagcctgaagaaggacaaggatggcaagagccccctggatggagccatggtggtggccgccagctctgtgcagggcttcagcacagtgtggcagggcctggagtgtgccgccaagtgcatcgtgaacaacgtgtctgctgagaccgtgcagacagtgcgctacaagtatggctacaatgctggggaggccacccaccacgctgtggacagcgctgtgaatgtgggcgtgacagcctacaacatcaacaacatcggcatcaaggccatggtgaagaagacagccacccagacaggccacaccctgctggaggactaccagatcgtggacaacagccagcgggagaaccaggagggcgccgccaacgtgaatgtgcggggggagaaggatgagcagaccaaggaggtgaaggaggccaagaagaaggacaagtag

SEQ ID NO: 184347 - DNA, 2001 bp, Artificial Sequence
  derived and/or modified sequence
atggagcaggagccccagaacggcgagcccgccgagatcaagatcatccgagaagcatacaagaaagcgttcctttttgtgaacaaaggcctgaatacggacgaactcgggcaaaaggaagaggctaagaattattacaagcagggtatcggccatcttctgagaggtatcagcatcagttctaaagaatccgagcacaccggcccggggtgggagtcagcccggcaaatgcagcagaagatgaaggagactctgcaaaatgtaaggactagactggagattttagagaaggggctagcaaccagtctgcagaatgacttacaggaggtgcccaaactgtaccccgagttccctcccaaggacatgtgcgagaagttgcccgaacctcagtccttttctagcgctcctcagcacgcggaggtcaatggaaacaccagcacgccctccgctggtgctgtggctgcccctgcttctttatctttgcccagtcagtcatgccctgccgaggccccaccagcttacactcctcaggcagccgaaggccattacacagtatcatatggaaccgactccggtgaatttagctctgtaggcgaggaattctatcggaaccatagtcagcccccacctctagagacgctcggactggacgccgacgagctgatccttataccaaatggcgttcaaatcttctttgtgaacccggcgggagaggtgagcgctccctcctacccaggttatctcaggatcgtgagattcctggataatagtctggatacggtcctgaacagaccgccggggttccttcaggtttgcgactggctgtatccattagtgcccgataggagcccggtgttgaagtgtaccgctggagcttacatgttccctgacactatgctccaggctgccggctgttttgtcggcgtggtgctcagcagcgagcttcctgaggatgacagagaactgttcgaggatttgctgcgacagatgtccgacttgaggctgcaagccaattggaaccgcgccgaagaagaaaatgagtttcagataccaggaaggacccggcctagttctgaccagctgaaggaagccagtggtactgacgtaaagcagctggaccagggcaacaaagacgttcggcacaaaggtaagcgtggcaaacgcgctaaagatacgtcctcagaagaagttaacctttcacacatcgtgccatgcgagccagtcccagaggaaaagccaaaagaactcccagagtggtccgagaaggtggctcacaacatcctgagtggcgcctcttgggtatcgtggggactggtaaagggcgctgagataaccggcaaagcaatccaaaaaggtgcctcaaagctgcgtgaacggatccagcccgaagagaagcccgttgaggttagtccagcggtaaccaagggtctgtacatcgcgaagcaggccacaggaggagcagcaaaagttagccagttccttgtagacggtgtctgtaccgtggctaattgcgttggaaaagagctagctcctcatgtgaaaaaacatgggagtaagctggtgcccgagtctttgaaaaaggacaaggatggtaaaagccccctcgatggtgctatggtggttgccgcatcttctgtacagggcttctctactgtttggcagggactagaatgtgccgccaaatgcatcgtgaacaatgtcagtgcggagacagtgcaaaccgtgagatataagtatggatacaacgccggagaggctacccaccacgccgtagactccgccgttaatgtgggtgtgaccgcctacaacatcaacaatatcggtattaaggccatggtgaagaaaacagcaacacagacaggccatactttgctggaggattaccagatcgtagataactcccagagggagaatcaagagggcgctgccaacgtgaacgtgcgcggtgagaaagacgagcagactaaggaggtcaaggaagccaagaaaaaagacaaatag

SEQ ID NO: 184348 - DNA, 2001 bp, Artificial Sequence
  derived and/or modified sequence
atggagcaggagccccagaacggcgagcccgccgagatcaagatcatccgagaggcgtataagaaagcgttcctgtttgtcaataaaggcttaaacacagacgagctgggccagaaggaggaggctaaaaactactataagcaggggattggccatctcctaagggggatcagtataagtagtaaggagagcgaacacactgggcctgggtgggaaagcgcaaggcagatgcagcaaaagatgaaggaaacgctgcagaacgtcagaaccagattggagattttagaaaaagggctagctactagcctgcagaacgatctgcaggaagtgcccaagttgtatcccgagtttccgccaaaagacatgtgcgaaaaactacctgagccccagagctttagcagcgcaccccaacacgccgaggtgaacggtaacacttctaccccgtccgcgggcgccgtcgcagctcctgcgagcctcagcctgccatcccagtcatgtccagctgaagccccccccgcttacactcctcaagcggccgagggacactacaccgtgagctatggcacagatagcggggaattctcaagcgtgggcgaagagttttacagaaatcactcccagcccccccctctggagaccctcggactggacgccgatgaactgatcctgatcccgaatggcgtgcagattttcttcgtcaacccagccggagaggtgagcgcacccagttatccggggtacctccggatagtacggtttctcgacaactctctcgataccgtgctgaatagaccaccaggcttccttcaggtgtgtgactggctgtaccctttggtccccgacaggtcccctgtgctgaagtgtacggcaggggcatacatgttccccgataccatgctgcaagctgccggttgttttgttggtgtggtgctgtcctcagagcttccggaggatgaccgcgaactgtttgaggatctactgcgacagatgtcagatctccgccttcaagcaaattggaacagggctgaggaggagaacgagttccagatccccggtcgcacaagacctagctcggatcagctgaaggaggccagcggaacagatgtaaaacagctggatcaggggaacaaggacgtccgccacaaggggaaaaggggcaagcgggcaaaggacacgagctccgaggaggtgaacctgtcccatatcgtcccatgtgagcccgttcccgaagaaaaaccaaaagagctccctgaatggtcagagaaggtggctcacaatatcctctccggcgcatcttgggtcagctgggggcttgtgaagggcgcagagattaccggtaaagctattcagaagggcgcctcgaagctgagagagaggattcagcctgaggagaagccggtggaggtctctccagcagtgacaaagggcctgtacattgccaaacaggctaccggtggtgctgcaaaagtatcccaatttttagtggacggcgtgtgcaccgtggctaactgtgtagggaaagagctcgctcctcacgttaaaaaacacggatctaagctcgttcctgaaagtctaaagaaggacaaagacggtaagtcccctctggacggggctatggtggtggcggcctccagtgttcaaggattttctaccgtgtggcaggggctcgaatgcgccgctaaatgtatcgtcaacaacgtctcggctgaaactgtccagactgttcggtataaatatggatataatgcaggcgaggccactcaccatgcagtcgactcagccgtgaatgtcggggtcactgcatacaatatcaacaacatcgggatcaaggccatggtcaaaaaaactgcaactcagactgggcatacactgcttgaggattatcagatcgtggataacagccagagggagaaccaagagggggcagctaatgtgaacgtgagaggtgaaaaagatgagcagactaaggaggtcaaagaggccaaaaagaaagacaagtag

SEQ ID NO: 184349 - DNA, 2001 bp, Artificial Sequence
  derived and/or modified sequence
atggagcaggagccccagaacggcgagcccgccgagatcaagatcatccgtgaggcatataagaaggcattcctctttgttaataagggtctgaatactgatgagctgggccagaaggaagaggctaaaaattactacaaacaggggattggccacctgctccgcggaatttctatatccagcaaggagtctgagcatacaggccctggttgggaaagcgccaggcagatgcaacaaaagatgaaagagacgctccaaaacgtgcggacccggctggaaattctcgaaaagggtctcgcaacctctttgcagaacgacctgcaggaggtgccgaagctgtatcccgagtttccacccaaggatatgtgcgagaaattaccagagccccaatctttctcctctgcacctcagcatgccgaggttaacggaaacactagcaccccttctgctggagcagttgcggcacccgcaagcctatctctgccttctcagtcgtgccctgccgaagcgcctcctgcgtatacccctcaggctgccgaaggtcattacaccgtgagttatggaaccgacagcggcgaattttcaagcgtgggcgaagaattttatcgtaatcactcccagccacctcccttggagaccttagggctagatgctgacgagttgatcctcattccaaacggagtgcagatcttttttgtcaaccccgctggggaggtgagcgctccctcctaccctggatatttaaggattgtccgattcttggataactcgctggataccgtcctcaataggccgcccggctttctacaggtctgtgactggctgtacccactggtaccggatcggagcccagttttgaaatgcacagccggtgcctatatgttccctgatacgatgctacaggccgcgggatgcttcgtgggtgtggtgctctcatcagagctcccagaggatgatcgagagctgtttgaggacctgctccgccagatgtcagacctaaggctacaggccaattggaacagagccgaggaagaaaatgagttccaaatccccggtagaacgaggccctcctctgatcagttgaaagaggcctctggtacggacgtgaagcagttagatcagggcaataaggacgtgcgacacaaaggcaagaggggcaaacgagccaaagacacctcatctgaggaggttaacttgtctcatatcgtgccttgcgaacccgttccagaagaaaaacccaaggaactaccagaatggagcgagaaagtggcacacaacatcctgtcaggagcaagctgggtcagttggggtttggtcaagggagccgagattacaggaaaggccatacagaagggcgctagcaaactgagggagaggatccagcccgaggaaaagcctgtagaggtgtcacccgcagtcaccaaaggcctgtacatcgctaaacaggccaccggaggagccgctaaggtgagtcagtttttagtggatggagtttgtacagtcgccaactgcgttggcaaggagttggcaccacacgttaagaaacatggttctaaactggtacccgagtctctaaaaaaagataaagacgggaagagccccctggacggcgctatggtcgtcgctgcttcttcagtgcagggtttctccacagtttggcagggcctggaatgtgccgccaaatgcattgtgaacaacgtgtccgctgagacagttcagacagttcgatacaaatacggctacaatgccggcgaagcaacccatcatgccgtagactctgcagtaaacgttggagtaacagcttataatatcaacaatattgggattaaggcaatggtcaaaaaaacagcaacacaaactgggcatacgctgttggaagattaccagatcgttgataactcccagcgagagaaccaggagggggctgctaatgtgaatgtacgaggggagaaggacgagcagacaaaagaagtgaaagaggctaagaagaaagataagtag

SEQ ID NO: 184350 - DNA, 2001 bp, Artificial Sequence
  derived and/or modified sequence
atggagcaggagccccagaacggcgagcccgccgagatcaagatcatccgggaggcatacaagaaggcgtttctcttcgtcaataaggggctcaatactgatgagctggggcagaaagaagaggccaagaactattacaagcagggcatagggcacctgctgaggggtattagcatctccagcaaggagagcgaacatactggacctggctgggagtctgcccgtcagatgcagcagaagatgaaggagacccttcagaatgttcgcacccgtctcgaaattctcgagaagggcctcgctacgtctttacagaacgatttgcaggaggtcccgaagctttacccggagttccccccgaaggacatgtgtgaaaaactgcctgaaccgcaaagcttcagctcagctccccagcacgccgaagtgaatggtaacacatcgaccccaagtgctggcgcggttgctgcccccgcctccttatccctgccaagccagagctgtccggcggaggcccccccggcctatacaccccaggctgccgagggccactataccgtttcctatggaaccgactcaggggagtttagctcagttggagaggagttttatagaaaccactcccagcctccgcctctcgaaactttaggccttgacgcagacgaactaatactaatcccgaatggggtgcagatctttttcgttaatccagctggggaggtgagcgctcctagttatcccggttaccttagaatagtgaggttccttgataactccctcgacacggtgctcaaccgccctcccggcttcctgcaggtgtgcgactggttataccccctcgtccctgaccggtccccagttctgaaatgcacggcaggcgcctacatgttccctgatactatgctacaggcagcaggctgcttcgtaggagtcgttttaagttccgagttgcctgaagacgatagagagttgtttgaagacctgcttcggcagatgagcgatctgaggttacaagccaactggaatagagctgaggaagagaacgagttccagatcccaggccggacgaggccatcaagcgatcagcttaaggaagcaagcgggactgatgtgaagcaattagatcaagggaacaaggatgtgcgtcacaaaggaaagcgggggaagagagctaaggacacgagctctgaggaggtcaacctgagccacattgttccgtgcgagcccgtgccggaggagaaacctaaggaacttcccgagtggtccgagaaggtggcacataatatcctgtccggggcttcatgggttagctggggcctggttaagggggctgagatcacgggaaaagctatccaaaaaggcgcctccaagttgagagaacgcatccagccggaggagaagcctgtagaggtgtcacctgccgttacaaagggactgtacattgccaagcaagccacaggcggagccgctaaagttagccagttcctagtcgacggagtgtgtacggtcgccaactgtgttggcaaggaactcgcaccacacgtcaagaaacacggcagtaaactcgtccctgaaagcttgaaaaaagacaaggatgggaagagcccactggatggcgcaatggttgtggccgcgtcatcagttcagggtttctccaccgtatggcagggattggagtgtgccgccaagtgcatagtcaataacgtttccgccgaaactgtgcagacagtcagatacaagtacggctataacgcaggagaagccacccatcacgccgtcgattcagccgtaaatgtcggtgttactgcctataatattaataacatcggtatcaaagccatggtgaaaaagacagccacacagactggccacacattactggaggactaccagatcgtggacaacagccagcgggaaaatcaagagggcgcagcaaacgtcaatgtcaggggtgaaaaggacgagcagaccaaagaggtgaaagaggcaaagaagaaggacaaatag

SEQ ID NO: 184351 - DNA, 2001 bp, Artificial Sequence
  derived and/or modified sequence
atggagcaggagcctcagaacggcgaacccgcagagatcaaaatcattcgagaggcctacaagaaagcatttctgttcgtgaataagggcttaaacaccgacgaactgggacagaaagaagaggcaaaaaactattacaagcagggaataggtcatctgctgcggggtatctcaatctcctctaaagaatcggaacatacgggtccaggctgggagagcgctcggcagatgcagcagaaaatgaaggagaccctgcaaaatgttaggactcggctcgagattcttgaaaaggggctggccacttcactgcaaaacgatctgcaagaagtaccaaaattgtatcctgaatttccacccaaagatatgtgtgaaaagctgcctgagcctcagagttttagttcagctcctcagcacgccgaggtgaatggcaacacttccacaccctccgcaggcgctgttgcagcccctgcaagtctgtctcttccctctcagtcttgtccagccgaggcacctcctgcgtatactccgcaggctgccgaagggcactatacggtgtcttacggtacagacagcggagagttttccagcgtgggcgaagaattctataggaaccactcacaaccgccacccctggaaacgttggggctcgacgccgacgagcttatcctgattcctaatggtgtccaaatcttttttgtaaatcccgcaggcgaggttagcgcgccatcgtacccgggatatctgcgcatcgtgagatttctcgacaactcgctggacacggtgctgaatcggcctccgggatttctacaagtctgcgactggttgtatcccctggtgcccgaccgctctccagtcctcaagtgtactgccggtgcgtacatgttccctgacaccatgctccaagctgccggatgttttgtgggggtggtgctttcaagtgaactgccagaggatgatcgggagctgtttgaagacctcctgaggcagatgtcggacctccggttgcaagcgaattggaatagagcggaggaggagaacgagttccagattccgggtcggactagaccctcttctgatcagcttaaggaggcaagtggcactgatgttaagcagctggaccagggtaacaaagatgtcagacataagggcaaaagaggaaagcgagctaaagacaccagcagtgaagaggtaaacttgagtcacattgtgccttgcgaacccgtgccagaggaaaagcccaaggagcttccagagtggagtgaaaaggtggctcataacatattatcaggagcctcatgggtgtcatggggccttgtgaaaggtgccgaaatcaccggaaaggccatacaaaagggagcctccaaactgagggaacgcatccaaccggaagaaaagccagtggaggtgtccccagccgtgaccaaaggtctatacatcgccaagcaggcgaccgggggagctgccaaggtttcacaattcttggtggatggcgtgtgtacagtagccaattgtgtggggaaggagctggccccacatgtcaagaagcatggttccaagctggtgcccgagagcctcaaaaaagataaggatgggaaatccccgttggacggcgcaatggtggtggccgcttcttctgtgcagggatttagcaccgtctggcagggactagaatgtgccgctaagtgcatcgtcaataacgttagcgcagaaacagtccagacggtgcggtacaagtatggctataatgccggagaagccacacaccacgccgtagacagcgcagttaacgtgggcgtgacggcctataacataaataacatcggcataaaggctatggtgaagaagacggccacacagacaggccacacactgctggaagactatcagatcgtggacaattcacaaagagaaaaccaagaaggcgcagccaacgttaacgtacgtggtgagaaagacgaacagactaaggaggtgaaagaagctaaaaagaaagacaaatag

SEQ ID NO: 184352 - DNA, 2001 bp, Artificial Sequence
  derived and/or modified sequence
atggagcaggaacctcaaaacggcgaaccagccgagattaagatcatccgagaggcatataagaaggcttttctgtttgtcaacaagggccttaacaccgatgagctagggcaaaaggaggaggccaaaaactattacaaacagggcattggacacctactgcggggaatttcgatttcctcaaaggaaagtgaacacacaggacccggatgggaatcggcccgacagatgcaacaaaaaatgaaggaaaccctccagaatgttcggacacgccttgagattcttgagaaagggttggctacctctctgcagaatgacctgcaggaggtgcccaagttgtacccagagttcccaccgaaggacatgtgcgaaaagttgcctgaaccgcagagcttctccagtgcgccacagcacgccgaggtaaacgggaacactagtacgccttcggctggtgctgtggcagcacccgcaagcttgtctctaccatcacagtcttgccccgctgaggcccctccagcttatacacctcaggctgcagaagggcattacaccgtcagctatggcactgacagtggggaattctcgtctgtgggagaggagttttacaggaaccattctcagccgccacctttggagacactggggctggacgccgacgagctgattctgatccccaatggcgtgcagattttttttgttaaccctgccggagaggttagcgccccttcataccctgggtatcttcggatagtgcgtttcttagacaactcgctggacaccgttctgaatagaccgccaggtttcctgcaggtctgtgattggctctatcctttagtgcccgaccggtcaccagtgttaaagtgcactgctggagcttacatgtttccggatacaatgcttcaagcagccggatgcttcgtaggagtagtgctctcctccgaactgccagaggatgaccgggagctattcgaagatctcttacggcaaatgtcggatttgagactgcaggccaactggaaccgggctgaggaagagaatgaattccaaattccaggtcgcacccgccctagctccgatcagctgaaggaagcatccggaaccgatgtaaaacagctggatcagggcaataaagacgtccggcacaaagggaaaagaggtaagagagcaaaagataccagcagcgaggaggtgaacctgagccacatagttccttgtgaacccgtgcccgaggagaagccaaaagagctgcccgagtggtctgaaaaggtggctcataatattctaagcggagcctcgtgggtgtcttggggtctggttaagggggctgaaatcacaggtaaggcaatccaaaagggagcctccaagctcagggagaggatccagcctgaggaaaaaccagtcgaagtgagtcctgcggttaccaagggattatatatcgccaaacaagccaccgggggtgctgctaaggttagccagttcctggtggacggggtttgcaccgtggctaactgtgtgggaaaagaactggcaccccacgttaagaagcacggaagtaaactggttcccgagagcctgaaaaaagataaagatggaaagtcaccgctagacggggctatggtggttgccgcatctagtgtacagggatttagcaccgtctggcagggattagaatgtgccgcaaaatgcattgtgaacaacgtgtccgcagaaacagtgcagacggtaagatacaagtatggctataacgctggggaggcgacgcatcacgccgtcgactctgccgtgaacgtgggcgtgaccgcatataacataaacaacatcggaatcaaggccatggtcaagaagacagctacacaaacgggccatacacttctagaagactaccagatcgtggataactcccagagggaaaaccaggaaggggcagctaacgtaaacgtcaggggagaaaaagatgagcaaaccaaggaagtgaaagaggcaaagaaaaaagacaagtag

SEQ ID NO: 184353 - DNA, 2001 bp, Artificial Sequence
  derived and/or modified sequence
atggagcaagaaccacagaatggagaacccgctgagatcaaaatcatccgggaagcatataagaaggccttcctgtttgtgaataagggcctgaacactgacgaattgggacagaaagaggaggccaaaaactattacaagcaaggcattggtcaccttctgcgcggtatttcaatttccagcaaggagagcgaacatacagggccaggatgggagtccgcacgccagatgcagcagaagatgaaagaaacgctgcaaaacgtcaggacccgcttggagatcctggagaagggattggccacctcactgcagaacgacctgcaggaggtcccgaagctgtaccctgaatttcccccaaaggatatgtgtgagaagctccccgagccgcagagcttcagtagcgctccgcagcatgccgaggtcaatggaaacactagcaccccctcagcaggagctgtagcagcaccagcatctctcagcctgccgtcgcagtcttgcccagccgaggctccacctgcctacactcctcaggccgctgagggccactatacagtctcgtatggaacagactcaggcgagttcagttcagtgggagaagagttttacagaaaccacagccagcctccaccattggagacactgggcctggatgccgatgagctcatattaatcccgaacggagttcagatattttttgtcaaccctgccggagaggtcagcgcaccttcataccccggttatctgagaatagtgagatttctggataactctctggacacagtactgaaccgtccccctggttttctgcaagtctgcgattggttgtatccccttgtgccagatagaagcccagttctgaagtgcacggcaggggcttacatgttcccagacacaatgctgcaagctgcaggctgtttcgtaggcgtggtcctgtcaagcgagctgcctgaggacgatagggagctgtttgaagacctgctcagacagatgtccgatctgcggctgcaggcgaattggaaccgcgctgaggaggaaaacgagttccagatcccaggacgcacccgtccttcttccgatcagctcaaagaagccagcggaacagatgtcaagcaactggatcaggggaacaaggacgtgcgccataagggtaaacggggaaaacgcgcaaaagatacctcttccgaagaggtgaacctgagtcacatcgtcccgtgcgagccagtgccggaagagaaacccaaggagctgcccgaatggtcagaaaaagttgcccacaatatcctatctggcgcaagttgggtgagttgggggctggtaaagggcgctgagatcaccgggaaggccatacagaaaggagcttcaaaattacgggagcgcatccaacctgaagagaaacccgtggaggtgtctccagccgtgactaaagggttgtatatagcgaaacaggcgacgggcggtgccgctaaagtctcacaattcctggtggacggagtctgtactgtcgctaactgcgtgggcaaagaactcgccccacacgtaaaaaagcacgggtcaaaactggtcccagaatccctgaaaaaagataaggatgggaagtctcccctcgacggcgctatggtggtggcagcttcttctgtgcagggattttctacggtgtggcagggcctggagtgcgccgcaaagtgcattgtgaacaacgtaagcgccgaaactgtacagaccgtccgatacaagtatggctacaatgcgggagaagccacccatcatgcggttgactccgctgtcaacgtgggagtgaccgcttataacattaataatatcggcatcaaggccatggtaaagaagactgccactcaaacaggtcatactctgctcgaagattatcagatcgtggacaatagtcagcgggaaaatcaagagggagctgctaatgtgaatgtgcggggagagaaagacgagcagactaaagaagtgaaggaggccaaaaagaaagataagtag

SEQ ID NO: 184354 - DNA, 2001 bp, Artificial Sequence
  derived and/or modified sequence
atggagcaggagccacaaaacggtgaacccgcagaaatcaagattattcgcgaggcctacaaaaaggccttcctgtttgttaataaaggactcaacaccgacgagctgggacagaaagaagaagcaaaaaattattacaagcagggaatcggccacctccttaggggcataagcataagttcaaaggaatccgaacacaccggaccaggctgggaatcagcgagacagatgcaacagaaaatgaaagagactctgcagaatgtgcggactaggctggaaatactggagaagggcctggccacatctctgcaaaatgacttacaggaggttcccaagctgtaccccgagtttccaccaaaggacatgtgcgagaaattgcccgagccccagtcctttagctcagccccacagcacgcagaagttaatgggaatacttccacaccctctgcaggtgccgtagccgctcctgcctcactctcattgccgtcccagtcatgtccggcagaggcaccccctgcatatactccacaggcagccgagggtcactataccgtgtcttatggaacagattccggagagttctcctccgtgggcgaggaattctaccggaaccattctcaacccccaccgttggagactctcggcctcgatgccgacgaactgatattaattcctaacggagttcagatcttcttcgttaaccctgcaggagaagtgtccgcaccgtcatatccaggatatctacggatcgtgagatttctcgacaatagtcttgacaccgtgctcaacaggccacccggattcttacaggtttgtgattggctctacccactggtgcctgaccggtcgccagtgcttaagtgcaccgccggagcctatatgtttcctgacacgatgctgcaagctgcgggttgttttgtcggtgtggtgctttctagcgagcttccagaagatgatagagagcttttcgaggacctgctgcggcaaatgtccgacctccgcctgcaggcaaattggaaccgggcagaagaagagaatgaatttcaaatccctgggcgaacgaggccttcatccgaccaactcaaggaggccagtggtaccgacgtgaaacagctggaccagggaaataaggacgtgcggcacaagggcaaacggggtaagcgcgctaaggatacttcttcagaggaagtcaatctctcccacattgtcccttgtgagccagttccagaggagaagccaaaggaactgcccgagtggtctgagaaggtggctcacaacattttatcaggcgcttcttgggtgtcttgggggctcgttaagggagcagaaatcacaggcaaagccattcaaaagggcgcatctaagctgcgcgaaaggattcagccagaggaaaagccggtcgaagtctcaccagctgtgacaaaaggcctgtatatcgctaaacaggctactggcggagccgcaaaggtttcccagttcctcgtcgacggggtatgtacagttgccaactgtgtgggcaaagagcttgccccacacgtaaaaaaacacggctctaagctggttcctgaaagtctgaaaaaagacaaggacggcaagtctcccctagatggtgccatggtggtggcagcgagcagcgttcagggcttctcaactgtttggcaggggctcgagtgcgccgcaaagtgcattgtgaacaacgtctctgccgagactgtgcaaaccgtcagatataagtatggttacaatgccggtgaggccacacaccatgcagtggatagcgccgtgaacgtaggggtcaccgcctacaatataaataacatcggcatcaaggcaatggtgaagaaaactgccacacagacaggccacactctgctcgaggattaccagatcgttgataatagccagcgggaaaaccaggaaggagcggctaacgttaatgtgagaggagagaaggacgagcagaccaaggaagtcaaggaggctaaaaaaaaggacaagtag

SEQ ID NO: 184355 - DNA, 4820 bp, Artificial Sequence
  derived and/or modified sequence
accagtaccagcccccaccttccgtctgtgcatgttttcttcagtcctggaaggaaatcataagtgatttgccccaaaaggattgctgttgaaaatggagcaagagccacaaaatggagaacctgctgaaattaagatcatcagagaagcatataagaaggcctttttatttgttaacaaaggtctgaatacagatgaattaggtcagaaggaagaagcaaagaactactataagcaaggaataggacacctgctcagagggatcagcatttcatcaaaagagtctgaacacacaggtcctgggtgggaatctgctagacagatgcaacagaaaatgaaagaaactctacagaatgtacgcaccaggctggaaattctagagaagggtcttgccacttctctgcagaatgatcttcaggaggtgcccaagttatatccagaatttccacctaaagacatgtgtgaaaaattaccagagcctcagtcttttagttcagctcctcagcatgctgaagtaaatggaaacacctcaactccaagtgcaggggcagttgctgcacctgcttctctgtctttaccatcacaaagttgtccagcagaagctcctcctgcttatactcctcaagctgctgaaggtcactacactgtatcctatggaacagattctggggagttttcatcagttggagaggagttttataggaatcattctcagccaccgcctcttgagaccttagggctggatgcagatgaattgattttgataccaaatggagtacagattttttttgtaaatcctgcaggggaggttagtgcaccttcgtatcctgggtaccttcgaattgtgaggtttttggataattctctcgatacggttctaaaccgtcctcccgggtttcttcaggtttgtgactggttatatcctctagttcctgatagatctccggttctgaaatgtactgcgggagcctacatgtttcctgatacaatgctacaagcagcaggatgctttgtgggggtcgtcctgtcctctgagttaccagaggatgatagagagctctttgaggatctgttaaggcaaatgtctgaccttcggctccaggccaactggaacagagcagaagaagaaaatgaattccaaatccctggaagaactagaccctcctctgaccaactaaaagaagcctctggcactgatgtgaaacagttggaccaaggcaataaggatgtacgtcataaaggaaaacgtggaaaaagggctaaagatacttcaagtgaagaagttaacctgagtcacattgtaccatgtgagccagttccagaagaaaagccaaaagaattacctgaatggagtgaaaaagtggctcacaacattttgtcaggtgcttcctgggtgagttggggtttagtcaaaggtgctgagattactggtaaggcaatccagaaaggtgcttctaaactccgagagcggattcaaccagaagaaaaacccgtggaagttagtccagctgtcaccaagggactttatatagcgaagcaagctacaggaggagcagcaaaagtcagtcagttcctggttgatggagtttgcactgtagcaaattgcgttggaaaagaactagctccacatgtcaagaagcatggaagcaaacttgttccagaatctcttaaaaaagacaaagatgggaaatctcctctggatggtgctatggttgtagcagcaagtagtgttcaaggattttcaactgtctggcaaggattggaatgtgcagctaaatgcatcgttaacaatgtttcagcagaaactgtacaaactgtcagatacaaatacggatataatgcaggagaagctacccaccatgcggtggattctgcggtcaatgttggcgtaactgcctacaatattaacaacattggtatcaaagcaatggtgaagaaaactgcaacacaaacaggacacactctccttgaggactatcagatagttgataattctcagagggaaaatcaagaaggagcagcaaatgtcaacgtgagaggggagaaggatgagcagacgaaggaagtaaaggaggcaaagaagaaagataaatgatgaagtgctgggaatcacttataccaaagccttatgaaatggatgaaattttgttaaataggcaaatgtggaattcctcacagattaaccagtattttttaaatgtattcattcctacaaattaactttcataaattttatggcatgtcttctatttaaaaggaaaagaataagtattcttgcatctggccttagaaatgtgaagttatattctcaagtttatttttttccaagtgtagctaaaatatttttgcaggtaaaataaagctgatagtacatgtgttgttcaaaccttgttaaacctaatattgaactatttttatatctgctgtctttcagaaggcaaataggaaactatatatttgcttaaaaattggcatttagtaaccttaattctttttatagaaggaatgacttaaagtattgtcccctctttttgcactaattgtggatttttttagatgcttctcaaaattttcagtgtgtaagctaaacaaaaactaaaactaagaattctcaaaaaaacttgttcaaaacagggaaagactgatgaaaagtaaaatggactacttttgtaacttacctgtttgttaggaaatggaatggtctctttgatttaaaataaataaaaatagattattacgtcttttgtattgagactgtattgttatgagcctaggaaatttgggaacatgattgtattgtattaaaattcgaagtgattattatcagcttaattggattaaaaaagtacttcaagaaattattttatcatatctgcttctgtttttccaaaaggttaaaacttgtaaaaaaaatatatataaacaattgagtttactaatggtaaacatttttattctgggattcggtcattggaatttatattaaaagacaagttattaaaaaggaaaggttctattcataatcagggtaaagaatatgaaaaccttagacgtaatccatggtggataggcattatggtttccactttggcagaaggcagactattcacagccctatttacttacataggctaaaaaactatgtaactaaatacctaatggtatttaatttttgtttattgaatttaagagattggtattagttttcatagctgtagtccattctaataatttctgatcttctagtggctacttaattagacattatttgaagctgtctgaagaatgcactttatgaattaaaaaactgaattgcctgacctcgttatcacatgagcttatattttgggaacacatagaactgatggaggcttttcctaaggccaaggataatgtactagttgttaaaatggaaataaaagtgaagtggtaaatagcttacagacagtctatgctttgtttaagaaatggaatggcacttcatatattctcatttgtgggagctaaaaattacaataatcaaacttaaggagatagagagtagaatgatggttaccagaggctgggaggcattgaagggatggggagggaagtgaggttgattaatgggtacgaaaatatagttagaacgaatttgttgtagtatttgatagcccaacagggtgactacagtcaacaataactttatacatttaaaaataaaagagtgtaattgggacgtttgtaacacaaatgaatgcttgaagcagtagatacaccctgatgtaattattataaatcgcatacctgtatcaaaatatctcatgtatcccataaatatatacacctaccatgtacccataaaaatttaaaaagaaatggaatggcaaataatggaacataaactttaaacagttagctttgaccagaggtcagcaaatatcctccatgggctaaatccagatgtccacctgttttcataaataacgttttattggagcatagctgtacccatttgtttacatattggctatggctgctgtctagttcaacgtgagagttgaatagttgcatcagagagtatatggtccacaagcctaacttattcactctctggccctttgcagaaaaagtgtgctgccttagtctatagaaaatggacttttcccaccattcactgactcattaggagataggcatcttctaaagattttttttatattgtgtaatgattgatatatagataaaattatatattacttgtaaggtatgatgaataacaacacttaaaaactcatcacacctaaagacatggaaagctgccaattacctatatgtatgttcttcctattttcttacctctttccccatgtcattttttattgttccttgccattttttaatcacacatgtatgttctccaaacatactgtttcattttttgaagctttctacatatagtgtctgaatgtgaagtcttactcaacttgcttttttgagtttatgtttaaaattcattcttgcgcttatatgcatggatggtttacttgctctatagtattctgtgtgagtataccacaatttaagtgttcattttcctatcagttgacatttgtttttagtttttgttggtagaaacagtacactcaaaacatccttgactgtcccctggtacacatatgcaagagactttatgcgtaagagtggagttgttggcttgtcaagttttgcaaaataatgccaggtattttccaaaatgatgatattctcttgagtattacttccctttgcaatgtttttattgttaatgtagcatatataaaaaagtatctcataatttt

SEQ ID NO: 184356 - DNA, 4996 bp, Artificial Sequence
  derived and/or modified sequence
acgtgacctaggctgcggcggcggcgtgctgcgggctctgtggcgggagcgaggccgacgggcggggccgcgcggccgcgtgacgcgaagcgttcgagagcgcgcgtcgtggaacgtcttggttgccacggcaagcgcgcgcgcgaggccttgggaacctcgggaccggcccccggcgagcgcagcggcgcccagtagtcatcttagtgggatttggggaagcaacagggctgtgtggggtaacctgccacctttaagtggaaatcagaaatggagcaagagccacaaaatggagaacctgctgaaattaagatcatcagagaagcatataagaaggcctttttatttgttaacaaaggtctgaatacagatgaattaggtcagaaggaagaagcaaagaactactataagcaaggaataggacacctgctcagagggatcagcatttcatcaaaagagtctgaacacacaggtcctgggtgggaatctgctagacagatgcaacagaaaatgaaagaaactctacagaatgtacgcaccaggctggaaattctagagaagggtcttgccacttctctgcagaatgatcttcaggaggtgcccaagttatatccagaatttccacctaaagacatgtgtgaaaaattaccagagcctcagtcttttagttcagctcctcagcatgctgaagtaaatggaaacacctcaactccaagtgcaggggcagttgctgcacctgcttctctgtctttaccatcacaaagttgtccagcagaagctcctcctgcttatactcctcaagctgctgaaggtcactacactgtatcctatggaacagattctggggagttttcatcagttggagaggagttttataggaatcattctcagccaccgcctcttgagaccttagggctggatgcagatgaattgattttgataccaaatggagtacagattttttttgtaaatcctgcaggggaggttagtgcaccttcgtatcctgggtaccttcgaattgtgaggtttttggataattctctcgatacggttctaaaccgtcctcccgggtttcttcaggtttgtgactggttatatcctctagttcctgatagatctccggttctgaaatgtactgcgggagcctacatgtttcctgatacaatgctacaagcagcaggatgctttgtgggggtcgtcctgtcctctgagttaccagaggatgatagagagctctttgaggatctgttaaggcaaatgtctgaccttcggctccaggccaactggaacagagcagaagaagaaaatgaattccaaatccctggaagaactagaccctcctctgaccaactaaaagaagcctctggcactgatgtgaaacagttggaccaaggcaataaggatgtacgtcataaaggaaaacgtggaaaaagggctaaagatacttcaagtgaagaagttaacctgagtcacattgtaccatgtgagccagttccagaagaaaagccaaaagaattacctgaatggagtgaaaaagtggctcacaacattttgtcaggtgcttcctgggtgagttggggtttagtcaaaggtgctgagattactggtaaggcaatccagaaaggtgcttctaaactccgagagcggattcaaccagaagaaaaacccgtggaagttagtccagctgtcaccaagggactttatatagcgaagcaagctacaggaggagcagcaaaagtcagtcagttcctggttgatggagtttgcactgtagcaaattgcgttggaaaagaactagctccacatgtcaagaagcatggaagcaaacttgttccagaatctcttaaaaaagacaaagatgggaaatctcctctggatggtgctatggttgtagcagcaagtagtgttcaaggattttcaactgtctggcaaggattggaatgtgcagctaaatgcatcgttaacaatgtttcagcagaaactgtacaaactgtcagatacaaatacggatataatgcaggagaagctacccaccatgcggtggattctgcggtcaatgttggcgtaactgcctacaatattaacaacattggtatcaaagcaatggtgaagaaaactgcaacacaaacaggacacactctccttgaggactatcagatagttgataattctcagagggaaaatcaagaaggagcagcaaatgtcaacgtgagaggggagaaggatgagcagacgaaggaagtaaaggaggcaaagaagaaagataaatgatgaagtgctgggaatcacttataccaaagccttatgaaatggatgaaattttgttaaataggcaaatgtggaattcctcacagattaaccagtattttttaaatgtattcattcctacaaattaactttcataaattttatggcatgtcttctatttaaaaggaaaagaataagtattcttgcatctggccttagaaatgtgaagttatattctcaagtttatttttttccaagtgtagctaaaatatttttgcaggtaaaataaagctgatagtacatgtgttgttcaaaccttgttaaacctaatattgaactatttttatatctgctgtctttcagaaggcaaataggaaactatatatttgcttaaaaattggcatttagtaaccttaattctttttatagaaggaatgacttaaagtattgtcccctctttttgcactaattgtggatttttttagatgcttctcaaaattttcagtgtgtaagctaaacaaaaactaaaactaagaattctcaaaaaaacttgttcaaaacagggaaagactgatgaaaagtaaaatggactacttttgtaacttacctgtttgttaggaaatggaatggtctctttgatttaaaataaataaaaatagattattacgtcttttgtattgagactgtattgttatgagcctaggaaatttgggaacatgattgtattgtattaaaattcgaagtgattattatcagcttaattggattaaaaaagtacttcaagaaattattttatcatatctgcttctgtttttccaaaaggttaaaacttgtaaaaaaaatatatataaacaattgagtttactaatggtaaacatttttattctgggattcggtcattggaatttatattaaaagacaagttattaaaaaggaaaggttctattcataatcagggtaaagaatatgaaaaccttagacgtaatccatggtggataggcattatggtttccactttggcagaaggcagactattcacagccctatttacttacataggctaaaaaactatgtaactaaatacctaatggtatttaatttttgtttattgaatttaagagattggtattagttttcatagctgtagtccattctaataatttctgatcttctagtggctacttaattagacattatttgaagctgtctgaagaatgcactttatgaattaaaaaactgaattgcctgacctcgttatcacatgagcttatattttgggaacacatagaactgatggaggcttttcctaaggccaaggataatgtactagttgttaaaatggaaataaaagtgaagtggtaaatagcttacagacagtctatgctttgtttaagaaatggaatggcacttcatatattctcatttgtgggagctaaaaattacaataatcaaacttaaggagatagagagtagaatgatggttaccagaggctgggaggcattgaagggatggggagggaagtgaggttgattaatgggtacgaaaatatagttagaacgaatttgttgtagtatttgatagcccaacagggtgactacagtcaacaataactttatacatttaaaaataaaagagtgtaattgggacgtttgtaacacaaatgaatgcttgaagcagtagatacaccctgatgtaattattataaatcgcatacctgtatcaaaatatctcatgtatcccataaatatatacacctaccatgtacccataaaaatttaaaaagaaatggaatggcaaataatggaacataaactttaaacagttagctttgaccagaggtcagcaaatatcctccatgggctaaatccagatgtccacctgttttcataaataacgttttattggagcatagctgtacccatttgtttacatattggctatggctgctgtctagttcaacgtgagagttgaatagttgcatcagagagtatatggtccacaagcctaacttattcactctctggccctttgcagaaaaagtgtgctgccttagtctatagaaaatggacttttcccaccattcactgactcattaggagataggcatcttctaaagattttttttatattgtgtaatgattgatatatagataaaattatatattacttgtaaggtatgatgaataacaacacttaaaaactcatcacacctaaagacatggaaagctgccaattacctatatgtatgttcttcctattttcttacctctttccccatgtcattttttattgttccttgccattttttaatcacacatgtatgttctccaaacatactgtttcattttttgaagctttctacatatagtgtctgaatgtgaagtcttactcaacttgcttttttgagtttatgtttaaaattcattcttgcgcttatatgcatggatggtttacttgctctatagtattctgtgtgagtataccacaatttaagtgttcattttcctatcagttgacatttgtttttagtttttgttggtagaaacagtacactcaaaacatccttgactgtcccctggtacacatatgcaagagactttatgcgtaagagtggagttgttggcttgtcaagttttgcaaaataatgccaggtattttccaaaatgatgatattctcttgagtattacttccctttgcaatgtttttattgttaatgtagcatatataaaaaagtatctcataatttt

SEQ ID NO: 184357 - DNA, 4789 bp, Artificial Sequence
  derived and/or modified sequence
gcggccgcgcagggagctctcgaggcaacgccggggcgcccgaggtctggaaggcgcagaaatggagcaagagccacaaaatggagaacctgctgaaattaagatcatcagagaagcatataagaaggcctttttatttgttaacaaaggtctgaatacagatgaattaggtcagaaggaagaagcaaagaactactataagcaaggaataggacacctgctcagagggatcagcatttcatcaaaagagtctgaacacacaggtcctgggtgggaatctgctagacagatgcaacagaaaatgaaagaaactctacagaatgtacgcaccaggctggaaattctagagaagggtcttgccacttctctgcagaatgatcttcaggaggtgcccaagttatatccagaatttccacctaaagacatgtgtgaaaaattaccagagcctcagtcttttagttcagctcctcagcatgctgaagtaaatggaaacacctcaactccaagtgcaggggcagttgctgcacctgcttctctgtctttaccatcacaaagttgtccagcagaagctcctcctgcttatactcctcaagctgctgaaggtcactacactgtatcctatggaacagattctggggagttttcatcagttggagaggagttttataggaatcattctcagccaccgcctcttgagaccttagggctggatgcagatgaattgattttgataccaaatggagtacagattttttttgtaaatcctgcaggggaggttagtgcaccttcgtatcctgggtaccttcgaattgtgaggtttttggataattctctcgatacggttctaaaccgtcctcccgggtttcttcaggtttgtgactggttatatcctctagttcctgatagatctccggttctgaaatgtactgcgggagcctacatgtttcctgatacaatgctacaagcagcaggatgctttgtgggggtcgtcctgtcctctgagttaccagaggatgatagagagctctttgaggatctgttaaggcaaatgtctgaccttcggctccaggccaactggaacagagcagaagaagaaaatgaattccaaatccctggaagaactagaccctcctctgaccaactaaaagaagcctctggcactgatgtgaaacagttggaccaaggcaataaggatgtacgtcataaaggaaaacgtggaaaaagggctaaagatacttcaagtgaagaagttaacctgagtcacattgtaccatgtgagccagttccagaagaaaagccaaaagaattacctgaatggagtgaaaaagtggctcacaacattttgtcaggtgcttcctgggtgagttggggtttagtcaaaggtgctgagattactggtaaggcaatccagaaaggtgcttctaaactccgagagcggattcaaccagaagaaaaacccgtggaagttagtccagctgtcaccaagggactttatatagcgaagcaagctacaggaggagcagcaaaagtcagtcagttcctggttgatggagtttgcactgtagcaaattgcgttggaaaagaactagctccacatgtcaagaagcatggaagcaaacttgttccagaatctcttaaaaaagacaaagatgggaaatctcctctggatggtgctatggttgtagcagcaagtagtgttcaaggattttcaactgtctggcaaggattggaatgtgcagctaaatgcatcgttaacaatgtttcagcagaaactgtacaaactgtcagatacaaatacggatataatgcaggagaagctacccaccatgcggtggattctgcggtcaatgttggcgtaactgcctacaatattaacaacattggtatcaaagcaatggtgaagaaaactgcaacacaaacaggacacactctccttgaggactatcagatagttgataattctcagagggaaaatcaagaaggagcagcaaatgtcaacgtgagaggggagaaggatgagcagacgaaggaagtaaaggaggcaaagaagaaagataaatgatgaagtgctgggaatcacttataccaaagccttatgaaatggatgaaattttgttaaataggcaaatgtggaattcctcacagattaaccagtattttttaaatgtattcattcctacaaattaactttcataaattttatggcatgtcttctatttaaaaggaaaagaataagtattcttgcatctggccttagaaatgtgaagttatattctcaagtttatttttttccaagtgtagctaaaatatttttgcaggtaaaataaagctgatagtacatgtgttgttcaaaccttgttaaacctaatattgaactatttttatatctgctgtctttcagaaggcaaataggaaactatatatttgcttaaaaattggcatttagtaaccttaattctttttatagaaggaatgacttaaagtattgtcccctctttttgcactaattgtggatttttttagatgcttctcaaaattttcagtgtgtaagctaaacaaaaactaaaactaagaattctcaaaaaaacttgttcaaaacagggaaagactgatgaaaagtaaaatggactacttttgtaacttacctgtttgttaggaaatggaatggtctctttgatttaaaataaataaaaatagattattacgtcttttgtattgagactgtattgttatgagcctaggaaatttgggaacatgattgtattgtattaaaattcgaagtgattattatcagcttaattggattaaaaaagtacttcaagaaattattttatcatatctgcttctgtttttccaaaaggttaaaacttgtaaaaaaaatatatataaacaattgagtttactaatggtaaacatttttattctgggattcggtcattggaatttatattaaaagacaagttattaaaaaggaaaggttctattcataatcagggtaaagaatatgaaaaccttagacgtaatccatggtggataggcattatggtttccactttggcagaaggcagactattcacagccctatttacttacataggctaaaaaactatgtaactaaatacctaatggtatttaatttttgtttattgaatttaagagattggtattagttttcatagctgtagtccattctaataatttctgatcttctagtggctacttaattagacattatttgaagctgtctgaagaatgcactttatgaattaaaaaactgaattgcctgacctcgttatcacatgagcttatattttgggaacacatagaactgatggaggcttttcctaaggccaaggataatgtactagttgttaaaatggaaataaaagtgaagtggtaaatagcttacagacagtctatgctttgtttaagaaatggaatggcacttcatatattctcatttgtgggagctaaaaattacaataatcaaacttaaggagatagagagtagaatgatggttaccagaggctgggaggcattgaagggatggggagggaagtgaggttgattaatgggtacgaaaatatagttagaacgaatttgttgtagtatttgatagcccaacagggtgactacagtcaacaataactttatacatttaaaaataaaagagtgtaattgggacgtttgtaacacaaatgaatgcttgaagcagtagatacaccctgatgtaattattataaatcgcatacctgtatcaaaatatctcatgtatcccataaatatatacacctaccatgtacccataaaaatttaaaaagaaatggaatggcaaataatggaacataaactttaaacagttagctttgaccagaggtcagcaaatatcctccatgggctaaatccagatgtccacctgttttcataaataacgttttattggagcatagctgtacccatttgtttacatattggctatggctgctgtctagttcaacgtgagagttgaatagttgcatcagagagtatatggtccacaagcctaacttattcactctctggccctttgcagaaaaagtgtgctgccttagtctatagaaaatggacttttcccaccattcactgactcattaggagataggcatcttctaaagattttttttatattgtgtaatgattgatatatagataaaattatatattacttgtaaggtatgatgaataacaacacttaaaaactcatcacacctaaagacatggaaagctgccaattacctatatgtatgttcttcctattttcttacctctttccccatgtcattttttattgttccttgccattttttaatcacacatgtatgttctccaaacatactgtttcattttttgaagctttctacatatagtgtctgaatgtgaagtcttactcaacttgcttttttgagtttatgtttaaaattcattcttgcgcttatatgcatggatggtttacttgctctatagtattctgtgtgagtataccacaatttaagtgttcattttcctatcagttgacatttgtttttagtttttgttggtagaaacagtacactcaaaacatccttgactgtcccctggtacacatatgcaagagactttatgcgtaagagtggagttgttggcttgtcaagttttgcaaaataatgccaggtattttccaaaatgatgatattctcttgagtattacttccctttgcaatgtttttattgttaatgtagcatatataaaaaagtatctcataattttaa

SEQ ID NO: 184358 - DNA, 4944 bp, Artificial Sequence
  derived and/or modified sequence
cggaggcctcggtttcgctggagagaaagagattgcgcaggcgccgagcagccgacgtggccgcaggggaccgtgcctgggggggtctgcgcggggccgctgactcgcgaggttctctgtcgcctgccgccctcgctccttttctccccttctagagtgttacggtgactcttgggtccgaaggggacggacgtcctcccacgtaccatttagaagaaatggagcaagagccacaaaatggagaacctgctgaaattaagatcatcagagaagcatataagaaggcctttttatttgttaacaaaggtctgaatacagatgaattaggtcagaaggaagaagcaaagaactactataagcaaggaataggacacctgctcagagggatcagcatttcatcaaaagagtctgaacacacaggtcctgggtgggaatctgctagacagatgcaacagaaaatgaaagaaactctacagaatgtacgcaccaggctggaaattctagagaagggtcttgccacttctctgcagaatgatcttcaggaggtgcccaagttatatccagaatttccacctaaagacatgtgtgaaaaattaccagagcctcagtcttttagttcagctcctcagcatgctgaagtaaatggaaacacctcaactccaagtgcaggggcagttgctgcacctgcttctctgtctttaccatcacaaagttgtccagcagaagctcctcctgcttatactcctcaagctgctgaaggtcactacactgtatcctatggaacagattctggggagttttcatcagttggagaggagttttataggaatcattctcagccaccgcctcttgagaccttagggctggatgcagatgaattgattttgataccaaatggagtacagattttttttgtaaatcctgcaggggaggttagtgcaccttcgtatcctgggtaccttcgaattgtgaggtttttggataattctctcgatacggttctaaaccgtcctcccgggtttcttcaggtttgtgactggttatatcctctagttcctgatagatctccggttctgaaatgtactgcgggagcctacatgtttcctgatacaatgctacaagcagcaggatgctttgtgggggtcgtcctgtcctctgagttaccagaggatgatagagagctctttgaggatctgttaaggcaaatgtctgaccttcggctccaggccaactggaacagagcagaagaagaaaatgaattccaaatccctggaagaactagaccctcctctgaccaactaaaagaagcctctggcactgatgtgaaacagttggaccaaggcaataaggatgtacgtcataaaggaaaacgtggaaaaagggctaaagatacttcaagtgaagaagttaacctgagtcacattgtaccatgtgagccagttccagaagaaaagccaaaagaattacctgaatggagtgaaaaagtggctcacaacattttgtcaggtgcttcctgggtgagttggggtttagtcaaaggtgctgagattactggtaaggcaatccagaaaggtgcttctaaactccgagagcggattcaaccagaagaaaaacccgtggaagttagtccagctgtcaccaagggactttatatagcgaagcaagctacaggaggagcagcaaaagtcagtcagttcctggttgatggagtttgcactgtagcaaattgcgttggaaaagaactagctccacatgtcaagaagcatggaagcaaacttgttccagaatctcttaaaaaagacaaagatgggaaatctcctctggatggtgctatggttgtagcagcaagtagtgttcaaggattttcaactgtctggcaaggattggaatgtgcagctaaatgcatcgttaacaatgtttcagcagaaactgtacaaactgtcagatacaaatacggatataatgcaggagaagctacccaccatgcggtggattctgcggtcaatgttggcgtaactgcctacaatattaacaacattggtatcaaagcaatggtgaagaaaactgcaacacaaacaggacacactctccttgaggactatcagatagttgataattctcagagggaaaatcaagaaggagcagcaaatgtcaacgtgagaggggagaaggatgagcagacgaaggaagtaaaggaggcaaagaagaaagataaatgatgaagtgctgggaatcacttataccaaagccttatgaaatggatgaaattttgttaaataggcaaatgtggaattcctcacagattaaccagtattttttaaatgtattcattcctacaaattaactttcataaattttatggcatgtcttctatttaaaaggaaaagaataagtattcttgcatctggccttagaaatgtgaagttatattctcaagtttatttttttccaagtgtagctaaaatatttttgcaggtaaaataaagctgatagtacatgtgttgttcaaaccttgttaaacctaatattgaactatttttatatctgctgtctttcagaaggcaaataggaaactatatatttgcttaaaaattggcatttagtaaccttaattctttttatagaaggaatgacttaaagtattgtcccctctttttgcactaattgtggatttttttagatgcttctcaaaattttcagtgtgtaagctaaacaaaaactaaaactaagaattctcaaaaaaacttgttcaaaacagggaaagactgatgaaaagtaaaatggactacttttgtaacttacctgtttgttaggaaatggaatggtctctttgatttaaaataaataaaaatagattattacgtcttttgtattgagactgtattgttatgagcctaggaaatttgggaacatgattgtattgtattaaaattcgaagtgattattatcagcttaattggattaaaaaagtacttcaagaaattattttatcatatctgcttctgtttttccaaaaggttaaaacttgtaaaaaaaatatatataaacaattgagtttactaatggtaaacatttttattctgggattcggtcattggaatttatattaaaagacaagttattaaaaaggaaaggttctattcataatcagggtaaagaatatgaaaaccttagacgtaatccatggtggataggcattatggtttccactttggcagaaggcagactattcacagccctatttacttacataggctaaaaaactatgtaactaaatacctaatggtatttaatttttgtttattgaatttaagagattggtattagttttcatagctgtagtccattctaataatttctgatcttctagtggctacttaattagacattatttgaagctgtctgaagaatgcactttatgaattaaaaaactgaattgcctgacctcgttatcacatgagcttatattttgggaacacatagaactgatggaggcttttcctaaggccaaggataatgtactagttgttaaaatggaaataaaagtgaagtggtaaatagcttacagacagtctatgctttgtttaagaaatggaatggcacttcatatattctcatttgtgggagctaaaaattacaataatcaaacttaaggagatagagagtagaatgatggttaccagaggctgggaggcattgaagggatggggagggaagtgaggttgattaatgggtacgaaaatatagttagaacgaatttgttgtagtatttgatagcccaacagggtgactacagtcaacaataactttatacatttaaaaataaaagagtgtaattgggacgtttgtaacacaaatgaatgcttgaagcagtagatacaccctgatgtaattattataaatcgcatacctgtatcaaaatatctcatgtatcccataaatatatacacctaccatgtacccataaaaatttaaaaagaaatggaatggcaaataatggaacataaactttaaacagttagctttgaccagaggtcagcaaatatcctccatgggctaaatccagatgtccacctgttttcataaataacgttttattggagcatagctgtacccatttgtttacatattggctatggctgctgtctagttcaacgtgagagttgaatagttgcatcagagagtatatggtccacaagcctaacttattcactctctggccctttgcagaaaaagtgtgctgccttagtctatagaaaatggacttttcccaccattcactgactcattaggagataggcatcttctaaagattttttttatattgtgtaatgattgatatatagataaaattatatattacttgtaaggtatgatgaataacaacacttaaaaactcatcacacctaaagacatggaaagctgccaattacctatatgtatgttcttcctattttcttacctctttccccatgtcattttttattgttccttgccattttttaatcacacatgtatgttctccaaacatactgtttcattttttgaagctttctacatatagtgtctgaatgtgaagtcttactcaacttgcttttttgagtttatgtttaaaattcattcttgcgcttatatgcatggatggtttacttgctctatagtattctgtgtgagtataccacaatttaagtgttcattttcctatcagttgacatttgtttttagtttttgttggtagaaacagtacactcaaaacatccttgactgtcccctggtacacatatgcaagagactttatgcgtaagagtggagttgttggcttgtcaagttttgcaaaataatgccaggtattttccaaaatgatgatattctcttgagtattacttccctttgcaatgtttttattgttaatgtagcatatataaaaaagtatctcataatttt

SEQ ID NO: 184359 - protein, 1723 aa, Artificial Sequence
  derived and/or modified sequence
MREKEQEREEQLMEDKKRKKEDKKKKEATQKVTEQKTKVPEVTKPSLSQPTAASPIGSSPSPPVNGGNNAKRVAVPNGQPPSAARYMPREVPPRFRCQQDHKVLLKRGQPPPPSCMLLGGGAGPPPCTAPGANPNNAQVTGALLQSESGTAPDSTLGGAAASNYANSTWGSGASSNNGTSPNPIHIWDKVIVDGSDMEEWPCIASKDTESSSENTTDNNSASNPGSEKSTLPGSTTSNKGKGSQCQSASSGNECNLGVWKSDPKAKSVQSSNSTTENNNGLGNWRNVSGQDRIGPGSGFSNFNPNSNPSAWPALVQEGTSRKGALETDNSNSSAQVSTVGQTSREQQSKMENAGVNFVVSGREQAQIHNTDGPKNGNTNSLNLSSPNPMENKGMPFGMGLGNTSRSTDAPSQSTGDRKTGSVGSWGAARGPSGTDTVSGQSNSGNNGNNGKEREDSWKGASVQKSTGSKNDSWDNNNRSTGGSWNFGPQDSNDNKWGEGNKMTSGVSQGEWKQPTGSDELKIGEWSGPNQPNSSTGAWDNQKGHPLPENQGNAQAPCWGRSSSSTGSEVGGQSTGSNHKAGSSDSHNSGRRSYRPTHPDCQAVLQTLLSRTDLDPRVLSNTGWGQTQIKQDTVWDIEEVPRPEGKSDKGTEGWESAATQTKNSGGWGDAPSQSNQMKSGWGELSASTEWKDPKNTGGWNDYKNNNSSNWGGGRPDEKTPSSWNENPSKDQGWGGGRQPNQGWSSGKNGWGEEVDQTKNSNWESSASKPVSGWGEGGQNEIGTWGNGGNASLASKGGWEDCKRSPAWNETGRQPNSWNKQHQQQQPPQQPPPPQPEASGSWGGPPPPPPGNVRPSNSSWSSGPQPATPKDEEPSGWEEPSPQSISRKMDIDDGTSAWGDPNSYNYKNVNLWDKNSQGGPAPREPNLPTPMTSKSASDSKSMQDGWGESDGPVTGARHPSWEEEEDGGVWNTTGSQGSASSHNSASWGQGGKKQMKCSLKGGNNDSWMNPLAKQFSNMGLLSQTEDNPSSKMDLSVGSLSDKKFDVDKRAMNLGDFNDIMRKDRSGFRPPNSKDMGTTDSGPYFEKGGSHGLFGNSTAQSRGLHTPVQPLNSSPSLRAQVPPQFISPQVSASMLKQFPNSGLSPGLFNVGPQLSPQQIAMLSQLPQIPQFQLACQLLLQQQQQQQLLQNQRKISQAVRQQQEQQLARMVSALQQQQQQQQRQPGMKHSPSHPVGPKPHLDNMVPNALNVGLPDLQTKGPIPGYGSGFSSGGMDYGMVGGKEAGTESRFKQWTSMMEGLPSVATQEANMHKNGAIVAPGKTRGGSPYNQFDIIPGDTLGGHTGPAGDSWLPAKSPPTNKIGSKSSNASWPPEFQPGVPWKGIQNIDPESDPYVTPGSVLGGTATSPIVDTDHQLLRDNTTGSNSSLNTSLPSPGAWPYSASDNSFTNVHSTSAKFPDYKSTWSPDPIGHNPTHLSNKMWKNHISSRNTTPLPRPPPGLTNPKPSSPWSSTAPRSVRGWGTQDSRLASASTWSDGGSVRPSYWLVLHNLTPQIDGSTLRTICMQHGPLLTFHLNLTQGTALIRYSTKQEAAKAQTALHMCVLGNTTILAEFATDDEVSRFLAQAQPPTPAATPSAPAAGWQSLETGQNQSDPVGPALNLFGGSTGLGQWSSSAGGSSGADLAGASLWGPPNYSSSLWGVPTVEDPHRMGSPAPLLPGDLLGGGSDSI

SEQ ID NO: 184360 - protein, 1723 aa, Artificial Sequence
  derived and/or modified sequence
MREKEQEREEQLMEDKKRKKEDKKKKEATQKHSNQKTAMPEVTKPSLSQPTAASPIGSSPSPPVNGGNNAKRVAVPNGQPPSAARYMPREVPPRFRCQQDHKVLLKRGQPPPPSCMLLGGGAGPPPCTAPGANPNNAQVTGALLQSESGTAPDSTLGGAAASNYANSTWGSGASSNNGTSPNPIHIWDKVIVDGSDMEEWPCIASKDTESSSENTTDNNSASNPGSEKSTLPGSTTSNKGKGSQCQSASSGNECNLGVWKSDPKAKSVQSSNSTTENNNGLGNWRNVSGQDRIGPGSGFSNFNPNSNPSAWPALVQEGTSRKGALETDNSNSSAQVSTVGQTSREQQSKMENAGVNFVVSGREQAQIHNTDGPKNGNTNSLNLSSPNPMENKGMPFGMGLGNTSRSTDAPSQSTGDRKTGSVGSWGAARGPSGTDTVSGQSNSGNNGNNGKEREDSWKGASVQKSTGSKNDSWDNNNRSTGGSWNFGPQDSNDNKWGEGNKMTSGVSQGEWKQPTGSDELKIGEWSGPNQPNSSTGAWDNQKGHPLPENQGNAQAPCWGRSSSSTGSEVGGQSTGSNHKAGSSDSHNSGRRSYRPTHPDCQAVLQTLLSRTDLDPRVLSNTGWGQTQIKQDTVWDIEEVPRPEGKSDKGTEGWESAATQTKNSGGWGDAPSQSNQMKSGWGELSASTEWKDPKNTGGWNDYKNNNSSNWGGGRPDEKTPSSWNENPSKDQGWGGGRQPNQGWSSGKNGWGEEVDQTKNSNWESSASKPVSGWGEGGQNEIGTWGNGGNASLASKGGWEDCKRSPAWNETGRQPNSWNKQHQQQQPPQQPPPPQPEASGSWGGPPPPPPGNVRPSNSSWSSGPQPATPKDEEPSGWEEPSPQSISRKMDIDDGTSAWGDPNSYNYKNVNLWDKNSQGGPAPREPNLPTPMTSKSASDSKSMQDGWGESDGPVTGARHPSWEEEEDGGVWNTTGSQGSASSHNSASWGQGGKKQMKCSLKGGNNDSWMNPLAKQFSNMGLLSQTEDNPSSKMDLSVGSLSDKKFDVDKRAMNLGDFNDIMRKDRSGFRPPNSKDMGTTDSGPYFEKGGSHGLFGNSTAQSRGLHTPVQPLNSSPSLRAQVPPQFISPQVSASMLKQFPNSGLSPGLFNVGPQLSPQQIAMLSQLPQIPQFQLACQLLLQQQQQQQLLQNQRKISQAVRQQQEQQLARMVSALQQQQQQQQRQPGMKHSPSHPVGPKPHLDNMVPNALNVGLPDLQTKGPIPGYGSGFSSGGMDYGMVGGKEAGTESRFKQWTSMMEGLPSVATQEANMHKNGAIVAPGKTRGGSPYNQFDIIPGDTLGGHTGPAGDSWLPAKSPPTNKIGSKSSNASWPPEFQPGVPWKGIQNIDPESDPYVTPGSVLGGTATSPIVDTDHQLLRDNTTGSNSSLNTSLPSPGAWPYSASDNSFTNVHSTSAKFPDYKSTWSPDPIGHNPTHLSNKMWKNHISSRNTTPLPRPPPGLTNPKPSSPWSSTAPRSVRGWGTQDSRLASASTWSDGGSVRPSYWLVLHNLTPQIDGSTLRTICMQHGPLLTFHLNLTQGTALIRYSTKQEAAKAQTALHMCVLGNTTILAEFATDDEVSRFLAQAQPPTPAATPSAPAAGWQSLETGQNQSDPVGPALNLFGGSTGLGQWSSSAGGSSGADLAGASLWGPPNYSSSLWGVPTVEDPHRMGSPAPLLPGDLLGGGSDSI

SEQ ID NO: 184361 - DNA, 5172 bp, Artificial Sequence
  derived and/or modified sequence
atgagagagaaggagcaggagagagaggagcagctgatggaggacaagaagagaaagaaggaggacaagaagaagaaggaggccacccagaaggtgaccgagcagaagaccaaggtgcccgaggtgaccaagcccagcctgagccagcccaccgccgccagccccatcggcagcagccccagcccccccgtgaacggcggcaacaacgccaagagagtggccgtgcccaacggccagccccccagcgccgccagatacatgcccagagaggtgccccccagattcagatgccagcaggaccacaaggtgctgctgaagagaggccagccccccccccccagctgcatgctgctgggcggcggcgccggcccccccccctgcaccgcccccggcgccaaccccaacaacgcccaggtgaccggcgccctgctgcagagcgagagcggcaccgcccccgacagcaccctgggcggcgccgccgccagcaactacgccaacagcacctggggcagcggcgccagcagcaacaacggcaccagccccaaccccatccacatctgggacaaggtgatcgtggacggcagcgacatggaggagtggccctgcatcgccagcaaggacaccgagagcagcagcgagaacaccaccgacaacaacagcgccagcaaccccggcagcgagaagagcaccctgcccggcagcaccaccagcaacaagggcaagggcagccagtgccagagcgccagcagcggcaacgagtgcaacctgggcgtgtggaagagcgaccccaaggccaagagcgtgcagagcagcaacagcaccaccgagaacaacaacggcctgggcaactggagaaacgtgagcggccaggacagaatcggccccggcagcggcttcagcaacttcaaccccaacagcaaccccagcgcctggcccgccctggtgcaggagggcaccagcagaaagggcgccctggagaccgacaacagcaacagcagcgcccaggtgagcaccgtgggccagaccagcagagagcagcagagcaagatggagaacgccggcgtgaacttcgtggtgagcggcagagagcaggcccagatccacaacaccgacggccccaagaacggcaacaccaacagcctgaacctgagcagccccaaccccatggagaacaagggcatgcccttcggcatgggcctgggcaacaccagcagaagcaccgacgcccccagccagagcaccggcgacagaaagaccggcagcgtgggcagctggggcgccgccagaggccccagcggcaccgacaccgtgagcggccagagcaacagcggcaacaacggcaacaacggcaaggagagagaggacagctggaagggcgccagcgtgcagaagagcaccggcagcaagaacgacagctgggacaacaacaacagaagcaccggcggcagctggaacttcggcccccaggacagcaacgacaacaagtggggcgagggcaacaagatgaccagcggcgtgagccagggcgagtggaagcagcccaccggcagcgacgagctgaagatcggcgagtggagcggccccaaccagcccaacagcagcaccggcgcctgggacaaccagaagggccaccccctgcccgagaaccagggcaacgcccaggccccctgctggggcagaagcagcagcagcaccggcagcgaggtgggcggccagagcaccggcagcaaccacaaggccggcagcagcgacagccacaacagcggcagaagaagctacagacccacccaccccgactgccaggccgtgctgcagaccctgctgagcagaaccgacctggaccccagagtgctgagcaacaccggctggggccagacccagatcaagcaggacaccgtgtgggacatcgaggaggtgcccagacccgagggcaagagcgacaagggcaccgagggctgggagagcgccgccacccagaccaagaacagcggcggctggggcgacgcccccagccagagcaaccagatgaagagcggctggggcgagctgagcgccagcaccgagtggaaggaccccaagaacaccggcggctggaacgactacaagaacaacaacagcagcaactggggcggcggcagacccgacgagaagacccccagcagctggaacgagaaccccagcaaggaccagggctggggcggcggcagacagcccaaccagggctggagcagcggcaagaacggctggggcgaggaggtggaccagaccaagaacagcaactgggagagcagcgccagcaagcccgtgagcggctggggcgagggcggccagaacgagatcggcacctggggcaacggcggcaacgccagcctggccagcaagggcggctgggaggactgcaagagaagccccgcctggaacgagaccggcagacagcccaacagctggaacaagcagcaccagcagcagcagcccccccagcagcccccccccccccagcccgaggccagcggcagctggggcggcccccccccccccccccccggcaacgtgagacccagcaacagcagctggagcagcggcccccagcccgccacccccaaggacgaggagcccagcggctgggaggagcccagcccccagagcatcagcagaaagatggacatcgacgacggcaccagcgcctggggcgaccccaacagctacaactacaagaacgtgaacctgtgggacaagaacagccagggcggccccgcccccagagagcccaacctgcccacccccatgaccagcaagagcgccagcgacagcaagagcatgcaggacggctggggcgagagcgacggccccgtgaccggcgccagacaccccagctgggaggaggaggaggacggcggcgtgtggaacaccaccggcagccagggcagcgccagcagccacaacagcgccagctggggccagggcggcaagaagcagatgaagtgcagcctgaagggcggcaacaacgacagctggatgaaccccctggccaagcagttcagcaacatgggcctgctgagccagaccgaggacaaccccagcagcaagatggacctgagcgtgggcagcctgagcgacaagaagttcgacgtggacaagagagccatgaacctgggcgacttcaacgacatcatgagaaaggacagaagcggcttcagaccccccaacagcaaggacatgggcaccaccgacagcggcccctacttcgagaagggcggcagccacggcctgttcggcaacagcaccgcccagagcagaggcctgcacacccccgtgcagcccctgaacagcagccccagcctgagagcccaggtgcccccccagttcatcagcccccaggtgagcgccagcatgctgaagcagttccccaacagcggcctgagccccggcctgttcaacgtgggcccccagctgagcccccagcagatcgccatgctgagccagctgccccagatcccccagttccagctggcctgccagctgctgctgcagcagcagcagcagcagcagctgctgcagaaccagagaaagatcagccaggccgtgagacagcagcaggagcagcagctggccagaatggtgagcgccctgcagcagcagcagcagcagcagcagagacagcccggcatgaagcacagccccagccaccccgtgggccccaagccccacctggacaacatggtgcccaacgccctgaacgtgggcctgcccgacctgcagaccaagggccccatccccggctacggcagcggcttcagcagcggcggcatggactacggcatggtgggcggcaaggaggccggcaccgagagcagattcaagcagtggaccagcatgatggagggcctgcccagcgtggccacccaggaggccaacatgcacaagaacggcgccatcgtggcccccggcaagaccagaggcggcagcccctacaaccagttcgacatcatccccggcgacaccctgggcggccacaccggccccgccggcgacagctggctgcccgccaagagcccccccaccaacaagatcggcagcaagagcagcaacgccagctggccccccgagttccagcccggcgtgccctggaagggcatccagaacatcgaccccgagagcgacccctacgtgacccccggcagcgtgctgggcggcaccgccaccagccccatcgtggacaccgaccaccagctgctgagagacaacaccaccggcagcaacagcagcctgaacaccagcctgcccagccccggcgcctggccctacagcgccagcgacaacagcttcaccaacgtgcacagcaccagcgccaagttccccgactacaagagcacctggagccccgaccccatcggccacaaccccacccacctgagcaacaagatgtggaagaaccacatcagcagcagaaacaccacccccctgcccagacccccccccggcctgaccaaccccaagcccagcagcccctggagcagcaccgcccccagaagcgtgagaggctggggcacccaggacagcagactggccagcgccagcacctggagcgacggcggcagcgtgagacccagctactggctggtgctgcacaacctgaccccccagatcgacggcagcaccctgagaaccatctgcatgcagcacggccccctgctgaccttccacctgaacctgacccagggcaccgccctgatcagatacagcaccaagcaggaggccgccaaggcccagaccgccctgcacatgtgcgtgctgggcaacaccaccatcctggccgagttcgccaccgacgacgaggtgagcagattcctggcccaggcccagccccccacccccgccgccacccccagcgcccccgccgccggctggcagagcctggagaccggccagaaccagagcgaccccgtgggccccgccctgaacctgttcggcggcagcaccggcctgggccagtggagcagcagcgccggcggcagcagcggcgccgacctggccggcgccagcctgtggggcccccccaactacagcagcagcctgtggggcgtgcccaccgtggaggacccccacagaatgggcagccccgcccccctgctgcccggcgacctgctgggcggcggcagcgacagcatctag

SEQ ID NO: 184362 - DNA, 5172 bp, Artificial Sequence
  derived and/or modified sequence
atgagagagaaggagcaggagagagaggagcagctgatggaggacaagaagagaaagaaggaggacaagaagaagaaggaggccacccagaagcacagcaaccagaagaccgccatgcccgaggtgaccaagcccagcctgagccagcccaccgccgccagccccatcggcagcagccccagcccccccgtgaacggcggcaacaacgccaagagagtggccgtgcccaacggccagccccccagcgccgccagatacatgcccagagaggtgccccccagattcagatgccagcaggaccacaaggtgctgctgaagagaggccagccccccccccccagctgcatgctgctgggcggcggcgccggcccccccccctgcaccgcccccggcgccaaccccaacaacgcccaggtgaccggcgccctgctgcagagcgagagcggcaccgcccccgacagcaccctgggcggcgccgccgccagcaactacgccaacagcacctggggcagcggcgccagcagcaacaacggcaccagccccaaccccatccacatctgggacaaggtgatcgtggacggcagcgacatggaggagtggccctgcatcgccagcaaggacaccgagagcagcagcgagaacaccaccgacaacaacagcgccagcaaccccggcagcgagaagagcaccctgcccggcagcaccaccagcaacaagggcaagggcagccagtgccagagcgccagcagcggcaacgagtgcaacctgggcgtgtggaagagcgaccccaaggccaagagcgtgcagagcagcaacagcaccaccgagaacaacaacggcctgggcaactggagaaacgtgagcggccaggacagaatcggccccggcagcggcttcagcaacttcaaccccaacagcaaccccagcgcctggcccgccctggtgcaggagggcaccagcagaaagggcgccctggagaccgacaacagcaacagcagcgcccaggtgagcaccgtgggccagaccagcagagagcagcagagcaagatggagaacgccggcgtgaacttcgtggtgagcggcagagagcaggcccagatccacaacaccgacggccccaagaacggcaacaccaacagcctgaacctgagcagccccaaccccatggagaacaagggcatgcccttcggcatgggcctgggcaacaccagcagaagcaccgacgcccccagccagagcaccggcgacagaaagaccggcagcgtgggcagctggggcgccgccagaggccccagcggcaccgacaccgtgagcggccagagcaacagcggcaacaacggcaacaacggcaaggagagagaggacagctggaagggcgccagcgtgcagaagagcaccggcagcaagaacgacagctgggacaacaacaacagaagcaccggcggcagctggaacttcggcccccaggacagcaacgacaacaagtggggcgagggcaacaagatgaccagcggcgtgagccagggcgagtggaagcagcccaccggcagcgacgagctgaagatcggcgagtggagcggccccaaccagcccaacagcagcaccggcgcctgggacaaccagaagggccaccccctgcccgagaaccagggcaacgcccaggccccctgctggggcagaagcagcagcagcaccggcagcgaggtgggcggccagagcaccggcagcaaccacaaggccggcagcagcgacagccacaacagcggcagaagaagctacagacccacccaccccgactgccaggccgtgctgcagaccctgctgagcagaaccgacctggaccccagagtgctgagcaacaccggctggggccagacccagatcaagcaggacaccgtgtgggacatcgaggaggtgcccagacccgagggcaagagcgacaagggcaccgagggctgggagagcgccgccacccagaccaagaacagcggcggctggggcgacgcccccagccagagcaaccagatgaagagcggctggggcgagctgagcgccagcaccgagtggaaggaccccaagaacaccggcggctggaacgactacaagaacaacaacagcagcaactggggcggcggcagacccgacgagaagacccccagcagctggaacgagaaccccagcaaggaccagggctggggcggcggcagacagcccaaccagggctggagcagcggcaagaacggctggggcgaggaggtggaccagaccaagaacagcaactgggagagcagcgccagcaagcccgtgagcggctggggcgagggcggccagaacgagatcggcacctggggcaacggcggcaacgccagcctggccagcaagggcggctgggaggactgcaagagaagccccgcctggaacgagaccggcagacagcccaacagctggaacaagcagcaccagcagcagcagcccccccagcagcccccccccccccagcccgaggccagcggcagctggggcggcccccccccccccccccccggcaacgtgagacccagcaacagcagctggagcagcggcccccagcccgccacccccaaggacgaggagcccagcggctgggaggagcccagcccccagagcatcagcagaaagatggacatcgacgacggcaccagcgcctggggcgaccccaacagctacaactacaagaacgtgaacctgtgggacaagaacagccagggcggccccgcccccagagagcccaacctgcccacccccatgaccagcaagagcgccagcgacagcaagagcatgcaggacggctggggcgagagcgacggccccgtgaccggcgccagacaccccagctgggaggaggaggaggacggcggcgtgtggaacaccaccggcagccagggcagcgccagcagccacaacagcgccagctggggccagggcggcaagaagcagatgaagtgcagcctgaagggcggcaacaacgacagctggatgaaccccctggccaagcagttcagcaacatgggcctgctgagccagaccgaggacaaccccagcagcaagatggacctgagcgtgggcagcctgagcgacaagaagttcgacgtggacaagagagccatgaacctgggcgacttcaacgacatcatgagaaaggacagaagcggcttcagaccccccaacagcaaggacatgggcaccaccgacagcggcccctacttcgagaagggcggcagccacggcctgttcggcaacagcaccgcccagagcagaggcctgcacacccccgtgcagcccctgaacagcagccccagcctgagagcccaggtgcccccccagttcatcagcccccaggtgagcgccagcatgctgaagcagttccccaacagcggcctgagccccggcctgttcaacgtgggcccccagctgagcccccagcagatcgccatgctgagccagctgccccagatcccccagttccagctggcctgccagctgctgctgcagcagcagcagcagcagcagctgctgcagaaccagagaaagatcagccaggccgtgagacagcagcaggagcagcagctggccagaatggtgagcgccctgcagcagcagcagcagcagcagcagagacagcccggcatgaagcacagccccagccaccccgtgggccccaagccccacctggacaacatggtgcccaacgccctgaacgtgggcctgcccgacctgcagaccaagggccccatccccggctacggcagcggcttcagcagcggcggcatggactacggcatggtgggcggcaaggaggccggcaccgagagcagattcaagcagtggaccagcatgatggagggcctgcccagcgtggccacccaggaggccaacatgcacaagaacggcgccatcgtggcccccggcaagaccagaggcggcagcccctacaaccagttcgacatcatccccggcgacaccctgggcggccacaccggccccgccggcgacagctggctgcccgccaagagcccccccaccaacaagatcggcagcaagagcagcaacgccagctggccccccgagttccagcccggcgtgccctggaagggcatccagaacatcgaccccgagagcgacccctacgtgacccccggcagcgtgctgggcggcaccgccaccagccccatcgtggacaccgaccaccagctgctgagagacaacaccaccggcagcaacagcagcctgaacaccagcctgcccagccccggcgcctggccctacagcgccagcgacaacagcttcaccaacgtgcacagcaccagcgccaagttccccgactacaagagcacctggagccccgaccccatcggccacaaccccacccacctgagcaacaagatgtggaagaaccacatcagcagcagaaacaccacccccctgcccagacccccccccggcctgaccaaccccaagcccagcagcccctggagcagcaccgcccccagaagcgtgagaggctggggcacccaggacagcagactggccagcgccagcacctggagcgacggcggcagcgtgagacccagctactggctggtgctgcacaacctgaccccccagatcgacggcagcaccctgagaaccatctgcatgcagcacggccccctgctgaccttccacctgaacctgacccagggcaccgccctgatcagatacagcaccaagcaggaggccgccaaggcccagaccgccctgcacatgtgcgtgctgggcaacaccaccatcctggccgagttcgccaccgacgacgaggtgagcagattcctggcccaggcccagccccccacccccgccgccacccccagcgcccccgccgccggctggcagagcctggagaccggccagaaccagagcgaccccgtgggccccgccctgaacctgttcggcggcagcaccggcctgggccagtggagcagcagcgccggcggcagcagcggcgccgacctggccggcgccagcctgtggggcccccccaactacagcagcagcctgtggggcgtgcccaccgtggaggacccccacagaatgggcagccccgcccccctgctgcccggcgacctgctgggcggcggcagcgacagcatctag

SEQ ID NO: 184363 - DNA, 5172 bp, Artificial Sequence
  derived and/or modified sequence
atgcgagagaaagagcaggaaagggaagagcagttaatggaggacaagaaaagaaaaaaagaggacaagaaaaaaaaagaggcaacacagaaggtgacagagcaaaagacaaaggtgcccgaggtcaccaagccaagcttgtcccagcccaccgctgcttctccaattggcagctctccatccccacctgttaatgggggcaataacgccaaaagggtcgccgtcccaaacggtcagcctcctagtgctgctcggtatatgccccgcgaggtacctccgcggtttcggtgtcagcaagaccacaaagtgctgttaaagcgcggacagccgccacctccgtcatgtatgctgttgggtggcggagccggaccccctccctgtacagcccccggagctaatcctaacaacgcccaagtaaccggagcattacttcaatctgaatcaggcactgcaccagactctacgcttggtggcgctgccgcttcgaattatgccaattctacatgggggagcggcgcctccagcaataatgggacctcaccaaatcctattcatatatgggataaagtgattgtcgatgggagcgacatggaagaatggccatgcattgcatctaaagatacagaatcctcatccgaaaacaccacggacaacaattccgctagtaacccaggatcagagaagagtacgctgccgggttcaacgacctccaacaagggcaagggatcgcaatgccaaagtgcctcttctggaaacgagtgcaacttgggcgtatggaaatcagatcctaaagccaaaagtgtccaatctagtaactccaccaccgagaataacaatggcttgggcaactggaggaacgtcagtggccaggacaggattggtccaggctcagggttcagcaattttaatccaaattcaaatcctagtgcttggcccgcattggtgcaggaaggaacttcccgcaagggagccctagagaccgataacagcaactcttccgcgcaggtaagcactgtgggccagacctctcgggagcaacagagcaaaatggagaacgcgggcgtcaacttcgtggtaagcggacgggaacaagcccagatccataataccgatggcccaaagaatgggaacaccaactcccttaacctgagctcccctaatcccatggagaacaaaggcatgccattcggcatgggcttagggaacacatcgaggtcgacggatgcaccaagccaatctactggagaccgcaagactggaagcgtggggtcttggggagcggctcgaggaccgagcgggacagacacagtttctggccagtccaacagcggcaataatggcaacaacggaaaagagagggaggactcatggaagggagcatccgtgcagaaatcaacgggctctaagaacgattcctgggataacaacaatcgctctactggaggctcgtggaactttggccctcaggacagcaacgacaataagtggggcgaaggcaataagatgacttccggggtttcccagggcgagtggaagcagccaactggaagcgacgagctgaaaatcggcgagtggtccggaccgaatcagccaaattcctccacaggggcctgggataatcagaaaggccaccctttgcccgaaaaccaaggcaatgctcaggccccgtgctggggaagaagcagctcatctaccggctccgaagtgggcggccagtcaaccggcagcaaccacaaggcagggtctagcgacagccataactcgggccggagatcttatagaccgacccatcccgattgccaggccgttctgcagaccctcctttcacgaacagacctggacccccgggttctgtcaaatactggctggggccagacccaaatcaagcaggatactgtttgggatatagaagaagttccacgtccagagggcaagtctgataagggtacagaaggctgggaaagtgccgcaactcaaaccaaaaattctgggggctggggtgatgccccgtcccagtcgaatcagatgaaatcgggctggggcgaattatccgcttcgacagaatggaaagacccaaagaatactggaggttggaatgattacaagaataacaatagctccaactggggaggcggccggcctgatgaaaagaccccatccagctggaacgaaaatccatctaaagatcaagggtggggcggcggcagacagcccaaccagggctggagtagtggaaaaaacggctggggagaagaggtggaccagaccaaaaatagtaactgggagtcctcggcctccaagcctgtgtcaggctggggagaggggggccagaacgagatcggaacatggggaaacggtggcaatgcatccctcgccagcaaaggcggctgggaggactgcaaacggagccctgcttggaacgagaccggtaggcagcctaattcctggaacaagcagcatcagcagcaacagccccctcagcaacctccaccaccgcagccggaggcttcaggatcctggggcgggccacctccaccgccccccggtaacgtacggcctagtaatagctcctggtcctctggcccccagcctgccacccctaaggacgaagagccgtctggttgggaagagccttccccgcaatctattagccgaaagatggatattgatgacggaacatccgcctggggtgatccaaattcttataattataaaaatgttaatctctgggacaagaatagccaagggggaccagccccgcgagagccaaatctgcccacacccatgacatccaagtctgccagcgattccaagtccatgcaggatggttggggcgagagcgacgggccagtgaccggagcgcgacatcctagctgggaggaagaagaggatggcggtgtatggaataccaccggctcccaaggcagtgccagttcccataacagcgcaagctggggccagggcggcaagaagcagatgaaatgtagcctgaagggcggcaacaatgattcttggatgaaccctctggctaaacagttctccaatatgggccttttaagccaaactgaggataacccttcgtctaaaatggacctgagtgtgggatctctttccgataaaaaatttgatgtcgataagcgagctatgaacctaggcgatttcaatgatattatgcggaaggacaggagcggctttaggcctccaaattcaaaggacatgggcaccaccgatagtggaccttatttcgagaagggcggttcacacggactctttggcaacagtaccgcgcagtcacggggacttcacactccggtgcaaccactgaattcgtccccaagcctccgtgctcaggtacccccacaatttataagcccccaggtgtcagcctctatgctcaagcagtttccaaattctggtctcagtcctggactttttaacgtgggcccacagttgtcaccccaacaaattgcaatgctgtcccagctcccccagatccctcagttccagctcgcctgccagctgttgctgcagcagcagcaacagcagcagcttctgcaaaatcagcgcaagatttcccaggccgtcagacagcagcaggagcagcagctggctcgtatggtctccgctctacaacagcaacagcagcagcaacaacgacagccaggtatgaaacacagcccatctcatccggttggccctaaacctcacctggataacatggtgccgaacgcgctcaatgttgggctgcctgatttgcagacaaagggtcctattccaggctatggctcaggtttctcctctggaggaatggactacggcatggtgggcgggaaagaggccgggaccgagtctcgatttaaacagtggaccagcatgatggagggcctgcccagcgtggccacgcaggaggccaacatgcacaagaatggggctatagtggccccgggcaaaactaggggaggatctccttataaccaatttgatatcatccctggggatactcttggcgggcacacggggccagctggcgacagttggttgcccgctaaatccccgcctacaaacaaaattggatccaaaagttctaatgcttcctggccacctgagttccagcctggcgtgccgtggaaaggaatccagaatatagaccctgaaagcgacccctatgtgactccaggtagcgtactcggaggcaccgctacatccccaattgtagacacagatcatcaactccttcgggacaatacgactggctcaaatagttctctgaatactagcctcccgtcacccggggcttggccgtactccgcctccgataattcattcacaaatgtgcacagtacatccgctaagtttccagactataagagcacctggtcgccggacccaattggacacaaccccacccatctgagcaataagatgtggaaaaatcacatctctagccggaataccacccccctgccacgcccgcctcccgggttgacaaatcccaaaccatcgagcccttggagtagcaccgccccccgttcagtgagaggttggggaactcaggattcacgcctggcaagcgcctcaacttggagtgacggggggtccgtgcgccctagctactggcttgtgttgcataatctaacaccccagatcgatgggtctactctgcgcacaatctgcatgcagcacgggcctctgttaactttccatctgaacctgacacaggggactgccctgatcaggtattcaaccaaacaggaggcagccaaagcacagaccgcccttcatatgtgtgtcctgggaaacacgactattctggctgaatttgccactgatgatgaggtaagtagatttttggcacaggcgcagccgcccacccctgccgcaacgccttctgccccagccgcgggctggcagtccctggagacgggccagaatcagagcgacccggtcggccctgccctgaatctattcggcggatccaccggcctgggccagtggtcctcctcagcgggtggctcctctggcgctgatttggcaggcgctagcctgtggggccctcccaattattctagctcgctttggggagtgccaactgtcgaggacccccaccgtatgggcagcccagctccgttgctgccgggagatctgctcgggggcggttccgactctatatag

SEQ ID NO: 184364 - DNA, 5172 bp, Artificial Sequence
  derived and/or modified sequence
atgagggagaaagagcaggaaagagaggaacaactgatggaggataaaaaaagaaaaaaagaagacaagaagaaaaaagaggccactcagaagcattcaaatcaaaagactgctatgcctgaggtgaccaagcccagcctgagtcagcctactgccgctagtcccatcggctcttcaccgtccccgccggtcaatggaggaaacaacgctaagcgggttgccgtgcctaacggccaaccccccagcgctgcacggtacatgccaagggaggtgcccccccgctttcgatgccagcaggaccacaaggtgctgttgaaacggggtcagccaccccctccatcctgtatgcttctcggaggaggggccggcccacccccctgcactgcccccggcgctaaccctaacaatgcccaagtcacgggcgccttactccagtctgaaagcggcactgcaccagattctacactggggggtgccgccgcgagcaactacgccaattccacctggggctctggagcctcatctaataacggcactagccctaaccccatccatatctgggacaaggtcatcgtggatgggagcgatatggaggagtggccctgtattgcaagtaaggacaccgagtcaagcagtgaaaacactacggataacaattctgcctccaatcccggttcagagaagtctacactgccgggatctactactagtaataaaggaaaaggctcccagtgtcagtctgcaagctctggcaacgaatgtaatctgggagtgtggaagtctgaccctaaagctaaatccgtacaatctagcaactccacaaccgaaaacaacaacggtctgggcaactggcggaacgtgtccgggcaggaccggatagggcccgggtcaggcttctcaaatttcaacccgaatagcaatccctctgcatggccagcactcgtgcaggagggcacgtcccgtaagggcgccctagaaacagataactctaattcctcagctcaggtgtctacagttgggcagacgtctcgcgagcagcagtctaagatggagaacgcgggagtgaactttgtggtgtcagggagagaacaggcccagattcacaataccgacggaccgaaaaacggcaacaccaactccctcaatctctctagtccgaatccaatggagaataaagggatgcctttcggaatgggccttggaaacacctctagatcgacggatgcgcctagtcaaagcacaggggatcgtaaaacaggttctgtgggaagctggggtgcggctagaggaccctccggaactgacactgtgtcaggacaaagcaattccggcaacaacggcaacaacggcaaagagagggaagattcttggaaaggcgcttcagttcagaagtccacgggctctaaaaatgacagctgggataacaacaaccgatctacgggtggctcttggaactttggaccacaagactctaacgataataaatggggcgaaggaaacaagatgacctctggggtgagtcaaggcgagtggaaacagcctacaggatccgacgagctaaaaataggagagtggtcggggcctaatcagccgaattccagcaccggtgcctgggataaccagaaagggcacccactaccagaaaaccagggtaatgctcaggctccatgctggggccgctccagtagctccacagggtcagaggtgggcgggcagtctacaggcagtaatcacaaagctggttcttcagattcccataactccggacgcagaagctaccgaccaactcaccctgactgccaggcagttcttcagacactcttgagccgtaccgatctggatccacgtgtgctcagcaacaccggttggggacagacacaaattaagcaagataccgtgtgggacatcgaagaagttcctaggccggagggcaaatctgataagggtaccgagggctgggaaagtgctgccacacagacaaaaaacagcggcggctggggagacgcaccatcccagtctaaccagatgaaatcaggctggggcgagctgtctgcctccaccgaatggaaggatcccaagaacactggtgggtggaatgattacaagaacaataactcatcgaattgggggggggggcggcctgatgagaaaacccccagcagttggaacgaaaatccctctaaggatcaaggctggggcggcggaagacagcctaaccaagggtggagttccgggaagaacgggtggggtgaagaggttgaccaaacaaagaattctaactgggaaagttcagcatcaaagcccgtttccggatggggggagggagggcagaatgaaattggaacgtggggaaatggcgggaacgctagtctggcctcaaagggcgggtgggaggactgcaaacggtcacccgcctggaacgagactggacggcagcccaatagttggaataaacaacatcagcaacagcagcctccccagcagcctccacctcctcagcccgaagcctccggaagctggggcggcccaccacctcccccacctggcaatgtaaggccatccaattcaagctggtcctctggacctcagcctgctactccaaaggatgaggaaccttctggctgggaagaaccatcccctcaaagcatctcaagaaaaatggacatcgacgacggaaccagcgcgtggggcgaccccaattcgtacaactacaaaaatgtcaacctctgggataaaaattcccagggcggtccagcccccagggaaccgaaccttcctacgccaatgacgtccaagagtgccagcgattcaaaatccatgcaggatggctggggggagagtgatggacctgtaaccggggctaggcacccatcgtgggaagaggaagaggatgggggggtttggaatacaaccggttcccaggggtctgcctctagccataatagcgccagttggggacagggaggaaagaagcaaatgaaatgttccttgaaagggggaaataatgactcctggatgaatccgctcgcaaagcagttcagcaacatggggttgctgtctcaaaccgaggacaaccccagttccaaaatggacctttctgttggatccctgagcgacaagaaattcgatgttgacaaaagggccatgaacctgggagattttaacgacatcatgcggaaggacagatctggatttagaccaccgaacagtaaagatatgggcactacagactcggggccttattttgagaaagggggctctcatgggttattcggcaactccaccgcacagtccagaggtctgcacacccctgtgcaacccttaaacagctcacctagtctgcgggctcaggtgccgcctcaattcatcagcccccaggtatcggccagtatgctgaaacagttccccaactctggtctaagcccaggcctgtttaacgtgggaccgcaattgagccctcagcaaattgccatgctcagtcagctcccccagattccccaattccagctagcttgtcagcttctcctgcagcagcagcagcagcagcagcttctccagaaccagaggaagatcagccaggccgtaagacagcaacaggagcagcagctggctcggatggtgtctgcactgcaacagcagcagcagcagcagcagcggcaaccggggatgaagcactcccctagtcaccccgtggggccgaaaccccacctggataacatggttccaaacgcactcaacgtgggtttacctgatctgcagactaagggcccaatccccgggtatggcagtggcttctcctcaggggggatggattacggtatggtcggcggcaaggaggcagggactgaaagtcgttttaaacaatggacttcaatgatggagggactgccttccgttgccacacaggaggctaatatgcacaagaacggggctattgtggcccctggaaaaacacgtggcgggtcgccttataatcagttcgacatcattccaggcgatacacttgggggccacacgggccccgcaggagactcttggctcccggccaaatctcccccaaccaacaaaataggttccaagagtagcaatgctagttggcctcccgagtttcagccaggagtcccgtggaaaggaatccagaacattgaccccgaatccgatccatacgtgacgcccggaagtgtcctgggagggactgccacttcacccattgttgacactgatcaccagcttctgcgggataacacaactgggagtaactcatcactaaatacttctctgccaagtcccggcgcgtggccgtactccgcctctgacaacagttttaccaacgtacacagcacttcagccaagttcccagactacaaatctacatggtcgcccgatccgatcgggcacaacccgactcatctgagcaataagatgtggaagaaccacatctcgtccagaaacactacccctcttcctcggccaccacccggactgaccaaccccaaaccatcgagcccatggtcttccaccgccccacgctctgtgaggggatggggcactcaggattctcgtctagcctccgcctctacttggagcgacggcggctcggtacgaccttcctactggctggtgcttcacaatctcactccacagatcgatggatctacactgcgcactatctgcatgcagcatggcccacttctgacctttcacttgaatctgacccaggggactgcactgatccgttactccacaaagcaggaagctgcaaaagcgcagaccgccctgcatatgtgtgtcctgggcaatacaacaattctggcagaattcgcgacagacgacgaagtctcaaggttcctggcccaggcccagcccccaacaccggctgcaaccccctccgcaccagcagccgggtggcagtctttggagacagggcagaaccagagcgaccccgtggggcctgccttgaatctgttcggcggttccactggcctgggtcagtggagcagctcagccggaggttcctccggggctgacctagcaggtgcttccctttgggggccaccgaactactcgtctagcctctggggagtgccaactgtggaagatcctcaccgaatgggcagtccggcccctttactgcccggggacctgttaggcggcggaagcgatagtatttag

SEQ ID NO: 184365 - DNA, 5172 bp, Artificial Sequence
  derived and/or modified sequence
atgagggagaaggagcaggagcgggaggagcagctgatggaggacaagaagaggaagaaggaggacaagaagaagaaggaggccacccagaaggtgacagagcagaagaccaaggtgcctgaggtgaccaagcccagcctgagccagcccacagctgccagccccatcggcagcagccccagcccccctgtgaatggaggcaacaatgccaagagggtggccgtgcccaacggccagccccccagcgctgcccgctacatgccccgggaggtgcccccacgcttccgctgccagcaggaccacaaggtgctgctgaagaggggccagcccccaccacccagctgcatgctgctgggcggcggggccggccccccaccctgcacagcccctggggccaaccccaacaatgcccaggtgactggagccctgctgcagagcgagagcggcacagccccagacagcaccctgggcggggccgccgccagcaactatgccaacagcacctggggcagcggggccagcagcaacaacggcaccagccccaaccccatccacatctgggacaaggtgattgtggatggcagtgacatggaggagtggccctgcatcgccagcaaggacacagagagcagcagcgagaacaccacagacaacaacagcgccagcaaccctggcagcgagaagagcaccctgcccggcagcaccaccagcaacaagggcaagggcagccagtgccagagcgccagcagtggaaatgaatgcaacctgggcgtgtggaagagtgaccccaaggccaagtctgtgcagagcagcaacagcaccacagagaacaacaacggcctgggcaactggagaaatgtgtctggccaggacagaattggccctggcagcggcttcagcaacttcaaccccaacagcaaccccagcgcctggccagccctggtgcaggagggcaccagcaggaagggggccctggagacagacaacagcaacagcagcgcccaggtgtccacagtgggccagaccagccgggagcagcagagcaagatggagaatgccggcgtgaactttgtggtgtctggccgggagcaggcccagatccacaacacagatggccccaagaatggaaacaccaacagcctgaacctgagcagccccaaccccatggagaacaagggcatgcccttcggcatgggcctgggcaacaccagccgcagcacagatgcccccagccagagcactggagacaggaagacaggctctgtgggctcctggggcgccgcccggggccccagcggcacagacacagtgtctggccagagcaacagcggcaacaacggcaacaacgggaaggagcgggaggacagctggaagggggcctctgtgcagaagagcacaggcagcaagaatgacagctgggacaacaacaacagaagcactggaggctcctggaactttggcccccaggacagcaatgacaacaagtggggcgagggcaacaagatgaccagcggcgtgtcccagggcgagtggaagcagcccactggaagtgatgagctgaagatcggggagtggagcggccccaaccagcccaacagcagcactggagcctgggacaaccagaagggccaccccctgcctgagaaccagggcaatgcccaggccccctgctggggccgcagcagcagcagcactggaagtgaggtgggcggccagagcacaggcagcaaccacaaggccggcagcagtgacagccacaacagcggccgccgcagctaccggcccacccacccagactgccaggccgtgctgcagaccctgctgagcaggacagacctggacccccgggtgctgagcaacacaggctggggccagacccagatcaagcaggacacagtgtgggacatcgaggaggtgcccaggcctgagggcaagagtgacaagggcacagagggctgggagagcgctgccacccagaccaagaacagcggcggctggggagatgcccccagccagagcaaccagatgaagagcggctggggcgagctgagcgccagcacagagtggaaggaccccaagaacacaggaggctggaatgactacaagaacaacaacagcagcaactggggcggcggccgcccagatgagaagacccccagctcctggaatgaaaaccccagcaaggaccagggctggggcggcggccggcagcccaaccagggctggagcagcggcaagaatggctggggcgaggaggtggaccagaccaagaacagcaactgggagagcagcgccagcaagcctgtgtctggctggggcgagggcggccagaatgagatcggcacctggggcaatggaggaaatgccagcctggccagcaagggcggctgggaggactgcaagaggagccctgcctggaatgaaacaggccggcagcccaacagctggaacaagcagcaccagcagcagcagcccccccagcagcccccaccaccccagcctgaggccagcggctcctggggcggccccccacctcctcctcctggaaatgtgcggcccagcaacagctcctggagcagcggcccccagcctgccacccccaaggatgaggagcccagcggctgggaggagcccagcccccagagcatcagcaggaagatggacattgatgatggcaccagcgcctggggagaccccaacagctacaactacaagaatgtgaacctgtgggacaagaacagccagggcggccctgccccccgggagcccaacctgcccacccccatgaccagcaagagcgccagtgacagcaagtccatgcaggacggctggggcgagagtgatggccctgtgactggagcccggcaccccagctgggaggaggaggaggatggcggcgtgtggaacaccaccggcagccagggcagcgccagcagccacaacagcgcctcctggggccagggcggcaagaagcagatgaagtgcagcctgaagggcggcaacaatgacagctggatgaaccccctggccaagcagttcagcaacatgggcctgctgagccagacagaggacaaccccagcagcaagatggacctgtctgtgggcagcctgagtgacaagaagtttgatgtggacaagagggccatgaacctgggggacttcaatgacatcatgaggaaggacagaagtggcttccggccccccaacagcaaggacatgggcaccacagacagcggcccctactttgagaagggcggcagccacggcctgtttggaaacagcacagcccagagccggggcctgcacacccctgtgcagcccctgaacagcagccccagcctgcgggcccaggtgcccccccagttcatcagcccccaggtgtctgcctccatgctgaagcagttccccaacagcggcctgagccctggcctcttcaacgtgggcccccagctgagcccccagcagatcgccatgctgagccagctgccccagatcccccagttccagctggcctgccagctgctgctgcagcagcagcagcagcagcagctgctgcagaaccagaggaagatcagccaggccgtgcggcagcagcaggagcagcagctggccaggatggtgtctgccctgcagcagcagcagcagcagcagcagaggcagcccggcatgaagcacagccccagccaccctgtgggccccaagccccacctggacaacatggtgcccaatgccctgaatgtgggcctgcctgacctgcagaccaagggccccatccctggctacggcagcggcttcagcagcggcggcatggactatggcatggtgggcggcaaggaggccggcacagagagccgcttcaagcagtggacctccatgatggagggcctgcccagcgtggccacccaggaggccaacatgcacaagaatggagccatcgtggcccctgggaagacccggggcggcagcccctacaaccagtttgacatcatccctggggacaccctgggcggccacactggacctgctggggacagctggctgcctgccaagagcccccccaccaacaagattggcagcaagagcagcaatgcctcctggcccccagagttccagcccggggtgccctggaagggcatccagaacatcgaccctgagagtgacccctacgtgaccccaggctctgtgctgggcggcacagccaccagccccatcgtggacacagaccaccagctgctgcgggacaacaccaccggcagcaacagcagcctgaacaccagcctgcccagccctggggcctggccctacagcgccagtgacaacagcttcaccaacgtgcacagcaccagcgccaagttcccagactacaagagcacctggagcccagaccccatcggccacaaccccacccacctgagcaacaagatgtggaagaaccacatcagcagcaggaacaccacccccctgcccaggcctcctcctggcctgaccaaccccaagcccagcagcccctggagcagcacagcccccaggtctgtgcggggctggggcacccaggacagccggctggccagcgccagcacctggagcgatggcggctctgtgcggcccagctactggctggtgctgcacaacctgaccccccagattgatggcagcaccctgcggaccatctgcatgcagcacggccccctgctgaccttccacctgaacctgacccagggcacagccctgatccgctacagcaccaagcaggaggccgccaaggcccagacagccctgcacatgtgtgtgctgggcaacaccaccatcctggccgagtttgccacagatgatgaggtgagccgcttcctggcccaggcccagccccccaccccagctgccacccccagcgccccagctgctggctggcagagcctggagaccggccagaaccagagcgaccctgtgggccctgccctgaacctgtttggaggcagcacaggcctgggccagtggagcagcagcgctgggggcagcagtggagctgacctggccggggccagcctgtggggcccccccaactacagcagcagcctgtggggcgtgcccaccgtggaggacccccacaggatgggcagccctgcccccctgctgcccggggacctgctgggcggcggcagtgacagcatctag

SEQ ID NO: 184366 - DNA, 5172 bp, Artificial Sequence
  derived and/or modified sequence
atgagggagaaggagcaggagcgggaggagcagctgatggaggacaagaagaggaagaaggaggacaagaagaagaaggaggccacccagaagcacagcaaccagaagacagccatgcctgaggtgaccaagcccagcctgagccagcccacagctgccagccccatcggcagcagccccagcccccctgtgaatggaggcaacaatgccaagagggtggccgtgcccaacggccagccccccagcgctgcccgctacatgccccgggaggtgcccccacgcttccgctgccagcaggaccacaaggtgctgctgaagaggggccagcccccaccacccagctgcatgctgctgggcggcggggccggccccccaccctgcacagcccctggggccaaccccaacaatgcccaggtgactggagccctgctgcagagcgagagcggcacagccccagacagcaccctgggcggggccgccgccagcaactatgccaacagcacctggggcagcggggccagcagcaacaacggcaccagccccaaccccatccacatctgggacaaggtgattgtggatggcagtgacatggaggagtggccctgcatcgccagcaaggacacagagagcagcagcgagaacaccacagacaacaacagcgccagcaaccctggcagcgagaagagcaccctgcccggcagcaccaccagcaacaagggcaagggcagccagtgccagagcgccagcagtggaaatgaatgcaacctgggcgtgtggaagagtgaccccaaggccaagtctgtgcagagcagcaacagcaccacagagaacaacaacggcctgggcaactggagaaatgtgtctggccaggacagaattggccctggcagcggcttcagcaacttcaaccccaacagcaaccccagcgcctggccagccctggtgcaggagggcaccagcaggaagggggccctggagacagacaacagcaacagcagcgcccaggtgtccacagtgggccagaccagccgggagcagcagagcaagatggagaatgccggcgtgaactttgtggtgtctggccgggagcaggcccagatccacaacacagatggccccaagaatggaaacaccaacagcctgaacctgagcagccccaaccccatggagaacaagggcatgcccttcggcatgggcctgggcaacaccagccgcagcacagatgcccccagccagagcactggagacaggaagacaggctctgtgggctcctggggcgccgcccggggccccagcggcacagacacagtgtctggccagagcaacagcggcaacaacggcaacaacgggaaggagcgggaggacagctggaagggggcctctgtgcagaagagcacaggcagcaagaatgacagctgggacaacaacaacagaagcactggaggctcctggaactttggcccccaggacagcaatgacaacaagtggggcgagggcaacaagatgaccagcggcgtgtcccagggcgagtggaagcagcccactggaagtgatgagctgaagatcggggagtggagcggccccaaccagcccaacagcagcactggagcctgggacaaccagaagggccaccccctgcctgagaaccagggcaatgcccaggccccctgctggggccgcagcagcagcagcactggaagtgaggtgggcggccagagcacaggcagcaaccacaaggccggcagcagtgacagccacaacagcggccgccgcagctaccggcccacccacccagactgccaggccgtgctgcagaccctgctgagcaggacagacctggacccccgggtgctgagcaacacaggctggggccagacccagatcaagcaggacacagtgtgggacatcgaggaggtgcccaggcctgagggcaagagtgacaagggcacagagggctgggagagcgctgccacccagaccaagaacagcggcggctggggagatgcccccagccagagcaaccagatgaagagcggctggggcgagctgagcgccagcacagagtggaaggaccccaagaacacaggaggctggaatgactacaagaacaacaacagcagcaactggggcggcggccgcccagatgagaagacccccagctcctggaatgaaaaccccagcaaggaccagggctggggcggcggccggcagcccaaccagggctggagcagcggcaagaatggctggggcgaggaggtggaccagaccaagaacagcaactgggagagcagcgccagcaagcctgtgtctggctggggcgagggcggccagaatgagatcggcacctggggcaatggaggaaatgccagcctggccagcaagggcggctgggaggactgcaagaggagccctgcctggaatgaaacaggccggcagcccaacagctggaacaagcagcaccagcagcagcagcccccccagcagcccccaccaccccagcctgaggccagcggctcctggggcggccccccacctcctcctcctggaaatgtgcggcccagcaacagctcctggagcagcggcccccagcctgccacccccaaggatgaggagcccagcggctgggaggagcccagcccccagagcatcagcaggaagatggacattgatgatggcaccagcgcctggggagaccccaacagctacaactacaagaatgtgaacctgtgggacaagaacagccagggcggccctgccccccgggagcccaacctgcccacccccatgaccagcaagagcgccagtgacagcaagtccatgcaggacggctggggcgagagtgatggccctgtgactggagcccggcaccccagctgggaggaggaggaggatggcggcgtgtggaacaccaccggcagccagggcagcgccagcagccacaacagcgcctcctggggccagggcggcaagaagcagatgaagtgcagcctgaagggcggcaacaatgacagctggatgaaccccctggccaagcagttcagcaacatgggcctgctgagccagacagaggacaaccccagcagcaagatggacctgtctgtgggcagcctgagtgacaagaagtttgatgtggacaagagggccatgaacctgggggacttcaatgacatcatgaggaaggacagaagtggcttccggccccccaacagcaaggacatgggcaccacagacagcggcccctactttgagaagggcggcagccacggcctgtttggaaacagcacagcccagagccggggcctgcacacccctgtgcagcccctgaacagcagccccagcctgcgggcccaggtgcccccccagttcatcagcccccaggtgtctgcctccatgctgaagcagttccccaacagcggcctgagccctggcctcttcaacgtgggcccccagctgagcccccagcagatcgccatgctgagccagctgccccagatcccccagttccagctggcctgccagctgctgctgcagcagcagcagcagcagcagctgctgcagaaccagaggaagatcagccaggccgtgcggcagcagcaggagcagcagctggccaggatggtgtctgccctgcagcagcagcagcagcagcagcagaggcagcccggcatgaagcacagccccagccaccctgtgggccccaagccccacctggacaacatggtgcccaatgccctgaatgtgggcctgcctgacctgcagaccaagggccccatccctggctacggcagcggcttcagcagcggcggcatggactatggcatggtgggcggcaaggaggccggcacagagagccgcttcaagcagtggacctccatgatggagggcctgcccagcgtggccacccaggaggccaacatgcacaagaatggagccatcgtggcccctgggaagacccggggcggcagcccctacaaccagtttgacatcatccctggggacaccctgggcggccacactggacctgctggggacagctggctgcctgccaagagcccccccaccaacaagattggcagcaagagcagcaatgcctcctggcccccagagttccagcccggggtgccctggaagggcatccagaacatcgaccctgagagtgacccctacgtgaccccaggctctgtgctgggcggcacagccaccagccccatcgtggacacagaccaccagctgctgcgggacaacaccaccggcagcaacagcagcctgaacaccagcctgcccagccctggggcctggccctacagcgccagtgacaacagcttcaccaacgtgcacagcaccagcgccaagttcccagactacaagagcacctggagcccagaccccatcggccacaaccccacccacctgagcaacaagatgtggaagaaccacatcagcagcaggaacaccacccccctgcccaggcctcctcctggcctgaccaaccccaagcccagcagcccctggagcagcacagcccccaggtctgtgcggggctggggcacccaggacagccggctggccagcgccagcacctggagcgatggcggctctgtgcggcccagctactggctggtgctgcacaacctgaccccccagattgatggcagcaccctgcggaccatctgcatgcagcacggccccctgctgaccttccacctgaacctgacccagggcacagccctgatccgctacagcaccaagcaggaggccgccaaggcccagacagccctgcacatgtgtgtgctgggcaacaccaccatcctggccgagtttgccacagatgatgaggtgagccgcttcctggcccaggcccagccccccaccccagctgccacccccagcgccccagctgctggctggcagagcctggagaccggccagaaccagagcgaccctgtgggccctgccctgaacctgtttggaggcagcacaggcctgggccagtggagcagcagcgctgggggcagcagtggagctgacctggccggggccagcctgtggggcccccccaactacagcagcagcctgtggggcgtgcccaccgtggaggacccccacaggatgggcagccctgcccccctgctgcccggggacctgctgggcggcggcagtgacagcatctag

SEQ ID NO: 184367 - DNA, 5172 bp, Artificial Sequence
  derived and/or modified sequence
atgcgggagaaggagcaggagcgggaggagcagctgatggaggacaagaagcgcaagaaggaagacaagaaaaagaaagaggctactcagaaggtcactgaacaaaaaaccaaggtgccagaggtaaccaagccttccctgagtcaacctactgcagccagcccaatagggagcagcccgtcccctccagtaaacggtggaaacaacgcaaagcgggtggccgttcccaacgggcagccaccaagcgccgcacggtatatgcctagggaggtgccccctcgcttccgatgtcagcaggaccacaaagtgttgctgaaacggggccagccaccaccaccttcctgtatgctcctgggcggcggagcgggacctccaccatgcacagccccgggtgcaaatcctaataatgcgcaggtcactggagccctgttgcagtccgagagcgggacggccccagattcaactcttggaggcgccgctgcatctaattacgctaacagcacatggggaagcggagcctctagcaataacggcaccagtccgaacccaattcatatttgggataaagtcattgttgatggatcagatatggaggagtggccttgtatcgctagcaaggacactgaatcttcatccgaaaatacaaccgacaacaactcagcctccaaccctggcagtgagaagtcaaccctccccgggtcaaccacttcaaacaagggcaagggatcccagtgtcagagcgcttccagcggcaacgaatgcaatctcggagtgtggaaaagtgatccaaaggctaagagtgtgcagagtagcaattcgactactgaaaacaataacggtctgggaaattggagaaatgtgagtgggcaggataggatcgggccaggatctgggttcagcaactttaacccgaattctaatccatctgcctggcccgcattagttcaggagggaacctctcgaaagggggccctggagacagacaattcaaattcctctgcacaggtttcaaccgtgggccagaccagtcgtgaacagcaatcgaagatggaaaatgccggagtgaatttcgtggtatcaggcagagagcaagcccagattcacaacacagacgggcctaagaacggaaatacaaactccctgaatctatccagccccaaccccatggagaataaaggcatgccctttggcatgggactgggtaacacctcaagatccacagacgcaccaagtcagagcaccggggacagaaagaccggcagtgtcggaagctggggggcagctaggggacctagcggtacagacacagtgtccgggcagagtaatagtgggaacaatggtaataacggtaaggagcgcgaggattcctggaaaggagctagcgtccagaaatctactggcagcaagaatgacagctgggataataacaaccgtagcaccggtggctcttggaattttggcccacaggattctaacgacaacaagtggggggaaggaaataagatgacctcaggtgtctctcaaggcgagtggaaacaaccaaccgggagcgatgagctcaagatcggggaatggtctggacctaaccagcctaattcctctacaggtgcatgggataaccaaaagggtcaccccctgcccgagaatcagggcaatgcgcaagctccttgctggggcagatccagctctagtacgggctctgaagtcgggggacaatccaccggctctaaccataaggctggttcctccgattctcacaactccggcagacgctcatatcgcccaacgcacccagactgccaagcagtgttgcaaacactgcttagccgcaccgatctggatcctcgcgtcctgagcaacactgggtggggacagactcagataaaacaggacactgtatgggacatcgaagaggtgccgcgcccagaaggaaaaagcgacaagggcaccgagggatgggagagcgcagccacacagacgaagaatagtggagggtggggcgacgctccgtcccagtccaatcagatgaaatccggttggggggagttgagcgccagcaccgaatggaaggatcctaaaaacacaggcggctggaatgattataagaacaataacagcagtaattggggagggggacgcccggatgagaaaacaccttcatcctggaatgaaaatccctcaaaggaccagggatggggcggcggcagacagcccaaccaggggtggtcctccggtaaaaacggatggggggaagaagtcgaccagactaagaactcaaattgggagagctcagccagcaaaccagtgagcgggtggggggagggggggcagaacgaaattgggacttggggcaacggagggaacgcctcgctggcctctaaaggggggtgggaagactgcaaacgttccccagcctggaacgagaccgggcgtcagcctaactcttggaacaaacagcatcagcaacagcagcccccccagcaacctcccccaccgcagcccgaagcctccggcagctggggaggtcctcccccaccacctcccggtaacgttaggccgagcaatagctcatggtcttcaggtccacagcctgcaactccaaaggatgaagagcccagcggatgggaagaaccatctccacagagcatcagtcgaaaaatggatatagatgatggcacaagtgcttggggcgaccctaactcttataactacaagaacgtgaatctttgggacaagaatagccagggagggcccgcaccacgtgagcccaacctcccgactccgatgacatctaagagtgcgtcggactctaagagcatgcaggacgggtggggagagagcgacggcccagtgacaggagcaagacacccatcctgggaggaggaagaggacgggggggtctggaatactacaggatctcagggatcggccagcagccacaatagcgcgagctgggggcagggaggcaaaaaacaaatgaagtgctccctcaagggaggtaataatgattcttggatgaatccactcgccaagcaattctccaacatggggttgctctcgcaaaccgaagataatccatcatcaaagatggatctgtctgttggatccctcagtgacaagaagtttgacgtcgataagagagcaatgaatttgggcgattttaacgacataatgcggaaggaccgatccggattcaggcctccaaattctaaagatatgggcacgactgactctggcccctattttgagaaaggggggagccacggactctttggcaattctacagcacagtcccgcggtctgcacacacctgtgcagcccctcaatagttcgccatcacttagagcacaggtgccgccccaattcatatccccacaggtctctgctagtatgctgaagcagtttccaaattctggccttagccctggtctctttaacgtcggcccacagctttccccacaacagatagccatgctcagccagttgccccagatcccgcagtttcagctcgcgtgtcaactgctcctgcagcagcagcagcagcaacaactcttacagaaccagaggaagatatcccaggcagtaagacagcagcaagaacagcagctcgcccgaatggtttcagcactccagcagcagcagcaacagcagcagaggcagccaggtatgaaacacagtccaagccaccccgtcggacccaagcctcacctggacaatatggtccctaacgccctcaatgtgggtctccccgatctgcaaacgaaaggaccaattccaggctatggatcaggtttcagctctggtgggatggactatgggatggtaggtgggaaagaagcgggaacagaatctaggtttaagcagtggacctcaatgatggaaggactgccaagtgtggctactcaggaagctaacatgcacaaaaatggcgccattgtggcccccggaaagacacgaggaggttcaccttataatcagtttgatattatacccggcgatactctcggaggccacacagggccggccggggacagttggttgcccgccaaatcacccccaaccaataaaatcggatctaagagttcaaacgccagctggccccccgagtttcagcccggtgtgccttggaaaggaatccagaacatcgatccagaaagcgatccctacgtcactccaggctcagtgctgggaggaacggcaacttcccctattgtcgacacggatcatcagttactccgtgataacacgaccggcagcaactcatcactgaatacatctttgccaagcccaggggcctggccctactctgcctccgacaactcattcaccaacgttcatagtaccagtgctaaattccccgattataaaagcacttggtcaccagacccaattggccataatcccacgcacctgtccaacaagatgtggaagaatcatatcagctctcggaatacaacccctctgccgcggccaccccctggcctgaccaatccaaaaccctcatcgccttggagttcgacagcgcctcgcagcgtcagaggctggggcacccaagactctagactcgcctccgcctctacgtggagtgatggcggatcagtgagaccctcttactggctggtcctgcacaaccttacaccccagatcgatggcagcacccttagaactatctgtatgcaacacggtcctcttctgactttccacctgaatttgactcaggggaccgccctgattcggtatagtacaaagcaggaagccgcgaaggcacagaccgcgctccacatgtgcgttttaggcaacaccaccatcttggccgaattcgctacagatgacgaggtgtcgcgattcctcgcccaggctcagccacccacccctgccgcaacccccagtgcgcccgctgccgggtggcagtctttggagaccggtcagaaccaatcggaccctgtgggcccggccctcaatttgtttggtggctctactggcctcggacaatggtctagctccgcagggggaagctccggcgcggatttggccggcgcaagtttatggggcccccccaactactcttcctctttgtggggcgttcccaccgtggaagacccacataggatgggttcacccgcacctctgctgcctggggacctcttaggtggaggatcagactccatctag

SEQ ID NO: 184368 - DNA, 5172 bp, Artificial Sequence
  derived and/or modified sequence
atgcgggagaaggagcaggagcgggaggagcagctgatggaggacaaaaagaggaaaaaggaagataaaaagaagaaggaagccacacagaagcatagtaaccagaagaccgccatgcccgaggtgaccaaaccatctctgagccagccaacagcggcctcccctattggaagcagccccagtcctcccgttaatggcggtaacaatgctaaaagagtggcagtccccaatggacagccaccttcagcagctaggtacatgccaagggaggtacccccccggtttaggtgccagcaggaccacaaggtattgctaaaaagaggacagcctccgccaccctcctgcatgctgttgggaggtggggctggccctcctccatgcacagcccccggagccaatcccaacaatgcacaagtgactggggccctattgcagtctgagagcgggactgctcccgattccaccttaggcggcgctgctgcgagtaactatgctaacagcacttggggctcaggagcctcgagcaataatgggacttctcccaacccaatccacatctgggataaagtcatcgtggatggttccgatatggaagaatggccctgtattgcaagcaaagacactgaatcaagttctgaaaataccacagacaataacagcgccagtaaccctggatctgaaaagtccacattgcctggaagcacgacgtccaataaggggaagggatcccagtgtcaaagcgccagctccggcaacgagtgcaatctcggcgtctggaaaagtgatccaaaagccaaatccgttcagagcagtaacagcaccaccgagaataacaacggactgggaaactggaggaacgtctccggtcaggatcggatcggtcccggaagtggcttctctaactttaatccgaatagcaatccatcagcatggccagcattagtccaggaaggaactagccgcaaaggagcccttgagaccgacaatagtaactcctcagcccaagtaagtactgtgggccagacctcccgagagcaacagagtaaaatggagaacgctggcgtcaattttgtggtgtcaggaagagaacaggctcagatacataatacagacggccccaaaaatggaaacaccaactctttgaacctaagttctcccaatcctatggaaaataagggcatgccatttggcatggggctggggaatacctctagaagcactgacgcacctagtcagagcactggggatagaaagacagggagcgtcggctcgtggggggcagctcgagggcccagcggtaccgacaccgtgtctggacagtccaacagcggaaataatggcaacaacgggaaggaacgggaggacagttggaaaggagcttcagtccagaaaagcactgggtctaaaaacgattcatgggataacaataatcggtcaaccggcggcagctggaacttcggcccccaagattctaatgataataaatggggcgaagggaataaaatgacatcgggagtgtctcagggtgaatggaaacaacccaccggttcggacgaactgaaaattggcgaatggtcaggacccaaccagcccaactcatccactggagcttgggataaccagaagggacatccccttccagaaaatcaggggaacgcacaggccccatgctggggaagaagctctagttccactggttctgaggtgggagggcaatccactggttctaaccataaagcggggagcagcgacagccacaatagcggtcggcgttcctatcgcccaacccaccccgattgccaggcagtgctgcagaccttattgagccggacagacctggatccgcgagtgctcagcaatactggctggggacagacacaaataaagcaggataccgtatgggatatcgaagaggtgcccaggcctgagggaaagtccgacaaggggaccgagggctgggaatccgcagccacccagaccaaaaactccgggggttggggggatgcaccctcacagtcgaaccagatgaagtctggctggggtgaactgagcgcctccacggagtggaaggatccaaagaataccggagggtggaatgactacaagaacaacaattctagcaactggggtggcggccgtcccgacgagaaaacccccagttcttggaacgaaaatccgagtaaagatcagggttggggcggaggcagacagccgaaccaggggtggtcttccggcaagaatggctggggcgaggaggtggatcagaccaagaattcaaattgggaatcctcagcaagtaagccggtgtctggctggggcgaagggggtcagaacgagattggcacctggggcaacggcggaaatgcctctctggcctcgaaggggggctgggaggactgtaagcggagccccgcctggaatgaaacaggaagacaacccaacagttggaataagcagcaccagcagcagcagccgcctcagcagccgcctcccccccaaccagaggcttcggggtcatgggggggtcctcctcctccaccacccgggaacgtaagaccatctaacagtagttggtcctccggcccacaacccgctaccccaaaagatgaggagcccagcggttgggaagagccctcaccccagtcaataagcagaaaaatggatatcgatgatggcactagcgcctggggggacccaaacagctataattacaaaaacgttaacttgtgggataagaactctcaggggggccctgcaccgcgtgagcctaatctgccaacccctatgacgagtaaatcagcttcagatagcaagagcatgcaggatgggtggggtgaatccgatggccctgttacaggggctagacacccttcctgggaagaagaggaggatggaggagtctggaataccacaggttcccaaggttctgctagttcccataactccgcgagctgggggcagggagggaaaaagcagatgaaatgcagccttaaggggggtaacaacgatagctggatgaaccctctagccaagcagttcagcaatatgggtttgctctcccagacagaagataatcccagtagcaaaatggatctgtcagtgggctccctgagtgataaaaagttcgacgtggataagcgagcgatgaacttaggcgactttaacgacatcatgcgaaaagacaggagcggattccggccccccaactccaaagacatgggtaccaccgatagcggaccctatttcgaaaaggggggatcccatggcttgttcgggaactccacggctcagagccggggcctgcacacccctgtgcaacctttaaactcaagcccttcacttagggctcaagtgccaccccagtttatttcacctcaagtgtccgcatcaatgcttaaacagttcccgaattcaggcttatccccggggctgtttaacgtgggtccccagttgtcccctcagcagatagcaatgctctctcagttaccacagattccccagttccagctggcgtgccagctattactgcagcagcagcaacagcaacagcttctccagaaccagcgaaaaattagccaggcagtccggcaacagcaggaacaacagttggcgcgcatggtgtccgccttgcaacagcaacagcagcagcaacagcggcagccaggaatgaagcattctccttcgcaccccgtgggtcctaagccccacttagataatatggtacccaacgcactgaacgtcgggttgcctgacctgcaaacgaaaggtcctattccgggttacggcagtgggttttcctctgggggaatggattatggcatggtggggggcaaggaggcaggcacagaatcaagatttaagcaatggacttctatgatggaggggctccccagcgtggccacccaggaagccaatatgcacaagaatggggccatcgtcgcgccgggtaaaacgagaggcggcagtccatacaatcaattcgatatcatcccgggagacacgctgggagggcacaccggccccgccggcgattcttggctacccgctaagtctcctccgaccaataaaatcggctcgaaatcttctaatgcttcatggccccccgagttccagcccggggtgccttggaaggggattcagaacatagatcctgagagcgatccctacgtgacgcccgggtctgtgctgggcggaaccgccactagtccgatcgtggataccgaccatcagctcctgcgcgataacacaacaggctcaaacagctcgctgaatacatcactcccttctcccggggcatggccttactccgcttctgacaattccttcaccaatgttcacagtacaagtgccaagttccccgactataagagtacctggtcccccgatcctatcggccacaaccccacccacctaagtaacaagatgtggaagaatcacattagcagtagaaatactacccccctgcccagacccccaccaggactgaccaaccctaagccctcctcgccttggagtagcacagcccctcggtccgtgcgtgggtggggaacacaagatagccgactcgcaagtgcttccacatggtctgacggaggctcagtgcggccttcctattggttggtgctgcataatctgactccgcaaattgatgggtcaactctgcgaactatatgtatgcagcacgggcccttgctcacctttcacctgaacctaactcaaggaacggcactcatccgctactctacaaaacaggaggccgctaaggcccagacggctctacatatgtgcgtcctggggaataccactatactagccgaatttgccacggatgacgaagtgtcacggtttcttgcacaagcccagccccccacaccagctgctacccccagcgcgcctgcagcaggctggcagtcactggaaaccggccaaaaccagtctgacccagttggacccgcactgaatcttttcgggggtagcacgggactgggtcagtggtcaagcagtgccggtggtagctctggagctgacctggctggcgccagtctatggggaccgccaaactatagttctagtctgtggggagtacccacagtcgaggatccccaccgcatggggagtcctgccccacttctccctggggaccttctcgggggcggctcggattcaatctag

SEQ ID NO: 184369 - DNA, 5171 bp, Artificial Sequence
  derived and/or modified sequence
atgagggagaaagagcaggagagagaagagcagctcatggaggacaagaagcgcaagaaggaagataaaaagaaaaaagaggcaacacagaaagtgacagaacagaaaaccaaggtgccagaggtgactaaacctagcttgtctcagcccaccgcagcaagtcctatcgggagcagcccttctccccctgtgaatggaggcaataatgccaagcgcgtggccgttcctaatggtcaacccccatcggcggctagatacatgcccagggaggtaccaccacgctttcgttgccagcaggaccataaagtacttctcaaacgcggtcagccccctccaccatcttgtatgcttctaggtggcggtgcaggcccacccccttgcacagccccaggggcaaatcctaataacgcccaggtgaccggcgctcttctgcagagcgagagtggaaccgcgcctgactccaccctgggaggggcagccgctagtaattacgcaaattcgacatggggcagcggggcatcttccaacaacggtacatccccaaacccaatccacatttgggacaaggtcattgtcgacggatctgacatggaggaatggccctgcatagccagtaaagatacagaaagctcctcagagaatacaacagacaacaattccgcctctaaccctggcagcgagaagtctaccctgccaggttctaccactagcaacaaaggtaagggaagtcagtgccagagcgccagttctgggaatgaatgcaatcttggagtctggaaaagcgatcctaaagccaagagcgtgcagtcctctaatagcactacggagaacaacaacgggcttggaaattggcggaatgtgagcggccaagataggatcggacccggatcgggattctcaaacttcaacccaaactctaacccatctgcctggcctgccctggtccaggaaggtactagcaggaagggcgcactggagaccgacaatagcaacagttctgctcaagtctcaaccgtcggccaaaccagtcgggagcaacagagtaaaatggaaaacgccggagtgaatttcgtagtgagcggccgagagcaggctcagattcacaatacggacgggccaaaaaatggcaataccaattcactgaacctgtcctccccaaaccctatggagaacaaaggaatgccctttggaatgggactgggcaacacatccaggtccaccgatgcaccaagtcagtctactggcgatcgcaagaccggaagcgtgggatcatggggcgctgctcgcggtcccagcggcacagacaccgtgagcggccaatccaatagtgggaacaacggcaacaatggcaaagagcgagaggatagctggaaaggggcttcagtgcaaaaatccaccggatcaaaaaatgattcttgggataacaacaatcgaagcactggcggatcttggaacttcgggcctcaggactcaaatgacaacaagtggggcgaggggaataagatgacttccggcgtctcccagggcgagtggaaacaaccgactgggagcgacgaactaaagattggtgaatggtcaggcccaaaccaacccaactcatcaactggcgcttgggacaaccaaaaggggcaccccctccctgagaaccagggcaacgctcaagctccgtgctggggccgatcctcttctagcaccggttcggaagtaggtggtcaatccactggcagtaaccataaagccggatcctccgactctcacaattcgggcagaagatcttatcgaccaactcaccctgactgccaggctgtgctccaaactctattaagcaggacagacctggatccaagagtgttgtctaataccggttggggtcagacacagattaaacaagataccgtgtgggacattgaagaggtgcccaggcccgaaggcaagtccgacaaagggaccgagggatgggagtcagctgcaactcagaccaaaaactccggaggttggggcgatgccccatcccagtccaatcagatgaaaagcgggtggggcgagctgagtgctagcaccgaatggaaagatcctaaaaataccggcggatggaacgattacaagaataacaacagtagtaattggggcggagggaggccggatgaaaagaccccatcaagttggaacgaaaacccttccaaagatcagggctggggagggggacggcaacccaaccaggggtggagcagtggaaagaacgggtggggcgaggaggttgatcagaccaaaaattccaactgggaatcctctgcgagcaagccggtatccggttggggagaaggcggacagaatgagatcggaacctgggggaacgggggaaacgcttcactggcatcgaagggtgggtgggaggactgtaagcggtcacccgcttggaacgaaacaggcagacagcccaattcctggaacaaacaacatcaacagcagcagccccctcagcagccacctcccccacagcccgaggcaagtggcagttggggaggaccgccaccaccaccacctggaaatgtgagacctagcaattcttcctggtcgagcgggcctcaacctgccaccccaaaagacgaggaaccctccgggtgggaggagccttcccctcagagcatctcaaggaaaatggatatcgatgatgggactagcgcatggggggacccgaactcttacaattacaagaacgtgaatctatgggataaaaatagccaggggggaccagcccctagggaacccaatctgccaactccaatgacatccaaatctgcaagtgactccaaatcaatgcaggatggttggggtgaatcagacggtccagtgaccggggctcgccacccttcgtgggaggaggaagaggacggaggagtgtggaacacaacgggtagccagggatcagcctctagccacaactccgccagctggggccaggggggtaagaagcagatgaagtgctcgctcaagggaggaaacaacgactcatggatgaaccctctagccaagcagttctctaacatgggactcctttcacagaccgaggacaaccctagcagtaagatggatcttagtgtgggatcgctgtccgacaaaaagtttgatgtagataagagggcaatgaaccttggcgactttaatgacatcatgcgaaaagacaggtccggatttcgccctcctaatagcaaagatatgggcaccacagactcggggccttacttcgagaaaggcggtagccatggactgttcggtaattcaactgcacagtccagagggcttcacactcccgtacagccactgaattcctctccatccctgcgggcacaggttccccctcagttcatatctccccaggtctctgcaagtatgctcaagcagtttccaaactctggcctctcccctggactcttcaatgtgggtccacagctgtctccccagcagattgccatgctttcacagttacctcaaattcctcagttccagctcgcctgccagttactgctccagcagcagcaacagcaacagctgcttcagaatcaacgaaaaatctctcaagccgttcgccagcagcaggagcagcagttagcacgtatggtaagtgctctgcaacagcagcagcagcaacagcagcgacagcccggtatgaagcactctccaagccatcccgtgggtcctaagccccacctagacaatatggtcccgaacgcacttaatgttggcttacctgatttgcaaacaaaaggtcccatccccggatacggaagcgggttcagttctgggggtatggactatggtatggtcgggggaaaggaagcaggaactgagagtcggtttaagcagtggacaagtatgatggagggtctgccctctgtcgccacccaggaggctaacatgcataaaaatggggcaattgtcgccccaggtaagacaagggggggatctccttacaaccaattcgatattattccgggtgacacgctggggggacatacaggacccgctggggactcatggttaccagccaaatccccacccaccaataagattggatcaaagtccagtaatgcttcgtggccgcctgaattccaacctggcgtgccatggaaagggatccagaacattgaccctgaatccgatccatacgtgactccaggctctgtgctggggggaaccgccacaagccctatcgtggacactgaccatcagcttctgcgtgataatactacaggtagcaatagctcactcaatacaagcttgccatcgccaggcgcttggccttactcagcctccgacaacagttttactaacgtccactctacctcggccaaattcccggactataagagtacctggtcccctgaccccatcgggcacaatcctactcatctgtcaaataaaatgtggaaaaaccacatttcgtcccgcaacactactcctttgccccgtccgccaccgggactgacaaacccaaagcccagctcaccttggtcatctaccgctcctagatcagtgcgaggatgggggacccaggacagccgcctggcaagtgcctccacttggtccgacggaggttcagttagaccctcttattggctagtgttgcacaatttgaccccacaaatcgacggttccacgttgagaaccatttgtatgcagcatggtccactgcttacatttcatctgaacctgacccagggcacagcgttgatccgctatagtaccaaacaggaggctgcaaaggcccagaccgcactgcatatgtgtgtattaggcaatacaaccatcctggccgagttcgctaccgacgatgaggtatctagatttttggctcaagcccaaccccctaccccagcagccacaccctctgcacctgcagccggttggcaaagcctcgagactggccaaaatcagtccgatcccgtcggcccagcccttaatcttttcgggggatcaactggcctgggacagtggagctccagtgccggtggatccagcggtgcggatttggccggtgcgtccttgtggggtcccccaaattactcctcttccctgtggggcgtccccacagttgaggacccccaccgcatgggttcacctgcccctcttttaccaggtgacctgctggggggaggcagcgactcaatcta

SEQ ID NO: 184370 - DNA, 5171 bp, Artificial Sequence
  derived and/or modified sequence
atgcgtgagaaggaacaagaacgcgaagagcaactgatggaagataaaaagagaaaaaaagaagacaaaaaaaagaaagaggcgacacaaaagcatagtaaccagaaaaccgccatgcccgaggttaccaagccctctctgtctcaaccaaccgccgcaagtccaattggaagctcaccgtccccgcctgttaacgggggtaacaacgcaaagcgagtggcagtgcccaacgggcagcccccatccgccgcacgctacatgcctagggaagtgccccctcggtttaggtgtcagcaggatcacaaggtgctcctgaagcgcggtcagcctcctcccccatcatgcatgctgttgggcggaggcgctggtcctcctccctgcacggcacctggtgcaaaccccaataacgcgcaggtcaccggggctctgcttcagtcggaaagtgggaccgctcccgacagtacgctaggtggcgctgcggcttcaaattacgccaactctacctgggggagtggagcaagctcaaacaatggcaccagccccaaccctatccacatttgggacaaggtcatcgtcgacggttccgacatggaggagtggccatgcatcgcaagtaaggatactgagtccagttccgaaaacacgactgataacaatagcgcctccaatcccggttctgaaaagagcaccttacccggaagcactacctcaaataaaggtaagggctctcaatgccagtcagcctctagcgggaatgaatgtaatcttggtgtgtggaagagcgacccaaaggccaaaagtgtccagagctccaactctactacagaaaacaataacggtctgggtaattggcggaacgtctctggccaagatagaattggccctggctccggattttctaactttaaccccaactctaacccatctgcttggcctgcactcgtacaagaagggacctctcgaaaaggagcattggaaaccgataactcaaattctagtgcccaagtgtctacagttggccaaacttccagggaacagcaatcaaagatggagaatgctggagtgaacttcgttgtgtctggccgtgagcaagctcagatacataacacggacggccctaaaaacggcaataccaatagtctgaacctgagcagccccaaccccatggagaataaaggaatgcccttcgggatgggcctcggtaacacaagcaggtcgacagacgccccttctcagagcaccggtgatcggaagactggaagtgtcggcagctggggggcagcccgagggcctagcggtactgataccgtaagcggccagtccaactccggcaacaatggaaataacggaaaggagagggaggatagctggaagggcgcatccgtgcagaaaagtaccggctctaaaaacgatagttgggacaacaacaacaggagtacagggggttcctggaattttggaccacaagactcaaacgataataagtggggcgagggtaacaagatgacctctggcgtgagccagggcgagtggaagcagcctacaggatccgacgagttgaaaatcggggagtggtcaggacccaaccaacccaatagctccactggtgcctgggataatcagaagggtcacccactgcccgaaaatcagggaaatgctcaagccccttgttgggggcgatcatcctcctctacgggcagcgaggtggggggtcagtcaaccggatccaaccataaggcaggcagcagcgacagtcataattctggacggagatcatacagaccaacacaccctgactgtcaagccgtgctgcagactttgctgtccagaactgacttagacccacgcgtgctgagcaacaccggatggggccaaacccagatcaagcaggataccgtgtgggacattgaggaagttcccaggccagagggcaagagtgacaaagggactgagggctgggagtctgccgctacgcaaacaaaaaattctggcggttggggtgacgccccttcacaatctaaccagatgaaaagtggatggggagagctctcagccagtacagaatggaaggacccaaagaacactggcggttggaatgactacaagaataacaacagttccaactggggaggaggcagacctgatgaaaaaaccccctcctcatggaatgagaatccgtctaaggatcagggctggggaggcggaagacagccaaaccaaggctggagcagcgggaagaacggctggggagaagaagtggaccagacgaagaacagcaattgggagtcttctgcatccaagccagtctccgggtggggcgagggtggccagaatgagatcgggacatggggcaacggcggaaacgctagcctggcctccaagggtggttgggaagactgcaagcggtctcctgcctggaacgaaacaggacgccagccaaattcttggaacaagcaacaccagcagcagcagccacctcagcagccgcctccccctcaacctgaggcctccggctcatggggaggcccaccaccccctccccctggcaatgttaggccatcaaactcctcctggtcgtccgggcctcagccggcaacgccgaaagacgaggagccttcagggtgggaggagcccagcccccagagtatatccaggaagatggacatagatgatgggacgagcgcctggggggatcctaattcatataactataagaatgtgaacttgtgggataagaattctcaaggtgggccagcccctagagagcctaaccttccaacccctatgacatccaagtccgcatccgatagtaagagcatgcaggatggctggggggaatcagatggtcccgtaacaggcgctaggcatccttcttgggaggaagaagaggacggaggagtgtggaatacaaccggcagtcagggttccgctagctctcataattctgcttcgtggggtcaaggaggtaaaaaacagatgaagtgttctctgaaagggggaaacaacgatagctggatgaatccactcgccaaacagttctctaatatgggactcctttctcaaacagaggacaacccctcctcgaagatggacctgtcggtggggtccttatctgacaaaaaattcgacgtggacaaacgggcaatgaacctgggcgatttcaatgatattatgcggaaggaccggtccggcttccgcccaccaaacagtaaggatatgggaaccacggattcaggcccttactttgaaaaaggtgggtcacacgggctctttggcaactcaacagctcagtccaggggactacatactccggtacaacccctgaacagtagcccatccctccgggcacaggttccaccccagtttatttcaccacaggtttcagcctccatgctgaagcagttcccgaacagcggtctctctcctggcctgtttaatgtggggccacaactgtccccccaacagattgccatgctgagtcaattgccccagatcccccagtttcaattggcttgtcagctcctgctgcagcagcagcagcagcagcaattactgcagaatcagaggaaaatatcgcaggctgtgcgccaacagcaagagcagcagctggcccgaatggtgtcggctctgcagcagcagcagcagcagcagcagaggcaacccggaatgaagcacagtccttcacatcccgtgggtccaaagcctcacttggataacatggttccgaacgccctaaatgtgggtctgcctgacttacagacgaagggccctatcccaggttatgggtctggtttttctagcggaggtatggattatggcatggtcggcggtaaggaggctgggactgaaagcaggttcaagcagtggacatcaatgatggagggacttcccagcgtggcaacccaagaagcaaacatgcacaagaacggagcaattgtggctcctggtaaaaccaggggcggaagcccctacaaccagtttgatatcattcctggcgacacattgggtggccataccgggccagccggagactcttggctccctgctaagtcgcctcctacaaataagataggatctaagagtagcaatgcttcttggccacccgaattccagcccggagttccctggaagggcatccagaacattgatccggagtcggatccctacgtgacgcccggaagcgtgctcgggggaacagctacgagccccattgtcgacactgatcaccagctgttgcgcgacaacactacagggtccaactccagtctgaacacgagcctcccaagtcctggggcttggccttattcagcctccgacaacagctttacaaatgtacactccactagcgcaaagttccctgactataaatcgacgtggagtccagacccgattggacataaccccacgcacctctcaaacaagatgtggaagaaccacattagctctagaaatactaccccactgcccaggccaccgccaggattgacaaatccaaaaccttcttctccatggtcctccaccgcacccagatcagtgcgagggtggggtacacaggactcccggttggcttctgcgagcacgtggagcgatggcggaagcgttcgtcccagttattggctggttctccataatctcacgccccaaatcgacgggtcaaccctaagaacaatttgcatgcaacatgggcctttgttgacgttccacctgaatctgacacaggggacggcgttgattaggtattccacaaagcaggaggcagccaaggcccagacggctctccacatgtgcgtgctaggaaacacaacaatacttgccgaatttgctaccgacgacgaggtgtcacggtttttggctcaggcccaaccaccaactcctgccgcaacgcccagcgcccctgccgctggttggcagtctctggagacaggacagaaccaatcggatccagttggtccggcactgaatctctttggcggatccacaggacttggccaatggtcttcttcagcaggcggatcttcaggcgctgacctcgccggagcttccctgtggggtcctcctaactatagttcctcgctttggggcgtgccaacagttgaggaccctcaccgcatgggatcacccgctccattactccccggtgacctgttgggcggtggcagtgactctatcta

SEQ ID NO: 184371 - DNA, 17930 bp, Artificial Sequence
  derived and/or modified sequence
gagagagcaagagggagagtgtgtgagagagagttagttcaagccaaaatggccgacagagtctctgctggtttctgaatatttaaaatacaaaaaaacagatagacaaaaagaattcattttttggaccttttttcatttccatttctaccttgtatgcctcaatttgctggatttaagcactgctgcactttatgagagagaaggagcaagaaagggaagaacagttaatggaagacaagaaaaggaagaaagaggataaaaagaaaaaagaagccactcagaaggtcacggaacaaaaaaccaaagtgcccgaagtgacgaaaccaagtttaagccaaccaacggccgccagcccaattggcagctctccatcgccaccagtcaatggtggcaacaatgccaaaagggtggcagtgccgaacggacaaccgccaagcgccgcccgctacatgcctcgggaggtgccgccgcgattccgttgccagcaggaccacaaagtgttactaaaacgtgggcagccccctccaccgtcctgcatgctccttgggggtggggcagggcctcctccctgcacagcacctggagcaaacccaaacaacgcacaagtgacaggagcgctgctgcagagtgagagtgggactgcgccagactcaacccttggaggtgctgctgcttcaaattatgcaaattccacttggggctcgggagcctcctccaacaacggcacctcccccaacccaattcacatctgggacaaggtgattgtagacgggtctgacatggaagagtggccttgtattgccagcaaagacactgaatcttcttccgaaaacaccaccgataacaacagtgcctcgaaccctggctctgagaagagcactctgccaggaagcaccactagtaacaaaggaaaagggagccagtgccagtctgcaagttctgggaacgaatgtaatcttggggtctggaaatctgaccctaaggctaaatctgttcaatcttccaactctactacagagaacaacaatggactaggaaattggaggaatgtgagtggtcaggatagaattggacctggctctggcttcagcaactttaacccaaatagcaacccatctgcctggccagcactggtccaagaaggaacttctaggaaaggggcattggaaacagataatagtaattccagtgcacaggttagcacagtaggtcagacatccagggaacagcagtcaaagatggaaaatgcgggtgttaattttgttgtctctggcagagaacaggctcaaattcataacactgatggaccaaaaaatggaaacactaactccttgaacttaagttcaccaaaccccatggagaataagggaatgccctttggaatgggcttggggaacacctccaggagcactgatgccccttcacaaagcactggagatcgaaagactgggagtgttggatcttggggtgcagctagggggccttctggaactgacacagtctctggacaaagcaattctggaaacaatgggaacaatggaaaagagagagaggactcctggaaaggagcttctgttcagaaatcaactgggtcaaaaaatgactcttgggacaacaataacaggtctacgggtgggtcctggaactttggcccccaggactctaatgacaacaaatggggtgaagggaacaaaatgacatctggggtctctcagggagaatggaaacagccgactgggtctgatgagttgaaaattggagaatggagtggtccaaaccaaccaaattctagcactggagcatgggacaatcaaaagggccaccccctccctgaaaaccaaggcaatgcccaggctccctgttggggaagatcttccagctccacaggaagtgaagttggaggtcaaagcactggaagcaaccacaaagcaggaagtagtgacagtcataactctggccgtcggtcgtacaggcccacacatcctgattgtcaggctgtcttgcagactcttttgagccgaactgatttggaccccagggtgctctcaaacactggctggggccaaactcaaattaagcaggacacagtgtgggacattgaagaggtgccaaggcctgaggggaaatctgacaaaggaactgaggggtgggagagcgctgccacacagaccaagaactcagggggctggggagatgcacccagccaaagcaatcaaatgaagtctggatggggggagctctcagcctctacagagtggaaagaccccaagaacacaggaggctggaatgactacaagaacaacaactcttccaactggggaggaggacgacctgatgaaaagacaccttcctcttggaatgagaatcccagcaaggatcaggggtggggaggtggacgccagcccaatcaaggatggtcttctggaaagaatggttggggggaggaagtcgatcagacaaaaaacagcaattgggaaagttctgcaagtaaacctgtgtctgggtggggtgaaggagggcagaatgaaatcgggacttggggtaatggtggcaatgcaagcctagcttcaaaaggtgggtgggaggattgcaaaagatccccagcatggaatgagacgggccgacagcccaattcctggaataaacaacaccaacagcagcagcccccacagcagccgccgccaccacaaccagaggcttctggttcgtggggaggcccacccccaccacctccaggcaacgttcgaccttccaattccagctggagcagcgggccacagcctgcaacacctaaggatgaggaacccagtggttgggaagagccatccccacagtcaattagtcggaaaatggacattgatgatggcacttcagcatggggagaccctaacagttataactacaagaatgtgaatctgtgggataagaattcccaagggggcccagcacctcgagaaccaaacctgcccaccccaatgaccagtaaatcggcatcagattccaaatctatgcaagacggctggggggagagtgacgggccagtcacaggagctcgccatcccagctgggaagaggaggaggatggaggagtctggaacaccactggctctcagggcagtgcttcctcccacaactcagcaagctggggacaaggaggaaagaaacaaatgaagtgctcactcaaaggaggaaacaatgattcatggatgaatcctcttgccaaacagttttcaaatatgggattgctgagtcagactgaagataatccaagcagcaaaatggatttgtctgtaggaagcctttcagataaaaaatttgatgtggacaagcgagcgatgaatctcggggattttaatgatatcatgaggaaggatcgatctgggttccgtccacctaattccaaagacatgggaaccacagatagtgggccttattttgagaagggcggtagtcatggtttgtttggaaacagcacagcacaatcgagaggtctgcacacacccgtgcagccactaaattcttctcccagtctccgggcgcaagtgcctccccagtttatttccccccaggtttctgcctcaatgctcaagcagtttcccaacagtggcctgagtccaggtcttttcaatgtggggccccagttatctcctcaacaaattgccatgctgagccagcttccacaaattccccagtttcagttggcatgtcagcttctcttgcagcagcagcaacagcagcagttgttacagaaccagagaaagatttctcaagctgtacgccaacagcaagagcagcagctggctcgaatggtgagtgcactgcagcagcagcagcagcagcagcagaggcagccaggcatgaagcactcgccctctcatcctgttgggcccaagccgcatctggacaacatggtacccaacgcattgaatgtggggctcccagaccttcaaaccaaagggccaatacctggatatggttctggcttcagctctggcggcatggactatggcatggttggtgggaaggaggctggaaccgagtctcgctttaaacagtggacctccatgatggaggggctgccctctgtagccacacaggaagccaatatgcacaaaaatggcgctatagtggcccctggtaaaacccggggagggtcaccgtacaaccagtttgatatcatccctggtgacacactgggtggccatacgggtcctgctggtgatagctggttacctgccaaatctccaccaacaaataaaatcggaagtaaatccagcaatgccagttggcctccagaattccaaccaggagtgccatggaaaggtatccaaaacattgaccctgaatctgacccctatgtcaccccaggaagtgtgctggggggtacagccacatctcccattgtagatactgaccaccaactgctgcgggataacaccacagggtctaattcttccctcaacacctcgctgccttcacctggtgcctggccctacagtgcctctgacaactcctttaccaacgttcatagcacttcagcaaagttccctgattacaaatcaacatggtccccagatcccataggacacaaccccactcatctctccaacaagatgtggaaaaaccatatttcctccaggaacactacaccgctgccccgcccacctcctggtctgaccaaccccaaaccatcatctccctggagcagcacagcaccccgatcagtcagggggtgggggacacaggactcacggctcgcctcggcctctacctggagtgatggtggctcagttcgtcctagttactggctggttcttcacaatctcaccccacagattgatgggtcaaccttgagaacgatctgcatgcagcatggcccactgctgacattccatctgaatctaacccagggcactgccctgatccgatacagcaccaaacaggaggcggccaaggcccaaactgcactgcacatgtgtgtgttgggaaacactaccatccttgctgagtttgccactgatgatgaagtcagccgctttctggcacaagctcagccccctacacctgcagcaaccccaagtgcgccagctgcggggtggcagtcgctggagaccggccagaaccagtcagatcccgtgggacctgctctgaatctttttggtgggtccactgggctcgggcagtggagcagcagcgctggtggcagcagcggggccgatcttgctggcgcttcattgtgggggcccccaaactattcttctagcttatggggagtcccaacggtggaagatccccataggatgggcagccctgctcctttactacctggtgaccttctgggaggagggtcggattcaatctgaacttagaactttcaactctgacctcgtgaccttttttggaacagcagcagcactaacttgaccttttcgttttttttttcaacttgcaataaatacatttttaaaaggaaaaaagaaaacggagagaaaaaaaggtgggtcattgacagactgtctgagcacatagttgcctcccttataacttcagttttttcgtttggaatatgaatccaaaaagagaacatatcactcttgaaatacttgaatcatgaacgccaacctagaaagacaatgtgaagcaagtacacataccatttaaatttaaacacaaaaaaattaaaaaaattagtttctagtttttcacttttttcatgttatatggaagttgttgctaagaaacatatatactgaaaaaaaatagctttttaactttgtttgcactgggtgtgtttccgtccttaggtctaccatgtttgggagggagggaaattcaaaagaattgttgggggaggggggagggaagacttgacggagcctcactttaaaaacaaaaacacaaaaaacctaaaaaaaaaaaaaaggaaaaaatttgtgattggctggttgataaataccagtgtgttctggcacatgtaactgcccaggcatgctcgttctggtgtgtgtgtgcacgtgtgttcatgtgcattcgcgtgcatccttctctgtctctgtgtgtgtgcctgtgttcttcccttctcccctgccccaccctgacttctcagaaagctgcatcgctgacagtctgcaggctggctggccggcccatctgctttttattttatttttttaactatgagaacacacaggcccggagagccactgctactaaagcaactccattgggctgcattaagatgaacagagtgctttttaatgatgaaagcagggagctcctttccatttgcaacttagcctgaatgtggggtttctctggctgttcttttgacctagcagtagagtggagcactgccaagtccaaaaaactagagcaggaggtacctcttggagcaacggtgtgtttatttctgtttttttttttttttaagtgaatggccaccaggcacatctgagtatctgttaagtttcatgcaggccttttcgttagtttgaaatgggaacggaagataacttttgatgatgcgatgtctcaaaaacagagaaactttgttccctctttccttatgatcaggtttgagaaattcttcaaaaaattaggtgaagttgagttacatatttctgttggttggttctctttttcattttatgaaaacagaaaagaataagtggtgagcagcctcctgaaagcatctgcagctactccctctgctcctttctcgccgagcgttacctgtgccaggccgtggcgcgttacagcaccaggccatcactgacagaaacgtttacttaacgaatgttcttaaaccagtgtgtacttcaagcgtttccttttgtttctctgtgttgtgtatttcctgtgtatgtggttttgcttaggcaggtataacttagcgaagacttttaagtattgcacctttttttgatttttgacctcttccccccaccttgtaattttgcttttttaatttcggtatttaaatacttttttttttttttaagcatcaatgtagtagtactctgggccgaacaggggtcaacgtttaatctacagttatcaccaacatgtatgtacttatgtcggaatcaaaatgtatcaaactgcttattgtgaagagaattatagcagacctgaagggggcgaaaaaccagatagggtggggggatggatgccggtgacgtgctagcacttgtgtggacatcccagtctgcattatgctgtttaacataaagtgccgacattttgtaccagcaaatacctgcccattccaacccttggtgggagcagacctctactgtcctctgtaacttgctgctattgaggacaagggagtttttctttctttagcgtcttcagtgaaggatacaatacaacaatgcctaatgtatttgactttttagcttgtgtctgtgtgtaggtgggtgggtgggtgtgtataggaaaagcctaaaacaagttatttgcatttcagtggttttgtgagacaaagaatgggaaattctgtagcccttctggcttaccctgttgattataaacctagcctcaaaagagattgacaggcatgactcaagtgagtgttcacatatacaagcctgcatgagccctctgtgggtaggtggtcacacttggcatctgcagcattgacgtggccccgctgggtgccttgagcatgccctcttcctgctctgcaatttgaatcaccaccgtgccccttccaccactgttccccatgcaaaagctctgcttccagcagcccccactgaccgctctctgtgtggagcaaagtgctgtcgtgcggtgaccaccaggtgaagagcagcttgtattcagacatctagagaaggttaaatcttagtgtccctgggccaggagcatatcccaaggctcctgcgagccagtggcgaccctgtccactgccgctcttggttcactgctgtgtcctgccccaccctcctctcctcctgcctgttggttccttgacctgcactatgggttagttgagttccttacgatactacggtgaaagccgggtgctagagcccctcttgtttacaagacataatgagggatttgaaatatgtaaaaataaacatgagaagctaaaatgttcttccatcataagcttaaagggaaaaaaactaaaaactttaaaaaaaaaagaccaaaaagtgcgtatatatatacatataaatatatattttagatgaagactaactctgggagcatttaacagtgttttttgtttctgtttttaacatttgttttcctgctttaaaatttgcaagcattctcaggaattctagggtaggaagccagttttttgaagatggtttatttaaccatatcttatcctagagagatggctgtttctttcctgttaataaacttttacaagttcctgaaacttcagaaagtttaaacaatttttacttaaaaaaatgtaaaaagaaaagtctccaaacattattgtcatactggggatcacacattttaaaacacatagaaatattttttaaaaattatcaatttagcagcaacaggtaaattcattatcttaaaaatatgggagaaggattaagctttgtaagagctcgatcatggattcttttgaaattgtgtgtagtttaatgggagagtgtttggtgtatatagatgagaatgccatcactttgttcctttccatttgagactgaactgaaatctcccctagtaatttttatttttttaaaggaacccttctccttgtccccacaaccccagcaacaaaagaaaggaaggaaggaagaaacaacagcttaaaaaaaaaagtaatctgtaaaatagtacagttggattgctgagaatctatgtaaagagttaggaaatataggttaataatttttggaacaaattttaaatataggcattactagaggaaaattatctatggactgtcctattaatgaagaatgtctgtcttacctccgtttgttttgggaggaggagaaaatatagaagaatctaataaggaacaagtgattttacttttttagctcccagctactgttgtgctcgttttaattgctgttttgaagatctgctgcttaattatccccatcccttagccggagatgtggagtgtttcctttcagtttttggtgatgttgaattcttttgtattccctcctggggccaggggtcagaattcccaagcatgaccacagcttcttttaaacattaagcttcccagtgggaaggaaactccagctcgacaggtaaagggagtgggtggggttgctgcctgcaatttctctaaaaccgctttagtgccttcgtacatacacccagacatcctgagcaagggggacgcacatgtgtgtgtgtgtggtccagtcactccacagatgtaagatactcacccataaaggaaattggagtggttctggacaggccccaaaggcagtgggctgaatttaaaataaataaacaaacgtcaagcaagttaatatgcttatgtctcagtaatgtagaatgccaagttccttcctgtgtcgtgtgccctccattactgtgcattgattcctccaggtgtgtaattgtgacaactgcagtgatttggaaagtctctttgtcttgggcaaatagaaggggttcctgttgttctgctcttgtccttcgtctcctccccttttcccccagacctcccccttctttttgtcaacttgctgggagctttgctttattggttggcagtgacctaagaacaggatatggtgaggatgtcatggaagagaagagctctttccgtggtattctttggcaagagccatgtctactaagaggttagatgacttcagtatacttataaaattcagtgagagtgccttcttctcttctaccacactctggcatagatacaggcttgctggtcacctctcattacatagatttattttaaaaacattttgattatgttaatttgagctttcccttttttttttttaactactttttaaaacacttgattactagtggcttagaggtgtgtacatctcctgaacatcacaaacttggtttctacctaccacacgagtagccaaaagaaaagaagcactaatagagaaaggggtgtctcacaccagacagaggacctctgctgtcaattagatccagtatcatgacctaactttaagtgtggaaaagagttcagatctctgagacactgtgaagaaatggatggctcatgtaacatctctgatccctcagtccccaaccctggacgtgtttcatttacaacattcataggagttaacttagcagtgttgcaagttaaggttccaaaccaaattatttaatcagtgtccccccaataaatcacttatccatttattgctagttagttttatttatagcaacttgatttcctatgagtatggctcctgttgtaagaattttcccacctcttctgacatgaatgtagcataagttagcaatcggttcttccaaactcctgtgggttgaatatggtatagaaggtatgcaagaggaaaaagaaaggaaaagataaaactcctgcctgagaatttggaagcacctttattaacacatatatctcgcagaaactagaagctcataggctgttaactttttgcaactattcactcatttttaccacttttttttttgggtgagggggtgatttttgtaaggttaacagccagattccattttgacctcagatgctgtgtactttttaatttcattttttatattctgccatcttgactcttctctaaaacagaatgaaaatgtctgcatgctgagcaaaatgcttacgccaagcctgtttttctctgcagagtaaacaggatgttttcagcagacttggctctaatagccatctctaagattagggaacaattgagtctttatgtagaaaagatccattttttccccatcctcagagttaaaattcaacatttaaagctttatcggttattgttttagatttgagatttttgtttttaagtatctataagatctttagaagtgagataaatttttcgctggttaaaaaaaatcaaactttcctctgcagtgtttttgccaagttttgtcacacttcatgtgtatgcattaactatacttcttagtgttactgcaaaaaaaaaaaacaaaaacaaaacaaaaaaaagccttgttctttaattgtgtttttcctcctgtgagtggacaactaaagccgcgtgatgatgcggatgaaaatattctggtctgtgtgtatacaatgaattgtcagtcttcagacctcatggtcgttaagaaaatagggaactcacaaaccctgctgcgcactacatttacttctttatctgcaagtacagggagtccatacagtcaagaaacacacagatacacataatgctattgaggacattgtcattctgtaagaaaacagaatattatctagatttccagagttagtgcagaccctgtgataacagtctgtgggtttgtggccagcgccaaaggtgtgtgtattttcagaaatggtccctatttgtcagtgatagtgttttttttttcttaagtttgacaaagggggtggtaatatcacattctttagatttgaaataattatcagctccaagaatctgtgaacatagtaataacaataaaaattcaacatcgaccctccctaacctgctcaccatacctccccaccccatgcctctgaagaaagaggccatgaacctacgaggtggtaaagggggacacaggtcagggagtggagagctactcctccagcagctcagcacccacactgcccgcatgcgtgtggccaccgggaccagatcccgagtgattgtggcatacccctaatatttgagtagtttttaagctgtcagtctcttgtcataacctcctaccgccacccaaaaaagtaacgaaagttgcagtaactgccagtgtttgcctcaccaaatttaaatcgttcccttttcagttagctatatacctgaatttgtttttaacaagaaactgtacatggccaggaaaaatggtactaccttggccaaagggtctttgcaaaaagctcagtcttcagttcttcactgtgacaaatgcttatcttgttcatgggaggggaaagatcagataaataggcaagaagtactctgttttaaataaagaataaatagtgtccgtttaaagcactttgtgcctcaacttcatttttaaactgtaaatcattgctttggaaataaattcccaattataattgacccatatctagccaatatcaacaagttgggatggtttttgtttttttcttttttttcaaaaagggaaattcctctttactgctcacagtaagctgcaaaagaaagttgtcaaggtggcttatgatgctgttgtagcagagctgtgaaaggaagtgctttgctttctctcccgccttccggaatctggcgttccttccccttcggctactgaaaggtgtgtacaactcccagaggggtggctgtaaaagttgactggaggcaaagtggagtggccttattgccaggactagccctacagaagagctttacagagaggaggacagtacatcctatgtgtgttcgccaaaaatgggaaaggtgggtatttaggcaaaacaaaataaaaacctttggaaccctttaagaagttacataccttttaaaggtagtatagtttctcaccaagtgatgcattttagcatgacacttcttgccagaaattttgggataagttggaataaatgtgtttaaaacatcatccaccgccctttttaaattttgtctaaggaattacttaagtatagtatttctgaatgtgcctttgtgagtacagagaccgtccgttctaggaagaagctatccgttggatacaaacaaacagacggtcagctttagtcattagggaagtcaaagttcctcctggaagtcccaggagcagctgttgagatttcattagcatcaatattgcacagtgtagagttgagtggaagagattctgggacttgggagaggagacaggggaaggtacccaggcgacgcagacccacgttagtccaagagcgcaggtttacacatctgcattccctagttttctccgtctgtatgtttgtgctcatgtggctttggctgttttgttttttgtttttctgtaagcactggagaattggaatatggtgatacttgtgacacattcatgcatgtaaacaaggcattttccagcttctgccgtgtgcagagcgggcagcacgcttttaccctttgagtctgtgtcctgaggcggccattacattcccacatgggcgtcacatcacgttgctgttgatgcaaacagggtattacacacaaggaaaaggggttttgaagagttaagattgaagtgtttgagaaagaaaagagaaaaatctgaaatcatattttatttcttcagagctattatagttgaacacagaaatctgcagtgtctttatttgtttttatgttttaaacaatttcacctcttctccccactcctatcttctaaagaaatatcaagcaaatgctaagggccatttccatgattcctcagagctcccccaaagaggagaacagtccctcccactcgattccttcagcttcattcaggaagacacagggaggagagatgctgcttctgcgctttgctctcattcctctctcatggccttgaaatgtattattatgcaaatgtgaattttgatactgaatttaagaagaggttgttggatttttttttttttttttttttttttcaaaaaaaaaagtcccacatgtggtcatcgtcgcttctttatgttgtaaggtgaattgtaactatgcattctgcaaagggggtggggaggagagggcagaaaggggaagggagtagcgttgcatccttgttcttcagtttctgtgtccatggtgtccccgtgtcctggaggggaaggggagtgagagacgaatgtggtaaggtcagcacagtgagatagagacctctgagtcctcttgccactgttgctggcaggtctgatggccaggtaaattccagggggcctgcagttcctgtcaaccaatgtggttcaggattcttgatcctagccgtgcagtgttaatccagtgcagcaatggaactccacaggctccagtgttctctggaaaaagtactcatcctttcctgaattcagagcccttcaagctcaggaaaccacgcttcactcgtgctgacctgaaagttaatctttaggtcgattttgaaaaactccgcctcctctctcctttttaatatttctttcttcctttttaatcatgtttaagtgaacttactcttagttataaggaactgtcctgctttgtggggaagagggctgttgcttgtcaggcaaaaaagttttctcttcctacccaccatccctctctctgcttcccttgcatttggcaggctgtatgaagccaatgagctgcgaggtgttttgacaggggaggtctgcatgcagcctcttctttgtcctaacaattcctttgttgatcttgcctgtgatgaatcatagcgcctgcattgctctggtctaggcattatttgcaacacacagtatcgtaagcgagagattgttctgcctatattcagtgttttccatgcagcaattcttcttgttgacgttcacagtactgtaacgagtaacagacttgatcacagtctcctcgtgcctgtgcagggctgcacaggcatgatcttatcagggttccaatctgttagattgcctttaaacaaaaaaaacaacaaaaaaataaaatcctgacgtttcaactgtctcacacaaaataatacctcgaggtacatttccccctgcaatgtaaacccttaactcctctctcctttctgacatcagtggattatcctttttaaaatatgaacatgtaaatagcaggataactttaaaaaacattttctttgctgtgaaagtaaccctaaaatatgttttcttcttttgtatttttttggtttttgtttttaagccatcagaagtttcagatctttactctttcatgtttaagaagaaagagcagaggaggtcgggggagccggtttgcatttgtgttggaggggtgttatctccattgcctcccacacagtgacagcagaccagtatgtaaaccctgtcttggctgggcgcggtggctcacaccagtaatcccagcactttgggaggctgaggcaggcagatcatctgaggtcaggagtttaagaccagcctggccaacatggtgaaaccccgtctctactaaaaaattagccggacgcagtggcgcgcgcctgtggtcccagctgctcgggaggctaaggcaggagaattgcttgaacccgggagacggaggttgcggtgagccgagattgcaccactgcactccagtgtgggcaacagagcaagacttcgactcaaaaacataaaataaacaaaagacacacacacacacaaaaaccctgtcttaaatagctgccatctcttccagcaatctagtgccagggtaagaagtgtctgaatttctctcttccagcagatccatcccctgcagggactccagaatgttctccacacaatacctggagctctcaacctttcttggttcagacacacacatacacaccccttgagtaactcagtatcattttgtagttcacagaaggatgtagtccctggcattttggtttgcactgtagaatccatagccttgtcactttgttatgctctggaaatgtactgatttcttacttgggaggaaacttgtgtaaggagatgtgcaaaccaccctgaaagccatgtgcatcctcacctcttccattaccccctccatgagctcgaagcgacattaagtagagggaaatgcttttaacaaatgctgctcatgtggatctgtcagctattgcttgcctagatttgggcacccatgaagcagggttggaatggatcattttgaattgcttctttgcagacacccccttcgcccccatctttaagataaaccctttactagtcaagaagcccttttcagttggatctcactgatcttgtatagtgacgacttcctttgaaggaagaagcttgattataagtgcatgcatattatccacccaccttctgatttgggcactgttcaccttggaattttatttattttgtttatctggaggccctttttctatcagtctctgatccctcatgggttctgcctgcccttgtatctcttgtacaatgctcccaaagggctttgctgatctctgcacttctttcctgggacactccccccaccaccaccctttgcacacaccagtgaccaaagtgtatgcagtgatctcacagaagacatcaaaaatggtgcatgcaccgtgaatgtgctcacagagacacgtgcacaagattctgcacccttggccttaatctcagtatgacttaaggtgcaggaacatttttaacaggttttaaaaaaacaaaaaacccttctgggaggaaaaaaataaaaagcagatacaacagctcaactgttcccactcctaactctccactatgtgcttataacttcacattctatgccctccccgccacccacctcatccctgttctgcgtaaccaaaaaacagacaacaaaagcaacctgaggagaggtttctggactattttatctgtctccatttagatggagatataaatgctgctttgggttccataatcctagggggctatgtttacatagtaaaatacatcctaccaaatcaggaaacagtgaataatgggagtcacttcacagagacgcaggaggacctggggggcgtagcagaggaggataggtagagaagtaccattttaattatttgtgacttgtggcttccttcctcctctcctcctccctccacgtctctctttgccccctttagacagaaggtgcagaaaagggcatcaaaaagaggctggattttttaaaaggcagctttccaactttgcacacaaacaggtaacaggaaggtacagcaaaaatcctctcatctgaaacactgtcagcagaaacaaaacctgtaaaaatgactaatcagctgcacatattgatgctctctgcaagttacctttaagtgttttttttttcttatacttgaagttgcttttacgatattattttggtggctttcttttctctctttgatgggcaatagaggaagtagataatgggatttaaggacgcctgggggagaaaagggaggatgtggcattgtctttttttttttttttttttttttttttagcatagaggtttaatcaaactcccatatgttgaaattgctcctcatattactggttttacatggacacagaaactaggcactttagaggtgcacttgcatggcaggctgggcccccttttctatattttattttcctttttagtatagtggtacttaaaatcactggttcacttaaaaaaacaaacaataaaatgttaaactctactaatgtacaaataagctgaaaagttgcattttatgtgtattttttgccatagcaggtactgtatttctcatgctggatttcaaaaaaaaaaaaaaaagtatcaaaaacaaaaaaaactaaagggtggtgttttattggattgtgacaggttgagtaataaggaattaagtcgtcgtcatttcattaaaactgagagatgatgtaatgcatatataagagttttctgaagggttttttttgggcttttaaacagcttatttttgtttttgtttagtttttttattttattttattttggaaagatatgattgtattatgtgcaactcagttgcttacattataactacaaaatatttttgggttcctggaaaaaaaagaaaaaagactaataaatgtgtttggctgctaa

SEQ ID NO: 184372 - DNA, 17949 bp, Artificial Sequence
  derived and/or modified sequence
agagacagagagggagagagagagcaagagggagagtgtgtgagagagagttagttcaagccaaaatggccgacagagtctctgctggtttctgaatatttaaaatacaaaaaaacagatagacaaaaagaattcattttttggaccttttttcatttccatttctaccttgtatgcctcaatttgctggatttaagcactgctgcactttatgagagagaaggagcaagaaagggaagaacagttaatggaagacaagaaaaggaagaaagaggataaaaagaaaaaagaagccactcagaagcactccaatcaaaagacagcaatgcccgaagtgacgaaaccaagtttaagccaaccaacggccgccagcccaattggcagctctccatcgccaccagtcaatggtggcaacaatgccaaaagggtggcagtgccgaacggacaaccgccaagcgccgcccgctacatgcctcgggaggtgccgccgcgattccgttgccagcaggaccacaaagtgttactaaaacgtgggcagccccctccaccgtcctgcatgctccttgggggtggggcagggcctcctccctgcacagcacctggagcaaacccaaacaacgcacaagtgacaggagcgctgctgcagagtgagagtgggactgcgccagactcaacccttggaggtgctgctgcttcaaattatgcaaattccacttggggctcgggagcctcctccaacaacggcacctcccccaacccaattcacatctgggacaaggtgattgtagacgggtctgacatggaagagtggccttgtattgccagcaaagacactgaatcttcttccgaaaacaccaccgataacaacagtgcctcgaaccctggctctgagaagagcactctgccaggaagcaccactagtaacaaaggaaaagggagccagtgccagtctgcaagttctgggaacgaatgtaatcttggggtctggaaatctgaccctaaggctaaatctgttcaatcttccaactctactacagagaacaacaatggactaggaaattggaggaatgtgagtggtcaggatagaattggacctggctctggcttcagcaactttaacccaaatagcaacccatctgcctggccagcactggtccaagaaggaacttctaggaaaggggcattggaaacagataatagtaattccagtgcacaggttagcacagtaggtcagacatccagggaacagcagtcaaagatggaaaatgcgggtgttaattttgttgtctctggcagagaacaggctcaaattcataacactgatggaccaaaaaatggaaacactaactccttgaacttaagttcaccaaaccccatggagaataagggaatgccctttggaatgggcttggggaacacctccaggagcactgatgccccttcacaaagcactggagatcgaaagactgggagtgttggatcttggggtgcagctagggggccttctggaactgacacagtctctggacaaagcaattctggaaacaatgggaacaatggaaaagagagagaggactcctggaaaggagcttctgttcagaaatcaactgggtcaaaaaatgactcttgggacaacaataacaggtctacgggtgggtcctggaactttggcccccaggactctaatgacaacaaatggggtgaagggaacaaaatgacatctggggtctctcagggagaatggaaacagccgactgggtctgatgagttgaaaattggagaatggagtggtccaaaccaaccaaattctagcactggagcatgggacaatcaaaagggccaccccctccctgaaaaccaaggcaatgcccaggctccctgttggggaagatcttccagctccacaggaagtgaagttggaggtcaaagcactggaagcaaccacaaagcaggaagtagtgacagtcataactctggccgtcggtcgtacaggcccacacatcctgattgtcaggctgtcttgcagactcttttgagccgaactgatttggaccccagggtgctctcaaacactggctggggccaaactcaaattaagcaggacacagtgtgggacattgaagaggtgccaaggcctgaggggaaatctgacaaaggaactgaggggtgggagagcgctgccacacagaccaagaactcagggggctggggagatgcacccagccaaagcaatcaaatgaagtctggatggggggagctctcagcctctacagagtggaaagaccccaagaacacaggaggctggaatgactacaagaacaacaactcttccaactggggaggaggacgacctgatgaaaagacaccttcctcttggaatgagaatcccagcaaggatcaggggtggggaggtggacgccagcccaatcaaggatggtcttctggaaagaatggttggggggaggaagtcgatcagacaaaaaacagcaattgggaaagttctgcaagtaaacctgtgtctgggtggggtgaaggagggcagaatgaaatcgggacttggggtaatggtggcaatgcaagcctagcttcaaaaggtgggtgggaggattgcaaaagatccccagcatggaatgagacgggccgacagcccaattcctggaataaacaacaccaacagcagcagcccccacagcagccgccgccaccacaaccagaggcttctggttcgtggggaggcccacccccaccacctccaggcaacgttcgaccttccaattccagctggagcagcgggccacagcctgcaacacctaaggatgaggaacccagtggttgggaagagccatccccacagtcaattagtcggaaaatggacattgatgatggcacttcagcatggggagaccctaacagttataactacaagaatgtgaatctgtgggataagaattcccaagggggcccagcacctcgagaaccaaacctgcccaccccaatgaccagtaaatcggcatcagattccaaatctatgcaagacggctggggggagagtgacgggccagtcacaggagctcgccatcccagctgggaagaggaggaggatggaggagtctggaacaccactggctctcagggcagtgcttcctcccacaactcagcaagctggggacaaggaggaaagaaacaaatgaagtgctcactcaaaggaggaaacaatgattcatggatgaatcctcttgccaaacagttttcaaatatgggattgctgagtcagactgaagataatccaagcagcaaaatggatttgtctgtaggaagcctttcagataaaaaatttgatgtggacaagcgagcgatgaatctcggggattttaatgatatcatgaggaaggatcgatctgggttccgtccacctaattccaaagacatgggaaccacagatagtgggccttattttgagaagggcggtagtcatggtttgtttggaaacagcacagcacaatcgagaggtctgcacacacccgtgcagccactaaattcttctcccagtctccgggcgcaagtgcctccccagtttatttccccccaggtttctgcctcaatgctcaagcagtttcccaacagtggcctgagtccaggtcttttcaatgtggggccccagttatctcctcaacaaattgccatgctgagccagcttccacaaattccccagtttcagttggcatgtcagcttctcttgcagcagcagcaacagcagcagttgttacagaaccagagaaagatttctcaagctgtacgccaacagcaagagcagcagctggctcgaatggtgagtgcactgcagcagcagcagcagcagcagcagaggcagccaggcatgaagcactcgccctctcatcctgttgggcccaagccgcatctggacaacatggtacccaacgcattgaatgtggggctcccagaccttcaaaccaaagggccaatacctggatatggttctggcttcagctctggcggcatggactatggcatggttggtgggaaggaggctggaaccgagtctcgctttaaacagtggacctccatgatggaggggctgccctctgtagccacacaggaagccaatatgcacaaaaatggcgctatagtggcccctggtaaaacccggggagggtcaccgtacaaccagtttgatatcatccctggtgacacactgggtggccatacgggtcctgctggtgatagctggttacctgccaaatctccaccaacaaataaaatcggaagtaaatccagcaatgccagttggcctccagaattccaaccaggagtgccatggaaaggtatccaaaacattgaccctgaatctgacccctatgtcaccccaggaagtgtgctggggggtacagccacatctcccattgtagatactgaccaccaactgctgcgggataacaccacagggtctaattcttccctcaacacctcgctgccttcacctggtgcctggccctacagtgcctctgacaactcctttaccaacgttcatagcacttcagcaaagttccctgattacaaatcaacatggtccccagatcccataggacacaaccccactcatctctccaacaagatgtggaaaaaccatatttcctccaggaacactacaccgctgccccgcccacctcctggtctgaccaaccccaaaccatcatctccctggagcagcacagcaccccgatcagtcagggggtgggggacacaggactcacggctcgcctcggcctctacctggagtgatggtggctcagttcgtcctagttactggctggttcttcacaatctcaccccacagattgatgggtcaaccttgagaacgatctgcatgcagcatggcccactgctgacattccatctgaatctaacccagggcactgccctgatccgatacagcaccaaacaggaggcggccaaggcccaaactgcactgcacatgtgtgtgttgggaaacactaccatccttgctgagtttgccactgatgatgaagtcagccgctttctggcacaagctcagccccctacacctgcagcaaccccaagtgcgccagctgcggggtggcagtcgctggagaccggccagaaccagtcagatcccgtgggacctgctctgaatctttttggtgggtccactgggctcgggcagtggagcagcagcgctggtggcagcagcggggccgatcttgctggcgcttcattgtgggggcccccaaactattcttctagcttatggggagtcccaacggtggaagatccccataggatgggcagccctgctcctttactacctggtgaccttctgggaggagggtcggattcaatctgaacttagaactttcaactctgacctcgtgaccttttttggaacagcagcagcactaacttgaccttttcgttttttttttcaacttgcaataaatacatttttaaaaggaaaaaagaaaacggagagaaaaaaaggtgggtcattgacagactgtctgagcacatagttgcctcccttataacttcagttttttcgtttggaatatgaatccaaaaagagaacatatcactcttgaaatacttgaatcatgaacgccaacctagaaagacaatgtgaagcaagtacacataccatttaaatttaaacacaaaaaaattaaaaaaattagtttctagtttttcacttttttcatgttatatggaagttgttgctaagaaacatatatactgaaaaaaaatagctttttaactttgtttgcactgggtgtgtttccgtccttaggtctaccatgtttgggagggagggaaattcaaaagaattgttgggggaggggggagggaagacttgacggagcctcactttaaaaacaaaaacacaaaaaacctaaaaaaaaaaaaaaggaaaaaatttgtgattggctggttgataaataccagtgtgttctggcacatgtaactgcccaggcatgctcgttctggtgtgtgtgtgcacgtgtgttcatgtgcattcgcgtgcatccttctctgtctctgtgtgtgtgcctgtgttcttcccttctcccctgccccaccctgacttctcagaaagctgcatcgctgacagtctgcaggctggctggccggcccatctgctttttattttatttttttaactatgagaacacacaggcccggagagccactgctactaaagcaactccattgggctgcattaagatgaacagagtgctttttaatgatgaaagcagggagctcctttccatttgcaacttagcctgaatgtggggtttctctggctgttcttttgacctagcagtagagtggagcactgccaagtccaaaaaactagagcaggaggtacctcttggagcaacggtgtgtttatttctgtttttttttttttttaagtgaatggccaccaggcacatctgagtatctgttaagtttcatgcaggccttttcgttagtttgaaatgggaacggaagataacttttgatgatgcgatgtctcaaaaacagagaaactttgttccctctttccttatgatcaggtttgagaaattcttcaaaaaattaggtgaagttgagttacatatttctgttggttggttctctttttcattttatgaaaacagaaaagaataagtggtgagcagcctcctgaaagcatctgcagctactccctctgctcctttctcgccgagcgttacctgtgccaggccgtggcgcgttacagcaccaggccatcactgacagaaacgtttacttaacgaatgttcttaaaccagtgtgtacttcaagcgtttccttttgtttctctgtgttgtgtatttcctgtgtatgtggttttgcttaggcaggtataacttagcgaagacttttaagtattgcacctttttttgatttttgacctcttccccccaccttgtaattttgcttttttaatttcggtatttaaatacttttttttttttttaagcatcaatgtagtagtactctgggccgaacaggggtcaacgtttaatctacagttatcaccaacatgtatgtacttatgtcggaatcaaaatgtatcaaactgcttattgtgaagagaattatagcagacctgaagggggcgaaaaaccagatagggtggggggatggatgccggtgacgtgctagcacttgtgtggacatcccagtctgcattatgctgtttaacataaagtgccgacattttgtaccagcaaatacctgcccattccaacccttggtgggagcagacctctactgtcctctgtaacttgctgctattgaggacaagggagtttttctttctttagcgtcttcagtgaaggatacaatacaacaatgcctaatgtatttgactttttagcttgtgtctgtgtgtaggtgggtgggtgggtgtgtataggaaaagcctaaaacaagttatttgcatttcagtggttttgtgagacaaagaatgggaaattctgtagcccttctggcttaccctgttgattataaacctagcctcaaaagagattgacaggcatgactcaagtgagtgttcacatatacaagcctgcatgagccctctgtgggtaggtggtcacacttggcatctgcagcattgacgtggccccgctgggtgccttgagcatgccctcttcctgctctgcaatttgaatcaccaccgtgccccttccaccactgttccccatgcaaaagctctgcttccagcagcccccactgaccgctctctgtgtggagcaaagtgctgtcgtgcggtgaccaccaggtgaagagcagcttgtattcagacatctagagaaggttaaatcttagtgtccctgggccaggagcatatcccaaggctcctgcgagccagtggcgaccctgtccactgccgctcttggttcactgctgtgtcctgccccaccctcctctcctcctgcctgttggttccttgacctgcactatgggttagttgagttccttacgatactacggtgaaagccgggtgctagagcccctcttgtttacaagacataatgagggatttgaaatatgtaaaaataaacatgagaagctaaaatgttcttccatcataagcttaaagggaaaaaaactaaaaactttaaaaaaaaaagaccaaaaagtgcgtatatatatacatataaatatatattttagatgaagactaactctgggagcatttaacagtgttttttgtttctgtttttaacatttgttttcctgctttaaaatttgcaagcattctcaggaattctagggtaggaagccagttttttgaagatggtttatttaaccatatcttatcctagagagatggctgtttctttcctgttaataaacttttacaagttcctgaaacttcagaaagtttaaacaatttttacttaaaaaaatgtaaaaagaaaagtctccaaacattattgtcatactggggatcacacattttaaaacacatagaaatattttttaaaaattatcaatttagcagcaacaggtaaattcattatcttaaaaatatgggagaaggattaagctttgtaagagctcgatcatggattcttttgaaattgtgtgtagtttaatgggagagtgtttggtgtatatagatgagaatgccatcactttgttcctttccatttgagactgaactgaaatctcccctagtaatttttatttttttaaaggaacccttctccttgtccccacaaccccagcaacaaaagaaaggaaggaaggaagaaacaacagcttaaaaaaaaaagtaatctgtaaaatagtacagttggattgctgagaatctatgtaaagagttaggaaatataggttaataatttttggaacaaattttaaatataggcattactagaggaaaattatctatggactgtcctattaatgaagaatgtctgtcttacctccgtttgttttgggaggaggagaaaatatagaagaatctaataaggaacaagtgattttacttttttagctcccagctactgttgtgctcgttttaattgctgttttgaagatctgctgcttaattatccccatcccttagccggagatgtggagtgtttcctttcagtttttggtgatgttgaattcttttgtattccctcctggggccaggggtcagaattcccaagcatgaccacagcttcttttaaacattaagcttcccagtgggaaggaaactccagctcgacaggtaaagggagtgggtggggttgctgcctgcaatttctctaaaaccgctttagtgccttcgtacatacacccagacatcctgagcaagggggacgcacatgtgtgtgtgtgtggtccagtcactccacagatgtaagatactcacccataaaggaaattggagtggttctggacaggccccaaaggcagtgggctgaatttaaaataaataaacaaacgtcaagcaagttaatatgcttatgtctcagtaatgtagaatgccaagttccttcctgtgtcgtgtgccctccattactgtgcattgattcctccaggtgtgtaattgtgacaactgcagtgatttggaaagtctctttgtcttgggcaaatagaaggggttcctgttgttctgctcttgtccttcgtctcctccccttttcccccagacctcccccttctttttgtcaacttgctgggagctttgctttattggttggcagtgacctaagaacaggatatggtgaggatgtcatggaagagaagagctctttccgtggtattctttggcaagagccatgtctactaagaggttagatgacttcagtatacttataaaattcagtgagagtgccttcttctcttctaccacactctggcatagatacaggcttgctggtcacctctcattacatagatttattttaaaaacattttgattatgttaatttgagctttcccttttttttttttaactactttttaaaacacttgattactagtggcttagaggtgtgtacatctcctgaacatcacaaacttggtttctacctaccacacgagtagccaaaagaaaagaagcactaatagagaaaggggtgtctcacaccagacagaggacctctgctgtcaattagatccagtatcatgacctaactttaagtgtggaaaagagttcagatctctgagacactgtgaagaaatggatggctcatgtaacatctctgatccctcagtccccaaccctggacgtgtttcatttacaacattcataggagttaacttagcagtgttgcaagttaaggttccaaaccaaattatttaatcagtgtccccccaataaatcacttatccatttattgctagttagttttatttatagcaacttgatttcctatgagtatggctcctgttgtaagaattttcccacctcttctgacatgaatgtagcataagttagcaatcggttcttccaaactcctgtgggttgaatatggtatagaaggtatgcaagaggaaaaagaaaggaaaagataaaactcctgcctgagaatttggaagcacctttattaacacatatatctcgcagaaactagaagctcataggctgttaactttttgcaactattcactcatttttaccacttttttttttgggtgagggggtgatttttgtaaggttaacagccagattccattttgacctcagatgctgtgtactttttaatttcattttttatattctgccatcttgactcttctctaaaacagaatgaaaatgtctgcatgctgagcaaaatgcttacgccaagcctgtttttctctgcagagtaaacaggatgttttcagcagacttggctctaatagccatctctaagattagggaacaattgagtctttatgtagaaaagatccattttttccccatcctcagagttaaaattcaacatttaaagctttatcggttattgttttagatttgagatttttgtttttaagtatctataagatctttagaagtgagataaatttttcgctggttaaaaaaaatcaaactttcctctgcagtgtttttgccaagttttgtcacacttcatgtgtatgcattaactatacttcttagtgttactgcaaaaaaaaaaaacaaaaacaaaacaaaaaaaagccttgttctttaattgtgtttttcctcctgtgagtggacaactaaagccgcgtgatgatgcggatgaaaatattctggtctgtgtgtatacaatgaattgtcagtcttcagacctcatggtcgttaagaaaatagggaactcacaaaccctgctgcgcactacatttacttctttatctgcaagtacagggagtccatacagtcaagaaacacacagatacacataatgctattgaggacattgtcattctgtaagaaaacagaatattatctagatttccagagttagtgcagaccctgtgataacagtctgtgggtttgtggccagcgccaaaggtgtgtgtattttcagaaatggtccctatttgtcagtgatagtgttttttttttcttaagtttgacaaagggggtggtaatatcacattctttagatttgaaataattatcagctccaagaatctgtgaacatagtaataacaataaaaattcaacatcgaccctccctaacctgctcaccatacctccccaccccatgcctctgaagaaagaggccatgaacctacgaggtggtaaagggggacacaggtcagggagtggagagctactcctccagcagctcagcacccacactgcccgcatgcgtgtggccaccgggaccagatcccgagtgattgtggcatacccctaatatttgagtagtttttaagctgtcagtctcttgtcataacctcctaccgccacccaaaaaagtaacgaaagttgcagtaactgccagtgtttgcctcaccaaatttaaatcgttcccttttcagttagctatatacctgaatttgtttttaacaagaaactgtacatggccaggaaaaatggtactaccttggccaaagggtctttgcaaaaagctcagtcttcagttcttcactgtgacaaatgcttatcttgttcatgggaggggaaagatcagataaataggcaagaagtactctgttttaaataaagaataaatagtgtccgtttaaagcactttgtgcctcaacttcatttttaaactgtaaatcattgctttggaaataaattcccaattataattgacccatatctagccaatatcaacaagttgggatggtttttgtttttttcttttttttcaaaaagggaaattcctctttactgctcacagtaagctgcaaaagaaagttgtcaaggtggcttatgatgctgttgtagcagagctgtgaaaggaagtgctttgctttctctcccgccttccggaatctggcgttccttccccttcggctactgaaaggtgtgtacaactcccagaggggtggctgtaaaagttgactggaggcaaagtggagtggccttattgccaggactagccctacagaagagctttacagagaggaggacagtacatcctatgtgtgttcgccaaaaatgggaaaggtgggtatttaggcaaaacaaaataaaaacctttggaaccctttaagaagttacataccttttaaaggtagtatagtttctcaccaagtgatgcattttagcatgacacttcttgccagaaattttgggataagttggaataaatgtgtttaaaacatcatccaccgccctttttaaattttgtctaaggaattacttaagtatagtatttctgaatgtgcctttgtgagtacagagaccgtccgttctaggaagaagctatccgttggatacaaacaaacagacggtcagctttagtcattagggaagtcaaagttcctcctggaagtcccaggagcagctgttgagatttcattagcatcaatattgcacagtgtagagttgagtggaagagattctgggacttgggagaggagacaggggaaggtacccaggcgacgcagacccacgttagtccaagagcgcaggtttacacatctgcattccctagttttctccgtctgtatgtttgtgctcatgtggctttggctgttttgttttttgtttttctgtaagcactggagaattggaatatggtgatacttgtgacacattcatgcatgtaaacaaggcattttccagcttctgccgtgtgcagagcgggcagcacgcttttaccctttgagtctgtgtcctgaggcggccattacattcccacatgggcgtcacatcacgttgctgttgatgcaaacagggtattacacacaaggaaaaggggttttgaagagttaagattgaagtgtttgagaaagaaaagagaaaaatctgaaatcatattttatttcttcagagctattatagttgaacacagaaatctgcagtgtctttatttgtttttatgttttaaacaatttcacctcttctccccactcctatcttctaaagaaatatcaagcaaatgctaagggccatttccatgattcctcagagctcccccaaagaggagaacagtccctcccactcgattccttcagcttcattcaggaagacacagggaggagagatgctgcttctgcgctttgctctcattcctctctcatggccttgaaatgtattattatgcaaatgtgaattttgatactgaatttaagaagaggttgttggatttttttttttttttttttttttttcaaaaaaaaaagtcccacatgtggtcatcgtcgcttctttatgttgtaaggtgaattgtaactatgcattctgcaaagggggtggggaggagagggcagaaaggggaagggagtagcgttgcatccttgttcttcagtttctgtgtccatggtgtccccgtgtcctggaggggaaggggagtgagagacgaatgtggtaaggtcagcacagtgagatagagacctctgagtcctcttgccactgttgctggcaggtctgatggccaggtaaattccagggggcctgcagttcctgtcaaccaatgtggttcaggattcttgatcctagccgtgcagtgttaatccagtgcagcaatggaactccacaggctccagtgttctctggaaaaagtactcatcctttcctgaattcagagcccttcaagctcaggaaaccacgcttcactcgtgctgacctgaaagttaatctttaggtcgattttgaaaaactccgcctcctctctcctttttaatatttctttcttcctttttaatcatgtttaagtgaacttactcttagttataaggaactgtcctgctttgtggggaagagggctgttgcttgtcaggcaaaaaagttttctcttcctacccaccatccctctctctgcttcccttgcatttggcaggctgtatgaagccaatgagctgcgaggtgttttgacaggggaggtctgcatgcagcctcttctttgtcctaacaattcctttgttgatcttgcctgtgatgaatcatagcgcctgcattgctctggtctaggcattatttgcaacacacagtatcgtaagcgagagattgttctgcctatattcagtgttttccatgcagcaattcttcttgttgacgttcacagtactgtaacgagtaacagacttgatcacagtctcctcgtgcctgtgcagggctgcacaggcatgatcttatcagggttccaatctgttagattgcctttaaacaaaaaaaacaacaaaaaaataaaatcctgacgtttcaactgtctcacacaaaataatacctcgaggtacatttccccctgcaatgtaaacccttaactcctctctcctttctgacatcagtggattatcctttttaaaatatgaacatgtaaatagcaggataactttaaaaaacattttctttgctgtgaaagtaaccctaaaatatgttttcttcttttgtatttttttggtttttgtttttaagccatcagaagtttcagatctttactctttcatgtttaagaagaaagagcagaggaggtcgggggagccggtttgcatttgtgttggaggggtgttatctccattgcctcccacacagtgacagcagaccagtatgtaaaccctgtcttggctgggcgcggtggctcacaccagtaatcccagcactttgggaggctgaggcaggcagatcatctgaggtcaggagtttaagaccagcctggccaacatggtgaaaccccgtctctactaaaaaattagccggacgcagtggcgcgcgcctgtggtcccagctgctcgggaggctaaggcaggagaattgcttgaacccgggagacggaggttgcggtgagccgagattgcaccactgcactccagtgtgggcaacagagcaagacttcgactcaaaaacataaaataaacaaaagacacacacacacacaaaaaccctgtcttaaatagctgccatctcttccagcaatctagtgccagggtaagaagtgtctgaatttctctcttccagcagatccatcccctgcagggactccagaatgttctccacacaatacctggagctctcaacctttcttggttcagacacacacatacacaccccttgagtaactcagtatcattttgtagttcacagaaggatgtagtccctggcattttggtttgcactgtagaatccatagccttgtcactttgttatgctctggaaatgtactgatttcttacttgggaggaaacttgtgtaaggagatgtgcaaaccaccctgaaagccatgtgcatcctcacctcttccattaccccctccatgagctcgaagcgacattaagtagagggaaatgcttttaacaaatgctgctcatgtggatctgtcagctattgcttgcctagatttgggcacccatgaagcagggttggaatggatcattttgaattgcttctttgcagacacccccttcgcccccatctttaagataaaccctttactagtcaagaagcccttttcagttggatctcactgatcttgtatagtgacgacttcctttgaaggaagaagcttgattataagtgcatgcatattatccacccaccttctgatttgggcactgttcaccttggaattttatttattttgtttatctggaggccctttttctatcagtctctgatccctcatgggttctgcctgcccttgtatctcttgtacaatgctcccaaagggctttgctgatctctgcacttctttcctgggacactccccccaccaccaccctttgcacacaccagtgaccaaagtgtatgcagtgatctcacagaagacatcaaaaatggtgcatgcaccgtgaatgtgctcacagagacacgtgcacaagattctgcacccttggccttaatctcagtatgacttaaggtgcaggaacatttttaacaggttttaaaaaaacaaaaaacccttctgggaggaaaaaaataaaaagcagatacaacagctcaactgttcccactcctaactctccactatgtgcttataacttcacattctatgccctccccgccacccacctcatccctgttctgcgtaaccaaaaaacagacaacaaaagcaacctgaggagaggtttctggactattttatctgtctccatttagatggagatataaatgctgctttgggttccataatcctagggggctatgtttacatagtaaaatacatcctaccaaatcaggaaacagtgaataatgggagtcacttcacagagacgcaggaggacctggggggcgtagcagaggaggataggtagagaagtaccattttaattatttgtgacttgtggcttccttcctcctctcctcctccctccacgtctctctttgccccctttagacagaaggtgcagaaaagggcatcaaaaagaggctggattttttaaaaggcagctttccaactttgcacacaaacaggtaacaggaaggtacagcaaaaatcctctcatctgaaacactgtcagcagaaacaaaacctgtaaaaatgactaatcagctgcacatattgatgctctctgcaagttacctttaagtgttttttttttcttatacttgaagttgcttttacgatattattttggtggctttcttttctctctttgatgggcaatagaggaagtagataatgggatttaaggacgcctgggggagaaaagggaggatgtggcattgtctttttttttttttttttttttttttttagcatagaggtttaatcaaactcccatatgttgaaattgctcctcatattactggttttacatggacacagaaactaggcactttagaggtgcacttgcatggcaggctgggcccccttttctatattttattttcctttttagtatagtggtacttaaaatcactggttcacttaaaaaaacaaacaataaaatgttaaactctactaatgtacaaataagctgaaaagttgcattttatgtgtattttttgccatagcaggtactgtatttctcatgctggatttcaaaaaaaaaaaaaaaagtatcaaaaacaaaaaaaactaaagggtggtgttttattggattgtgacaggttgagtaataaggaattaagtcgtcgtcatttcattaaaactgagagatgatgtaatgcatatataagagttttctgaagggttttttttgggcttttaaacagcttatttttgtttttgtttagtttttttattttattttattttggaaagatatgattgtattatgtgcaactcagttgcttacattataactacaaaatatttttgggttcctggaaaaaaaagaaaaaagactaataaatgtgtttggctgctaagc

SEQ ID NO: 184373 - DNA, 240 bp, Artificial Sequence
  derived and/or modified sequence
atgatctttacccctttcctgccgccagcggacctttccgtgtttcaaaatgtcaaggggctgcagaacgacccggaggagtgggttgccgtatccgacgcgactgaagacccgagcggtggaacaggcttgccacgagagccagctctgctgagagggtcttggcgttccaggttccagcgggctcttgcctgtttcacgaagtgctttcgcggcggttaccgagctctcggtatatag

SEQ ID NO: 184374 - protein, 2517 aa, Artificial Sequence
  derived and/or modified sequence
MVGERHAGDLMVPLGPRLQAYPEELIRQRPGHDGHPEYLIRWSVLKCGEVGKVGVEEGKAEHILMWLSAPEVYANCPGLLGERALSKGLQHEPAGVSGSFPRDPGGLDEVAMGEMEADVQALVRRAARQLAESGTPSLTAAVLHTIHVLSAYASIGPLTGVFRETGALDLLMHMLCNPEPQIRRSAGKMLQALAAHDAGSRAHVLLSLSQQDGIEQHMDFDSRYTLLELFAETTSSEEHCMAFEGIHLPQIPGKLLFSLVKRYLCVTSLLDQLNSSPELGAGDQSSPCATREKSRGQRELEFSMAVGNLISELVRSMGWARNLSEQGMSPPRPTRSIFQPYISGPSLLLPTIVTTPRRQGWVFRQRSEFSSRSGYGEYVQQTLQPGMRVRMLDDYEEISAGDEGEFRQSNNGIPPVQVFWQSTGRTYWVHWHMLEILGPEEATEDKASAAVEKGAGATVLGTAFPSWDWNPMDGLYPLPYLQPEPQKNERVGYLTQAEWWELLFFIKKLDLCEQQPIFQNLWKNLDETLGEKALGEISVSVEMAESLLQVLSSRFEGSTLNDLLNSQIYTKYGLLSNEPSSSSTSRNHSCTPDPEEESKSEASFSEEETESLKAKAEAPKTEAEPTKTRTETPMAQSDSQLFNQLLVTEGMTLPTEMKEAASEMARALRGPGPRSSLDQHVAAVVATVQISSLDTNLQLSGLSALSQAVEEVTERDHPLVRPDRSLREKLVKMLVELLTNQVGEKMVVVQALRLLYLLMTKHEWRPLFAREGGIYAVLVCMQEYKTSVLVQQAGLAALKMLAVASSSEIPTFVTGRDSIHSLFDAQMTREIFASIDSATRPGSESLLLTVPAAVILMLNTEGCSSAARNGLLLLNLLLCNHHTLGDQIITQELRDTLFRHSGIAPRTEPMPTTRTILMMLLNRYSEPPGSPERAALETPIIQGQDGSPELLIRSLVGGPSAELLLDLERVLCREGSPGGAVRPLLKRLQQETQPFLLLLRTLDAPGPNKTLLLSVLRVITRLLDFPEAMVLPWHEVLEPCLNCLSGPSSDSEIVQELTCFLHRLASMHKDYAVVLCCLGAKEILSKVLDKHSAQLLLGCELRDLVTECEKYAQLYSNLTSSILAGCIQMVLGQIEDHRRTHQPINIPFFDVFLRHLCQGSSVEVKEDKCWEKVEVSSNPHRASKLTDHNPKTYWESNGSTGSHYITLHMHRGVLVRQLTLLVASEDSSYMPARVVVFGGDSTSCIGTELNTVNVMPSASRVILLENLNRFWPIIQIRIKRCQQGGIDTRVRGVEVLGPKPTFWPLFREQLCRRTCLFYTIRAQAWSRDIAEDHRRLLQLCPRLNRVLRHEQNFADRFLPDDEAAQALGKTCWEALVSPLVQNITSPDAEGVSALGWLLDQYLEQRETSRNPLSRAASFASRVRRLCHLLVHVEPPPGPSPEPSTRPFSKNSKGRDRSPAPSPVLPSSSLRNITQCWLSVVQEQVSRFLAAAWRAPDFVPRYCKLYEHLQRAGSELFGPRAAFMLALRSGFSGALLQQSFLTAAHMSEQFARYIDQQIQGGLIGGAPGVEMLGQLQRHLEPIMVLSGLELATTFEHFYQHYMADRLLSFGSSWLEGAVLEQIGLCFPNRLPQLMLQSLSTSEELQRQFHLFQLQRLDKLFLEQEDEEEKRLEEEEEEEEEEEAEKELFIEDPSPAISILVLSPRCWPVSPLCYLYHPRKCLPTEFCDALDRFSSFYSQSQNHPVLDMGPHRRLQWTWLGRAELQFGKQILHVSTVQMWLLLKFNQTEEVSVETLLKDSDLSPELLLQALVPLTSGNGPLTLHEGQDFPHGGVLRLHEPGPQRSGEALWLIPPQAYLNVEKDEGRTLEQKRNLLSCLLVRILKAHGEKGLHIDQLVCLVLEAWQKGPNPPGTLGHTVAGGVACTSTDVLSCILHLLGQGYVKRRDDRPQILMYAAPEPMGPCRGQADVPFCGSQSETSKPSPEAVATLASLQLPAGRTMSPQEVEGLMKQTVRQVQETLNLEPDVAQHLLAHSHWGAEQLLQSYSEDPEPLLLAAGLCVHQAQAVPVRPDHCPVCVSPLGCDDDLPSLCCMHYCCKSCWNEYLTTRIEQNLVLNCTCPIADCPAQPTGAFIRAIVSSPEVISKYEKALLRGYVESCSNLTWCTNPQGCDRILCRQGLGCGTTCSKCGWASCFNCSFPEAHYPASCGHMSQWVDDGGYYDGMSVEAQSKHLAKLISKRCPSCQAPIEKNEGCLHMTCAKCNHGFCWRCLKSWKPNHKDYYNCSAMVSKAARQEKRFQDYNERCTFHHQAREFAVNLRNRVSAIHEVPPPRSFTFLNDACQGLEQARKVLAYACVYSFYSQDAEYMDVVEQQTENLELHTNALQILLEETLLRCRDLASSLRLLRADCLSTGMELLRRIQERLLAILQHSAQDFRVGLQSPSVEAWEAKGPNMPGSQPQASSGPEAEEEEEDDEDDVPEWQQDEFDEELDNDSFSYDESENLDQETFFFGDEEEDEDEAYD

SEQ ID NO: 184375 - DNA, 7554 bp, Artificial Sequence
  derived and/or modified sequence
atggtgggggagaggcacgccggggacctcatggtgccgctgggacctcgactacaggcttatccagaagagctcatacgccaaagacctgggcatgatggacatccagagtatctgatcaggtggtccgtgctcaagtgcggtgaggtgggaaaagtgggagtggaagagggcaaggccgaacacatactgatgtggctatcagctcctgaagtgtatgccaattgtccagggctcctgggcgagcgcgccttgagcaaaggtctgcagcatgaaccagccggcgtatccggaagtttcccccgggaccccggtggcttagatgaagtcgcaatgggtgagatggaagccgacgtgcaggcgctggtccgcagggccgcccgccagctggccgaaagtggaactccaagccttacggccgccgtgttgcacaccatccatgtcctgagcgcctacgctagcatcggacccctgaccggggtgttccgcgagaccggcgccctggacctgctgatgcacatgctgtgcaaccctgagccgcagatccgccgttcagccgggaaaatgctgcaggccctggctgcccacgacgcagggagccgtgcacacgttcttctgtccctgagccagcaggacggcatcgaacagcacatggactttgattccaggtatacactgttggaactcttcgccgagacaacatcctccgaagagcactgtatggctttcgagggcattcatctgccccagattcccgggaaacttttgttcagcctagtcaagcgttatctttgcgtgacgagtctgttggaccaattgaacagttcccctgagctgggcgccggggaccaatcttcaccttgtgctacccgcgagaaaagccggggccagcgggaattggaattctcgatggcagtagggaatctcatatccgagctggtgcgttccatgggatgggctagaaacctctccgaacagggcatgtccccacctagacccacccgaagtatattccagccatacatctccggcccgagtctgctgcttccaaccatagttacaacccctaggagacagggatgggtgttcagacagcgcagtgaatttagcagccgatctggatatggggaatacgtgcagcagaccttgcagcctgggatgcgtgtgcgcatgcttgacgattatgaggagatttctgctggcgatgagggggaattccgtcagtccaataacgggatacctccggttcaggtcttttggcaaagcacaggcagaacgtattgggtccactggcatatgcttgaaatcttgggcccggaggaggccacggaggacaaggccagcgccgccgtcgaaaagggggccggagctacagttcttggtaccgcattcccttcttgggactggaaccctatggacggcctatacccccttccctacttgcagcccgaaccccagaaaaatgagagggtggggtacttgacgcaggccgagtggtgggaattgctgttttttatcaagaagttagacctgtgtgaacaacagcccatttttcagaatctctggaaaaacctagatgagaccctcggtgagaaggcccttggggaaatctctgtgagcgtggagatggcagagtcccttctgcaggtcctttcctctagatttgaaggatccactctgaacgatctgctgaactcacagatatataccaagtacgggctcctgtctaacgagccctcatcaagctccaccagtagaaatcactcatgtacacccgaccctgaagaggaatccaaatccgaagcctccttctctgaggaggaaacagagagccttaaagccaaggccgaagcaccaaagacagaggccgagcctacaaaaactagaaccgaaacacctatggcccagagcgactcacaattgtttaaccagttgctcgttactgagggaatgacgctgccaaccgaaatgaaagaggcggcgtccgagatggctagggccctgaggggacctggtccccgatcgtcgctggatcagcacgttgccgccgtggtggccaccgtccagatttcgagcctcgacaccaacttgcagttgagtggcctctctgccctgtcccaagctgtcgaggaggtgacagaacgggatcatccgctggttcggccggatagatctctcagagagaaactcgtcaagatgcttgtggaactgttaactaatcaggtaggagaaaaaatggtcgtcgtgcaagctctgcgtctcctctacctgctcatgacaaaacatgagtggcgcccgctctttgcacgtgaaggcggaatttacgccgtgctggtatgtatgcaggagtacaagacctctgtgctggtgcagcaagctggactagccgcattaaagatgctcgccgtagcctcatcctcggaaatacctactttcgtgactggtagggacagtatccacagcctgttcgatgcacagatgacacgggagatcttcgcaagcatcgattccgctacccggcccggctctgagtctctcttacttaccgtgcctgcggccgtgatccttatgcttaataccgagggttgttcctctgccgcccgaaatgggcttctactattaaacctgcttctgtgcaaccaccatacactaggcgaccaaattataacgcaggaactccgggatactctttttaggcactcaggcattgctccaaggacagaacccatgcccacgactcgtacaatcttgatgatgctgctgaaccgttatagcgaaccccctgggtcgccagaacgagccgccctggaaacccctataattcagggacaggatggctcaccagaattactgatccgctcattagttgggggacccagcgcagaactcctgcttgatttagagcgtgtcctgtgcagagaaggtagtccgggcggtgccgtccgcccccttttgaagcggcttcaacaggagacccagcccttcctgctgctgctgcggacactggacgctccaggccccaacaagaccctgttgctttcagtcctgcgggtcatcacccgcctattagattttcctgaggcgatggtgttgccgtggcacgaagtgttggagccatgcctgaactgcctgagcgggccaagctctgattcagagatcgtccaagagctgacttgttttctgcaccgcctggctagcatgcacaaggattacgctgtggtcctatgctgcctcggggccaaagagattctgtccaaagttcttgataaacactctgcacagcttttactcgggtgtgagctgcgtgatttggtcaccgagtgtgaaaagtatgctcagctctactccaacctaacatctagcatcctcgctgggtgcattcagatggtgctgggccagattgaggaccatcgtcgtactcaccagccaatcaatattccctttttcgacgtttttctccggcacctttgccagggcagctctgtggaagttaaggaggataagtgctgggaaaaggtggaggtgtcctccaacccccatcgagcaagcaagctaactgaccataatccgaagacatactgggagtctaacgggagcaccggatcacactatattacccttcacatgcacaggggcgtgctggtgcgccagctgacacttctggtggcttcagaagattcgtcttacatgcccgctcgggtggttgtctttggcggggactcaacaagttgcatcggtactgagctgaataccgtgaacgtgatgccaagtgctagtcgggttatacttctggagaatctcaatagattttggcctattatccaaattcggatcaaaagatgtcagcagggcggcatcgacactcgtgtgcgcggcgtggaggttctcggcccgaagcctaccttttggccgctatttcgggagcagctatgtcgtaggacatgtctcttttatactatccgcgcacaggcatggagccgagacatcgcagaggatcatcgtagactgcttcagctctgtccgcggcttaatcgcgtgctgcgacacgagcagaattttgctgaccgctttctgccagatgatgaggccgctcaggccctgggcaaaacgtgctgggaggcactggtttctcccctcgtgcagaatataacctcgcccgacgcagagggagtgagtgccttggggtggttgctcgaccagtacctggagcaacgggagaccagtcgtaatcccttaagcagagccgcttcttttgcatcacgcgtgcgaaggttgtgtcatctgctggttcacgttgagccaccacctggccctagtcctgaacccagtacacgtccgtttagtaagaattcaaagggccgcgaccgaagcccggcaccgtcaccagtgttgccctccagctccctccggaacatcacgcagtgttggctgagtgtagtgcaagaacaggtcagtcgatttttggcagcggcatggagagcccccgactttgtacctaggtattgcaagttgtacgagcacctgcaaagagccggctccgagctcttcggcccccgcgccgcctttatgctcgcgctgcggagtgggttctccggagctctgctgcagcagtccttcctgactgctgcgcacatgagtgagcagttcgcccgttacatcgaccagcaaatacagggtggactgatcggcggtgccccaggagtagagatgctgggacagttgcagcgccacctggaacccatcatggtgttatcaggactggaattggcaacgacatttgagcatttctaccaacactatatggcagacagactgttgtcttttggctcttcatggctagaaggggccgtgctggaacagatagggctgtgctttccaaacagacttccgcaactaatgttacagtcattatctacttctgaagagctccaaagacagtttcatttgttccagctgcagagactggataagctatttttggagcaggaggatgaggaagaaaaaaggctcgaggaagaagaagaggaagaggaggaggaggaagcagagaaggaattgtttatcgaggacccaagccccgcaattagtatactggtgctgagccccaggtgctggccagtgagccctctttgctacctgtatcaccccaggaagtgcctgccaaccgagttctgcgatgccctggacagatttagttctttttactcccaatcacaaaaccacccagtgctcgatatgggtccccatagacgcctgcagtggacttggctcggcagagcagagctccagttcggcaaacagattctgcacgtatctacagtgcaaatgtggctgctgctcaagttcaaccaaaccgaggaagttagcgtggagacactcttaaaggactccgatctgagtccagaattgctgcttcaggccctcgtgcctctcacgagcggcaatggcccgttgacgctgcacgagggtcaggacttcccgcacggcggagtcctccgattacacgagcctggcccacaaagaagcggcgaggctctctggctgatacccccacaggcttacctgaacgtggaaaaggatgaaggtcgcactctcgagcagaagcgaaacttactgtcatgcttactggtacgcatcttgaaggcacatggcgaaaagggcttgcacattgaccagcttgtgtgtttggtgctggaggcctggcagaagggccccaaccctcccggcactctgggacataccgtcgcagggggagttgcgtgcaccagcaccgacgttctgtcttgcattcttcatctgttaggtcagggatacgtgaagaggagagacgataggccacagatcctgatgtacgctgcgccagagcctatgggaccctgtaggggacaggcagatgtgccattctgtgggagccaatcagagacatctaagccctctcctgaggcagtggctaccctcgcttcactccagctgccggcggggcgcacaatgtctcctcaggaagtcgagggtcttatgaagcagacagtgcgacaggttcaggagacactgaacctggagccggacgtggcccaacatctgcttgcacatagccactggggcgctgagcagctcctgcagagctatagtgaggatcctgaaccgctgctcttagcagcaggtctgtgcgttcatcaggctcaggctgtgcctgtgagacccgaccattgccccgtgtgtgtgagccccctggggtgtgatgatgacctacctagtctctgctgcatgcactactgctgtaaatcctgttggaatgagtatctcacaacacgtatagaacagaacctggtactcaactgtacatgtcccatcgctgactgtcccgcccagcccacaggagcatttataagagcgatagtaagttcaccagaagttatcagtaagtatgaaaaagctttgctccgaggctatgtcgaatcctgttccaaccttacatggtgcacaaacccacagggctgtgataggatcctttgccgccaaggcctggggtgcggcaccacatgttcaaagtgcgggtgggcatcctgctttaattgtagtttccctgaggctcattatccggcatcctgtggtcacatgagccagtgggtggacgatggagggtattatgatggcatgagtgtggaagcacaatccaaacacttagccaaattgatttccaaaaggtgtccgagttgccaggccccgatcgaaaaaaatgaaggatgcctccacatgacatgcgccaagtgtaaccacggtttctgttggaggtgtctgaaatcctggaaacccaatcacaaagattactacaattgtagtgcaatggttagcaaagcggccagacaggaaaaaagatttcaggactataatgagaggtgtaccttccaccatcaggctagagaatttgcagtgaatctccggaatcgagtgtccgcaatacacgaggtcccgcctcccagatctttcaccttcttgaatgacgcgtgccagggactcgagcaggcgaggaaagtattggcctatgcatgcgtttacagcttctattcacaggatgccgaatacatggacgtggtggagcagcagaccgagaacttggagcttcacactaatgcactgcaaattctgcttgaagagaccctcctccgttgtcgcgatctagcttctagtcttcgcctccttcgtgctgactgtctgtcaacgggaatggaacttctgagacgtattcaagagaggctgcttgccatcctgcagcactcggctcaggacttccgggtgggtttacagagccccagcgtagaggcttgggaggcaaaaggccccaatatgcccgggagccagcctcaggcctcctcaggtccagaagcggaagaggaagaggaggatgatgaagatgacgtgcctgagtggcagcaggacgagttcgatgaagagttggacaatgattctttttcctacgacgagagcgagaatttagatcaagagacatttttttttggcgacgaggaagaggatgaagacgaggcctatgactag

SEQ ID NO: 184376 - DNA, 7554 bp, Artificial Sequence
  derived and/or modified sequence
atggtgggggagagacatgctggggacctgatggtgcccctgggcccccggctgcaggcctacccagaggagctgatccggcagaggcctggccatgatggccaccctgagtacctgatccgctggagcgtgctgaagtgtggggaggtgggcaaggtgggcgtggaggagggcaaggccgagcacatcctgatgtggctgagcgcccctgaggtgtatgccaactgccccggcctgctgggggagcgggccctgagcaagggcctgcagcacgagcctgctggggtgtctggcagcttcccccgggaccccggcggcctggatgaggtggccatgggagagatggaggctgatgtgcaggccctggtgcggcgggccgcccggcagctggccgagagcggcacccccagcctgacagctgctgtgctgcacaccatccacgtgctgagcgcctatgccagcatcggccccctgactggagtcttccgggagactggagccctggacctgctgatgcacatgctgtgcaaccctgagccccagatcagaagatctgctgggaagatgctgcaggccctggccgcccatgatgctggcagccgggcccacgtgctgctgagcctgagccagcaggacggcatcgagcagcacatggactttgacagccgctacaccctgctggagctgtttgctgagaccaccagcagcgaggagcactgcatggcctttgagggcatccacctgccccagatccctgggaagctgctcttcagcctggtgaagcgctacctgtgtgtgaccagcctgctggaccagctgaacagcagccctgagctgggcgctggggaccagagcagcccctgtgccacccgggagaagagccggggccagcgggagctggagttctccatggctgtgggcaacctgatcagcgagctggtgcgctccatgggctgggccaggaacctgtctgagcagggcatgagccccccccggcccaccaggagcatcttccagccctacatcagcggccccagcctgctgctgcccaccatcgtgaccaccccccggcggcagggctgggtgttccggcagaggtctgagttcagcagccgcagcggctatggagaatatgtgcagcagaccctgcagcccggcatgagggtgaggatgctggatgattatgaggagatctctgctggagatgaaggagagttccggcagagcaacaacggcatcccccctgtgcaggtgttctggcagagcactggaagaacctactgggtgcactggcacatgctggagatcctgggccctgaggaggccacagaggacaaggccagcgctgctgtggagaagggagctggggccaccgtgctgggcacagccttccccagctgggactggaaccccatggatggcctgtaccccctgccctacctgcagcctgagccccagaagaatgaaagagtgggctacctgacccaggccgagtggtgggagctgctcttcttcatcaagaagctggacctgtgtgagcagcagcccatcttccagaacctgtggaagaacctggatgagaccctgggggagaaggccctgggggagatctctgtgtctgtggagatggccgagagcctgctgcaggtgctgagcagcagatttgagggcagcaccctgaatgacctgctgaacagccagatctacaccaagtatggcctgctgagcaatgagcccagcagcagcagcaccagcaggaaccacagctgcaccccagaccctgaggaggagagcaagtctgaggccagcttcagcgaggaggagacagagagcctgaaggccaaggccgaggcccccaagacagaagctgagcccaccaagaccaggacagagacccccatggcccagagcgacagccagctgttcaaccagctgctggtgacagagggcatgaccctgcccacagagatgaaggaggccgccagcgagatggcccgggccctgcggggccctggccccaggagcagcctggaccagcacgtggccgctgtggtggccaccgtgcagatcagcagcctggacaccaacctgcagctgagcggcctgagcgccctgagccaggccgtggaggaggtgacagagcgggaccaccccctggtgcggccagacaggagcctgcgggagaagctggtgaagatgctggtggagctgctgaccaaccaggtgggggagaagatggtggtggtgcaggccctgcggctgctgtacctgctgatgaccaagcatgagtggaggcccctgtttgcccgggagggcggcatctatgctgtgctggtgtgcatgcaggagtacaagacctctgtgctggtgcagcaggccggcctggccgccctgaagatgctggccgtggccagcagcagcgagatccccacctttgtgacaggccgggacagcatccacagcctgtttgatgcccagatgacccgggagatctttgccagcattgattctgccaccaggcctggcagcgagagcctgctgctgactgtgcctgctgctgtgatcctgatgctgaacacagagggctgcagcagcgctgccagaaatggcctgctgctgctgaacctgctgctgtgcaaccaccacaccctgggggaccagatcatcacccaggagctgcgggacaccctcttccgccacagcggcatcgcccccaggacagagcccatgcccaccaccaggaccatcctgatgatgctgctgaaccgctacagcgagcccccaggcagccctgagcgggccgccctggagacccccatcatccagggccaggacggcagccctgagctgctgatccgcagcctggtgggcggccccagcgctgagctgctgctggacctggagcgggtgctgtgccgggagggcagccctggaggagctgtgcggcccctgctgaagaggctgcagcaggagacccagcccttcctgctgctgctgcggaccctggatgcccctggccccaacaagaccctgctgctgtctgtgctgcgggtcatcacccggctgctggacttccctgaggccatggtgctgccctggcatgaggtgctggagccctgcctgaactgcctgagcggccccagcagtgacagcgagatcgtgcaggagctgacctgcttcctgcaccggctggcctccatgcacaaggactatgctgtggtgctgtgctgcctgggcgccaaggagatcctgagcaaggtgctggacaagcacagcgcccagctgctgctgggctgtgagctgcgggacctggtgacagaatgtgagaagtatgcccagctgtacagcaacctgaccagcagcatcctggccggctgcatccagatggtgctgggccagatcgaggaccacaggaggacccaccagcccatcaacatccccttctttgatgtgttcctgcggcacctgtgccagggcagctctgtggaggtgaaggaggacaagtgctgggagaaggtggaggtgagcagcaacccccaccgggccagcaagctgacagaccacaaccccaagacctactgggagagcaatggcagcacaggcagccactacatcaccctgcacatgcaccggggcgtgctggtgcggcagctgaccctgctggtggccagcgaggacagcagctacatgcctgcccgggtggtggtgtttggaggagacagcaccagctgcattggaacagagctgaacacagtgaatgtgatgcccagcgccagcagggtcatcctgctggagaacctgaaccgcttctggcccatcatccagatccgcatcaagcgctgccagcagggcggcatcgacaccagggtgcggggcgtggaggtgctgggccccaagcccaccttctggcccctcttccgggagcagctgtgcaggaggacctgcctcttctacaccatccgggcccaggcctggagccgggacattgctgaggaccaccggcggctgctgcagctgtgcccccggctgaacagagtgctgcggcatgagcagaactttgctgaccgcttcctgcctgatgatgaagctgcccaggccctgggcaagacctgctgggaggccctggtgagccccctggtgcagaacatcaccagcccagatgctgagggcgtgtctgccctgggctggctgctggaccagtacctggagcagcgggagaccagcaggaaccccctgagcagagctgccagctttgccagccgggtgcggcggctgtgccacctgctggtgcacgtggagcccccacctggccccagccctgagcccagcacccggcccttcagcaagaacagcaagggccgggacaggagccctgcccccagccctgtgctgcccagcagcagcctgaggaacatcacccagtgctggctgtctgtggtgcaggagcaggtgagccgcttcctggccgccgcctggagggccccagactttgtgccccgctactgcaagctgtatgagcacctgcagagagctggcagcgagctgtttggcccccgggccgccttcatgctggccctgcggagcggcttcagcggggccctgctgcagcagagcttcctgacagctgcccacatgtctgagcagtttgcccgctacatcgaccagcagatccagggcggcctcatcggcggggcccctggggtggagatgctgggccagctgcagaggcacctggagcccatcatggtgctgagcggcctggagctggccaccacctttgagcacttctaccagcactacatggctgaccggctgctgagctttggcagctcctggctggagggcgctgtgctggagcagatcggcctgtgcttccccaaccggctgccccagctgatgctgcagagcctgagcaccagcgaggagctgcagaggcagttccacctgttccagctgcagaggctggacaagctgttcctggagcaggaggatgaggaggagaagaggctggaggaggaggaggaggaggaggaggaggaggaggccgagaaggagctgttcatcgaggaccccagccctgccatcagcatcctggtgctgagcccccgctgctggcctgtgagccccctgtgctacctgtaccaccccaggaagtgcctgcccacagagttctgtgatgccctggaccgcttcagcagcttctacagccagagccagaaccaccctgtgctggacatgggcccccaccggcggctgcagtggacctggctgggccgggcagagctgcagtttgggaagcagatcctgcacgtgtccacagtgcagatgtggctgctgctgaagttcaaccagacagaggaggtgtctgtggagaccctgctgaaggacagcgacctgagccctgagctgctgctgcaggccctggtgcccctgaccagcggaaatggccccctgaccctgcacgagggccaggacttcccccacggcggcgtgctgcggctgcacgagcccggcccccagaggtctggagaggccctgtggctgatccccccccaggcctacctgaatgtggagaaggatgagggccgcaccctggagcagaagaggaacctgctgagctgcctgctggtgcgcatcctgaaggcccatggagagaagggcctgcacatcgaccagctggtgtgcctggtgctggaggcctggcagaagggccccaaccccccaggcaccctgggccacacagtggccggcggcgtggcctgcaccagcacagatgtgctgagctgcatcctgcacctgctgggccagggctacgtgaagagaagagatgaccggccccagatcctgatgtatgctgcccctgagcccatgggcccctgccggggccaggctgatgtgcccttctgtggcagccagagcgagaccagcaagcccagccctgaggccgtggccaccctggccagcctgcagctgcctgctggccgcaccatgagcccccaggaggtggagggcctgatgaagcagacagtgcggcaggtgcaggagaccctgaacctggagccagatgtggcccagcacctgctggcccacagccactggggcgctgagcagctgctgcagagctacagcgaggaccctgagcccctgctgctggccgccggcctgtgtgtgcaccaggcccaggccgtgcctgtgcggccagaccactgccctgtgtgtgtgagccccctgggctgtgatgatgacctgcccagcctgtgctgcatgcactactgctgcaagagctgctggaatgagtacctgaccaccagaattgagcagaacctggtgctgaactgcacctgccccatcgctgactgcccagcccagcccactggagccttcatccgggccatcgtgagcagccctgaggtgatcagcaaatatgagaaggccctgctgcggggctacgtggagagctgcagcaacctgacctggtgcaccaacccccagggctgtgaccgcatcctgtgccggcagggcctgggctgcggcaccacctgcagcaaatgtggctgggccagctgcttcaactgcagcttccctgaggcccactacccagccagctgtggccacatgagccagtgggtggatgatggcggctactatgatggcatgtctgtggaggcccagagcaagcacctggccaagctgatcagcaagcgctgccccagctgccaggcccccatcgagaagaatgaaggctgcctgcacatgacctgtgccaagtgcaaccacggcttctgctggcgctgcctgaagtcctggaagcccaaccacaaggactactacaactgcagcgccatggtgtccaaggccgcccggcaggagaagcgcttccaggactacaatgaacgctgcaccttccaccaccaggcccgggagtttgctgtgaacctgaggaacagagtgtctgccatccacgaggtgcccccacccaggagcttcaccttcctgaatgatgcctgccagggcctggagcaggccaggaaggtgctggcctatgcctgtgtgtacagcttctacagccaggatgctgagtacatggatgtggtggagcagcagacagagaacctggagctgcacaccaatgccctgcagatcctgctggaggagaccctgctgcgctgccgggacctggccagcagcctgcggctgctgcgggctgactgcctgagcacaggcatggagctgctgcggcgcatccaggagcggctgctggccatcctgcagcacagcgcccaggacttccgggtgggcctgcagagccccagcgtggaggcctgggaggccaagggccccaacatgcctggcagccagccccaggccagcagcggccctgaggccgaggaggaggaggaggatgatgaagatgatgtgcctgagtggcagcaggatgaatttgatgaggagctggacaatgacagcttctcctatgatgaaagtgagaacctggaccaggagaccttcttctttggagatgaggaggaggatgaagatgaggcctatgactag

SEQ ID NO: 184377 - DNA, 7554 bp, Artificial Sequence
  derived and/or modified sequence
atggtgggcgagcggcacgccggcgacctgatggtgcccctgggccctaggctgcaggcctatcctgaggaattaattagacagagacctggacacgacggacacccagagtacttgatccgctggagtgtactgaaatgtggtgaggtgggtaaagtgggcgttgaggagggaaaggcagaacacatccttatgtggttgtctgctcctgaagtgtacgctaattgccctggtcttctaggggagcgcgcccttagcaagggactgcagcatgagccagctggcgtatctggctccttcccacgggatccaggcgggttggatgaagttgcaatgggagagatggaagccgatgttcaagccctcgttaggcgcgcagccaggcagttagccgaatctggcacgccatccctgactgccgctgttttacatactatccatgtgctcagtgcctacgccagcattggccccctcacgggtgtgtttcgcgaaactggggcgctcgatttactcatgcacatgctgtgtaatcccgagccacagatccgacgaagcgcgggaaaaatgctccaagctctggccgcccatgacgctggtagcagggcccacgtgcttttgagtttgagtcagcaggacggtatcgagcagcacatggacttcgattcccgatatacgttgttggagctctttgccgagaccactagcagtgaagagcattgcatggccttcgaaggtatccatctgccgcagatccccggcaagcttctgttcagccttgttaagagatatctttgcgttaccagtctactggaccagctgaactcttcaccagagctcggagcaggagatcagagctccccttgcgcaaccagagagaaaagccgaggccagcgcgaattggagttctcgatggctgtgggaaacctgatttctgaactcgtgagatctatgggttgggcccgcaatcttagtgagcaaggaatgtcacccccacgccccacccgttccattttccagccctatataagcgggccgtcactgctgctccctactatcgtaaccactccgagaaggcaaggctgggttttccggcagaggtcagaattctcgagtagatccggatacggtgagtatgttcagcagactctccagcccggcatgagggtgcgaatgctggatgactatgaggagatttccgctggggatgaaggagagtttagacagtctaacaacggcatccccccagtccaggtcttctggcagtctactggccggacttattgggtgcactggcacatgctggagatcttgggccccgaggaggccactgaagataaggctagcgccgcggtggaaaagggtgccggagcaaccgtgctcggaacagcttttcctagttgggattggaatcctatggacggactctaccccttgccatacctccagcccgaaccgcagaagaacgagagggttggctacctcacacaggccgaatggtgggagctcctctttttcattaagaagctggacctgtgcgagcagcagccaatcttccaaaacctttggaagaatctggacgagacattgggggaaaaagctctgggggagatcagtgtcagcgtggagatggccgaatctctgctccaggtgctatcctcacggtttgaggggagcactcttaacgatctgcttaattcgcagatatacaccaagtacggcctacttagtaacgagccttcatcaagctctacttcaaggaaccattcatgcactcctgacccggaagaggagagcaagtcggaagccagtttcagcgaggaggagactgaatctctgaaagccaaagccgaagcaccaaagacagaggctgaacctactaaaactaggactgagacgcctatggcgcagtcagactcccaattattcaatcagctgttggtgaccgaaggcatgactcttccaacggagatgaaagaggcggcatccgaaatggccagggccctaagaggacccgggcccaggagttcattggaccagcacgtcgcagccgtcgtggcaactgtgcagattagttccctcgataccaatttgcagctgtctggattgtcagctctcagccaggccgtcgaggaggtcactgagcgtgatcatccacttgtccgcccagaccgctccctcagagagaagctggtgaagatgctcgttgaacttcttaccaaccaggttggggagaagatggtggtcgttcaggcactgcgtctgctttatttgctgatgaccaaacacgagtggcgcccgctgttcgccagggaaggaggaatctacgccgttctggtctgcatgcaagagtataaaacctccgtgcttgtgcagcaggccggactcgctgccctgaaaatgctggcagtggcctcatcatctgaaattcctacatttgtgactgggagagactcgattcactccttatttgacgctcagatgacacgcgaaatatttgcctctattgactctgcaacgcgacccggttctgaaagcttgctgctgacggtacctgccgccgttattctgatgctcaatacagaaggatgtagctctgccgcgcgtaatggtcttctccttctcaacctgctactctgcaaccaccatactctgggagatcagattatcacacaggagcttcgagataccctgttccggcattcaggaattgcaccaagaaccgaacccatgcctacaaccaggaccatcctcatgatgttgttgaaccgctacagtgaaccgccaggatcaccagagcgggccgccctggagactccgatcattcagggccaggacgggtcaccagaactactgattaggtccctggtgggcggtccgtcagctgaactgctgttggacctggagcgggtgctgtgcagggaagggagtccagggggagcggttcgccccctgcttaaaagactccaacaagagacccagccgttcctgctcctcctgcggactcttgatgcccccggccccaacaaaactctgctgctgtctgtgctccgcgtgatcacccgtctgttagacttccctgaggcaatggtgttaccctggcacgaagtcctagagccttgccttaactgtttaagtggcccttcttccgactctgagattgttcaggagctgacatgtttcttgcatcggctcgcaagtatgcataaagactacgccgtagtcctatgctgcctgggagcaaaagagatcctgtccaaagttttagacaaacactcagcacaactgctgttaggctgcgagctcagagatctggtgactgagtgtgagaagtatgcccagttatattccaacttgacatccagcatacttgccggatgtatccagatggttttaggacaaattgaggatcaccggcgcacgcatcagcccatcaatatcccttttttcgacgtgtttctgagacacctctgccagggaagtagcgtcgaagtgaaggaggacaagtgctgggaaaaagttgaggtgagctcaaatcctcaccgtgcatctaagctgacggaccataatcccaagacatactgggaatcgaatggctctactggttcccactatatcaccctccatatgcatcggggcgttttggtccgccagctcacccttcttgtcgccagtgaagactcttcctacatgccagcaagagtggtcgtattcgggggagacagtacgtcatgcataggtaccgagctgaacactgtcaacgtaatgccatctgctagcagggttattctgctggagaacctcaaccggttttggccaatcattcagatcaggattaagagatgccagcagggcggcatagacacaagagtacgcggggtggaagtccttggaccgaagcccaccttttggcctctgtttcgggagcagttatgcaggcgtacatgcctcttctacacaataagggcccaggcatggtctcgcgacatcgctgaggatcacaggaggttgcttcagttgtgtcctcgtttgaaccgggtcctgcgccacgaacagaactttgccgacagattcctacccgatgatgaggccgcgcaggcacttggaaaaacttgttgggaagcactggttagtccattggtgcagaacatcaccagcccagacgctgaaggggtttccgcactgggctggctccttgaccagtatctcgagcagagggaaactagtcgtaatccgctgagtagagcagcctcctttgcctctcgcgtgagacgactgtgtcatctgctcgtgcacgtagaacccccaccgggtccgtccccagagccatccacacggcccttttcaaagaactccaaaggtcgcgatcgatcccccgccccctctcccgtgctgccctctagttcactcagaaacattacacagtgttggcttagtgtcgtccaggaacaagtgagccggtttcttgccgctgcttggagagcacccgattttgttccccgatactgcaagctttatgagcacttacaacgggcaggatccgagctgttcggacccagagcggccttcatgctcgcacttcgctctggattttccggggcacttcttcagcagtcttttctgacagcagcccacatgagtgagcagttcgcccgttatattgatcagcaaatacaaggtggactcattggaggagctccgggagtcgagatgcttggccagcttcaaaggcatttggagccaatcatggtcctgtcagggttagagctggccactactttcgagcatttctatcagcattacatggctgataggttacttagctttggcagttcatggctggagggagctgtgcttgaacagattggactgtgttttcctaatcgattacctcagctgatgctgcagtccctctcaacatctgaggaattgcagagacagttccacctgtttcagctgcagagactggataagctgtttcttgagcaggaggatgaagaggagaagcgcctcgaggaagaggaggaagaagaggaggaggaagaggctgagaaggagctgttcattgaggacccgtcacctgccatatctattctggttctcagccccagatgctggcctgtgtcccccctgtgctatctctatcacccccgcaagtgcctgccgactgagttctgtgacgccctggaccggtttagcagcttctactcacagtcacagaatcacccagtcctggatatgggaccgcaccgtagactgcagtggacttggttgggccgtgccgaactccagttcggcaaacagattctccacgtgagcaccgtgcagatgtggctgctcctgaagtttaaccagactgaagaggtgagtgtcgaaacgctgcttaaggacagcgatctgtctcccgaactccttctacaggctctggtgcccttaacctccggaaatggcccgctcacccttcacgagggccaggactttccccatgggggcgtgctgcggctgcatgaaccagggccccaacgcagcggggaagccttgtggctgattccccctcaggcatacctgaatgtggagaaggacgagggtcgcacactggagcagaaaaggaacctgctgtcctgcctgcttgtgagaatcctgaaagcccacggagagaaggggctacacatcgaccagttagtgtgcttggtacttgaggcatggcagaaaggacctaacccacctggcacacttggacatactgtggccgggggagttgcctgcacatcgactgacgtgttgtcatgcattcttcaccttttaggtcaggggtacgttaagagacgcgatgataggccccagatactaatgtacgcagccccagagcccatggggccatgtcggggtcaagccgacgtgcccttttgcggttcgcagagcgagacctccaaaccatcaccggaagccgtggctacactggcttcgctgcagctgccagccgggcgcacgatgtccccgcaggaggtggagggattaatgaaacaaactgtgcggcaggttcaagagactctaaatctggaacccgatgtggcccagcatctgttggcccacagtcactggggagctgagcagttactgcaaagctattctgaggatcccgaaccacttctgcttgcggctggcctgtgtgtgcaccaagcccaggccgtcccagtgcgcccggaccattgtccagtgtgcgtctcacctctgggctgcgacgacgatctcccgtccctgtgttgtatgcattactgttgtaagtcttgttggaacgagtatttaaccaccagaatcgaacagaatctggtgctgaattgcacttgtcctatcgccgattgcccggctcagccaacaggtgcctttattagagctatcgtctctagccccgaggtgatatctaaatatgagaaagctctgctcagaggctacgtggagtcatgctctaatttgacttggtgcactaacccgcaaggatgtgatagaatcctgtgccgccagggacttggctgcggcaccacttgttcaaagtgcgggtgggctagttgttttaactgtagtttccccgaagcacactatccagccagctgtggacatatgtcccagtgggttgacgacggaggatactacgacgggatgagcgtggaggctcaaagcaaacacctagccaaattaatcagcaaaagatgtccaagctgccaagctccaattgagaaaaatgaagggtgcttgcacatgacatgcgctaaatgtaatcatggcttttgctggagatgtctcaaaagctggaaacccaaccacaaagactactacaattgcagcgccatggtgagcaaggccgcccggcaggaaaaaagattccaggattacaatgaacgctgcacttttcatcaccaggcccgtgagttcgcagtgaacttacgcaatcgggtatccgccatccatgaggtgccccctcctagaagttttacttttcttaacgacgcatgccaaggtctcgagcaggctagaaaggtgcttgcatacgcctgtgtatacagcttctactcccaggacgccgaatacatggatgtggtcgaacagcaaacagagaatctcgagttacacactaacgctcttcagattctgctagaggaaaccctactgcggtgtagagacctggcctcttccctgaggcttcttcgcgccgattgtctcagtaccggaatggaactattgcgaagaattcaggaacgactcttggccatccttcagcactcggcacaggacttcagggttgggctgcagagtccatccgtggaggcctgggaagcaaaaggcccgaacatgccaggtagtcaacctcaggcatctagcggacccgaagctgaggaggaagaagaggacgacgaggacgatgtaccggagtggcagcaggatgaattcgacgaggaactagataacgacagctttagttacgatgagtcagagaacctggaccaagagacctttttcttcggtgacgaagaggaggatgaagacgaagcctacgactag

SEQ ID NO: 184378 - DNA, 7554 bp, Artificial Sequence
  derived and/or modified sequence
atggtgggcgagaggcatgccggtgacttgatggtgcctctgggcccaaggttgcaagcctaccccgaagagcttattcggcagaggcccggacacgatggtcatcctgaatatttgatacgctggtccgttttgaagtgcggggaggtagggaaggttggcgtggaagaaggtaaggctgaacacattcttatgtggctgagcgccccagaggtttatgccaactgccctgggttgttaggtgagcgtgctttgtcaaaggggttgcaacacgaacctgccggagtgagcggctccttccccagagatcccggtgggcttgatgaggtggctatgggtgagatggaagccgacgtgcaggcactggttagacgcgctgcacgccagctagcagagagcgggaccccttccctgaccgcggctgttctccacacaatccacgtgctgagtgcatacgcctccatcgggccactgaccggagttttcagggagacaggcgcactggacttgctgatgcatatgctctgtaatcccgaaccgcagataagacgctctgccggaaagatgttgcaagccctcgccgctcacgacgccggtagccgtgctcatgtgttactgtctctgagtcagcaggacggcatcgagcaacatatggactttgacagtaggtacactttgctggagctattcgcagagacgacgagctccgaggagcattgcatggctttcgagggcatccacctgccgcaaattcccggtaagctgttgttctctctggtcaaacggtacctttgtgtgacttccctacttgatcagctcaatagctccccagagctgggagccggagaccagtcctcgccatgcgcaacacgtgagaaaagcagaggacagcgtgaattggagttttcaatggccgtcggcaatctgatttcagagctcgtgagaagtatgggctgggccagaaatctgtccgagcagggtatgtctcctcccagaccgacacggtccatttttcaaccttacattagtggcccatctctactccttccgaccatcgtaaccacgccccgtagacaaggatgggtgttccggcagcggagtgagtttagctctaggtccggctacggggagtacgtacagcagaccctgcagcctggtatgcgagtaagaatgcttgatgactacgaagagatcagcgccggagatgagggagaattccgccagagtaacaatggcatcccgccagtccaggtcttctggcagtcaaccggacgtacttactgggtgcattggcatatgcttgaaatcctgggaccggaggaggccactgaggacaaggcaagcgccgcagtcgagaagggcgcaggcgcaaccgtgctcggaacagcctttccctcatgggattggaaccctatggacgggttgtatccattaccttacctgcagccagagcctcagaagaatgagagggttggatacctcacacaggctgagtggtgggagctgctgtttttcattaaaaaactggacttatgcgaacaacagcccatttttcaaaacctgtggaaaaatctggatgagactctcggcgagaaggcactcggggagatctccgtttctgtggaaatggctgaaagtttactccaggtgctctcatctaggtttgagggctccacgctcaacgatctcctcaactcccagatttataccaagtacggtcttttatctaacgaaccgtcctcctcttcaacctctcgtaatcattcctgcacacccgatcctgaagaagagtccaaatctgaagcctcattttctgaggaggagacagagtcacttaaagccaaggccgaggccccaaagaccgaggctgaaccaaccaagacccgaactgaaaccccaatggctcagagcgactctcaactcttcaatcagttgctagtgacggaaggtatgacactccctacagaaatgaaagaggccgcatcggagatggctcgggctctgcgtggccctggcccacgaagttctttggaccagcacgtggccgctgtggtggctacagttcaaatttcgtccctggacacaaatctccagctgtctgggctgtccgcgctttcccaggccgtagaagaggtgaccgaaagagaccaccctttggtccgtcccgaccggtcactgcgtgaaaagctggtcaagatgcttgtcgagcttctgaccaaccaagtgggcgagaaaatggtggttgtgcaggctctgagactgctttaccttcttatgactaaacatgaatggcgccctctgtttgccagagagggaggtatatatgcagtgttggtgtgcatgcaagagtacaaaacatccgtgcttgtccaacaggcagggctagctgctctcaaaatgttagccgtggcctcctcgagtgagatccctacattcgtgacgggtcgcgactcaatccacagtctctttgatgcacaaatgacccgggaaatcttcgcatccatcgatagtgcaacaagaccgggttccgagagcttacttctgaccgtgccagcggctgtaatcctgatgttgaacaccgaagggtgctcttccgccgcacgaaatggtctcctcctgcttaacctgctgctgtgtaaccaccatacacttggggatcagataatcacccaggaactgcgagatacactctttcgccactcaggaatcgcacctcgcaccgaacccatgcccacaacaaggacaatccttatgatgcttcttaaccgatattctgaacctcccggttctcccgagagagccgcacttgagaccccaatcatccagggtcaagacgggagccccgaacttcttatcagatccctggtggggggtccaagtgcagagctgctcctggaccttgagagagttttatgccgggagggcagcccaggcggagcggttcgtcctctgctaaaacgtctgcagcaggaaacgcagccttttttgttgctgttgcgtacactggacgctccaggtccaaataagactctgctgcttagcgtgcttcgagtaattacacggctcctcgactttcccgaggccatggtcttgccgtggcatgaagttctcgagccttgcctgaactgcctctccggccctagcagtgactccgagatcgttcaggagctgacctgcttcctgcaccgccttgctagtatgcacaaggactacgcggtggtgttatgctgcttgggtgctaaggaaatcctgtcgaaggtgctggacaaacattcggcacaactcctcctgggatgtgaactcagagatttagtcaccgagtgtgagaagtacgcacagctttattctaatctcacgtcaagcatcttggctgggtgtatccagatggtgttgggacagatcgaggaccatagaagaacccatcagcccatcaacatacctttctttgacgtgtttttacgccatttgtgccagggaagctctgtcgaagtgaaggaagacaaatgctgggagaaggtggaagtgagctcaaatccccatcgcgcttcgaaactgaccgatcacaaccccaagacctactgggagtccaatggaagcacaggctcgcactacattaccctacacatgcaccggggagttctggtgaggcaactgactcttctggtcgcctctgaagactcctcttacatgcctgcccgagtggtggtcttcggaggtgatagcacatcgtgcattggcaccgaattgaacacagtgaacgtcatgccttcggcatcaagggtcatacttctggaaaatctgaaccgcttctggcctataatccagatcaggattaaaagatgccagcagggcggtatagatacgcgcgtcagaggagtggaagttcttggtccaaagcctacattttggcccctgtttcgtgaacagttgtgccgcaggacctgtctcttctatactatccgggctcaggcatggtcccgagatattgcagaagaccaccgacgcttactgcaactgtgtccgagacttaatcgtgtgctgagacacgaacagaatttcgccgaccggtttttacccgacgatgaggccgcacaggcattgggtaaaacctgttgggaagctcttgtgtccccactcgttcagaacatcacttcccccgacgccgagggtgtgtcggctttaggatggttattggaccagtacctggagcaacgggagacaagtcggaatcccctctctagagctgccagttttgcctcccgcgtacggaggctctgtcatctgttggtccacgtggagccaccccctggaccctcgcccgaaccttccacaagaccattctcaaaaaattcaaaggggagagatcgttccccagcccctagccccgtactgcctagcagttccctgcgtaatattacccagtgttggctgagcgtggtgcaggaacaggtatctcgcttcctagccgcagcttggagggccccagatttcgtgcctagatattgcaagttgtatgaacaccttcagcgcgctgggagtgagctgttcggacctagggccgcttttatgctggcccttcggtccggcttttctggagctctcctacagcagagcttcctgactgccgctcatatgtccgaacagtttgccagatacattgatcagcaaatccaggggggactgatcggaggcgcaccgggtgtcgaaatgctagggcagctgcaaaggcatctggaacctatcatggtcctctcaggattggagctggcgacaaccttcgaacacttttaccagcattatatggccgaccgtcttctgtcttttgggagcagttggctcgagggcgcagttttagaacagatcggtctgtgtttccccaatagacttccgcaattgatgctgcagagcctgtccacctcagaggaactccagcgtcaatttcaccttttccaattgcaacgtcttgataaactcttccttgagcaggaggacgaagaggagaaacgtctggaggaagaggaggaagaggaggaagaggaggaggcagaaaaggagctgtttatcgaggatccctcccccgcaatcagtatattggttctgtcccccaggtgttggccagtcagtcccctgtgttatctttaccacccaaggaagtgcttgcctaccgagttttgtgacgcattggatcgtttttcaagcttctacagtcagtctcagaatcacccagtgcttgatatgggaccacaccgtcggcttcagtggacttggctcggtcgcgcagagctgcagtttggaaagcagattctccacgtctctactgtccagatgtggctgctcctgaaattcaaccagactgaagaggtaagcgtggagaccctgctcaaagacagcgacctgtctcctgagttacttctccaggccctggtaccacttacaagcggaaacggccctctcacgttacacgaggggcaagatttcccacacggaggcgtcctaaggttgcacgagcccggacctcagcgcagtggggaggccctatggctgatcccaccacaggcatacctgaatgtcgagaaggacgagggaaggacgctggagcaaaagcgtaatctgctgagttgtctactggtcagaattttgaaagcccatggtgagaaaggcctccacattgaccaacttgtgtgccttgttctggaggcctggcagaaagggcctaacccacccggtacgctcggccatacggtggccggtggcgtagcctgcacgagtaccgatgtgctgtcatgcatactgcacctcctcggccagggatatgtcaagcggcgtgacgaccgccctcagatccttatgtacgctgctcctgagccgatggggccttgtaggggacaagccgatgtgcccttctgcggttcccagagcgagacatcaaagccttcccctgaagccgttgccaccctggctagccttcagctgcccgcaggtagaactatgtcgccccaggaggttgaaggactgatgaagcagaccgtaaggcaagtgcaagagacactgaacttagagcctgacgtcgcccaacatctgctagcccactcccactggggtgccgagcagttgctgcagtcgtactctgaggatcccgaacctcttctacttgccgcagggttgtgtgtgcatcaggcccaagccgttcccgtacgtcctgaccactgtcctgtttgcgtgagcccactgggctgtgacgacgatctcccaagcttgtgttgcatgcattattgctgtaagtcctgttggaacgagtatttaacgactagaatcgaacagaacctcgtcctgaactgtacttgccccatcgcggattgcccggcacagcccacaggcgctttcatccgtgccatagtgagcagccctgaggtaatctcgaagtacgaaaaggccctcctgagaggatatgtggagtcatgttcaaatttgacatggtgtaccaatccacagggctgtgatcgcatcctgtgccgtcaaggactcgggtgcggaactacatgtagtaaatgcggctgggcatcatgctttaactgttcttttcccgaagcccactatcccgcatcatgtgggcacatgtcccagtgggtagatgacggaggttattatgacggaatgtcagtggaagcacagagcaagcacctggcaaagcttatttcaaagcggtgcccctcctgccaggccccaatagaaaagaacgaaggttgtctgcacatgacctgcgctaagtgcaaccatgggttctgttggagatgcctgaagagctggaagcccaaccataaggactactacaattgctcggccatggttagcaaagccgctcgacaggaaaagcgctttcaggattataacgagagatgcacattccaccatcaggcccgagagttcgccgttaatcttcggaaccgcgtgtccgctatacatgaggttccgccacccagatctttcactttcttgaacgacgcttgccagggactagagcaggcacgcaaagtgctggcttatgcctgtgtgtactccttctatagtcaggacgcagaatacatggacgtggtggaacagcagactgaaaatctcgaactgcacacgaatgcgcttcagatactgttggaagagacactactgcggtgtagagatctcgcctcctccctgcgcttgctgcgggctgactgtctttccactggcatggaactgctgcggcgtatccaggaacgcctgttggctattctgcagcatagcgcacaggatttccgggtcggcctacaatctcctagcgtggaagcctgggaggcaaagggtccgaatatgcctggtagtcagccgcaggcaagcagcgggccagaggccgaggaagaagaggaggacgacgaggacgatgtccccgaatggcaacaggatgaattcgatgaagagctcgataacgacagcttctcatacgacgaaagcgagaacctggatcaggagactttctttttcggagatgaggaagaggacgaggatgaagcctacgactat

SEQ ID NO: 184379 - DNA, 7780 bp, Artificial Sequence
  derived and/or modified sequence
agctctgaggaggcggggccaggacggcgggaccggccgctgggtcccagcgagggctgagccgggcggtgggaggaggtcaggatggtgggggaacggcatgctggggacctcatggtgcccttagggcctcggctgcaggcatatcctgaagaactcattcgacagaggcctgggcatgacgggcatcctgaatacctgatccgatggagtgtcctgaagtgtggggaagtgggcaaagtgggtgtggaagaaggcaaagcagagcacatcctcatgtggctgtcggctcctgaggtctacgccaactgccctgggctgttaggtgagcgggcactatctaagggacttcagcacgaaccagctggggtttcaggaagctttcctcgagatccaggaggcctggatgaagtggcaatgggagagatggaggctgatgttcaggcgctggtacgcagggcggccaggcagctggcagaaagtgggaccccaagcctcacggccgctgtgcttcacaccatccacgtgctcagtgcctacgccagcatcgggcccctcactggtgtcttcagggagacaggagccctggacctgctcatgcacatgttatgcaatcctgagcctcagatccgccggagtgcaggcaaaatgctgcaggctctggcagcccacgatgctgggagtcgggctcacgtccttctatcactgagccagcaagatggcatcgagcagcacatggattttgacagtcgctatacattgctggagctgtttgcagaaaccacatcctctgaagaacactgcatggcctttgagggcattcatctgcctcagatcccaggaaagctgcttttctccttggtgaagcgctacctttgtgtcacgtccctcctggatcagctgaatagcagtccagagctgggagctggagaccaaagctccccatgtgccacaagagagaaaagccggggacagcgggaactggagttcagcatggctgtgggcaacctcatctctgagcttgtgcggagcatgggctgggcccggaacctcagcgaacagggcatgtcacctccccggccaacccggtccatctttcagccctacatttcaggccccagccttttactccccaccattgtcaccacccccagaagacaagggtgggtcttccgccagcgctctgaattctccagccgtagtggctatggagaatatgtgcagcagacactccagccagggatgcgagtgcggatgctggatgattatgaggagatcagtgctggggacgagggcgagttccggcagagcaacaacggcattccccctgtgcaggttttctggcagtcgacaggccgcacttactgggtgcactggcacatgctggagatcctgggccctgaggaagccactgaggataaggcttcagcagctgtggagaagggggcaggggctactgtgttgggcacagcatttccctcctgggactggaatcctatggatgggctgtaccctttgccgtacctccagcccgaacctcagaagaatgagagagtgggatatctgacccaggctgaatggtgggagctgcttttctttatcaaaaagttggacttgtgtgagcagcagccaattttccagaatctttggaagaacctggatgagaccctgggtgaaaaggccctaggtgagatctctgtgtccgtggaaatggccgagagtctgctgcaggttctcagtagtcgatttgagggcagcactctcaatgacctgctcaactcccagatctacaccaagtatgggctgctgtctaatgaaccaagcagctcgtctacttcacgaaatcactcctgtaccccagatccagaagaggagtccaagtcggaggccagcttctcagaggaagagactgagtccctcaaagcaaaggccgaggcccctaagacagaggccgagcccaccaagacaaggaccgagacccccatggcacagagtgattctcagctgtttaaccagcttctggtgactgaggggatgaccctgcccactgagatgaaggaggcagccagtgaaatggccagagccttgcggggtcccggtcctcgcagctccctggatcagcatgtggcagcggtcgtggccactgtgcagatatccagcttggacacaaacctgcagctttcagggctctctgccctctctcaggctgtggaggaggtcactgagcgggaccaccctctggtccgtcctgacagatcgctgagagagaagctagtgaagatgctggtggagctgctgaccaaccaggtgggagagaagatggtggtcgtgcaggccctgcgcctcctttacctgctcatgaccaagcacgagtggcggccgctctttgccagggagggtggcatctatgctgtgctggtctgcatgcaagaatataagacttctgtcttggtgcagcaggctgggctggcggcactgaagatgctggccgtcgccagctcctcggagatccccacttttgttactggccgagattctatccactctttgtttgatgctcagatgaccagagagatcttcgccagcatcgactcagccacacgcccgggctctgagagcctgctcctcactgtccctgcagccgtgatcctgatgctgaatactgaggggtgctcttctgcagcgagaaatggcttactcctgctcaacctacttttgtgcaaccaccacactctgggagaccagattataacccaagagctgagagacacgttgtttaggcactcagggatagcaccaagaacagaacctatgcctaccacacgcaccatcctcatgatgcttctcaatcgctactcagagccgccgggcagccctgagcgtgcagcactagagacccccatcatccagggtcaggatgggtcccctgagctactgattcgatccctggttgggggcccatctgcagaactactcctggacttggagcgtgtgctgtgccgtgagggcagccccggaggtgccgtgaggcccctcctcaagcgcctccagcaggagacccagcctttcctcctgttgctgcggactctggatgctccggggcccaacaagactctgctgctgtctgtgctgagggtcataacccgactgctggatttccctgaggcaatggtcctcccctggcacgaggtcttggagccctgcctcaactgcctgagtggccctagcagtgactccgagattgttcaggagctgacctgcttcctacatcgcctggcctcgatgcataaggactatgctgtggtgctctgctgcctgggagcaaaagagatcctctccaaagtcctggacaagcactcagctcagctgctgctgggctgtgagcttcgggacctggtgacagagtgtgagaagtacgcacagctctatagcaacctcacctccagcatcctggccggctgcattcagatggtgctgggccagatcgaagaccacagacgaacccaccaacccatcaatatccccttctttgatgtgttcctcaggcatctctgccagggctccagtgtggaagtgaaggaggacaagtgctgggagaaggtggaggtgtcctccaacccgcaccgagccagcaagctgacggaccacaaccccaagacctactgggagtccaacggcagcaccggctcccactacatcaccctgcacatgcaccgtggtgttcttgttaggcagctcactttgctggtggccagtgaggactcaagctacatgccagccagggtggtggtgtttgggggtgacagcaccagctgcatcggcactgagctcaacacggtgaatgtgatgccctctgccagccgggtgatcctcttggagaacctgaaccgcttctggcccatcatccagatccgcataaagcgctgccagcagggcggcattgacacccgggttcggggtgtggaggtcctgggccctaagcccacattctggccactgttccgggagcagctgtgtcgccgaacatgtctcttctacacaattcgggcacaagcctggagccgggacatagcagaggaccaccggcgcctcctccagctctgtcccagactgaacagggttttgcgccacgagcagaattttgctgaccgcttcctccctgatgatgaggccgcccaggcactgggcaagacctgctgggaggccctggtcagccccctggtgcagaacatcacctctcccgatgcggaaggcgtgagtgccctgggatggctgctggatcagtacttagaacagagagagacctctcggaaccccttgagtcgagcagcgtcctttgcttctcgagttcgtcgcctttgccacttgctggtgcatgtggaacctcctcctgggccttctcctgagccatccactcggcccttcagcaagaacagcaagggtcgggaccggagcccggcgccttcgccagtgcttccaagcagcagcctgaggaacataacccagtgctggctgagcgtggtgcaggagcaggtcagcagattcctggctgcagcttggagggccccagactttgtgcctcgttactgtaaactctatgagcacttgcagagagcaggctccgagctgtttgggcctcgggcagccttcatgctggctctgcgcagtggcttctctggcgccttgctgcagcagtccttcctcactgctgctcacatgagtgagcagtttgccaggtacattgaccaacagatccagggtggcctgattggtggagcccctggagtggaaatgctggggcagcttcagcggcacctggaacccattatggtcctttctggtctggaactggccacaacttttgagcacttctatcagcattatatggcggaccgtctcctgagctttggttcgagctggctggagggggctgtgctagagcagattggcctctgttttcccaaccgcctcccacagctgatgctgcagagcctgagcacctctgaggagctgcagcgccagttccacctcttccagctccagcggctcgacaagttgttcttggagcaggaagatgaggaggaaaagagactagaggaagaggaggaggaagaggaggaagaggaagctgagaaagaattatttatcgaagatccaagtccagccatttctatactggtcctgtcaccacgctgctggcccgtctccccactctgctacctgtaccatcccagaaagtgccttcccacagaattctgtgatgcccttgaccgtttctccagtttctacagccagagtcagaaccatccagtcctggacatgggaccacatcggcgactgcagtggacgtggctgggccgggctgagctgcagtttgggaagcagatactgcatgtgtccaccgtgcagatgtggctgctgctgaaattcaatcagacagaggaggtgtcagtagagaccttgctgaaggattctgacctctccccagagctgctgctccaggcactcgtgcccctcacctcagggaatggccctttgaccctgcatgagggccaggactttccacacgggggtgtgctgcggcttcatgagcctgggccccagcgcagtggggaggccctgtggctgatacctccccaggcatacctgaacgtagagaaggatgaaggccgaaccctggaacagaagaggaatctcttgagctgtcttcttgttcgtattctcaaagcccatggggaaaagggcctccacattgatcagctggtttgtctggtgctggaggcctggcagaagggtccaaatcctcctggaaccctgggccacactgttgctgggggtgtggcctgtaccagtacagatgtcctctcttgcatcctgcacctcttaggccagggctacgtgaaacggcgtgatgaccggccccagatcctgatgtatgccgctccagagcccatggggccctgccggggtcaggcagatgtccctttctgtggcagccagagcgaaacctccaagcccagcccagaagctgtggctaccctggcatctctacagctgcctgcaggccgcaccatgagcccccaggaagtagaagggttgatgaagcagacggtgcgtcaggtgcaggagacgctgaacttagagccagatgtcgctcagcaccttttggctcattcccactggggcgctgaacagctgctgcagagctacagtgaggaccctgagccactgctgctggcagctgggctgtgcgtacaccaggctcaggctgtacccgtacggcctgaccactgccccgtctgtgtgagccccctggggtgtgacgacgacctgccctctctctgctgcatgcactattgctgtaagtcttgctggaatgagtacctgacaactcggatcgagcagaaccttgttttgaattgcacctgccccattgccgactgccccgcccagcccaccggagccttcattcgtgccatcgtctcctcgccagaggtcatctccaagtatgagaaggcgctcctgcgtggctatgtggagagctgctccaacctgacctggtgcaccaacccccagggctgcgaccgcatcctgtgccgccagggcctgggctgtgggaccacctgctccaagtgtggctgggcctcttgcttcaactgtagcttccctgaggcacactaccctgctagctgtggccatatgtctcagtgggtcgacgacggtggctactatgacggcatgagcgtggaggcgcagagcaagcacctggccaagctcatctccaagcgctgtcccagctgtcaggctcccatcgagaagaacgaggggtgcctgcacatgacctgtgccaaatgtaaccatggattctgctggcgctgcctcaagtcctggaagccaaatcacaaagactattacaactgctctgccatggtaagcaaggcagctcgccaggagaagcggtttcaggactataatgagaggtgcactttccatcaccaggcgcgggagtttgctgtgaacttgcggaaccgggtgtctgccatccatgaagtgcccccgcccagatccttcaccttcctcaatgatgcctgccagggactggagcaggctcggaaggtgctggcctacgcctgcgtgtacagcttctacagccaggacgcagagtacatggatgtggtggagcagcagacagagaacctggagctgcacaccaatgccctgcagatcctcctggaggaaaccctgctgcggtgcagagacctggcctcctccctgcgcctcctgcgggccgactgcctcagcacgggcatggagctgctccggcggatccaggagaggctgcttgccatcctgcagcattctgcccaggatttccgggttggtcttcagagtccatcagtagaggcctgggaggcaaaaggacccaacatgcctggcagtcagccccaggcctcctcagggccagaggcagaagaggaggaggaagacgatgaggatgatgtgcccgagtggcagcaggatgagtttgatgaggagctggacaatgacagcttctcctacgatgagtctgagaacctggaccaagagactttcttctttggtgatgaggaagaggatgaagatgaggcctatgactgagggggcagatgcaggaaacacctagagcagccccagagtcacggggctgagggggcgggagctgcccctgtcatagggagggggattcccagcgtctgtagtgcttcctgtttgctgaataaaggtctctttctcacacaca

SEQ ID NO: 184380 - DNA, 7554 bp, Artificial Sequence
  derived and/or modified sequence
atggtgggcgagagacacgccggcgacctgatggtgcccctgggccccagactgcaggcctaccccgaggagctgatcagacagagacccggccacgacggccaccccgagtacctgatcagatggagcgtgctgaagtgcggcgaggtgggcaaggtgggcgtggaggagggcaaggccgagcacatcctgatgtggctgagcgcccccgaggtgtacgccaactgccccggcctgctgggcgagagagccctgagcaagggcctgcagcacgagcccgccggcgtgagcggcagcttccccagagaccccggcggcctggacgaggtggccatgggcgagatggaggccgacgtgcaggccctggtgagaagagccgccagacagctggccgagagcggcacccccagcctgaccgccgccgtgctgcacaccatccacgtgctgagcgcctacgccagcatcggccccctgaccggcgtgttcagagagaccggcgccctggacctgctgatgcacatgctgtgcaaccccgagccccagatcagaagaagcgccggcaagatgctgcaggccctggccgcccacgacgccggcagcagagcccacgtgctgctgagcctgagccagcaggacggcatcgagcagcacatggacttcgacagcagatacaccctgctggagctgttcgccgagaccaccagcagcgaggagcactgcatggccttcgagggcatccacctgccccagatccccggcaagctgctgttcagcctggtgaagagatacctgtgcgtgaccagcctgctggaccagctgaacagcagccccgagctgggcgccggcgaccagagcagcccctgcgccaccagagagaagagcagaggccagagagagctggagttcagcatggccgtgggcaacctgatcagcgagctggtgagaagcatgggctgggccagaaacctgagcgagcagggcatgagcccccccagacccaccagaagcatcttccagccctacatcagcggccccagcctgctgctgcccaccatcgtgaccacccccagaagacagggctgggtgttcagacagagaagcgagttcagcagcagaagcggctacggcgagtacgtgcagcagaccctgcagcccggcatgagagtgagaatgctggacgactacgaggagatcagcgccggcgacgagggcgagttcagacagagcaacaacggcatcccccccgtgcaggtgttctggcagagcaccggcagaacctactgggtgcactggcacatgctggagatcctgggccccgaggaggccaccgaggacaaggccagcgccgccgtggagaagggcgccggcgccaccgtgctgggcaccgccttccccagctgggactggaaccccatggacggcctgtaccccctgccctacctgcagcccgagccccagaagaacgagagagtgggctacctgacccaggccgagtggtgggagctgctgttcttcatcaagaagctggacctgtgcgagcagcagcccatcttccagaacctgtggaagaacctggacgagaccctgggcgagaaggccctgggcgagatcagcgtgagcgtggagatggccgagagcctgctgcaggtgctgagcagcagattcgagggcagcaccctgaacgacctgctgaacagccagatctacaccaagtacggcctgctgagcaacgagcccagcagcagcagcaccagcagaaaccacagctgcacccccgaccccgaggaggagagcaagagcgaggccagcttcagcgaggaggagaccgagagcctgaaggccaaggccgaggcccccaagaccgaggccgagcccaccaagaccagaaccgagacccccatggcccagagcgacagccagctgttcaaccagctgctggtgaccgagggcatgaccctgcccaccgagatgaaggaggccgccagcgagatggccagagccctgagaggccccggccccagaagcagcctggaccagcacgtggccgccgtggtggccaccgtgcagatcagcagcctggacaccaacctgcagctgagcggcctgagcgccctgagccaggccgtggaggaggtgaccgagagagaccaccccctggtgagacccgacagaagcctgagagagaagctggtgaagatgctggtggagctgctgaccaaccaggtgggcgagaagatggtggtggtgcaggccctgagactgctgtacctgctgatgaccaagcacgagtggagacccctgttcgccagagagggcggcatctacgccgtgctggtgtgcatgcaggagtacaagaccagcgtgctggtgcagcaggccggcctggccgccctgaagatgctggccgtggccagcagcagcgagatccccaccttcgtgaccggcagagacagcatccacagcctgttcgacgcccagatgaccagagagatcttcgccagcatcgacagcgccaccagacccggcagcgagagcctgctgctgaccgtgcccgccgccgtgatcctgatgctgaacaccgagggctgcagcagcgccgccagaaacggcctgctgctgctgaacctgctgctgtgcaaccaccacaccctgggcgaccagatcatcacccaggagctgagagacaccctgttcagacacagcggcatcgcccccagaaccgagcccatgcccaccaccagaaccatcctgatgatgctgctgaacagatacagcgagccccccggcagccccgagagagccgccctggagacccccatcatccagggccaggacggcagccccgagctgctgatcagaagcctggtgggcggccccagcgccgagctgctgctggacctggagagagtgctgtgcagagagggcagccccggcggcgccgtgagacccctgctgaagagactgcagcaggagacccagcccttcctgctgctgctgagaaccctggacgcccccggccccaacaagaccctgctgctgagcgtgctgagagtgatcaccagactgctggacttccccgaggccatggtgctgccctggcacgaggtgctggagccctgcctgaactgcctgagcggccccagcagcgacagcgagatcgtgcaggagctgacctgcttcctgcacagactggccagcatgcacaaggactacgccgtggtgctgtgctgcctgggcgccaaggagatcctgagcaaggtgctggacaagcacagcgcccagctgctgctgggctgcgagctgagagacctggtgaccgagtgcgagaagtacgcccagctgtacagcaacctgaccagcagcatcctggccggctgcatccagatggtgctgggccagatcgaggaccacagaagaacccaccagcccatcaacatccccttcttcgacgtgttcctgagacacctgtgccagggcagcagcgtggaggtgaaggaggacaagtgctgggagaaggtggaggtgagcagcaacccccacagagccagcaagctgaccgaccacaaccccaagacctactgggagagcaacggcagcaccggcagccactacatcaccctgcacatgcacagaggcgtgctggtgagacagctgaccctgctggtggccagcgaggacagcagctacatgcccgccagagtggtggtgttcggcggcgacagcaccagctgcatcggcaccgagctgaacaccgtgaacgtgatgcccagcgccagcagagtgatcctgctggagaacctgaacagattctggcccatcatccagatcagaatcaagagatgccagcagggcggcatcgacaccagagtgagaggcgtggaggtgctgggccccaagcccaccttctggcccctgttcagagagcagctgtgcagaagaacctgcctgttctacaccatcagagcccaggcctggagcagagacatcgccgaggaccacagaagactgctgcagctgtgccccagactgaacagagtgctgagacacgagcagaacttcgccgacagattcctgcccgacgacgaggccgcccaggccctgggcaagacctgctgggaggccctggtgagccccctggtgcagaacatcaccagccccgacgccgagggcgtgagcgccctgggctggctgctggaccagtacctggagcagagagagaccagcagaaaccccctgagcagagccgccagcttcgccagcagagtgagaagactgtgccacctgctggtgcacgtggagcccccccccggccccagccccgagcccagcaccagacccttcagcaagaacagcaagggcagagacagaagccccgcccccagccccgtgctgcccagcagcagcctgagaaacatcacccagtgctggctgagcgtggtgcaggagcaggtgagcagattcctggccgccgcctggagagcccccgacttcgtgcccagatactgcaagctgtacgagcacctgcagagagccggcagcgagctgttcggccccagagccgccttcatgctggccctgagaagcggcttcagcggcgccctgctgcagcagagcttcctgaccgccgcccacatgagcgagcagttcgccagatacatcgaccagcagatccagggcggcctgatcggcggcgcccccggcgtggagatgctgggccagctgcagagacacctggagcccatcatggtgctgagcggcctggagctggccaccaccttcgagcacttctaccagcactacatggccgacagactgctgagcttcggcagcagctggctggagggcgccgtgctggagcagatcggcctgtgcttccccaacagactgccccagctgatgctgcagagcctgagcaccagcgaggagctgcagagacagttccacctgttccagctgcagagactggacaagctgttcctggagcaggaggacgaggaggagaagagactggaggaggaggaggaggaggaggaggaggaggaggccgagaaggagctgttcatcgaggaccccagccccgccatcagcatcctggtgctgagccccagatgctggcccgtgagccccctgtgctacctgtaccaccccagaaagtgcctgcccaccgagttctgcgacgccctggacagattcagcagcttctacagccagagccagaaccaccccgtgctggacatgggcccccacagaagactgcagtggacctggctgggcagagccgagctgcagttcggcaagcagatcctgcacgtgagcaccgtgcagatgtggctgctgctgaagttcaaccagaccgaggaggtgagcgtggagaccctgctgaaggacagcgacctgagccccgagctgctgctgcaggccctggtgcccctgaccagcggcaacggccccctgaccctgcacgagggccaggacttcccccacggcggcgtgctgagactgcacgagcccggcccccagagaagcggcgaggccctgtggctgatccccccccaggcctacctgaacgtggagaaggacgagggcagaaccctggagcagaagagaaacctgctgagctgcctgctggtgagaatcctgaaggcccacggcgagaagggcctgcacatcgaccagctggtgtgcctggtgctggaggcctggcagaagggccccaacccccccggcaccctgggccacaccgtggccggcggcgtggcctgcaccagcaccgacgtgctgagctgcatcctgcacctgctgggccagggctacgtgaagagaagagacgacagaccccagatcctgatgtacgccgcccccgagcccatgggcccctgcagaggccaggccgacgtgcccttctgcggcagccagagcgagaccagcaagcccagccccgaggccgtggccaccctggccagcctgcagctgcccgccggcagaaccatgagcccccaggaggtggagggcctgatgaagcagaccgtgagacaggtgcaggagaccctgaacctggagcccgacgtggcccagcacctgctggcccacagccactggggcgccgagcagctgctgcagagctacagcgaggaccccgagcccctgctgctggccgccggcctgtgcgtgcaccaggcccaggccgtgcccgtgagacccgaccactgccccgtgtgcgtgagccccctgggctgcgacgacgacctgcccagcctgtgctgcatgcactactgctgcaagagctgctggaacgagtacctgaccaccagaatcgagcagaacctggtgctgaactgcacctgccccatcgccgactgccccgcccagcccaccggcgccttcatcagagccatcgtgagcagccccgaggtgatcagcaagtacgagaaggccctgctgagaggctacgtggagagctgcagcaacctgacctggtgcaccaacccccagggctgcgacagaatcctgtgcagacagggcctgggctgcggcaccacctgcagcaagtgcggctgggccagctgcttcaactgcagcttccccgaggcccactaccccgccagctgcggccacatgagccagtgggtggacgacggcggctactacgacggcatgagcgtggaggcccagagcaagcacctggccaagctgatcagcaagagatgccccagctgccaggcccccatcgagaagaacgagggctgcctgcacatgacctgcgccaagtgcaaccacggcttctgctggagatgcctgaagagctggaagcccaaccacaaggactactacaactgcagcgccatggtgagcaaggccgccagacaggagaagagattccaggactacaacgagagatgcaccttccaccaccaggccagagagttcgccgtgaacctgagaaacagagtgagcgccatccacgaggtgcccccccccagaagcttcaccttcctgaacgacgcctgccagggcctggagcaggccagaaaggtgctggcctacgcctgcgtgtacagcttctacagccaggacgccgagtacatggacgtggtggagcagcagaccgagaacctggagctgcacaccaacgccctgcagatcctgctggaggagaccctgctgagatgcagagacctggccagcagcctgagactgctgagagccgactgcctgagcaccggcatggagctgctgagaagaatccaggagagactgctggccatcctgcagcacagcgcccaggacttcagagtgggcctgcagagccccagcgtggaggcctgggaggccaagggccccaacatgcccggcagccagccccaggccagcagcggccccgaggccgaggaggaggaggaggacgacgaggacgacgtgcccgagtggcagcaggacgagttcgacgaggagctggacaacgacagcttcagctacgacgagagcgagaacctggaccaggagaccttcttcttcggcgacgaggaggaggacgaggacgaggcctacgactag

SEQ ID NO: 184381 - DNA, 3510 bp, Artificial Sequence
  derived and/or modified sequence
atggccagacagcccccccccccctgggtgcacgccgccttcctgctgtgcctgctgagcctgggcggcgccatcgagatccccatggacctgacccagccccccaccatcaccaagcagagcgccaaggaccacatcgtggaccccagagacaacatcctgatcgagtgcgaggccaagggcaaccccgcccccagcttccactggaccagaaacagcagattcttcaacatcgccaaggaccccagagtgagcatgagaagaagaagcggcaccctggtgatcgacttcagaagcggcggcagacccgaggagtacgagggcgagtaccagtgcttcgccagaaacaagttcggcaccgccctgagcaacagaatcagactgcaggtgagcaagagccccctgtggcccaaggagaacctggaccccgtggtggtgcaggagggcgcccccctgaccctgcagtgcaaccccccccccggcctgcccagccccgtgatcttctggatgagcagcagcatggagcccatcacccaggacaagagagtgagccagggccacaacggcgacctgtacttcagcaacgtgatgctgcaggacatgcagaccgactacagctgcaacgccagattccacttcacccacaccatccagcagaagaaccccttcaccctgaaggtgctgaccaaccacccctacaacgacagcagcctgagaaaccaccccgacatgtacagcgccagaggcgtggccgagagaacccccagcttcatgtacccccagggcaccgccagcagccagatggtgctgagaggcatggacctgctgctggagtgcatcgccagcggcgtgcccacccccgacatcgcctggtacaagaagggcggcgacctgcccagcgacaaggccaagttcgagaacttcaacaaggccctgagaatcaccaacgtgagcgaggaggacagcggcgagtacttctgcctggccagcaacaagatgggcagcatcagacacaccatcagcgtgagagtgaaggccgccccctactggctggacgagcccaagaacctgatcctggcccccggcgaggacggcagactggtgtgcagagccaacggcaaccccaagcccaccgtgcagtggatggtgaacggcgagcccctgcagagcgccccccccaaccccaacagagaggtggccggcgacaccatcatcttcagagacacccagatcagcagcagagccgtgtaccagtgcaacaccagcaacgagcacggctacctgctggccaacgccttcgtgagcgtgctggacgtgccccccagaatgctgagccccagaaaccagctgatcagagtgatcctgtacaacagaaccagactggactgccccttcttcggcagccccatccccaccctgagatggttcaagaacggccagggcagcaacctggacggcggcaactaccacgtgtacgagaacggcagcctggagatcaagatgatcagaaaggaggaccagggcatctacacctgcgtggccaccaacatcctgggcaaggccgagaaccaggtgagactggaggtgaaggaccccaccagaatctacagaatgcccgaggaccaggtggccagaagaggcaccaccgtgcagctggagtgcagagtgaagcacgaccccagcctgaagctgaccgtgagctggctgaaggacgacgagcccctgtacatcggcaacagaatgaagaaggaggacgacagcctgaccatcttcggcgtggccgagagagaccagggcagctacacctgcgtggccagcaccgagctggaccaggacctggccaaggcctacctgaccgtgctgggcagacccgacagacccagagacctggagctgaccgacctggccgagagaagcgtgagactgacctggatccccggcgacgccaacaacagccccatcaccgactacgtggtgcagttcgaggaggaccagttccagcccggcgtgtggcacgaccacagcaagtaccccggcagcgtgaacagcgccgtgctgagactgagcccctacgtgaactaccagttcagagtgatcgccatcaacgaggtgggcagcagccaccccagcctgcccagcgagagatacagaaccagcggcgccccccccgagagcaaccccggcgacgtgaagggcgagggcaccagaaagaacaacatggagatcacctggacccccatgaacgccaccagcgccttcggccccaacctgagatacatcgtgaagtggagaagaagagagaccagagaggcctggaacaacgtgaccgtgtggggcagcagatacgtggtgggccagacccccgtgtacgtgccctacgagatcagagtgcaggccgagaacgacttcggcaagggccccgagcccgagagcgtgatcggctacagcggcgaggactaccccagagccgcccccaccgaggtgaaggtgagagtgatgaacagcaccgccatcagcctgcagtggaacagagtgtacagcgacaccgtgcagggccagctgagagagtacagagcctactactggagagagagcagcctgctgaagaacctgtgggtgagccagaagagacagcaggccagcttccccggcgacagactgagaggcgtggtgagcagactgttcccctacagcaactacaagctggagatggtggtggtgaacggcagaggcgacggccccagaagcgagaccaaggagttcaccacccccgagggcgtgcccagcgcccccagaagattcagagtgagacagcccaacctggagaccatcaacctggagtgggaccaccccgagcaccccaacggcatcatgatcggctacaccctgaagtacgtggccttcaacggcaccaaggtgggcaagcagatcgtggagaacttcagccccaaccagaccaagttcaccgtgcagagaaccgaccccgtgagcagatacagattcaccctgagcgccagaacccaggtgggcagcggcgaggccgtgaccgaggagagccccgccccccccaacgaggcctacaccaacaaccaggccgacatcgccacccagggctggttcatcggcctgatgtgcgccatcgccctgctggtgctgatcctgctgatcgtgtgcttcatcaagagaagcagaggcggcaagtaccccgtgagagagaagaaggacgtgcccctgggccccgaggaccccaaggaggaggacggcagcttcgactacagcgacgaggacaacaagcccctgcagggcagccagaccagcctggacggcaccatcaagcagcaggagagcgacgacagcctggtggactacggcgagggcggcgagggccagttcaacgaggacggcagcttcatcggccagtacaccgtgaagaaggacaaggaggagaccgagggcaacgagagcagcgaggccaccagccccgtgaacgccatctacagcctggcctag

SEQ ID NO: 184382 - DNA, 3510 bp, Artificial Sequence
  derived and/or modified sequence
atggcgagacaaccacctcctccatgggtgcatgccgcctttctgctatgtctcctgagtctcggaggtgcgattgaaatccctatggatctgacccaaccccctacaattactaagcagtccgctaaagatcatattgtagacccccgggataacattcttattgaatgcgaagccaaagggaatcctgctccttcctttcattggactcgcaatagtagattcttcaacattgcaaaggacccgcgagtatctatgcgaagacgttcaggaactctggttattgacttccgcagtggtggacgccctgaagaatatgagggagaatatcagtgcttcgctaggaacaaattcggcaccgcactctctaatcgtattcgcctccaggtcagcaaatccccactctggccaaaggaaaacctggacccggtcgtggtccaggaaggcgctcccctgaccttgcaatgtaaccctcctcccggtctgccaagccctgtaatcttttggatgtcctctagcatggagcccattactcaagataaaagggtgtcacagggccacaatggagatttatatttcagcaatgtgatgcttcaagacatgcaaaccgattatagctgtaatgcgcggtttcatttcacccatacaatccagcagaagaatcccttcactctgaaggtactgaccaaccacccctacaacgatagcagtctgcggaatcatcccgacatgtacagcgcacgaggcgtggctgagagaacccctagcttcatgtacccacaagggaccgcttcgagccagatggtgcttcggggcatggacttacttttggaatgcatcgcaagtggcgtccccaccccagacatcgcatggtataaaaaaggcggcgacctgccatccgacaaggcaaagtttgaaaacttcaataaggcactgcgaataaccaacgtgagcgaggaggattccggggaatacttttgtttggcgagcaacaaaatgggcagtattcgccatacaatctcagtgcgggtgaaggctgcaccgtactggctcgacgagcctaaaaacctaatcctggcgcccggagaggacgggcgattggtctgcagggccaacgggaaccccaagcccaccgtacagtggatggtgaacggggagcctctgcagagcgcccctcccaaccctaatcgggaagttgccggggacaccattatctttcgggatacgcagatctccagcagggccgtgtaccagtgtaacacttccaatgaacacggctatctgctggcgaacgccttcgtctctgtgctggatgtacccccccggatgctttcccctagaaaccagctgatccgcgtgattctatataaccgaacgaggctggattgtcccttttttggatcaccaatacccacactgcggtggtttaagaacggtcagggtagcaatctggacggcggcaactaccacgtgtatgagaacggatcactggaaatcaagatgattcggaaggaagatcagggaatctacacctgcgtggctacaaacatcctgggaaaggccgaaaatcaggtgcggctggaggtgaaagaccccaccagaatatatcgcatgccggaggatcaggtggccagaaggggcacaacggtacagctcgagtgtcgtgtcaagcatgacccaagcctaaaactcactgtgtcatggttgaaagacgacgagcctttgtatatcggaaatcgtatgaaaaaagaagacgactcgcttaccattttcggagtcgccgagagggaccagggctcatatacatgcgtggcgtctactgaacttgaccaggacttggcaaaagcctacttaaccgtccttgggcgcccagatagaccgcgcgacctggagctcacggacctagctgaacggtctgtcagattgacctggattccaggcgacgcaaacaactctccaattacagactacgtggtgcaattcgaagaagatcaattccagccaggtgtgtggcatgaccacagcaagtacccaggatcagtaaatagcgcagtgctgagattgagtccctacgtgaattaccagttcagagttattgcaattaacgaggtgggctctagccacccctccttgcccagcgagagatatcggacttccggcgcaccgcccgaatctaatcccggagatgtcaagggcgaaggcaccagaaagaataatatggagattacttggacgccaatgaatgccacaagcgccttcggcccaaatctacgttatattgtgaaatggagaagaagagagactcgcgaagcctggaacaacgttaccgtgtggggcagccgctacgtggtgggtcagaccccagtctacgtcccctatgagattagagtccaggcagaaaatgacttcggcaagggtcctgagcctgaatcagtgatcgggtattctggggaggattatccacgggccgcccccactgaagtgaaagttcgtgtgatgaattccacagccatcagcctgcagtggaacagagtctattcagatacagtccagggccagctgcgggaatacagggcgtactattggagagagtcatctttgttgaaaaatttgtgggtatcccagaaacggcagcaggccagctttcccggagatagactgcggggtgttgttagcagactgtttccttattcgaattacaaactcgagatggtggtggtgaacggccgcggcgatgggccccgctctgaaaccaaagagttcacgacacccgagggggtgcccagtgcaccacggagattccgagtcaggcagccaaacctggaaactataaacctcgagtgggaccatccggaacaccccaatggcattatgatcggttataccttgaagtatgtggcattcaatgggacgaaagtcggcaagcagatcgtggaaaatttcagcccaaaccagacaaagttcaccgtccaacgcaccgaccccgtgtcacgatatcggttcactcttagtgcccgcactcaagtgggctcaggggaggctgtgacagaagagtctccagctccacctaatgaagcctatacaaacaaccaggccgacattgcaacccaaggctggttcattggcctgatgtgcgctattgcactgttagtcctgatactcctaatagtgtgttttatcaaaaggagcaggggcggtaagtatccagtgagggaaaagaaggatgtccccttgggccctgaagatccaaaagaagaagatggctctttcgactactcggatgaggacaataagccgctccagggaagtcagacctctctcgacggcactattaaacagcaggaatcagacgattcacttgtggactacggggaaggcggtgaaggccaatttaacgaagatggttcctttattggacagtacaccgttaagaaagataaggaggaaaccgagggaaatgagagtagtgaggccacaagtcccgtaaatgcaatctactccttggcttag

SEQ ID NO: 184383 - DNA, 3510 bp, Artificial Sequence
  derived and/or modified sequence
atggcgaggcagcccccccccccatgggtccacgcggccttcctgctgtgcctgttgtccctcgggggcgccattgagatccctatggatttaactcagccccctacaatcacaaagcagtccgctaaggatcacatcgtggacccccgagataatatattaatcgagtgtgaggcaaagggaaatcctgcccctagttttcattggacacggaactctaggtttttcaacatcgccaaggatcctcgagtgagcatgcgtcggcgcagcggaactttggtgatagactttagatcgggaggccgtccagaggaatatgagggagagtaccagtgtttcgctaggaataaattcggtactgcactgagcaatcgtatccgattgcaggtttccaagagtcccctttggcctaaagaaaacctggacccagtggtggtgcaggaaggcgcaccactgaccctgcaatgtaaccctcctccaggtctgcccagtcctgttattttctggatgtccagcagtatggagcccattacacaggataagcgagtgtcacagggacataacggtgatttgtacttcagtaatgttatgctgcaagacatgcaaacagattactcctgcaatgctaggttccactttacacacacgattcagcagaagaacccttttactttaaaggtgctcaccaatcatccgtataatgactctagtctgcgtaaccatcccgatatgtactcggcgagaggcgtcgctgaaaggaccccttccttcatgtatcctcaaggaacagccagctcccagatggtcctgagaggcatggacctgcttctagagtgcatagccagcggtgtgcctacccccgatatcgcatggtacaaaaagggcggagatctgcccagcgataaagccaaatttgagaatttcaacaaggccctgcggatcactaatgtgagcgaggaagactccggtgagtacttctgcttggcctcgaacaagatggggtcaatccgacatacgataagcgttagagttaaggcagccccatactggctggacgagcccaagaaccttatcctggcacctggtgaggacggtcggctggtgtgccgagctaacgggaatccgaagcctaccgtgcagtggatggtaaacggagaaccactccagagtgcaccacctaaccccaatagggaggttgcgggtgacacaattattttcagagatactcagatatccagtagggccgtgtaccaatgtaacacatctaatgagcatggatacctgcttgccaacgccttcgtgagcgtcctggatgtgcctcctaggatgctgagtccccgcaatcagttgatcagagttatcctgtacaatcggacacgcctggactgcccattctttggcagtcccatccccacattacgctggttcaagaacggacagggatcgaatttagatggtgggaactatcacgtatacgagaacggctcactcgagatcaaaatgatccggaaagaggaccaggggatctatacttgtgtcgctaccaatatcctcggcaaagccgagaatcaggtgaggctggaggtgaaggaccctacaaggatttaccgcatgcccgaggatcaggttgcccggagaggcacaactgttcagctcgagtgtagagtgaaacacgacccttccctgaaattaaccgtctcttggctgaaagacgatgaaccactgtacataggaaatcgaatgaagaaggaagatgattccctgaccattttcggagtggccgaacgggaccagggttcttatacttgtgtcgcctctacggaactcgaccaggatctggccaaggcatatctaaccgtccttgggcgcccggatcgaccaagggacctggaactcaccgacttggctgaacgctccgttaggcttacatggattcccggtgatgcaaataactcaccaatcactgactatgtcgtacagttcgaggaagatcaatttcagcccggagtctggcacgaccattccaaatacccaggctccgtgaattccgccgtgctacgcctctcaccttacgttaattatcagtttcgggtcatcgctataaacgaagtgggaagcagtcatccgagtctgccttccgagcgttatcgaacttccggtgctccacctgagtccaaccccggcgacgtgaaaggggagggcacgcgtaaaaataatatggaaattacctggacccccatgaacgccacttctgccttcggccccaatctgaggtatatcgtgaagtggcgaaggagggagactcgcgaagcttggaacaatgtcacagtgtggggcagtcggtatgtggtagggcagactcccgtgtatgttccgtatgagatccgcgttcaagcggagaacgatttcggtaagggccccgaacccgaatcagttatcggatatagtggagaagattacccaagggccgctccaacagaagtgaaggtcagagtaatgaattccaccgcgatttctctccaatggaatagagtgtactctgacacagtgcaggggcagctgagagagtaccgggcatattattggagagagtctagcctgcttaaaaacctgtgggtctcccagaaaaggcagcaggccagctttccgggagacagacttaggggcgtggtctctaggctgtttccctattcgaactacaaattagaaatggtggtggtgaacggacgaggagacgggcccaggagcgagactaaagagtttacaacacccgagggagttcccagcgcccctaggcggtttagggtcagacaacctaacctagaaactatcaatctggagtgggatcaccctgaacaccccaatgggattatgatcggatatactcttaaatatgtggccttcaacggtaccaaggttgggaaacagattgtcgaaaacttttcacccaatcagacaaaatttactgtgcagaggactgatccagtgagtcggtacagatttaccttgagcgctaggacacaggtgggctccggggaagctgtgactgaggagagccctgcccctcctaacgaagcctatactaataaccaggctgatattgctacacagggatggttcatcggtctgatgtgcgccatcgctttgttggtactgattctgctcattgtttgctttatcaaacgttcccggggcggaaagtatcccgtccgtgagaaaaaagacgtgccacttggacccgaggatccaaaggaggaggacggaagcttcgactattcggacgaggacaataagccactgcagggttcacagactagtctcgacggaacaatcaagcagcaggagagtgatgactctctcgtcgattatggcgagggaggagaagggcagttcaacgaagatggcagctttattgggcagtacacagtgaagaaggacaaggaggagactgagggaaatgagagtagtgaggcgacctcacccgtgaatgccatttactctctcgcctag

SEQ ID NO: 184384 - DNA, 3510 bp, Artificial Sequence
  derived and/or modified sequence
atggcccggcagcccccaccaccctgggtgcacgccgccttcctgctgtgcctgctgagcctgggcggggccatcgagatccccatggacctgacccagccccccaccatcaccaagcagagcgccaaggaccacatcgtggacccccgggacaacatcctgattgaatgtgaggccaagggcaacccagcccccagcttccactggaccaggaacagccgcttcttcaacatcgccaaggacccccgggtgtccatgagaagaagaagtggcaccctggtgattgacttccgcagcggcggccggcctgaggagtatgaaggagagtaccagtgctttgccaggaacaagtttggaacagccctgagcaaccgcatccggctgcaggtgtccaagagccccctgtggcccaaggagaacctggaccctgtggtggtgcaggagggcgcccccctgaccctgcagtgcaaccccccacctggcctgcccagccctgtgatcttctggatgagcagctccatggagcccatcacccaggacaagagggtgtcccagggccacaacggggacctgtacttcagcaatgtgatgctgcaggacatgcagacagactacagctgcaatgcccgcttccacttcacccacaccatccagcagaagaaccccttcaccctgaaggtgctgaccaaccacccctacaatgacagcagcctgaggaaccacccagacatgtacagcgcccggggcgtggccgagaggacccccagcttcatgtacccccagggcacagccagcagccagatggtgctgcggggcatggacctgctgctggagtgcatcgccagcggcgtgcccaccccagacatcgcctggtacaagaagggcggggacctgcccagcgacaaggccaagtttgagaacttcaacaaggccctgcgcatcaccaacgtgtctgaggaggacagcggggagtacttctgcctggccagcaacaagatgggcagcatccgccacaccatctctgtgcgggtgaaggccgccccctactggctggatgagcccaagaacctgatcctggcccctggagaagatggccgcctggtgtgccgggccaacggcaaccccaagcccaccgtgcagtggatggtgaatggagagcccctgcagagcgccccacccaaccccaaccgggaggtggccggggacaccatcatcttccgggacacccagatcagcagcagagctgtgtaccagtgcaacaccagcaatgaacatggctacctgctggccaatgcctttgtgtctgtgctggatgtgccccccaggatgctgagccccaggaaccagctgatccgggtcatcctgtacaacagaacccggctggactgccccttcttcggcagccccatccccaccctgcgctggttcaagaatggccagggcagcaacctggatggcggcaactaccacgtgtatgaaaatggcagcctggagatcaagatgatcagaaaagaagaccagggcatctacacctgtgtggccaccaacatcctgggcaaggccgagaaccaggtgcggctggaggtgaaggaccccacccgcatctacaggatgcctgaggaccaggtggcccggcggggcaccaccgtgcagctggagtgccgggtgaagcatgaccccagcctgaagctgactgtgtcctggctgaaggatgatgagcccctgtacatcggcaacaggatgaagaaggaggatgacagcctgaccatctttggagtggccgagcgggaccagggcagctacacctgtgtggccagcacagagctggaccaggacctggccaaggcctacctgactgtgctgggccgcccagaccggccccgggacctggagctgacagacctggccgagaggtctgtgcggctgacctggatccctggagatgccaacaacagccccatcacagattatgtggtgcagtttgaggaggaccagttccagcccggggtgtggcatgaccacagcaagtacccaggctctgtgaacagcgctgtgctgcggctgagcccctacgtgaactaccagttccgggtgattgccatcaatgaggtgggcagcagccaccccagcctgcccagcgagcgctaccgcaccagcggggcccctcctgagagcaaccctggagatgtgaagggggagggcaccaggaagaacaacatggagatcacctggacccccatgaatgccaccagcgccttcggccccaacctgcgctacatcgtgaagtggaggagaagagagacccgggaggcctggaacaacgtgacagtgtggggcagccgctacgtggtgggccagacccctgtgtatgtgccctatgagatccgggtgcaggccgagaatgactttggaaaaggacctgagcctgagagcgtgattggctacagcggggaggactaccccagggctgcccccacagaggtgaaggtgcgggtgatgaacagcacagccatcagcctgcagtggaacagagtgtacagcgacacagtgcagggccagctgcgggagtaccgggcctactactggagggagagcagcctgctgaagaacctgtgggtgtcccagaagaggcagcaggccagcttccctggggaccggctgcggggcgtggtgtcccggctcttcccctacagcaactacaagctggagatggtggtggtgaatggaagaggagatggccccaggtctgagaccaaggagttcaccaccccagagggcgtgcccagcgccccccggcgcttccgggtgcggcagcccaacctggagaccatcaacctggagtgggaccaccctgagcaccccaacggcatcatgattggctacaccctgaagtatgtggccttcaacggcaccaaggtgggcaagcagatcgtggagaacttcagccccaaccagaccaagttcaccgtgcagaggacagatcctgtgagccgctaccgcttcaccctgagcgcccggacccaggtgggcagcggggaggccgtgacagaggagagccctgcccccccaaatgaggcctacaccaacaaccaggccgacatcgccacccagggctggttcatcggcctgatgtgtgccatcgccctgctggtgctgatcctgctgattgtgtgcttcatcaagaggagcagaggaggcaagtaccctgtgcgggagaagaaggatgtgcccctgggccctgaggaccccaaggaggaggatggcagctttgactacagtgatgaggacaacaagcccctgcagggcagccagaccagcctggatggcaccatcaagcagcaggagagtgatgacagcctggtggactatggagagggcggggagggccagttcaatgaagatggcagcttcatcggccagtacacagtgaagaaggacaaggaggagacagagggcaatgaaagcagcgaggccaccagccctgtgaatgccatctacagcctggcctag

SEQ ID NO: 184385 - DNA, 3510 bp, Artificial Sequence
  derived and/or modified sequence
atggcccggcagcccccccccccctgggtgcacgccgccttcctgctgtgtctgctctccctgggcggggcaatcgagattcctatggacctgactcagccacccacaattacgaaacagtccgccaaagaccatatcgtcgatcctagagataatatcctcatcgaatgcgaagctaaaggaaacccagccccctcttttcactggacccggaacagccgcttttttaatattgccaaagaccctcgtgtgtcaatgaggcggcggtccggcactctggtgatcgactttcgttccggcggacggccagaggaatacgaaggcgagtaccaatgcttcgctagaaacaaattcgggactgcactgagcaacagaattcgcctgcaagtaagcaagtcccctctttggcccaaagagaacctggaccccgtagtggttcaggaaggtgctcccttgacactccagtgcaaccctcctcccggactgcccagtcccgttatcttttggatgtcttccagcatggagcctatcacacaggataaacgcgtgtctcaggggcataacggggacctgtacttctccaatgtcatgttacaggatatgcagaccgattattcttgcaatgctcggttccatttcactcatacgattcaacagaaaaatccttttacactcaaggtccttactaatcacccgtacaacgacagttcactcagaaaccacccagacatgtacagcgcgcgtggagtggctgaacgtacgccgagcttcatgtacccccaggggaccgctagtagccagatggtgcttagaggcatggatctattattggaatgtatcgccagcggagtgcctacgccagatatcgcctggtacaaaaaaggaggtgacttaccttcagacaaggccaaattcgagaacttcaacaaggccctcagaataaccaacgtctcagaggaagacagcggagaatacttctgcctggcttcaaataaaatgggaagtattcgtcatacaatcagtgtgagggtgaaggccgccccctactggctcgatgaaccgaagaatctgatcctggcacccggagaagacggtcgactcgtgtgccgtgcgaacggtaatcctaaacccaccgtgcagtggatggttaacggtgagccactacagtccgcacctcccaatcctaaccgcgaggttgcgggggatacaataatctttcgagacacacagattagtagtcgggcggtgtatcaatgcaacacatccaacgagcatggctacctccttgcaaacgccttcgtctcagttcttgacgtgccccccagaatgttaagccccaggaaccagcttatcagagtgattctgtataacagaactcggctggattgcccctttttcggttcacccatccctaccctgaggtggttcaagaatgggcagggctcaaatttagacggagggaattaccacgtttacgaaaatggatccctcgagattaaaatgatccggaaagaggaccagggcatttacacatgtgtggccaccaatatactcggcaaagcggagaaccaggttcggctcgaagtcaaggacccgactcgtatctatcgcatgcctgaggatcaggtcgcccgaaggggaacaactgttcagcttgagtgccgggtgaaacatgatcccagcctgaaactcacagtgagctggctcaaggacgatgagcctttgtatattggtaacaggatgaagaaggaggacgattcactcaccatcttcggtgtagccgagagagatcaaggctcctatacctgcgtcgccagcaccgagttggatcaggatctggctaaggcctacctcactgtgcttggaaggcccgacaggccacgagatctggagctgaccgatctggctgagaggtcagtgagactcacgtggattcccggggatgcgaataactcccccattacagactatgtggtgcagttcgaggaggaccagtttcagcccggcgtgtggcatgaccactccaaatatcccgggagtgtgaatagcgccgtcctcaggctaagcccctatgtgaactatcaatttagggttattgctattaatgaagtcggctcttcacacccaagcctgccaagcgaaaggtatcgtacttctggtgcaccccccgagtccaatcctggcgatgtgaaaggggaagggaccagaaaaaacaatatggagataacttggacccccatgaatgctacttccgcctttgggcctaatctgaggtatattgttaaatggcggcggcgagagacaagagaggcgtggaacaacgttaccgtgtggggatctaggtacgtggtggggcagacccctgtgtatgtgccatacgagatccgcgtccaggcagagaatgattttggaaaaggccccgagcctgaatccgtgatcgggtacagtggcgaagactaccccagggctgccccgaccgaggttaaggtgcgcgtgatgaacagtaccgctatttctctgcagtggaaccgtgtgtactccgacacagttcagggacagctcagggaatatagagcgtattattggcgcgaatcttcactcctcaagaacctttgggtaagccagaagagacaacaggcttcttttcccggagatcggcttcgcggggtcgttagccgcttgttcccgtactcaaactataaactagagatggtggtggtgaacggacgcggggacggcccaagatccgagacaaaggaattcactacccctgagggcgtgccgtctgccccccggcgttttcgtgtgaggcagccgaaccttgagaccattaatcttgaatgggaccatcctgaacatccaaacggaattatgatcgggtacacgctgaagtacgttgccttcaatggcaccaaggtcggtaagcaaattgtagagaatttctctcctaaccaaaccaagttcaccgtgcaacgtaccgatccagtgtcaagatatcgtttcacacttagtgccagaactcaagtggggtctggtgaggccgtaacggaagagagccccgccccgccgaacgaagcatatacaaacaatcaggccgatatcgcaacccaaggctggttcatcggactcatgtgcgccatagctctgctggttctaatcttgctaatcgtgtgtttcataaagcgatctcgaggaggcaaataccccgttagagaaaaaaaggacgtaccacttggccctgaagatcctaaggaagaggacggttcattcgactattcggatgaagacaacaagcctctccaagggtcacagacttctctcgacgggactatcaagcagcaagagtcagacgacagtcttgtcgactacggggaaggaggagaaggtcagtttaacgaagacggatccttcataggccagtacacagtgaaaaaggacaaagaggagactgagggcaatgaaagctcagaggctacttcacccgtcaatgctatttactcccttgcctag

SEQ ID NO: 184386 - DNA, 3510 bp, Artificial Sequence
  derived and/or modified sequence
atggcccggcagcccccccccccctgggtgcacgccgccttcctgctgtgcctgctgtcccttgggggggccatagagatccccatggacctgacccagcctcctaccattaccaagcaatctgccaaagaccatatagtcgacccacgggacaacatcttaattgaatgcgaggccaagggcaatccagctccctctttccattggacgcgtaactcccggttcttcaacattgccaaggatcctcgtgtatccatgaggcgacgctccggtacattggtgatcgatttcaggtctggcgggagacccgaggagtatgagggcgagtaccaatgcttcgcccgtaacaagttcggcacggccctaagcaaccgcatcaggttgcaggtgtcaaagtccccactttggcccaaggagaatctggaccccgtcgtggtgcaggaaggtgcccccctcaccctccagtgtaaccccccccccggtctgcctagccccgtaattttttggatgagtagtagcatggaacccatcactcaggataagcgtgtctcacagggccataacggcgacttatactttagtaatgtcatgctgcaggacatgcagacggactacagctgtaacgcccgatttcactttacccacacaatccagcagaaaaacccctttactcttaaggtattgacaaaccacccatacaatgatagctctctccggaaccatcccgacatgtactcggctaggggcgtggccgagcgcactccctctttcatgtatccccagggaacagcctccagccagatggttcttagagggatggatctgttactagagtgcatagccagtggggtgcctacccccgatatcgcgtggtataaaaagggtggggacctcccatcagataaagcaaagtttgaaaacttcaataaagcacttcggatcacaaatgtttctgaggaggacagtggagaatatttttgtctagcctccaataaaatgggaagcatacgacatactatcagtgtgcgggtcaaggcagccccttactggctggacgagcccaaaaatctgatcttggctcccggggaagatggtaggcttgtgtgtagggccaacgggaatcccaaaccaactgttcaatggatggttaatggtgaacccttgcaatcggcaccccctaacccaaatcgggaggttgcgggagatacgattatatttcgggatacccagatttccagtcgggccgtgtaccagtgcaatacaagcaatgagcatgggtaccttttagcaaacgcgtttgtgtcagtcctggacgtgcccccccgtatgttgagccctaggaaccaacttatcagagtgatcttgtataatagaacgcggctggactgcccatttttcggaagtccaatccccacccttcggtggttcaagaacggccagggaagcaatctcgacggcggcaattaccacgtatacgagaacggctccctggaaatcaaaatgatcaggaaagaagatcagggtatctatacttgcgtggcaaccaacatcctggggaaagcagaaaaccaagtgcggttagaggtgaaggacccaactaggatctatcggatgcccgaagaccaagtcgccaggaggggtaccactgtccaactggaatgcagagtgaaacacgacccatccctcaagctgacggtctcttggttgaaggacgatgaacccctttacattggcaatcgaatgaaaaaagaggacgatagccttaccatttttggcgtcgcagaacgggatcagggatcgtatacgtgtgttgcttctaccgaactagaccaggaccttgccaaggcctacctgacagtcctgggcagaccagataggccacgagacctagaactgacagatcttgctgaaagatctgtgcgactgacctggattcccggggacgctaataatagccccattacagactatgtggtgcagttcgaggaggaccagttccagcctggagtttggcatgatcactccaaatatccgggttcagtcaatagcgcagtgcttcgattatccccgtatgttaactaccagtttcgcgtgattgcaataaatgaggtgggaagctctcacccttccctgccaagcgagcggtatcggaccagtggagccccccctgagtccaaccccggagacgttaagggagagggcaccaggaaaaacaacatggagattacgtggacaccaatgaacgccacttcggcctttgggcccaatcttcgctatatcgtgaaatggcgaaggcgggagacccgcgaagcttggaacaatgtgacagtgtggggcagcagatacgtggtgggccagactcccgtctacgtgccctatgaaattcgggtccaggccgaaaatgacttcgggaaaggaccagagccagagagcgtgatcggttactccggcgaggactacccacgcgcagccccaaccgaagtcaaggtccgggttatgaacagcacagctatcagcttgcagtggaatagggtctatagcgacactgttcaagggcaacttcgggaatacagggcctactattggcgggagagctctcttctgaaaaacctgtgggttagtcaaaagaggcaacaagctagctttcctggagatagattgcggggagtggtgagcaggcttttcccttacagtaactataagctggaaatggtggtagtcaatggtagaggggatggcccgaggtccgagacaaaggaattcacaacccccgaaggggtccctagcgccccaaggcgctttcgcgtgcgccaaccaaacctggagaccatcaatctggaatgggaccaccccgagcatccaaatgggattatgattggatacacactgaagtatgtggcttttaatggcactaaggtggggaagcagattgtggagaattttagtcctaatcagactaaattcactgttcagcgcaccgaccccgttagccgctatagattcactctcagcgcccgaacccaggtgggaagcggcgaggcggtaaccgaagaatcacctgccccgcctaacgaagcctacaccaataaccaagctgacatagcgacgcagggctggttcatcgggctgatgtgtgccatagctctgttagtacttattctcctaattgtgtgttttatcaagagatcgaggggaggcaaatatccagttagggagaagaaagacgtgccgctgggaccagaagatccaaaggaagaggatggctcattcgattattccgacgaagacaacaagcccctgcaagggtctcaaacttccctggacggtactatcaaacagcaggagagcgatgactcgctggtagattacggagagggcggagagggccagttcaatgaggatgggtcattcattggccagtatacagtgaaaaaggacaaggaggaaacagaaggcaacgagagttcagaggccactagccctgtgaacgccatctacagcttggcttag

SEQ ID NO: 184387 - DNA, 3510 bp, Artificial Sequence
  derived and/or modified sequence
atggctcggcagcctccgccaccatgggtccatgccgcatttcttctttgtttgctttccctggggggagccatcgagatcccaatggacctgacgcagcccccaaccatcaccaagcagtcagcgaaggatcatattgtggatccacgtgacaacattctcatagaatgcgaagccaaaggaaaccccgcaccctctttccattggacccggaactcaaggttctttaatatagctaaggaccccagagtctccatgaggagacgcagcgggaccctagttatagactttagaagtggcggaaggcctgaagagtacgaaggcgagtatcaatgttttgcacgtaataagtttgggaccgcgctgtccaaccggatacgcttgcaggtaagcaagagtccactgtggccaaaagaaaatctggacccagtcgtcgtgcaggagggcgctcctttaacattgcagtgcaacccccctcctgggctgccatcaccagttatcttctggatgtcgtcctcaatggagcctatcacgcaggataagagggtgagtcagggccacaacggggacctgtatttctctaatgttatgctccaggacatgcagaccgattacagctgcaatgccagatttcacttcactcacaccattcagcagaaaaacccattcacactcaaggtgctgactaaccatccctacaatgattcgtctctgagaaaccaccctgatatgtactctgcacgaggcgtcgcagaaaggacgccgagcttcatgtacccccagggcaccgcatcctcccagatggtgctgaggggaatggacctgctcttggagtgcatcgcttccggggtgccaacccctgatattgcatggtacaagaaaggcggagatttgccctcagataaggccaagttcgaaaattttaacaaggccctaagaattactaacgtgagtgaggaggattccggagagtacttctgtctggcatctaacaagatggggagtattagacatacaattagtgtgagggtcaaagctgctccctactggttggacgaacctaaaaatctgatcctcgcaccaggagaagacggcagactggtctgccgcgctaatggtaaccctaagccaacggttcaatggatggtgaacggcgagccattgcagagtgcaccccctaaccctaaccgtgaagtcgccggtgacaccatcattttccgggatacccaaatttcttctagggctgtctaccaatgcaatacgagcaatgaacacggttatctgttggcgaacgcattcgtgtctgtcctggatgtgcctcctcgtatgttaagtcccaggaatcagttgatccgcgtgatcctgtacaaccggacgcgtctggattgtcctttttttggaagtccaatcccaaccttacgctggtttaagaatgggcaggggtccaatttagacggtgggaattaccacgtttacgaaaacggatccctggaaataaaaatgataagaaaagaggaccagggaatttatacttgtgtggcaaccaatattcttggaaaggccgagaatcaggtgagactggaggtgaaggaccccactcgtatctataggatgccggaggatcaggtggctagaagaggaactacagttcaactggagtgcagagtaaaacacgatcctagtctgaagctcactgtaagctggctgaaggacgacgaacccctctacatcgggaaccgcatgaaaaaggaagatgactcgctgactatcttcggtgtggctgaacgtgatcaaggaagttacacgtgtgtcgcaagcaccgagctcgatcaggacctggctaaagcatacttgaccgtactgggacgccctgatagacccagagatctggagctcactgatctcgcagagcgaagtgtgaggctaacatggatacccggagacgcaaacaactctcctattaccgactatgttgtgcagtttgaagaggatcagttccagcctggcgtttggcacgaccacagtaaataccccggaagcgtcaatagcgctgtcttacggctgtctccgtatgtgaactatcagttcagggtaattgctatcaatgaggtcggttcatcccacccatccctgccttcggagagataccgcacatccggcgcacctcctgagtcaaatcctggggacgtcaagggggaaggcacccgaaagaacaatatggagatcacctggactcctatgaacgccaccagtgccttcgggcctaatcttcgctacattgtaaaatggcggcgaagagaaacacgggaggcatggaacaatgtgactgtttggggcagcagatacgtggtcggccagacccccgtatatgtgccatacgagatcagagttcaggcagagaatgactttgggaaaggcccagaaccagagtccgtgatcggatacagcggcgaggattatcctagagccgctcctaccgaggtgaaggtgagagtgatgaacagcactgcaatcagtctgcagtggaatagggtgtatagcgatacagtacagggccagctaagagaatatcgcgcatactattggcgggaaagtagccttctaaagaacctgtgggtgtctcaaaaaagacagcaggccagcttccccggagacaggctgcgtggcgttgtaagtaggcttttcccctatagtaattacaagcttgagatggtggtcgtgaacgggagaggggatggtcctcggtctgaaaccaaggaattcacaacacccgaaggcgtgcctagcgctccgagaaggttcagggtgcgacaaccaaacctggagactatcaacctggagtgggaccatccagagcacccgaatggtattatgattggttacactctgaagtacgtcgcctttaacggaacaaaagtcggcaagcagattgtggaaaacttctcgcccaaccaaactaaatttaccgttcagcgtactgaccccgtgagtagatacagattcaccctctccgccaggacacaggtgggctcgggagaggcggtgactgaagaatccccagctccacccaacgaagcatatactaataatcaggcggacatcgcgacgcagggttggtttatagggttgatgtgcgctattgccctgctggttctcatccttcttatcgtctgctttatcaagaggtccaggggaggcaagtatcctgtgcgagaaaaaaaggacgtgccattgggcccagaagatcctaaggaggaagatggaagcttcgactattcagatgaggacaacaagccattgcagggctcccagacatctctcgatgggacaatcaagcaacaggaaagcgacgacagcctggtggattatggggaggggggagagggtcagtttaatgaagatggatcttttattggccagtacacagtgaaaaaggataaggaagagaccgaagggaacgaatcatctgaagctacctccccagtaaatgcaatttattctctggcttag

SEQ ID NO: 184388 - DNA, 3510 bp, Artificial Sequence
  derived and/or modified sequence
atggcgcgacagccccctccgccatgggtacacgctgcgttcctactttgccttctttctctggggggagccatcgagattcctatggaccttacccagcctccaacaattaccaagcagtcagctaaggaccatatcgtagatcctcgggacaatattctgatagagtgtgaggcaaagggtaatccagcaccttccttccactggaccagaaacagccggttttttaatatcgctaaagacccgcgagttagcatgagaaggaggagcgggacactggttatagactttagatcaggtggcagacctgaagagtatgagggagagtatcaatgtttcgctcgcaacaagtttgggaccgccctgtctaaccggataagacttcaggtgagcaaaagccccctctggccgaaggagaatcttgaccccgtggtggtgcaggagggggcacccctaacgctgcagtgcaacccccctcccggactgccatcgcccgtaatattctggatgtcctcttcgatggaacccattacacaggacaaaagggtctctcaggggcacaacggtgatctgtacttttccaacgtgatgctccaggatatgcagactgactactcgtgcaacgcacggttccactttactcatacaatacaacaaaaaaatcctttcacactgaaagtcttgacaaatcacccctataatgactcctccctaaggaatcacccagatatgtacagcgcaagaggtgtagctgagcggacacctagttttatgtacccgcagggaactgccagcagccagatggtcttgaggggtatggatctgttgctggaatgcatcgcctccggggtcccgaccccagacatcgcttggtataagaaaggcggtgacctgccatctgacaaagcaaagttcgaaaatttcaacaaggctctgcggatcacaaatgtttccgaagaggatagcggggagtacttctgtctcgccagtaataagatgggcagtatccggcacaccatctctgtaagagtcaaggcagcaccctattggctggacgaacctaagaaccttattttggctccgggagaggatgggcgtttggtctgcagggccaacgggaatccgaagccaacagtccagtggatggtgaacggggaacccctccaaagcgcccctccaaaccccaacagagaagttgctggagacacaatcatttttcgtgatactcagatttcttctcgagccgtgtaccagtgcaacacctctaacgaacatgggtatctactggccaacgcgttcgttagtgtcctagacgtcccacctcgaatgctttcacctcggaatcagctgattcgtgtgatcctgtacaatcgaacgcgtcttgactgtccctttttcggatcaccaattcccacccttagatggttcaaaaatgggcagggatccaatttggacggtggtaactaccacgtttatgaaaatggaagtttggagattaaaatgatccgaaaggaggaccagggtatctatacatgtgtcgctactaatatccttgggaaggctgagaaccaagtcaggctggaagtcaaagaccccacacgaatttatcggatgccagaggaccaggtcgctcggagaggcacaactgtccagctggaatgtagggtaaagcacgatccttctttgaaactcactgtctcctggcttaaggacgatgagccactctatattggaaacaggatgaagaaggaagacgacagcctgactattttcggcgttgcagagcgcgatcaaggctcctatacatgtgtcgcaagcacagagttggaccaagacctcgctaaggcttaccttaccgttctgggccgaccagacagacctcgggacttggagctgaccgacctcgctgaaagaagcgtgagactgacatggatccccggtgatgccaataattccccaatcaccgactacgtggtccagtttgaggaagatcagttccagccgggagtgtggcacgaccactcgaagtaccctggatcagtgaattccgcggtactgcgactgtccccttatgtcaattaccagtttagagttattgccatcaatgaagtgggatctagtcatcccagtttgcccagcgagaggtatcggacctcgggtgcaccccctgaaagcaacccaggggatgtgaagggggagggaacccggaagaacaatatggaaatcacatggacacctatgaacgcaacttctgcgtttgggccaaacttgaggtatatcgttaaatggagacgcagagagacccgcgaggcctggaacaacgtcaccgtgtggggctcccgatatgtggtgggccagaccccagtgtatgtaccctatgaaatccgggtgcaagcagagaacgacttcggcaagggcccagagcctgagagcgtgatcggatacagcggggaggactaccctagggcggcacctactgaggtaaaagtgcgagtgatgaatagcactgctatctccctgcagtggaatagggtatacagcgataccgttcagggccagttgcgagagtacagggcgtactactggcgcgaatctagtctgctgaagaatctttgggtgagtcagaagaggcagcaggcctcatttcctggagacaggctacgcggtgttgtgagccgtttgttcccctactccaattataagcttgaaatggtggtggtcaacggacgcggagacggtcctagatctgagacgaaggaattcacaactccagaaggagttcccagcgcccctcggagatttcgtgtaagacagcccaacctggagaccatcaaccttgaatgggaccatccggagcaccctaatggcatcatgattggatacactctcaagtacgtcgcttttaacggaactaaggtcgggaaacagatagtagaaaatttctcccctaatcagacaaagttcactgtgcaacgcactgatccagtttcccgctaccgattcacgctttcagcaagaactcaagttggaagtggagaggcggtgactgaggaaagccccgctcccccaaacgaagcatacaccaacaatcaggccgacatcgccacacagggatggtttatcggacttatgtgtgcgatcgccctactcgtgctgatactactcatagtgtgcttcatcaaaaggtctaggggaggaaagtaccccgttcgtgagaagaaggatgtgccgctggggcctgaggacccaaaggaagaggatggtagttttgattattccgatgaggataataagcccctgcagggatcacaaaccagtctcgatggcaccatcaaacagcaggagagtgatgattctctagtcgattacggggagggaggggagggtcagttcaatgaggatggttcgtttattggccagtataccgttaagaaagataaagaagaaacggaaggaaacgaatcatcggaagctaccagccccgtcaatgcaatctactccctggcctag

SEQ ID NO: 184389 - protein, 1720 aa, Artificial Sequence
  derived and/or modified sequence
MAAAPSALLLLPPFPVLSTYRLQSRSRPSAPETDDSRVGGIMRGEKNYYFRGAAGDHGSCPTTTSPLASALLMPSEAVSSSWSESGGGLSGGDEEDTRLLQLLRTARDPSEAFQALQAALPRRGGRLGFPRRKEALYRALGRVLVEGGSDEKRLCLQLLSDVLRGQGEAGQLEEAFSLALLPQLVVSLREENPALRKDALQILHICLKRSPGEVLRTLIQQGLESTDARLRASTALLLPILLTTEDLLLGLDLTEVIISLARKLGDQETEEESETAFSALQQIGERLGQDRFQSYISRLPSALRRHYNRRLESQFGSQVPYYLELEASGFPEDPLPCAVTLSNSNLKFGIIPQELHSRLLDQEDYKNRTQAVEELKQVLGKFNPSSTPHSSLVGFISLLYNLLDDSNFKVVHGTLEVLHLLVIRLGEQVQQFLGPVIAASVKVLADNKLVIKQEYMKIFLKLMKEVGPQQVLCLLLEHLKHKHSRVREEVVNICICSLLTYPSEDFDLPKLSFDLAPALVDSKRRVRQAALEAFAVLASSMGSGKTSILFKAVDTVELQDNGDGVMNAVQARLARKTLPRLTEQGFVEYAVLMPSSAGGRSNHLAHGADTDWLLAGNRTQSAHCHCGDHVRDSMHIYGSYSPTICTRRVLSAGKGKNKLPWENEQPGIMGENQTSTSKDIEQFSTYDFIPSAKLKLSQGMPVNDDLCFSRKRVSRNLFQNSRDFNPDCLPLCAAGTTGTHQTNLSGKCAQLGFSQICGKTGSVGSDLQFLGTTSSHQEKVYASLNFGSKTQQTFGSQTECTSSNGQNPSPGAYILPSYPVSSPRTSPKHTSPLIISPKKSQDNSVNFSNSWPLKSFEGLSKPSPQKKLVSQKSSDPTGRNHGENSQEKPPVQLTPALVRSPSSRRGLNGTKPVPPIPRGISLLPDKADLSTVGHKKKEPDDIWKCEKDSLPIDLSELNFKDKDLDQEEMHSSLRSLRNSAAKKRAKLSGSTSDLESPDSAMKLDLTMDSPSLSSSPNINSYSESGVYSQESLTSSLSTTPQGKRIMSDIFPTFGSKPCPTRLSSAKKKISHIAEQSPSAGSSSNPQQISSFDFTTTKALSEDSVVVVGKGVFGSLSSAPATCSQSVISSVENGDTFSIKQSIEPPSGIYGRSVQQNISSYLDVENEKDAKVSISKSTYNKMRQKRKEEKELFHNKDCEKKEKNSWERMRHTGTEKMASESETPTGAISQYKERMPSVTHSPEIMDLSELRPFSKPEIALTEALRLLADEDWEKKIEGLNFIRCLAAFHSEILNTKLHETNFAVVQEVKNLRSGVSRAAVVCLSDLFTYLKKSMDQELDTTVKVLLHKAGESNTFIREDVDKALRAMVNNVTPARAVVSLINGGQRYYGRKMLFFMMCHPNFEKMLEKYVPSKDLPYIKDSVRNLQQKGLGEIPLDTPSAKGRRSHTGSVGNTRSSSVSRDAFNSAERAVTEVREVTRKSVPRNSLESAEYLKLITGLLNAKDFRDRINGIKQLLSDTENNQDLVVGNIVKIFDAFKSRLHDSNSKVNLVALETMHKMIPLLRDHLSPIINMLIPAIVDNNLNSKNPGIYAAATNVVQALSQHVDNYLLLQPFCTKAQFLNGKAKQDMTEKLADIVTELYQRKPHATEQKVLVVLWHLLGNMTNSGSLPGAGGNIRTATAKLSKALFAQMGQNLLNQAASQPPHIKKSLEELLDMTILNEL

SEQ ID NO: 184390 - DNA, 5163 bp, Artificial Sequence
  derived and/or modified sequence
atggccgccgcccccagcgccctgctgctgctgccccccttccccgtgctgagcacctacagactgcagagcagaagcagacccagcgcccccgagaccgacgacagcagagtgggcggcatcatgagaggcgagaagaactactacttcagaggcgccgccggcgaccacggcagctgccccaccaccaccagccccctggccagcgccctgctgatgcccagcgaggccgtgagcagcagctggagcgagagcggcggcggcctgagcggcggcgacgaggaggacaccagactgctgcagctgctgagaaccgccagagaccccagcgaggccttccaggccctgcaggccgccctgcccagaagaggcggcagactgggcttccccagaagaaaggaggccctgtacagagccctgggcagagtgctggtggagggcggcagcgacgagaagagactgtgcctgcagctgctgagcgacgtgctgagaggccagggcgaggccggccagctggaggaggccttcagcctggccctgctgccccagctggtggtgagcctgagagaggagaaccccgccctgagaaaggacgccctgcagatcctgcacatctgcctgaagagaagccccggcgaggtgctgagaaccctgatccagcagggcctggagagcaccgacgccagactgagagccagcaccgccctgctgctgcccatcctgctgaccaccgaggacctgctgctgggcctggacctgaccgaggtgatcatcagcctggccagaaagctgggcgaccaggagaccgaggaggagagcgagaccgccttcagcgccctgcagcagatcggcgagagactgggccaggacagattccagagctacatcagcagactgcccagcgccctgagaagacactacaacagaagactggagagccagttcggcagccaggtgccctactacctggagctggaggccagcggcttccccgaggaccccctgccctgcgccgtgaccctgagcaacagcaacctgaagttcggcatcatcccccaggagctgcacagcagactgctggaccaggaggactacaagaacagaacccaggccgtggaggagctgaagcaggtgctgggcaagttcaaccccagcagcaccccccacagcagcctggtgggcttcatcagcctgctgtacaacctgctggacgacagcaacttcaaggtggtgcacggcaccctggaggtgctgcacctgctggtgatcagactgggcgagcaggtgcagcagttcctgggccccgtgatcgccgccagcgtgaaggtgctggccgacaacaagctggtgatcaagcaggagtacatgaagatcttcctgaagctgatgaaggaggtgggcccccagcaggtgctgtgcctgctgctggagcacctgaagcacaagcacagcagagtgagagaggaggtggtgaacatctgcatctgcagcctgctgacctaccccagcgaggacttcgacctgcccaagctgagcttcgacctggcccccgccctggtggacagcaagagaagagtgagacaggccgccctggaggccttcgccgtgctggccagcagcatgggcagcggcaagaccagcatcctgttcaaggccgtggacaccgtggagctgcaggacaacggcgacggcgtgatgaacgccgtgcaggccagactggccagaaagaccctgcccagactgaccgagcagggcttcgtggagtacgccgtgctgatgcccagcagcgccggcggcagaagcaaccacctggcccacggcgccgacaccgactggctgctggccggcaacagaacccagagcgcccactgccactgcggcgaccacgtgagagacagcatgcacatctacggcagctacagccccaccatctgcaccagaagagtgctgagcgccggcaagggcaagaacaagctgccctgggagaacgagcagcccggcatcatgggcgagaaccagaccagcaccagcaaggacatcgagcagttcagcacctacgacttcatccccagcgccaagctgaagctgagccagggcatgcccgtgaacgacgacctgtgcttcagcagaaagagagtgagcagaaacctgttccagaacagcagagacttcaaccccgactgcctgcccctgtgcgccgccggcaccaccggcacccaccagaccaacctgagcggcaagtgcgcccagctgggcttcagccagatctgcggcaagaccggcagcgtgggcagcgacctgcagttcctgggcaccaccagcagccaccaggagaaggtgtacgccagcctgaacttcggcagcaagacccagcagaccttcggcagccagaccgagtgcaccagcagcaacggccagaaccccagccccggcgcctacatcctgcccagctaccccgtgagcagccccagaaccagccccaagcacaccagccccctgatcatcagccccaagaagagccaggacaacagcgtgaacttcagcaacagctggcccctgaagagcttcgagggcctgagcaagcccagcccccagaagaagctggtgagccagaagagcagcgaccccaccggcagaaaccacggcgagaacagccaggagaagccccccgtgcagctgacccccgccctggtgagaagccccagcagcagaagaggcctgaacggcaccaagcccgtgccccccatccccagaggcatcagcctgctgcccgacaaggccgacctgagcaccgtgggccacaagaagaaggagcccgacgacatctggaagtgcgagaaggacagcctgcccatcgacctgagcgagctgaacttcaaggacaaggacctggaccaggaggagatgcacagcagcctgagaagcctgagaaacagcgccgccaagaagagagccaagctgagcggcagcaccagcgacctggagagccccgacagcgccatgaagctggacctgaccatggacagccccagcctgagcagcagccccaacatcaacagctacagcgagagcggcgtgtacagccaggagagcctgaccagcagcctgagcaccaccccccagggcaagagaatcatgagcgacatcttccccaccttcggcagcaagccctgccccaccagactgagcagcgccaagaagaagatcagccacatcgccgagcagagccccagcgccggcagcagcagcaacccccagcagatcagcagcttcgacttcaccaccaccaaggccctgagcgaggacagcgtggtggtggtgggcaagggcgtgttcggcagcctgagcagcgcccccgccacctgcagccagagcgtgatcagcagcgtggagaacggcgacaccttcagcatcaagcagagcatcgagccccccagcggcatctacggcagaagcgtgcagcagaacatcagcagctacctggacgtggagaacgagaaggacgccaaggtgagcatcagcaagagcacctacaacaagatgagacagaagagaaaggaggagaaggagctgttccacaacaaggactgcgagaagaaggagaagaacagctgggagagaatgagacacaccggcaccgagaagatggccagcgagagcgagacccccaccggcgccatcagccagtacaaggagagaatgcccagcgtgacccacagccccgagatcatggacctgagcgagctgagacccttcagcaagcccgagatcgccctgaccgaggccctgagactgctggccgacgaggactgggagaagaagatcgagggcctgaacttcatcagatgcctggccgccttccacagcgagatcctgaacaccaagctgcacgagaccaacttcgccgtggtgcaggaggtgaagaacctgagaagcggcgtgagcagagccgccgtggtgtgcctgagcgacctgttcacctacctgaagaagagcatggaccaggagctggacaccaccgtgaaggtgctgctgcacaaggccggcgagagcaacaccttcatcagagaggacgtggacaaggccctgagagccatggtgaacaacgtgacccccgccagagccgtggtgagcctgatcaacggcggccagagatactacggcagaaagatgctgttcttcatgatgtgccaccccaacttcgagaagatgctggagaagtacgtgcccagcaaggacctgccctacatcaaggacagcgtgagaaacctgcagcagaagggcctgggcgagatccccctggacacccccagcgccaagggcagaagaagccacaccggcagcgtgggcaacaccagaagcagcagcgtgagcagagacgccttcaacagcgccgagagagccgtgaccgaggtgagagaggtgaccagaaagagcgtgcccagaaacagcctggagagcgccgagtacctgaagctgatcaccggcctgctgaacgccaaggacttcagagacagaatcaacggcatcaagcagctgctgagcgacaccgagaacaaccaggacctggtggtgggcaacatcgtgaagatcttcgacgccttcaagagcagactgcacgacagcaacagcaaggtgaacctggtggccctggagaccatgcacaagatgatccccctgctgagagaccacctgagccccatcatcaacatgctgatccccgccatcgtggacaacaacctgaacagcaagaaccccggcatctacgccgccgccaccaacgtggtgcaggccctgagccagcacgtggacaactacctgctgctgcagcccttctgcaccaaggcccagttcctgaacggcaaggccaagcaggacatgaccgagaagctggccgacatcgtgaccgagctgtaccagagaaagccccacgccaccgagcagaaggtgctggtggtgctgtggcacctgctgggcaacatgaccaacagcggcagcctgcccggcgccggcggcaacatcagaaccgccaccgccaagctgagcaaggccctgttcgcccagatgggccagaacctgctgaaccaggccgccagccagcccccccacatcaagaagagcctggaggagctgctggacatgaccatcctgaacgagctgtag

SEQ ID NO: 184391 - DNA, 2988 bp, Artificial Sequence
  derived and/or modified sequence
atggccgccgcccccagcgccctgctgctgctgccccccttccccgtgctgagcacctacagactgcagagcagaagcagacccagcgcccccgagaccgacgacagcagagtgggcggcatcatgagaggcgagaagaactactacttcagaggcgccgccggcgaccacggcagctgccccaccaccaccagccccctggccagcgccctgctgatgcccagcgaggccgtgagcagcagctggagcgagagcggcggcggcctgagcggcggcgacgaggaggacaccagactgctgcagctgctgagaaccgccagagaccccagcgaggccttccaggccctgcaggccgccctgcccagaagaggcggcagactgggcttccccagaagaaaggaggccctgtacagagccctgggcagagtgctggtggagggcggcagcgacgagaagagactgtgcctgcagctgctgagcgacgtgctgagaggccagggcgaggccggccagctggaggaggccttcagcctggccctgctgccccagctggtggtgagcctgagagaggagaaccccgccctgagaaaggacgccctgcagatcctgcacatctgcctgaagagaagccccggcgaggtgctgagaaccctgatccagcagggcctggagagcaccgacgccagactgagagccagcaccgccctgctgctgcccatcctgctgaccaccgaggacctgctgctgggcctggacctgaccgaggtgatcatcagcctggccagaaagctgggcgaccaggagaccgaggaggagagcgagaccgccttcagcgccctgcagcagatcggcgagagactgggccaggacagattccagagctacatcagcagactgcccagcgccctgagaagacactacaacagaagactggagagccagttcggcagccaggtgccctactacctggagctggaggccagcggcttccccgaggaccccctgccctgcgccgtgaccctgagcaacagcaacctgaagttcggcatcatcccccaggagctgcacagcagactgctggaccaggaggactacaagaacagaacccaggccgtggaggagctgaagcaggtgctgggcaagttcaaccccagcagcaccccccacagcagcctggtgggcttcatcagcctgctgtacaacctgctggacgacagcaacttcaaggtggtgcacggcaccctggaggtgctgcacctgctggtgatcagactgggcgagcaggtgcagcagttcctgggccccgtgatcgccgccagcgtgaaggtgctggccgacaacaagctggtgatcaagcaggagtacatgaagatcttcctgaagctgatgaaggaggtgggcccccagcaggtgctgtgcctgctgctggagcacctgaagcacaagcacagcagagtgagagaggaggtggtgaacatctgcatctgcagcctgctgacctaccccagcgaggacttcgacctgcccaagctgagcttcgacctggcccccgccctggtggacagcaagagaagagtgagacaggccgccctggaggccttcgccgtgctggccagcagcatgggcagcggcaagaccagcatcctgttcaaggccgtggacaccgtggagctgcaggacaacggcgacggcgtgatgaacgccgtgcaggccagactggccagaaagaccctgcccagactgaccgagcagggcttcgtggagtacgccgtgctgatgcccagcagcgccggcggcagaagcaaccacctggcccacggcgccgacaccgactggctgctggccggcaacagaacccagagcgcccactgccactgcggcgaccacgtgagagacagcatgcacatctacggcagctacagccccaccatctgcaccagaagagtgctgagcgccggcaagggcaagaacaagctgccctgggagaacgagcagcccggcatcatgggcgagaaccagaccagcaccagcaaggacatcgagcagttcagcacctacgacttcatccccagcgccaagctgaagctgagccagggcatgcccgtgaacgacgacctgtgcttcagcagaaagagagtgagcagaaacctgttccagaacagcagagacttcaaccccgactgcctgcccctgtgcgccgccggcaccaccggcacccaccagaccaacctgagcggcaagtgcgcccagctgggcttcagccagatctgcggcaagaccggcagcgtgggcagcgacctgcagttcctgggcaccaccagcagccaccaggagaaggtgtacgccagcctgaacttcggcagcaagacccagcagaccttcggcagccagaccgagtgcaccagcagcaacggccagaaccccagccccggcgcctacatcctgcccagctaccccgtgagcagccccagaaccagccccaagcacaccagccccctgatcatcagccccaagaagagccaggacaacagcgtgaacttcagcaacagctggcccctgaagagcttcgagggcctgagcaagcccagcccccagaagaagctggtgagccagaagagcagcgaccccaccggcagaaaccacggcgagaacagccaggagaagccccccgtgcagctgacccccgccctggtgagaagccccagcagcagaagaggcctgaacggcaccaagcccgtgccccccatccccagaggcatcagcctgctgcccgacaaggccgacctgagcaccgtgggccacaagaagaaggagcccgacgacatctggaagtgcgagaaggacagcctgcccatcgacctgagcgagctgaacttcaaggacaaggacctggaccaggaggaggtgagacacatcagcaacatctgggtgaagaccctgagcaacaagaccttcttctgcaaggagaagaacttcagctactgctag

SEQ ID NO: 184392 - DNA, 3483 bp, Artificial Sequence
  derived and/or modified sequence
atggccgccgcccccagcgccctgctgctgctgccccccttccccgtgctgagcacctacagactgcagagcagaagcagacccagcgcccccgagaccgacgacagcagagtgggcggcatcatgagaggcgagaagaactactacttcagaggcgccgccggcgaccacggcagctgccccaccaccaccagccccctggccagcgccctgctgatgcccagcgaggccgtgagcagcagctggagcgagagcggcggcggcctgagcggcggcgacgaggaggacaccagactgctgcagctgctgagaaccgccagagaccccagcgaggccttccaggccctgcaggccgccctgcccagaagaggcggcagactgggcttccccagaagaaaggaggccctgtacagagccctgggcagagtgctggtggagggcggcagcgacgagaagagactgtgcctgcagctgctgagcgacgtgctgagaggccagggcgaggccggccagctggaggaggccttcagcctggccctgctgccccagctggtggtgagcctgagagaggagaaccccgccctgagaaaggacgccctgcagatcctgcacatctgcctgaagagaagccccggcgaggtgctgagaaccctgatccagcagggcctggagagcaccgacgccagactgagagccagcaccgccctgctgctgcccatcctgctgaccaccgaggacctgctgctgggcctggacctgaccgaggtgatcatcagcctggccagaaagctgggcgaccaggagaccgaggaggagagcgagaccgccttcagcgccctgcagcagatcggcgagagactgggccaggacagattccagagctacatcagcagactgcccagcgccctgagaagacactacaacagaagactggagagccagttcggcagccaggtgccctactacctggagctggaggccagcggcttccccgaggaccccctgccctgcgccgtgaccctgagcaacagcaacctgaagttcggcatcatcccccaggagctgcacagcagactgctggaccaggaggactacaagaacagaacccaggccgtggaggagctgaagcaggtgctgggcaagttcaaccccagcagcaccccccacagcagcctggtgggcttcatcagcctgctgtacaacctgctggacgacagcaacttcaaggtggtgcacggcaccctggaggtgctgcacctgctggtgatcagactgggcgagcaggtgcagcagttcctgggccccgtgatcgccgccagcgtgaaggtgctggccgacaacaagctggtgatcaagcaggagtacatgaagatcttcctgaagctgatgaaggaggtgggcccccagcaggtgctgtgcctgctgctggagcacctgaagcacaagcacagcagagtgagagaggaggtggtgaacatctgcatctgcagcctgctgacctaccccagcgaggacttcgacctgcccaagctgagcttcgacctggcccccgccctggtggacagcaagagaagagtgagacaggccgccctggaggccttcgccgtgctggccagcagcatgggcagcggcaagaccagcatcctgttcaaggccgtggacaccgtggagctgcaggacaacggcgacggcgtgatgaacgccgtgcaggccagactggccagaaagaccctgcccagactgaccgagcagggcttcgtggagtacgccgtgctgatgcccagcagcgccggcggcagaagcaaccacctggcccacggcgccgacaccgactggctgctggccggcaacagaacccagagcgcccactgccactgcggcgaccacgtgagagacagcatgcacatctacggcagctacagccccaccatctgcaccagaagagtgctgagcgccggcaagggcaagaacaagctgccctgggagaacgagcagcccggcatcatgggcgagaaccagaccagcaccagcaaggacatcgagcagttcagcacctacgacttcatccccagcgccaagctgaagctgagccagggcatgcccgtgaacgacgacctgtgcttcagcagaaagagagtgagcagaaacctgttccagaacagcagagacttcaaccccgactgcctgcccctgtgcgccgccggcaccaccggcacccaccagaccaacctgagcggcaagtgcgcccagctgggcttcagccagatctgcggcaagaccggcagcgtgggcagcgacctgcagttcctgggcaccaccagcagccaccaggagaaggtgtacgccagcctgaacttcggcagcaagacccagcagaccttcggcagccagaccgagtgcaccagcagcaacggccagaaccccagccccggcgcctacatcctgcccagctaccccgtgagcagccccagaaccagccccaagcacaccagccccctgatcatcagccccaagaagagccaggacaacagcgtgaacttcagcaacagctggcccctgaagagcttcgagggcctgagcaagcccagcccccagaagaagctggtgagccagaagagcagcgaccccaccggcagaaaccacggcgagaacagccaggagaagccccccgtgcagctgacccccgccctggtgagaagccccagcagcagaagaggcctgaacggcaccaagcccgtgccccccatccccagaggcatcagcctgctgcccgacaaggccgacctgagcaccgtgggccacaagaagaaggagcccgacgacatctggaagtgcgagaaggacagcctgcccatcgacctgagcgagctgaacttcaaggacaaggacctggaccaggaggagatgcacagcagcctgagaagcctgagaaacagcgccgccaagaagagagccaagctgagcggcagcaccagcgacctggagagccccgacagcgccatgaagctggacctgaccatggacagccccagcctgagcagcagccccaacatcaacagctacagcgagagcggcgtgtacagccaggagagcctgaccagcagcctgagcaccaccccccagggcaagagaatcatgagcgacatcttccccaccttcggcagcaagccctgccccaccagactgagcagcgccaagaagaagatcagccacatcgccgagcagagccccagcgccggcagcagcagcaacccccagcagatcagcagcttcgacttcaccaccaccaaggccctgagcgaggacagcgtggtggtggtgggcaagggcgtgttcggcagcctgagcagcgcccccgccacctgcagccagagcgtgatcagcagcgtggagaacggcgacaccttcagcatcaagcagagcatcgagccccccagcggcatctacggcagaagcgtgcagcagaacttcatcatcagctag

SEQ ID NO: 184393 - DNA, 5163 bp, Artificial Sequence
  derived and/or modified sequence
atggcagcagccccctctgctctgctgctcttaccaccctttccagttctgtctacttacaggctgcagagtaggtcccgtccgtccgcccctgaaaccgacgactcgagggtgggtggcattatgcggggcgaaaagaattactattttaggggcgccgccggggatcacggatcgtgtcctaccacaacttcacccctggctagcgcccttctgatgccgagcgaagctgtgtcaagctcttggtcggagtcaggaggggggctctctggaggggatgaggaggacactcggcttctgcagctgctgagaactgctcgggatccttccgaggcgttccaggctttgcaagcagctctgccccggcgcggcggaaggctgggatttccccggcgaaaggaagcactgtatagagctctcgggagagttctcgtggaagggggcagcgacgagaagcgcctatgcctccaattgctcagtgatgtccttcgcgggcagggagaggccggccagctggaggaggcattctctctggccctcttgccacagctggtagtgtcccttcgggaggagaatcccgctctccgcaaagacgccctgcagatcctacacatatgcctcaaaagaagtccaggggaggttttgaggacactgattcagcagggcctggaaagcaccgatgccagactccgagcttccactgcactgctgctgccaattctcctaaccacggaagatctgctcctcggcctggacctgactgaagttatcatcagcctggctcggaagctcggtgaccaggaaaccgaggaagagtcagaaacagcgttttccgccctccagcaaatcggagaaaggttgggccaggacaggtttcagagttacataagcagattaccttcagccctccgccggcactataacaggaggttggaaagccagttcgggtcacaggttccgtattacttggagctcgaagcgagtgggtttccagaggacccactgccatgcgccgtcacactgagtaattctaacctgaagttcgggattattccgcaggagctgcatagccggctgctggatcaggaggattacaagaacaggacccaggcagtggaagaactgaaacaagtcctgggaaagtttaatccatccagtactccccacagcagcctcgtcggcttcatttcactactgtataatctgctggacgacagcaacttcaaggtagtgcacggtactctggaagttctgcatctgctggttatccgcctgggagaacaggtgcagcaattcttgggccctgttatcgccgccagtgtcaaggtgttggctgacaataaactcgttatcaagcaggaatacatgaagatctttctcaaacttatgaaggaagttggtccgcagcaggtcctctgcttgctgctcgagcacctcaaacataagcactcccgcgtgcgcgaggaagtggtgaatatttgcatttgttccctgctgacttaccctagcgaggacttcgatctgccgaaattgagctttgacctggcacctgccctggtagatagtaagagacgcgtccggcaagcagctctggaggcttttgctgtgctggcttcatcaatgggtagcggaaagacctctattctgtttaaggctgttgataccgtagagctgcaggataatggcgacggcgtaatgaatgcggtccaggctagactcgcacggaaaactctgccacgtttgaccgagcagggcttcgtagaatatgcggtgttaatgcccagctccgcaggtgggagaagcaaccatctagctcacggggcggatacagactggctactggccggcaacagaacacagtctgcacactgccattgtggagaccacgtccgcgacagcatgcacatttatgggtcttacagtcccaccatatgcacgcgtcgggttctgagtgccggcaagggcaaaaataagttgccatgggagaacgagcaacccggaatcatgggcgagaatcagacctccacttccaaggatatcgagcagttttcaacgtacgattttattccaagcgccaaattaaagttgagtcaaggcatgcctgtgaacgacgatctctgttttagtaggaagagggtgtcccggaacctgttccagaattcacgggattttaacccagactgtctcccattgtgtgcggcaggcactacaggcacccatcagactaacctgtcgggtaaatgtgcccagttgggctttagtcagatctgcggcaagaccggctccgtgggatctgatctgcagtttttggggacgacaagttcccaccaggagaaggtgtatgcgtctttgaattttggaagcaagacccagcaaacctttgggagccagacagaatgcacatcctcaaacggccaaaacccatcccccggagcttatattcttccttcgtaccctgtctcctctcccaggactagcccaaagcacacctcacccctgataattagcccgaaaaaatcccaggataatagtgtcaacttctcaaacagctggcccctgaaatcgttcgaaggcctgagcaagcctagtcctcagaaaaaattggttagccagaaaagttctgatccaacagggcgcaatcacggcgaaaacagtcaggaaaaaccgcccgttcaactgaccccagcccttgtgcggagcccgagctcgcggagaggactgaacgggaccaagcctgtgcctcccataccaagaggcatctctctcttaccagataaagccgacctctccactgtgggccacaaaaagaaagaacccgacgacatttggaaatgtgaaaaggactcactccccattgacctcagcgaattaaattttaaggacaaagatctggaccaggaagagatgcattctagcctacggtctctcaggaattctgctgccaagaagagagcaaaacttagtgggagcactagcgacttggaatcacccgactcggccatgaaactagatctgacgatggactcccctagtctgagcagtagtccgaacatcaactcctactccgagagcggcgtatattcacaggagtcattaacaagctctctgagcaccactccacagggaaagcgaatcatgtccgacatttttccaacattcggcagtaaaccctgccctacacgacttagcagtgcaaagaagaaaatctcgcacattgctgagcagtcaccatctgctgggtcttcgagtaatccccaacagatttcttcttttgacttcaccacaactaaagccctgagcgaggactcagtagtcgttgtcggcaagggcgtgttcgggagcctttcaagcgcccctgccacatgcagccagtccgttatcagctctgtggagaacggcgatacgttctcaatcaagcagagcatcgaacctcccagcggcatctacggccgctctgtccaacagaacatttcatcatacctagacgtcgagaatgaaaaggatgcaaaagtgagcatctccaaatccacgtataacaaaatgcgtcagaagcggaaagaagagaaggaattatttcacaataaggactgtgagaagaaggagaagaactcttgggagcgtatgaggcacaccgggaccgagaaaatggcatccgaaagtgagacgcccacgggcgctatttcccagtataaggaacggatgccatccgttacccacagccccgagataatggacctgagtgaattgagaccctttagtaaacctgagatcgcccttaccgaagcactgcgcctgctggcagacgaggattgggaaaagaaaatcgaagggctcaattttattagatgtctcgctgcttttcattccgagatcctgaacactaaactgcatgaaaccaactttgcagtggtgcaggaagttaagaatctgagatcaggcgtgtccagggcggcggtcgtctgcctgagcgacttgttcacctatctgaagaagtcgatggaccaggaattagatacaactgtgaaagttctgctccacaaggccggagagagtaatacttttatacgagaagacgtagacaaggcacttagggcaatggtcaacaacgtgactccagcgagagctgtcgtgtcactaattaacggaggccagagatactatggacggaagatgcttttttttatgatgtgccatccaaacttcgaaaagatgctggagaaatatgtgcctagcaaagatcttccctacattaaggactctgtgcggaacttgcagcaaaagggactcggcgagattcctctggataccccctcggccaaagggcgcagatcccatactggatctgtggggaacacacggagttcaagtgtaagcagagatgccttcaattccgccgaacgcgctgttaccgaagtgagagaagtcacccggaagagcgtgcctcggaattctctagagtccgccgaatacttgaaactgatcacgggtctgctgaacgccaaggacttccgtgatcgcataaacggcatcaagcagttattgtcggataccgaaaacaaccaggacttggtcgtgggaaatattgtgaaaatcttcgatgcctttaagagtcgactgcacgactcgaactccaaggtgaacttggtagcactggaaactatgcacaaaatgatccccctgttgagggatcatctgagtcccatcatcaatatgctcataccggcaattgtggataacaacttgaatagtaagaatcctggaatatatgccgccgctactaacgtagtacaagcgctctcacagcacgtggataactacctcttgttacagcctttctgtacaaaagcacagtttctcaatgggaaagctaagcaagacatgaccgagaaattagccgacatcgtgactgaactataccagagaaaaccccatgccacagagcagaaggtgcttgtagtgctgtggcatctcttggggaacatgacaaactcaggtagccttccaggagccgggggcaatattaggaccgctacagccaaattgtctaaggccctttttgcacagatggggcagaacctgcttaatcaggccgcctctcagccccctcacattaagaaaagtcttgaagagttgctggacatgaccattttgaatgagctgtag

SEQ ID NO: 184394 - DNA, 2988 bp, Artificial Sequence
  derived and/or modified sequence
atggccgcagctccatcagccctgctgttactgcctccatttcccgttctctccacttataggctccagtcccgctcaagaccatcagctccagaaacggacgactcccgagtcggcggcattatgaggggagaaaagaattattactttagaggggccgctggggaccacggtagctgtcctactactacttctcccctcgcttcagccctgctcatgccgtccgaggccgtgtcatcatcctggtcggagtctggaggcggactttcaggcggggatgaggaggatactagactgttgcagctgctccgtacagcgagggatccttcagaggcatttcaggcattgcaggccgccctgccgcgccgcgggggaaggcttgggtttccccggcgaaaggaggccctatatcgggccttggggcgcgtcttggtggagggggggtcagatgaaaagagactatgcctacagcttctcagcgacgtccttagaggtcagggcgaggccggacagctggaggaagctttctccctcgccctcctgccgcagctagttgtatctctgcgagaggagaaccccgccctgcgaaaggacgccctgcagattttgcatatttgtctgaaacgctcccctggggaggtgctgcggacccttattcagcagggacttgagagtacagacgccaggctcagagctagcaccgccctactgcttcccattctgttaacgactgaggatctgctgctgggattggacttgaccgaagttatcatctcattggcccgcaagctgggcgaccaagaaacagaagaagaaagcgagactgctttcagcgcattgcaacagataggagaaaggctgggtcaggaccgattccagtcatacatcagccggttgccaagcgctcttcggcgccactacaacagacgactcgagagtcagttcggctcacaggtgccttactacctggagttggaggcctcaggctttccggaggacccacttccctgtgccgtgaccctttctaacagtaatctgaaatttgggattataccacaagaactccactccagactgctggaccaggaggactataagaaccggactcaggctgtggaggaattgaaacaggtcctgggcaagttcaaccctagctccacgccccattcctcgctggtcggattcatcagtctgctgtataacctcctcgacgacagtaattttaaggtggtgcacggcacactggaagttctgcatctgctggtaattagactgggcgagcaggtgcagcagttcctcggaccagtcattgcagcctccgtgaaggtactggccgataacaagctcgttattaaacaggaatatatgaagattttcctcaagctgatgaaggaggttggcccccagcaggtgctttgtctcctgcttgagcatctgaagcacaagcatagccgggtgcgggaagaggttgtcaatatctgtatctgcagcttactgacttacccttctgaggactttgacctccccaagttatcctttgacctcgcccccgcgctcgtggatagtaagcggagagtgcgccaggctgctctggaagctttcgctgtgttggcaagtagcatgggatctggtaagacatccatactattcaaagccgtggacacagtagagttgcaggataatggcgatggtgtcatgaatgctgtccaggcaaggcttgccaggaaaactcttcctcgcttgactgagcagggcttcgtggagtacgccgtgctcatgccctcaagcgccggcggccgaagtaatcatttagcacacggggctgacactgattggctactggccggtaacagaactcagagcgcacattgtcactgtggagaccatgtgcgcgactcgatgcatatttatgggtcttattcacctactatttgcacgcgccgggtcctgtcagccggaaaaggaaaaaataaactgccatgggaaaacgaacaaccaggcatcatgggcgaaaatcagacatccaccagtaaagatatcgaacaattcagtacctacgattttatcccctctgcgaagctgaaactgtctcaagggatgcccgtgaacgatgatttatgtttttcacgcaagagggtctcacggaacctgttccagaattctcgggactttaacccagattgtttgcccttgtgcgctgctgggacgacaggcactcatcagactaacttgagcggaaagtgcgcacagcttggcttttcacagatttgtggtaaaacagggtccgtgggctctgatctgcagtttctgggtacaaccagcagccatcaggaaaaggtctatgccagtctgaacttcggctcaaagacccaacagaccttcggttcacaaacggagtgcacgtcaagcaacggtcaaaacccgtcccctggagcatacattctgccttcctacccggtctccagtccaagaacatcccctaagcacacgtcccccctgattatctctcccaaaaaaagtcaagacaattcggtcaattttagcaactcctggccattgaaatctttcgaagggctgagtaaaccttctccgcagaaaaaactcgtgtctcagaagtcttcggatccaaccgggagaaatcacggggaaaattcccaggaaaaaccccctgtgcaattgacgcccgccttggtccgttcgccttcctcccgacgggggctcaatgggacaaaacctgtcccaccaattccacgcggcatttctctcctgcccgacaaggctgatctttccactgtagggcacaagaagaaggagcctgatgacatctggaagtgcgagaaggatagccttccgatcgacctgagcgaactgaactttaaggacaaggacttggatcaggaagaggtgagacatatcagcaatatctgggttaaaacgctgtcgaacaaaacctttttctgtaaagagaagaacttcagttactgttag

SEQ ID NO: 184395 - DNA, 3483 bp, Artificial Sequence
  derived and/or modified sequence
atggccgcagctccatcggccttgctgctgttgccgccatttccggtgttaagtacctacagactccagagccgcagtaggccatcagccccagagaccgatgactctcgcgtgggggggattatgcggggggagaaaaactactattttcgcggtgcggctggagaccacggaagctgtccaactacaaccagtcctctggcttctgctcttcttatgccaagcgaagctgttagctcgtcctggtccgagagcggcggaggactttccggtggcgatgaggaggatacgagactcctgcagttgttgcgaaccgctagagacccctcggaagccttccaggccctacaggcggccttgcctcgccgcggtgggcggttaggattccccagacgaaaggaagcattgtatcgcgcactgggccgcgtactcgttgaaggtggttctgatgagaagagactgtgtttacagttgttgagcgatgtcctgagaggccaaggcgaagctggacagttagaagaggcgttcagtctggccctactgcctcaactggtggttagcttgcgggaggaaaacccggcactgaggaaagatgccctgcagatccttcacatttgcctcaaaagaagcccaggtgaggtcctgcgaaccctgatccagcaaggactggaaagcaccgacgccagactgcgcgcatctactgcactgctgctgcccattctgttgactactgaggacctgctgttgggattagacctcaccgaagtcataattagccttgcaaggaagctaggtgatcaggagacagaagaagaaagcgagaccgccttcagcgcactgcagcagataggtgagagacttggccaggaccgatttcagtcatatatttccagactccctagtgccctccggaggcattacaacagaaggttggagtctcagtttggaagccaggtcccatactacttagaactggaggcatccggtttccctgaggatccattgccttgtgcagtgaccctgagcaacagtaacctcaagttcggaatcattccccaggagttgcattcaaggttgctcgaccaggaggactacaagaacagaactcaagccgttgaagagctcaagcaggtgttgggaaaattcaacccctccagtaccccacacagctctctggtcggcttcatttctctgctgtataaccttttggacgactccaacttcaaagtggttcacgggactttagaagtgcttcacttgctggtgataaggctgggcgaacaggtgcagcagttcctcgggccagtaattgccgcttcggtgaaggtgctagccgataataagttggtcattaaacaggagtacatgaagatatttcttaagctcatgaaagaagtcgggccacagcaggtgctgtgtctgctcctagagcacctcaagcacaagcactcacgagttcgcgaggaagttgtaaacatctgtatctgtagtctgctcacttacccttcagaagactttgacctgcctaagctgtcattcgatctcgcccccgccttggtggattccaagcgaagggtgagacaagctgcactggaggcttttgctgtacttgctagctcaatgggaagtgggaagacttccattctgtttaaagctgtcgacaccgtcgagctgcaggataatggcgacggtgtgatgaacgcagtgcaggcacgattggccaggaagacgctgcctcggctaaccgaacagggatttgtggaatacgcggtgctgatgccatcaagtgctggcggtcggtctaatcacctggcccatggcgcagacactgattggctgctggctggtaacaggacccagagcgctcattgtcactgtggcgatcatgtgagagactccatgcacatctacggaagctatagtcctacaatatgcacacgtagggtgttgtcagctggaaaaggcaaaaataaactgccctgggagaacgagcagcccggcatcatgggcgagaatcagaccagcacatccaaggacatagagcagttcagcacatacgatttcattcctagcgctaagttgaagttatcccagggcatgccagtcaatgatgatctgtgtttctccagaaagcgcgtgtcacggaacctgtttcagaactctcgagactttaacccagactgcctgcccctctgtgctgccggaacaaccgggactcatcagacaaatctttccggcaagtgtgcccagctgggattctcccagatatgcggtaagacgggtagtgttgggtccgacctacaatttctcggcaccacatcgagtcaccaggaaaaggtctatgcttcactcaacttcggttctaaaacgcagcagacgtttgggagccagactgaatgtacttcctccaatggacagaacccgagcccaggggcctacatcctgccaagttaccctgtgtcttctccaagaacctctcctaagcacacatctcccttgatcatttcccccaagaagtcccaagataacagtgtgaacttttcgaattcttggccacttaagtcttttgagggattaagtaaaccctcaccccagaagaagctggtatcgcagaagtccagcgatccaacaggccgaaaccatggcgaaaacagccaggagaaaccgcctgttcagctcacgccagcactggtccggtcaccatcttcccgtagaggactgaacggaaccaagcccgtgcctccgattccacgcggtattagcctccttcctgataaagccgatctatctacagtggggcataagaaaaaggagcccgatgacatttggaaatgcgagaaggacagtctccctattgatctgtccgagttgaactttaaagataaagatctcgaccaggaggaaatgcactcaagtctccgaagcttgaggaattctgccgccaagaaacgggccaaactgtcagggagcactagtgacctagagtcaccggattctgctatgaaattggacctgacaatggactcccccagcctttcttcttccccaaatataaactcatactctgaatcgggcgtgtattctcaggaatccctcacaagctccctgtcaaccactccacaggggaagaggataatgtcggacatctttccaaccttcgggtccaagccctgtcctacccgattaagctctgccaagaaaaagatctctcatatcgcagaacagtctccatcggccggtagttcatcaaacccacaacagatcagcagctttgattttaccaccacgaaggccttgtccgaggatagtgtggtcgttgtcgggaaaggggtgtttggctctctgtcctcagcaccggcaacatgctcgcagtctgtcatctccagtgtggaaaatggagacaccttttcaattaagcaatctattgagcccccctctggcatttatgggcgttccgttcagcagaatttcataatttcttag

SEQ ID NO: 184396 - DNA, 6247 bp, Artificial Sequence
  derived and/or modified sequence
cgcccggtggcagctgtggggtctagggctcagacgggggccattttgccagaggctgcctcccggagttgggggcggcctggcggcaggctgaagctgttcttttgcctcttctgcagcttggggcttggagaggatctggaagtctgggctccatcgagccctttggagacggcaatggtttcttccaaccaccaccacctgacaaccctgcatggcggctgccccctccgcgctgcttctgctgccgccctttccagtcctctctacctatcggctccagagccgcagtcgtccttccgccccagagaccgatgatagtcgagttgggggcattatgagaggagagaaaaactactacttccgtggagctgcgggggaccacggttcctgccccactacaacttcgcctctggcctcggccctcttgatgccctcggaggcagtctcaagcagctggtctgagtctggaggcggtttgtcagggggagatgaagaggacactcggctccttcaactcctccgcactgcccgggatccttctgaggccttccaggctttgcaagctgctttgccgcggcggggcggtcgacttggcttcccccgacgcaaggaagctttgtatcgggcactgggccgagtgcttgtggaaggaggtagtgatgagaagcggctctgcttgcaacttctctcggacgttctccggggtcagggggaggcaggccagcttgaagaggcctttagcttagcacttttgcctcaactagttgtctcgttacgggaagagaatccagccctgcggaaagatgcgctgcagatccttcatatatgtctgaaacgtagtcctggagaggtgctgagaacgcttatacaacaaggactggaaagtaccgatgcccgacttagagcttccacagcactactgcttcccatcttgcttactactgaggacttgttgcttggtctggatctcaccgaggtgataatatccctagcccgaaagcttggtgatcaggagacagaagaagaatctgagacagctttctccgcacttcaacaaattggggagcgacttggccaagacaggtttcaatcttacatttctcgtctgccctctgccctgaggagacactacaatcgccgcctggagtcccagtttggaagtcaggttccttattatttggaacttgaagcctctggatttcctgaagatccccttccctgtgcagtgactctttccaacagcaatcttaaatttgggattattcctcaggagctgcattcacgattattggatcaggaagactataagaaccggacccaggccgtcgaagaactaaagcaggtgctgggaaaatttaaccctagttctactcctcattctagtcttgttggcttcattagtttgctatataatttgttagacgattctaacttcaaagtggtgcatggcacacttgaagtcctgcatttactggttattcgccttggagagcaggtacagcagttcttgggaccagttatagcagcttctgtcaaagtgctggcggacaacaagttggtgatcaaacaagaatacatgaaaatcttcctcaagctaatgaaggaagtaggacctcagcaggtgctttgtttactcctggaacatctcaaacataagcattccagagtgagagaggaggtggtgaacatttgcatctgctccctgctgacctatcctagtgaggattttgacttgcccaaactgtcctttgatcttgccccagctcttgtagatagcaaacgcagggtacgccaagcagctttagaagcttttgccgtattggcatcatcaatgggctcaggtaaaaccagcatcctttttaaagctgtggatacagttgaactgcaagataatggagatggagtgatgaatgctgtgcaggccagattggctaggaaaaccttaccaaggctcacagagcagggatttgtggaatatgcagtactgatgccatcttctgccgggggtaggtcaaaccatttggcacatggagcagatacggactggcttttggctggtaacagaactcagagtgcacactgtcactgtggtgaccacgtgagggatagcatgcacatttatggatcttacagcccaactatctgtacccgaagggtattaagtgcaggaaaaggaaaaaataaattaccatgggaaaatgagcaacctggaatcatgggagaaaaccagacctccacttccaaggatatagagcagttttcaacatatgatttcatcccatctgcaaaattaaagctttctcaaggaatgccagtcaatgatgatttatgttttagcagaaaaagagtatcaagaaacttatttcagaatagtcgggattttaacccagattgtcttcctttatgtgctgctggtactactgggactcatcaaacaaatctttctgggaaatgtgcacaacttggattttcacaaatatgtggtaaaactggcagtgtgggttctgacttacaattcctagggacaactagcagtcatcaagaaaaagtgtatgctagcctcaattttggcagtaagacacagcaaacatttggtagtcaaacagagtgtacttcctcaaatggtcaaaatccaagtccaggagcttacatccttccatcctatcctgtctcatcacctcgaactagtccaaagcatacatctcctcttattatatctccaaagaagtctcaagataattctgttaatttctcaaattcctggcctcttaaaagcttcgaaggactatcaaagccaagtccacagaagaagcttgtcagccaaaaatcgtctgatcctacgggtagaaatcatggagaaaattctcaagaaaaacctccagttcagcttacacctgccttggtgagatcgccatcttcccgacgaggtctaaatgggacaaagcctgttcctcccataccaaggggaataagccttttgcctgataaagctgatttaagcacagtgggacacaaaaagaaagagcctgatgatatttggaagtgtgaaaaagatagtcttccaattgatctttcagaattaaatttcaaggataaagatttggatcaagaagagatgcatagctctcttaggtcccttcgtaatagtgcagctaagaaaagagcaaaactgagtggcagtacttcagatcttgaaagccctgattctgcaatgaagctcgacttgacgatggactccccgtctctgtcttcctcaccaaacatcaattcttacagtgaaagtggagtttacagccaagaatcattgacttcttctctgtctacaactccccaggggaagagaataatgtcagacatatttccaacatttgggtcaaaaccttgtccaacaagactttcttctgcaaagaaaaaaatttctcatattgctgaacaaagccccagtgcagggtcatcatcaaatccacagcaaatttccagttttgacttcacaaccacaaaggctttatcagaagactcagtagtagttgttggaaaaggcgtatttggaagtttaagttcagcaccagcaacctgcagccaatcagtgatatcttctgtggaaaatggggatacattttcaattaaacaaagtattgaaccaccatcagggatttatggaagatcagtccagcaaaatatttcatcatatcttgatgttgagaatgaaaaagatgctaaagtttctatttctaaatctacttataacaagatgagacaaaagagaaaagaagagaaagaactgtttcacaataaagattgtgaaaagaaggaaaaaaattcctgggaacgaatgagacatacaggaactgagaaaatggcatctgaaagtgaaacacctactggagctatttcacagtataaagaaaggatgccttctgtcactcatagtccagaaataatggatctgtcagaactacgaccattctctaaaccagaaatagcactgacagaagccctgaggcttttggctgatgaggattgggagaagaaaattgagggactgaattttattagatgcttagctgcttttcattctgagatactgaacacaaagttgcatgaaacaaattttgcagttgttcaagaggtgaaaaatttacgttctggagtttctcgtgctgctgtggtctgtttaagtgatcttttcacttatttgaaaaagagcatggatcaagagctagataccacagtaaaagttttgttgcacaaggctggtgaatcaaatacatttataagagaagatgttgacaaagcattgagagctatggttaataatgtaactcctgcacgtgcagttgtttctcttatcaatggtggacaaaggtattatggtcgaaagatgctgttcttcatgatgtgtcatcctaactttgaaaaaatgcttgaaaagtatgtcccatctaaagatttgccatatattaaggactctgttagaaacttacagcaaaagggtttgggggagataccattagatactccttcagcaaaaggaagacgatctcatactggcagtgttggaaatacaagatcatcatctgtttctagagatgctttcaattcagctgaaagagctgtaactgaagttcgtgaagtcaccagaaaatcagtccctcgtaattccttagaaagtgctgagtaccttaaactcataactggcttattaaatgcaaaagactttcgtgatcgtattaatgggattaagcagcttttatcagatacagaaaataatcaagaccttgttgttggaaacattgtgaagatttttgatgcttttaaatctcgacttcatgattctaatagtaaagtaaatctggtggctctggaaacaatgcacaaaatgattcctctacttagagaccacttatctcctataatcaacatgctaattccagcaatagtggataacaatctgaattccaagaatccaggcatctatgcggctgctacaaatgttgttcaggcactgagtcagcatgtagacaattacttacttctacagccattttgcacaaaagctcagtttttaaatggaaaagcaaaacaggacatgacggaaaagcttgctgatattgttacggaactttatcaaaggaagccgcatgccacagagcagaaagtgttggttgttttatggcatctcttaggaaatatgacaaatagtggctctctgcctggagctggaggaaatatacgaacagccacagctaaattatcaaaagcactctttgcacagatgggtcagaatctgttaaatcaggctgcatctcaaccaccacatatcaaaaagagtttggaggaattactcgatatgacaattttaaatgaattatgaatcttcgataaaatactgtatgatgaacaaaagtgtttacatgatgacaaatggaactttctaaaagttatgttatcagtgcctgcacttcacatccagcaaattaagtcaatggctatttttatttgcagcctatgagtacacatctgtcctatatcaaccttaccacttatattcatcacataaaaacctaaaatattcatgaataattcatgaaatctgagtcacatgggatgaattcaattttaatatttttgagaaaagtcctgctcatttgcactattctatagaaactacaatttgttgccctatatgtaaaattagaattgtaattaaaaatacacattttattatgtaatcatgttctggtatgtctcatttctcagccttattttataacgtggaagtcattgaactatgttatcagaaactaagtttgtatattatttgtgaaaaacatgtatttctgaatcagtccgctaatatgattgtgcagtattagcttgcttttgctgctgtgttaatgtcatatatttgcttaccttttgggttcaattatctacataattgtgaaatttaacaagttataataaagcatgacaaccaaagttttagaaaacattaaacattttaaatgcacgtttaaaaaacgtgttgaatgtaacccccctatttttgtgtgcaaacactaaattttattgctttatgttttgacctttataaaggtgttattctgctgcccagttttgtaattctcaaaaatagtgccaggtcttctatagcttttttcagaattcatgggcttacaagtactgtatgcatctttaaaaagaaaaggaatgttataaaataaaaggatttatttcttta

SEQ ID NO: 184397 - DNA, 6140 bp, Artificial Sequence
  derived and/or modified sequence
agacgggggccattttgccagaggctgcctcccggagttgggggcggcctggcggcaggctgaagctgttcttttgcctcttctgcagcttggggcttggagaggatctggaagtctgggctccatcgagccctttggagacggcaatggtttcttccaaccaccaccacctgacaaccctgcatggcggctgccccctccgcgctgcttctgctgccgccctttccagtcctctctacctatcggctccagagccgcagtcgtccttccgccccagagaccgatgatagtcgagttgggggcattatgagaggagagaaaaactactacttccgtggagctgcgggggaccacggttcctgccccactacaacttcgcctctggcctcggccctcttgatgccctcggaggcagtctcaagcagctggtctgagtctggaggcggtttgtcagggggagatgaagaggacactcggctccttcaactcctccgcactgcccgggatccttctgaggccttccaggctttgcaagctgctttgccgcggcggggcggtcgacttggcttcccccgacgcaaggaagctttgtatcgggcactgggccgagtgcttgtggaaggaggtagtgatgagaagcggctctgcttgcaacttctctcggacgttctccggggtcagggggaggcaggccagcttgaagaggcctttagcttagcacttttgcctcaactagttgtctcgttacgggaagagaatccagccctgcggaaagatgcgctgcagatccttcatatatgtctgaaacgtagtcctggagaggtgctgagaacgcttatacaacaaggactggaaagtaccgatgcccgacttagagcttccacagcactactgcttcccatcttgcttactactgaggacttgttgcttggtctggatctcaccgaggtgataatatccctagcccgaaagcttggtgatcaggagacagaagaagaatctgagacagctttctccgcacttcaacaaattggggagcgacttggccaagacaggtttcaatcttacatttctcgtctgccctctgccctgaggagacactacaatcgccgcctggagtcccagtttggaagtcaggttccttattatttggaacttgaagcctctggatttcctgaagatccccttccctgtgcagtgactctttccaacagcaatcttaaatttgggattattcctcaggagctgcattcacgattattggatcaggaagactataagaaccggacccaggccgtcgaagaactaaagcaggtgctgggaaaatttaaccctagttctactcctcattctagtcttgttggcttcattagtttgctatataatttgttagacgattctaacttcaaagtggtgcatggcacacttgaagtcctgcatttactggttattcgccttggagagcaggtacagcagttcttgggaccagttatagcagcttctgtcaaagtgctggcggacaacaagttggtgatcaaacaagaatacatgaaaatcttcctcaagctaatgaaggaagtaggacctcagcaggtgctttgtttactcctggaacatctcaaacataagcattccagagtgagagaggaggtggtgaacatttgcatctgctccctgctgacctatcctagtgaggattttgacttgcccaaactgtcctttgatcttgccccagctcttgtagatagcaaacgcagggtacgccaagcagctttagaagcttttgccgtattggcatcatcaatgggctcaggtaaaaccagcatcctttttaaagctgtggatacagttgaactgcaagataatggagatggagtgatgaatgctgtgcaggccagattggctaggaaaaccttaccaaggctcacagagcagggatttgtggaatatgcagtactgatgccatcttctgccgggggtaggtcaaaccatttggcacatggagcagatacggactggcttttggctggtaacagaactcagagtgcacactgtcactgtggtgaccacgtgagggatagcatgcacatttatggatcttacagcccaactatctgtacccgaagggtattaagtgcaggaaaaggaaaaaataaattaccatgggaaaatgagcaacctggaatcatgggagaaaaccagacctccacttccaaggatatagagcagttttcaacatatgatttcatcccatctgcaaaattaaagctttctcaaggaatgccagtcaatgatgatttatgttttagcagaaaaagagtatcaagaaacttatttcagaatagtcgggattttaacccagattgtcttcctttatgtgctgctggtactactgggactcatcaaacaaatctttctgggaaatgtgcacaacttggattttcacaaatatgtggtaaaactggcagtgtgggttctgacttacaattcctagggacaactagcagtcatcaagaaaaagtgtatgctagcctcaattttggcagtaagacacagcaaacatttggtagtcaaacagagtgtacttcctcaaatggtcaaaatccaagtccaggagcttacatccttccatcctatcctgtctcatcacctcgaactagtccaaagcatacatctcctcttattatatctccaaagaagtctcaagataattctgttaatttctcaaattcctggcctcttaaaagcttcgaaggactatcaaagccaagtccacagaagaagcttgtcagccaaaaatcgtctgatcctacgggtagaaatcatggagaaaattctcaagaaaaacctccagttcagcttacacctgccttggtgagatcgccatcttcccgacgaggtctaaatgggacaaagcctgttcctcccataccaaggggaataagccttttgcctgataaagctgatttaagcacagtgggacacaaaaagaaagagcctgatgatatttggaagtgtgaaaaagatagtcttccaattgatctttcagaattaaatttcaaggataaagatttggatcaagaagaggtcagacatatttccaacatttgggtcaaaaccttgtccaacaagactttcttctgcaaagaaaaaaatttctcatattgctgaacaaagccccagtgcagggtcatcatcaaatccacagcaaatttccagttttgacttcacaaccacaaaggctttatcagaagactcagtagtagttgttggaaaaggcgtatttggaagtttaagttcagcaccagcaacctgcagccaatcagtgatatcttctgtggaaaatggggatacattttcaattaaacaaagtattgaaccaccatcagggatttatggaagatcagtccagcaaaatatttcatcatatcttgatgttgagaatgaaaaagatgctaaagtttctatttctaaatctacttataacaagatgagacaaaagagaaaagaagagaaagaactgtttcacaataaagattgtgaaaagaaggaaaaaaattcctgggaacgaatgagacatacaggaactgagaaaatggcatctgaaagtgaaacacctactggagctatttcacagtataaagaaaggatgccttctgtcactcatagtccagaaataatggatctgtcagaactacgaccattctctaaaccagaaatagcactgacagaagccctgaggcttttggctgatgaggattgggagaagaaaattgagggactgaattttattagatgcttagctgcttttcattctgagatactgaacacaaagttgcatgaaacaaattttgcagttgttcaagaggtgaaaaatttacgttctggagtttctcgtgctgctgtggtctgtttaagtgatcttttcacttatttgaaaaagagcatggatcaagagctagataccacagtaaaagttttgttgcacaaggctggtgaatcaaatacatttataagagaagatgttgacaaagcattgagagctatggttaataatgtaactcctgcacgtgcagttgtttctcttatcaatggtggacaaagccatttacacattgctgtaagaaggtgtacagcccagcatttatcagatgtattggaatttatggaaccagaacgtattttatctgcagcaaaggatatggctgaacgcatattaccagctgctgctaagtttgctcaagacagttcacaagaaaccaggtattatggtcgaaagatgctgttcttcatgatgtgtcatcctaactttgaaaaaatgcttgaaaagtatgtcccatctaaagatttgccatatattaaggactctgttagaaacttacagcaaaagggtttgggggagataccattagatactccttcagcaaaaggaagacgatctcatactggcagtgttggaaatacaagatcatcatctgtttctagagatgctttcaattcagctgaaagagctgtaactgaagttcgtgaagtcaccagaaaatcagtccctcgtaattccttagaaagtgctgagtaccttaaactcataactggcttattaaatgcaaaagactttcgtgatcgtattaatgggattaagcagcttttatcagatacagaaaataatcaagaccttgttgttggaaacattgtgaagatttttgatgcttttaaatctcgacttcatgattctaatagtaaagtaaatctggtggctctggaaacaatgcacaaaatgattcctctacttagagaccacttatctcctataatcaacatgctaattccagcaatagtggataacaatctgaattccaagaatccaggcatctatgcggctgctacaaatgttgttcaggcactgagtcagcatgtagacaattacttacttctacagccattttgcacaaaagctcagtttttaaatggaaaagcaaaacaggacatgacggaaaagcttgctgatattgttacggaactttatcaaaggaagccgcatgccacagagcagaaagtgttggttgttttatggcatctcttaggaaatatgacaaatagtggctctctgcctggagctggaggaaatatacgaacagccacagctaaattatcaaaagcactctttgcacagatgggtcagaatctgttaaatcaggctgcatctcaaccaccacatatcaaaaagagtttggaggaattactcgatatgacaattttaaatgaattatgaatcttcgataaaatactgtatgatgaacaaaagtgtttacatgatgacaaatggaactttctaaaagttatgttatcagtgcctgcacttcacatccagcaaattaagtcaatggctatttttatttgcagcctatgagtacacatctgtcctatatcaaccttaccacttatattcatcacataaaaacctaaaatattcatgaataattcatgaaatctgagtcacatgggatgaattcaattttaatatttttgagaaaagtcctgctcatttgcactattctatagaaactacaatttgttgccctatatgtaaaattagaattgtaattaaaaatacacattttattatgtaatcatgttctggtatgtctcatttctcagccttattttataacgtggaagtcattgaactatgttatcagaaactaagtttgtatattatttgtgaaaaacatgtatttctgaatcagtccgctaatatgattgtgcagtattagcttgcttttgctgctgtgttaatgtcatatatttgcttaccttttgggttcaattatctacataattgtgaaatttaacaagttataataaagcatgacaaccaaagttttagaaaacattaaacattttaaatgcacgtttaaaaaacgtgttgaatgtaacccccctatttttgtgtgcaaacactaaattttattgctttatgttttgacctttataaaggtgttattctgctgcccagttttgtaattctcaaaaatagtgccaggtcttctatagcttttttcagaattcatgggcttacaagtactgtatgcatctttaaaaagaaaaggaatgttataaaataaaaggatttatttctt

SEQ ID NO: 184398 - DNA, 3777 bp, Artificial Sequence
  derived and/or modified sequence
acgtggtgcccttggttacgcccggtggcagctgtggggtctagggctcagacgggggccattttgccagaggctgcctcccggagttgggggcggcctggcggcaggctgaagctgttcttttgcctcttctgcagcttggggcttggagaggatctggaagtctgggctccatcgagccctttggagacggcaatggtttcttccaaccaccaccacctgacaaccctgcatggcggctgccccctccgcgctgcttctgctgccgccctttccagtcctctctacctatcggctccagagccgcagtcgtccttccgccccagagaccgatgatagtcgagttgggggcattatgagaggagagaaaaactactacttccgtggagctgcgggggaccacggttcctgccccactacaacttcgcctctggcctcggccctcttgatgccctcggaggcagtctcaagcagctggtctgagtctggaggcggtttgtcagggggagatgaagaggacactcggctccttcaactcctccgcactgcccgggatccttctgaggccttccaggctttgcaagctgctttgccgcggcggggcggtcgacttggcttcccccgacgcaaggaagctttgtatcgggcactgggccgagtgcttgtggaaggaggtagtgatgagaagcggctctgcttgcaacttctctcggacgttctccggggtcagggggaggcaggccagcttgaagaggcctttagcttagcacttttgcctcaactagttgtctcgttacgggaagagaatccagccctgcggaaagatgcgctgcagatccttcatatatgtctgaaacgtagtcctggagaggtgctgagaacgcttatacaacaaggactggaaagtaccgatgcccgacttagagcttccacagcactactgcttcccatcttgcttactactgaggacttgttgcttggtctggatctcaccgaggtgataatatccctagcccgaaagcttggtgatcaggagacagaagaagaatctgagacagctttctccgcacttcaacaaattggggagcgacttggccaagacaggtttcaatcttacatttctcgtctgccctctgccctgaggagacactacaatcgccgcctggagtcccagtttggaagtcaggttccttattatttggaacttgaagcctctggatttcctgaagatccccttccctgtgcagtgactctttccaacagcaatcttaaatttgggattattcctcaggagctgcattcacgattattggatcaggaagactataagaaccggacccaggccgtcgaagaactaaagcaggtgctgggaaaatttaaccctagttctactcctcattctagtcttgttggcttcattagtttgctatataatttgttagacgattctaacttcaaagtggtgcatggcacacttgaagtcctgcatttactggttattcgccttggagagcaggtacagcagttcttgggaccagttatagcagcttctgtcaaagtgctggcggacaacaagttggtgatcaaacaagaatacatgaaaatcttcctcaagctaatgaaggaagtaggacctcagcaggtgctttgtttactcctggaacatctcaaacataagcattccagagtgagagaggaggtggtgaacatttgcatctgctccctgctgacctatcctagtgaggattttgacttgcccaaactgtcctttgatcttgccccagctcttgtagatagcaaacgcagggtacgccaagcagctttagaagcttttgccgtattggcatcatcaatgggctcaggtaaaaccagcatcctttttaaagctgtggatacagttgaactgcaagataatggagatggagtgatgaatgctgtgcaggccagattggctaggaaaaccttaccaaggctcacagagcagggatttgtggaatatgcagtactgatgccatcttctgccgggggtaggtcaaaccatttggcacatggagcagatacggactggcttttggctggtaacagaactcagagtgcacactgtcactgtggtgaccacgtgagggatagcatgcacatttatggatcttacagcccaactatctgtacccgaagggtattaagtgcaggaaaaggaaaaaataaattaccatgggaaaatgagcaacctggaatcatgggagaaaaccagacctccacttccaaggatatagagcagttttcaacatatgatttcatcccatctgcaaaattaaagctttctcaaggaatgccagtcaatgatgatttatgttttagcagaaaaagagtatcaagaaacttatttcagaatagtcgggattttaacccagattgtcttcctttatgtgctgctggtactactgggactcatcaaacaaatctttctgggaaatgtgcacaacttggattttcacaaatatgtggtaaaactggcagtgtgggttctgacttacaattcctagggacaactagcagtcatcaagaaaaagtgtatgctagcctcaattttggcagtaagacacagcaaacatttggtagtcaaacagagtgtacttcctcaaatggtcaaaatccaagtccaggagcttacatccttccatcctatcctgtctcatcacctcgaactagtccaaagcatacatctcctcttattatatctccaaagaagtctcaagataattctgttaatttctcaaattcctggcctcttaaaagcttcgaaggactatcaaagccaagtccacagaagaagcttgtcagccaaaaatcgtctgatcctacgggtagaaatcatggagaaaattctcaagaaaaacctccagttcagcttacacctgccttggtgagatcgccatcttcccgacgaggtctaaatgggacaaagcctgttcctcccataccaaggggaataagccttttgcctgataaagctgatttaagcacagtgggacacaaaaagaaagagcctgatgatatttggaagtgtgaaaaagatagtcttccaattgatctttcagaattaaatttcaaggataaagatttggatcaagaagagatgcatagctctcttaggtcccttcgtaatagtgcagctaagaaaagagcaaaactgagtggcagtacttcagatcttgaaagccctgattctgcaatgaagctcgacttgacgatggactccccgtctctgtcttcctcaccaaacatcaattcttacagtgaaagtggagtttacagccaagaatcattgacttcttctctgtctacaactccccaggggaagagaataatgtcagacatatttccaacatttgggtcaaaaccttgtccaacaagactttcttctgcaaagaaaaaaatttctcatattgctgaacaaagccccagtgcagggtcatcatcaaatccacagcaaatttccagttttgacttcacaaccacaaaggctttatcagaagactcagtagtagttgttggaaaaggcgtatttggaagtttaagttcagcaccagcaacctgcagccaatcagtgatatcttctgtggaaaatggggatacattttcaattaaacaaagtattgaaccaccatcagggatttatggaagatcagtccagcaaaatttcatcatatcttgatgttgagaatgaaaaagatgctaaagtttctatttctaaatctacttataacaagatgagac

SEQ ID NO: 184399 - DNA, 5163 bp, Artificial Sequence
  derived and/or modified sequence
atggctgctgcccccagcgccctgctgctgctgccccccttccctgtgctgagcacctaccgcctgcagagccgcagccggcccagcgcccctgagacagatgacagccgggtgggcggcatcatgagaggagagaagaactactacttcagaggagctgctggggaccacggcagctgccccaccaccaccagccccctggccagcgccctgctgatgcccagcgaggccgtgagcagctcctggagcgagagcggcggcggcctgtctggaggagatgaggaggacacccggctgctgcagctgctgaggacagcccgggaccccagcgaggccttccaggccctgcaggccgccctgccccggcggggcggccgcctgggcttccccaggaggaaggaggccctgtaccgggccctgggccgggtgctggtggagggcggcagtgatgagaagaggctgtgcctgcagctgctgagtgatgtgctgcggggccagggcgaggccggccagctggaggaggccttcagcctggccctgctgccccagctggtggtgtccctgcgggaggagaacccagccctgaggaaggatgccctgcagatcctgcacatctgcctgaagaggagccctggagaggtgctgcggaccctcatccagcagggcctggagagcacagatgcccggctgcgggccagcacagccctgctgctgcccatcctgctgaccacagaggacctgctgctgggcctggacctgacagaggtgatcatcagcctggccaggaagctgggggaccaggagacagaggaggagagcgagacagccttcagcgccctgcagcagattggagagcggctgggccaggaccgcttccagagctacatcagccggctgcccagcgccctgcggcggcactacaacagaaggctggagagccagtttggcagccaggtgccctactacctggagctggaggccagcggcttccctgaggaccccctgccctgtgctgtgaccctgagcaacagcaacctgaagtttggcatcatcccccaggagctgcacagccggctgctggaccaggaggactacaagaacagaacccaggccgtggaggagctgaagcaggtgctgggcaagttcaaccccagcagcaccccccacagcagcctggtgggcttcatcagcctgctgtacaacctgctggatgacagcaacttcaaggtggtgcacggcaccctggaggtgctgcacctgctggtgatccggctgggggagcaggtgcagcagttcctgggccctgtgattgctgcctctgtgaaggtgctggccgacaacaagctggtgatcaagcaggagtacatgaagatcttcctgaagctgatgaaggaggtgggcccccagcaggtgctgtgcctgctgctggagcacctgaagcacaagcacagccgggtgcgggaggaggtggtgaacatctgcatctgcagcctgctgacctaccccagcgaggactttgacctgcccaagctgagctttgacctggccccagccctggtggacagcaagagaagagtgcggcaggccgccctggaggcctttgctgtgctggccagctccatgggcagcggcaagaccagcatcctcttcaaggctgtggacacagtggagctgcaggacaatggagatggagtgatgaatgctgtgcaggcccggctggccaggaagaccctgccccggctgacagagcagggctttgtggagtatgctgtgctgatgcccagcagcgctgggggccgcagcaaccacctggcccacggggctgacacagactggctgctggccggcaacagaacccagagcgcccactgccactgtggggaccacgtgcgggacagcatgcacatctacggcagctacagccccaccatctgcaccaggagagtgctgtctgctgggaagggcaagaacaagctgccctgggagaatgagcagcccggcatcatgggagagaaccagaccagcaccagcaaggacatcgagcagttcagcacctatgacttcatccccagcgccaagctgaagctgagccagggcatgcctgtgaatgatgacctgtgcttcagcaggaagagggtgtccaggaacctcttccagaacagccgggacttcaacccagactgcctgcccctgtgtgccgccggcaccaccggcacccaccagaccaacctgtctggaaaatgtgcccagctgggcttcagccagatctgtgggaagacaggctctgtgggcagtgacctgcagttcctgggcaccaccagcagccaccaggagaaggtgtatgccagcctgaactttggcagcaagacccagcagaccttcggcagccagacagaatgtaccagcagcaatggccagaaccccagccctggggcctacatcctgcccagctaccctgtgagcagccccaggaccagccccaagcacaccagccccctcatcatcagccccaagaagagccaggacaacagcgtgaacttcagcaacagctggcccctgaagagctttgagggcctgagcaagcccagcccccagaagaagctggtgtcccagaagagcagtgaccccactggaagaaatcatggagagaacagccaggagaagccccctgtgcagctgaccccagccctggtgcgcagccccagcagccggcggggcctgaatggcaccaagcctgtgccccccatcccccggggcatcagcctgctgcctgacaaggctgacctgagcacagtgggccacaagaagaaggagccagatgacatctggaagtgtgagaaggacagcctgcccatcgacctgtctgagctgaacttcaaggacaaggacctggaccaggaggagatgcacagcagcctgcggagcctgagaaattctgctgccaagaagagggccaagctgagcggcagcaccagtgacctggagagcccagattctgccatgaagctggacctgaccatggacagccccagcctgagcagcagccccaacatcaacagctacagcgagagcggcgtgtacagccaggagagcctgaccagcagcctgagcaccaccccccagggcaagaggatcatgtctgacatcttccccaccttcggcagcaagccctgccccacccggctgagcagcgccaagaagaagatcagccacatcgccgagcagagccccagcgctggcagcagcagcaacccccagcagatcagcagctttgacttcaccaccaccaaggccctgtctgaagattctgtggtggtggtgggcaaaggagtgtttggcagcctgagcagcgccccagccacctgcagccagagcgtcatcagctctgtggagaatggagacaccttcagcatcaagcagagcattgagccccccagcggcatctacggccgctctgtgcagcagaacatcagcagctacctggatgtggagaatgagaaggatgccaaggtgtccatcagcaagagcacctacaacaagatgaggcagaagaggaaggaggagaaggagctgttccacaacaaggactgtgagaagaaggagaagaacagctgggagaggatgaggcacactggaacagagaagatggccagcgagagcgagacccccaccggggccatcagccagtacaaggagaggatgcccagcgtgacccacagccctgagatcatggacctgtctgagctgcggcccttcagcaagccagaaattgccctgacagaggccctgcggctgctggctgatgaggactgggagaagaagattgagggcctgaacttcatccgctgcctggccgccttccacagcgagatcctgaacaccaagctgcacgagaccaactttgctgtggtgcaggaggtgaagaacctgcggtctggagtgtccagagctgctgtggtgtgcctgagtgacctcttcacctacctgaagaagtccatggaccaggagctggacaccaccgtgaaggtgctgctgcacaaggccggggagagcaacaccttcatcagagaagatgtggacaaggccctgcgggccatggtgaacaacgtgaccccagcccgggctgtggtgtccctcatcaatggaggccagcgctactacggcaggaagatgctgttcttcatgatgtgccaccccaactttgagaagatgctggagaagtatgtgcccagcaaggacctgccctacatcaaggacagcgtgaggaacctgcagcagaagggcctgggggagatccccctggacacccccagcgccaagggccgccgcagccacacaggctctgtgggcaacaccaggagcagctctgtgtccagagatgccttcaacagcgctgagagagctgtgacagaggtgcgggaggtgaccaggaagtctgtgcccaggaacagcctggagagcgctgagtacctgaagctgatcaccggcctgctgaatgccaaggacttccgggaccgcatcaatggcatcaagcagctgctgagtgacacagagaacaaccaggacctggtggtgggcaacatcgtgaagatctttgatgccttcaagagccggctgcatgacagcaacagcaaggtgaacctggtggccctggagaccatgcacaagatgatccccctgctgcgggaccacctgagccccatcatcaacatgctgatcccagccatcgtggacaacaacctgaacagcaagaaccctggcatctatgctgctgccaccaacgtggtgcaggccctgagccagcacgtggacaactacctgctgctgcagcccttctgcaccaaggcccagttcctgaatggcaaggccaagcaggacatgacagagaagctggccgacatcgtgacagagctgtaccagaggaagccccacgccacagagcagaaggtgctggtggtgctgtggcacctgctgggcaacatgaccaacagcggcagcctgcccggggccggcggcaacatcagaacagccacagccaagctgagcaaggccctgtttgcccagatgggccagaacctgctgaaccaggccgccagccagcccccccacatcaagaagagcctggaggagctgctggacatgaccatcctgaatgagctgtag

SEQ ID NO: 184400 - DNA, 2988 bp, Artificial Sequence
  derived and/or modified sequence
atggctgctgcccccagcgccctgctgctgctgccccccttccctgtgctgagcacctaccgcctgcagagccgcagccggcccagcgcccctgagacagatgacagccgggtgggcggcatcatgagaggagagaagaactactacttcagaggagctgctggggaccacggcagctgccccaccaccaccagccccctggccagcgccctgctgatgcccagcgaggccgtgagcagctcctggagcgagagcggcggcggcctgtctggaggagatgaggaggacacccggctgctgcagctgctgaggacagcccgggaccccagcgaggccttccaggccctgcaggccgccctgccccggcggggcggccgcctgggcttccccaggaggaaggaggccctgtaccgggccctgggccgggtgctggtggagggcggcagtgatgagaagaggctgtgcctgcagctgctgagtgatgtgctgcggggccagggcgaggccggccagctggaggaggccttcagcctggccctgctgccccagctggtggtgtccctgcgggaggagaacccagccctgaggaaggatgccctgcagatcctgcacatctgcctgaagaggagccctggagaggtgctgcggaccctcatccagcagggcctggagagcacagatgcccggctgcgggccagcacagccctgctgctgcccatcctgctgaccacagaggacctgctgctgggcctggacctgacagaggtgatcatcagcctggccaggaagctgggggaccaggagacagaggaggagagcgagacagccttcagcgccctgcagcagattggagagcggctgggccaggaccgcttccagagctacatcagccggctgcccagcgccctgcggcggcactacaacagaaggctggagagccagtttggcagccaggtgccctactacctggagctggaggccagcggcttccctgaggaccccctgccctgtgctgtgaccctgagcaacagcaacctgaagtttggcatcatcccccaggagctgcacagccggctgctggaccaggaggactacaagaacagaacccaggccgtggaggagctgaagcaggtgctgggcaagttcaaccccagcagcaccccccacagcagcctggtgggcttcatcagcctgctgtacaacctgctggatgacagcaacttcaaggtggtgcacggcaccctggaggtgctgcacctgctggtgatccggctgggggagcaggtgcagcagttcctgggccctgtgattgctgcctctgtgaaggtgctggccgacaacaagctggtgatcaagcaggagtacatgaagatcttcctgaagctgatgaaggaggtgggcccccagcaggtgctgtgcctgctgctggagcacctgaagcacaagcacagccgggtgcgggaggaggtggtgaacatctgcatctgcagcctgctgacctaccccagcgaggactttgacctgcccaagctgagctttgacctggccccagccctggtggacagcaagagaagagtgcggcaggccgccctggaggcctttgctgtgctggccagctccatgggcagcggcaagaccagcatcctcttcaaggctgtggacacagtggagctgcaggacaatggagatggagtgatgaatgctgtgcaggcccggctggccaggaagaccctgccccggctgacagagcagggctttgtggagtatgctgtgctgatgcccagcagcgctgggggccgcagcaaccacctggcccacggggctgacacagactggctgctggccggcaacagaacccagagcgcccactgccactgtggggaccacgtgcgggacagcatgcacatctacggcagctacagccccaccatctgcaccaggagagtgctgtctgctgggaagggcaagaacaagctgccctgggagaatgagcagcccggcatcatgggagagaaccagaccagcaccagcaaggacatcgagcagttcagcacctatgacttcatccccagcgccaagctgaagctgagccagggcatgcctgtgaatgatgacctgtgcttcagcaggaagagggtgtccaggaacctcttccagaacagccgggacttcaacccagactgcctgcccctgtgtgccgccggcaccaccggcacccaccagaccaacctgtctggaaaatgtgcccagctgggcttcagccagatctgtgggaagacaggctctgtgggcagtgacctgcagttcctgggcaccaccagcagccaccaggagaaggtgtatgccagcctgaactttggcagcaagacccagcagaccttcggcagccagacagaatgtaccagcagcaatggccagaaccccagccctggggcctacatcctgcccagctaccctgtgagcagccccaggaccagccccaagcacaccagccccctcatcatcagccccaagaagagccaggacaacagcgtgaacttcagcaacagctggcccctgaagagctttgagggcctgagcaagcccagcccccagaagaagctggtgtcccagaagagcagtgaccccactggaagaaatcatggagagaacagccaggagaagccccctgtgcagctgaccccagccctggtgcgcagccccagcagccggcggggcctgaatggcaccaagcctgtgccccccatcccccggggcatcagcctgctgcctgacaaggctgacctgagcacagtgggccacaagaagaaggagccagatgacatctggaagtgtgagaaggacagcctgcccatcgacctgtctgagctgaacttcaaggacaaggacctggaccaggaggaggtgcgccacatcagcaacatctgggtgaagaccctgagcaacaagaccttcttctgcaaggagaagaacttctcctactgctag

SEQ ID NO: 184401 - DNA, 3483 bp, Artificial Sequence
  derived and/or modified sequence
atggctgctgcccccagcgccctgctgctgctgccccccttccctgtgctgagcacctaccgcctgcagagccgcagccggcccagcgcccctgagacagatgacagccgggtgggcggcatcatgagaggagagaagaactactacttcagaggagctgctggggaccacggcagctgccccaccaccaccagccccctggccagcgccctgctgatgcccagcgaggccgtgagcagctcctggagcgagagcggcggcggcctgtctggaggagatgaggaggacacccggctgctgcagctgctgaggacagcccgggaccccagcgaggccttccaggccctgcaggccgccctgccccggcggggcggccgcctgggcttccccaggaggaaggaggccctgtaccgggccctgggccgggtgctggtggagggcggcagtgatgagaagaggctgtgcctgcagctgctgagtgatgtgctgcggggccagggcgaggccggccagctggaggaggccttcagcctggccctgctgccccagctggtggtgtccctgcgggaggagaacccagccctgaggaaggatgccctgcagatcctgcacatctgcctgaagaggagccctggagaggtgctgcggaccctcatccagcagggcctggagagcacagatgcccggctgcgggccagcacagccctgctgctgcccatcctgctgaccacagaggacctgctgctgggcctggacctgacagaggtgatcatcagcctggccaggaagctgggggaccaggagacagaggaggagagcgagacagccttcagcgccctgcagcagattggagagcggctgggccaggaccgcttccagagctacatcagccggctgcccagcgccctgcggcggcactacaacagaaggctggagagccagtttggcagccaggtgccctactacctggagctggaggccagcggcttccctgaggaccccctgccctgtgctgtgaccctgagcaacagcaacctgaagtttggcatcatcccccaggagctgcacagccggctgctggaccaggaggactacaagaacagaacccaggccgtggaggagctgaagcaggtgctgggcaagttcaaccccagcagcaccccccacagcagcctggtgggcttcatcagcctgctgtacaacctgctggatgacagcaacttcaaggtggtgcacggcaccctggaggtgctgcacctgctggtgatccggctgggggagcaggtgcagcagttcctgggccctgtgattgctgcctctgtgaaggtgctggccgacaacaagctggtgatcaagcaggagtacatgaagatcttcctgaagctgatgaaggaggtgggcccccagcaggtgctgtgcctgctgctggagcacctgaagcacaagcacagccgggtgcgggaggaggtggtgaacatctgcatctgcagcctgctgacctaccccagcgaggactttgacctgcccaagctgagctttgacctggccccagccctggtggacagcaagagaagagtgcggcaggccgccctggaggcctttgctgtgctggccagctccatgggcagcggcaagaccagcatcctcttcaaggctgtggacacagtggagctgcaggacaatggagatggagtgatgaatgctgtgcaggcccggctggccaggaagaccctgccccggctgacagagcagggctttgtggagtatgctgtgctgatgcccagcagcgctgggggccgcagcaaccacctggcccacggggctgacacagactggctgctggccggcaacagaacccagagcgcccactgccactgtggggaccacgtgcgggacagcatgcacatctacggcagctacagccccaccatctgcaccaggagagtgctgtctgctgggaagggcaagaacaagctgccctgggagaatgagcagcccggcatcatgggagagaaccagaccagcaccagcaaggacatcgagcagttcagcacctatgacttcatccccagcgccaagctgaagctgagccagggcatgcctgtgaatgatgacctgtgcttcagcaggaagagggtgtccaggaacctcttccagaacagccgggacttcaacccagactgcctgcccctgtgtgccgccggcaccaccggcacccaccagaccaacctgtctggaaaatgtgcccagctgggcttcagccagatctgtgggaagacaggctctgtgggcagtgacctgcagttcctgggcaccaccagcagccaccaggagaaggtgtatgccagcctgaactttggcagcaagacccagcagaccttcggcagccagacagaatgtaccagcagcaatggccagaaccccagccctggggcctacatcctgcccagctaccctgtgagcagccccaggaccagccccaagcacaccagccccctcatcatcagccccaagaagagccaggacaacagcgtgaacttcagcaacagctggcccctgaagagctttgagggcctgagcaagcccagcccccagaagaagctggtgtcccagaagagcagtgaccccactggaagaaatcatggagagaacagccaggagaagccccctgtgcagctgaccccagccctggtgcgcagccccagcagccggcggggcctgaatggcaccaagcctgtgccccccatcccccggggcatcagcctgctgcctgacaaggctgacctgagcacagtgggccacaagaagaaggagccagatgacatctggaagtgtgagaaggacagcctgcccatcgacctgtctgagctgaacttcaaggacaaggacctggaccaggaggagatgcacagcagcctgcggagcctgagaaattctgctgccaagaagagggccaagctgagcggcagcaccagtgacctggagagcccagattctgccatgaagctggacctgaccatggacagccccagcctgagcagcagccccaacatcaacagctacagcgagagcggcgtgtacagccaggagagcctgaccagcagcctgagcaccaccccccagggcaagaggatcatgtctgacatcttccccaccttcggcagcaagccctgccccacccggctgagcagcgccaagaagaagatcagccacatcgccgagcagagccccagcgctggcagcagcagcaacccccagcagatcagcagctttgacttcaccaccaccaaggccctgtctgaagattctgtggtggtggtgggcaaaggagtgtttggcagcctgagcagcgccccagccacctgcagccagagcgtcatcagctctgtggagaatggagacaccttcagcatcaagcagagcattgagccccccagcggcatctacggccgctctgtgcagcagaacttcatcatctcctag

SEQ ID NO: 184402 - DNA, 5163 bp, Artificial Sequence
  derived and/or modified sequence
atggccgccgcccccagcgccctgctgctgctgccccccttccccgtactatcaacttacaggctgcagagccggtctcggccgagcgcccccgaaactgacgattcaagggtggggggaataatgagaggcgaaaagaattattacttccgcggcgctgctggggaccatggttcctgccctacaactacaagtcctttagcatccgctcttcttatgccttctgaggccgtgtcctcctcttggtcagagagcgggggcggattgtccggcggcgacgaagaggacacgagactgttgcaactgttgcgtaccgcgagagatccgtcggaggccttccaggctctgcaagcagcactccctcgcagagggggtcggttaggctttcctagacggaaagaggccctctaccgggcgctgggccgcgtgcttgtagagggcggaagcgacgagaagcggctgtgcctgcagttgttgtctgatgtgctacgtggtcaaggcgaagcgggacagcttgaagaagccttcagcctggcactgttaccccagctggtggtgtccctgcgagaggagaatcccgcactacggaaagacgcactgcagatcctgcatatctgcttgaaaagaagcccaggagaagtactgcgaaccctgattcagcagggacttgagagcaccgacgcaagactccgagcttccaccgctctgctgttacccatcttgctgaccactgaagacctgctgttggggctggacctcaccgaggttatcatttctctggcccgtaaactgggagatcaagagactgaggaggaaagtgaaactgccttcagcgcccttcagcagattggcgagcggctgggccaggatcgcttccaatcctacatctcacgtctgccttcggccctgcggcgacactacaaccgcagactggagagccagttcggatctcaagtgccttactatcttgagttagaggctagcggtttccccgaagacccattgccctgtgcagttactctgtcaaactccaatctcaagtttggaatcatcccacaagaactgcattcccggctcttggaccaggaggattacaagaaccgtactcaggccgtggaggaattgaagcaggtgttgggcaagtttaacccaagctccacgccacatagcagcttagtgggttttatcagtcttctgtacaatctcctggatgattctaattttaaggtcgtgcatggtaccttagaagtgttgcacctccttgttattcggttgggagaacaggtgcagcagtttcttgggccagtaatagcagcttccgtgaaagttttggcggataataaactggtgatcaagcaagagtacatgaagatcttcctgaagcttatgaaagaggtgggaccccagcaggtgctttgtcttctgcttgaacacctcaaacataagcacagtagagtccgggaggaagtcgtgaatatttgcatatgctcattgttaacgtatccatctgaggacttcgatctccccaagctgtccttcgacctcgctcccgctctggtggatagtaagcgacgcgtcagacaggcagcactcgaggctttcgccgtccttgcatcatctatggggtccgggaagacaagcattctgttcaaagctgtcgataccgtggaacttcaagacaacggtgatggggtgatgaacgcggttcaagctcgattagcgagaaagacacttcctcgtttgaccgagcagggctttgtggaatatgctgtactgatgccctcatcggcaggaggccgcagtaaccatttagctcacggcgctgacacagattggctccttgccggcaacagaacccagagcgcccactgccactgtggcgaccacgtccgagactccatgcacatttacggatcctactctccaactatctgcacccgcagggtgctttccgcaggaaagggcaagaataagttaccctgggagaacgagcaacctggcatcatgggcgagaatcagacttccacctccaaagacatcgagcaattctccacctacgacttcatcccctccgccaaactgaaattgtcccaggggatgcctgttaacgatgacctgtgttttagccggaagcgcgtctccaggaacctatttcagaatagccgggactttaatcccgactgtctgcctttgtgtgccgccggaacaactgggacgcaccagactaacctgagcgggaaatgtgcccaactcggcttttcacagatctgcgggaagaccggtagcgtggggtctgacttgcagtttctggggactactagcagccatcaggagaaggtgtacgcctcactgaacttcggttccaaaactcagcagacgttcggtagccagaccgagtgtacgagctcaaatggacagaacccatctccaggcgcttatatcttaccatcgtatcccgtgtcatcccctagaacatcaccgaagcatacttccccactgattattagtcctaagaagagccaagacaatagtgtcaatttcagcaactcttggcccctgaaatcttttgagggactcagcaagccatcccctcaaaaaaagctggtcagccagaaaagctcagaccctacaggccgcaatcacggagagaactcacaagagaagccccctgtgcagctcactcccgcactggtgcgctccccctcttctcgtcggggtctaaacggaacaaagcccgtgccacccatcccaaggggtatctccctcctgcccgacaaagccgatttatctaccgtcgggcacaaaaagaaagagccagatgacatctggaaatgtgagaaggacagtctgcccatcgacttatccgagcttaatttcaaggacaaagacctcgaccaggaggagatgcactcgtccctgcgaagcttaaggaactctgcagccaaaaagcgcgcgaaattatccggatcaacgagcgacctggagtctcctgattctgcaatgaaacttgacctcaccatggattcaccatcattgagtagctcccccaatataaacagctactccgaatcaggagtgtactcacaggagtctctcacatcatccctgagcacaactcctcagggcaaacgtataatgtcggatatctttccaacatttgggtcaaaaccatgtcctaccaggctatcttccgctaaaaagaaaatctctcacatcgcagaacaatctcccagcgcagggtcaagcagcaacccacagcagatctctagctttgatttcacaaccacaaaagcgctgagcgaggactccgtggtggtcgtcgggaagggcgtgttcggatctctgtcaagcgcacctgccacgtgctcccaaagcgttatctcttctgttgagaatggggacacgttctctattaagcaatcaattgaacccccaagtggaatttacggtagaagcgttcagcagaacatctcttcttacctggatgtggagaacgaaaaggatgccaaagtgagcatttcgaagagcacctataataaaatgagacagaaaaggaaagaggaaaaggaactcttccacaacaaagactgcgaaaagaaagagaagaattcctgggagcgcatgaggcatactgggaccgagaagatggcaagcgagagtgaaaccccaacaggggccatttcacaatacaaggagagaatgcccagcgtgacccactccccagagatcatggacctgtctgaacttcggccgttctccaagccggagattgcactgaccgaggcattgaggctcctggcggatgaggattgggaaaaaaagatcgaggggctgaatttcattcggtgcctggccgcattccattctgaaattctgaacaccaaattgcatgagactaattttgccgtggtccaggaggtgaagaatcttagaagcggagtgtccagggcggcagtagtgtgtctgagtgacctgtttacatatctcaaaaagagtatggaccaagagctagacaccactgtgaaggtcctgcttcacaaggctggcgagagtaatacgttcataagggaggatgtggacaaggctctgagggccatggtaaataacgttacccctgcccgcgccgtggttagtttgatcaacggaggccagcgatattatgggagaaagatgctattctttatgatgtgtcaccccaactttgaaaagatgctcgaaaaatacgtgccctcaaaagatctgccctacattaaagatagtgtcaggaatctccagcaaaagggcctcggagaaatcccgttggatactcccagtgctaagggccgcagatcgcatacaggctcagtgggcaatactagaagcagtagtgtctcaagggatgctttcaacagtgctgagagagctgtgaccgaggttcgggaggtgacacgaaagtcggttcccagaaactcccttgagagtgcggagtacttaaaactgatcaccggtttgctcaacgcaaaagatttcagggaccggatcaacggtattaaacagcttttatccgatactgagaacaatcaggacctggtggtcggcaacattgtgaagatcttcgatgcgtttaagagccgcttgcatgattctaactctaaagtgaacctcgttgcattggaaaccatgcataagatgattcctctgttgcgcgaccacctctcaccaatcatcaacatgctgattccagcaatcgtcgataacaatcttaacagcaaaaacccgggcatctatgctgccgcaacaaatgtggtgcaggccctctcacaacatgttgacaactacttgctgctccagcccttctgtaccaaggcccagtttcttaacggcaaagccaaacaggacatgacagagaaactggccgacatcgtgaccgaactctaccagcgaaagccccatgctaccgaacaaaaggtactggtggtgctgtggcacctgttaggcaatatgaccaatagtggaagcctcccaggagccggcggcaacatacggaccgctaccgctaagctctctaaggcattgtttgcacaaatgggacaaaatctgctcaatcaggccgctagtcagccacctcacattaaaaagtctttggaagaattgctagacatgaccatccttaatgagctgtag

SEQ ID NO: 184403 - DNA, 2988 bp, Artificial Sequence
  derived and/or modified sequence
atggccgccgcccccagcgccctgctgctgctgccccccttccccgtgctgtccacataccgcctgcagtcacgctcccgcccctctgcgcctgagacagatgatagtcgggtgggcgggatcatgaggggggagaaaaattattacttcaggggggccgcgggcgatcacggctcatgcccaacgacaacctctcctcttgccagcgccctactcatgccgtcagaagccgtatcaagtagttggagtgagagcgggggagggctcagcggtggggatgaggaggacaccaggctgctgcagttgttgagaactgccagggacccttcagaagcttttcaggccttacaagctgcactgcctcggcgcggtgggcggttgggattccctcgccgtaaagaagcattataccgagcgctaggaagagtcctggtcgagggtgggtccgatgaaaaacgcttgtgtctccagctgctttccgatgttctgcgcggccagggagaagcaggacagctggaagaggctttcagtttggccctgcttcctcagcttgtcgtttcactgcgcgaagaaaaccccgctctgaggaaagacgctctgcagatcctccacatctgtttgaaacggagtcccggcgaggtgcttcgaactctaatacaacagggactggaatctacagacgctaggttgagagcaagcacagctctgttgttaccgatccttctgacgactgaagatttactgctcggtctggatctgacagaggtgattatcagcctggctcggaaactaggcgaccaggaaaccgaagaggaatctgagacagcgttttctgcactgcagcaaatcggagaacgccttggccaggacagattccagtcctatatcagcaggctgccatccgctctcagaagacactacaatagacggttggagtctcagtttggcagccaggtcccttattacttagagttggaggcctctggttttccagaggatcctctgccttgcgctgtcaccttgtcaaactctaatctaaaattcggcataattccacaggaactgcacagccgcctcttggatcaggaagattacaagaatcggacccaagccgttgaggagcttaagcaggtcctgggaaagttcaaccccagctcaactcctcacagttccttggtagggttcattagtctgctgtacaatctcctagatgactctaacttcaaggtggtccacggtactttagaggtgctgcacctgctggtgattagactcggtgagcaggtgcagcagttcctggggcctgtgatcgctgcatctgtcaaagtgctcgccgataataagttggttatcaagcaagagtacatgaagattttcttaaagctgatgaaggaggtaggcccacaacaagtcctgtgcctactcctcgagcacctaaagcataaacacagccgcgtgagggaggaggtcgtaaatatctgcatatgttcgttgttaacatacccatccgaggactttgatctccccaagctgtcctttgatctcgctccagcattagtagattccaaacgcagggtgaggcaggcagcattggaggcctttgccgtgctcgcaagtagtatgggctctggcaagacctccattctcttcaaggcagtcgacaccgttgaactacaggataatggggatggggtcatgaatgcggtgcaggcccgcttggctcgtaaaacactacccaggctcaccgaacagggttttgtggagtatgctgttctgatgccctcaagcgctgggggcagaagtaaccacctggcgcatggcgcagataccgactggttgctggcaggaaacagaacacagagtgcgcactgtcattgtggagatcacgtgcgagactctatgcatatctacggctcctattctcccactatctgtacgcggcgggtactgtccgcaggtaaagggaagaacaaactcccttgggagaacgagcagcctggcataatgggcgagaatcagactagcaccagtaaggatattgagcaattttcaacatatgatttcattccaagcgccaagctgaagctttcacagggtatgcctgttaatgatgacctatgtttttctaggaaacgcgtgagtcggaacctattccagaattcgcgcgatttcaacccggattgtctgccgctgtgtgccgcagggaccaccgggactcaccagactaatttgtctgggaaatgcgctcagttgggcttcagtcaaatatgtggtaaaaccgggagcgtagggtcagatctgcagttcctcggcacaacatccagccaccaagagaaagtctatgcctccctgaatttcggcagtaaaacccagcagacattcggctctcaaaccgaatgtacatctagtaacggtcaaaatccttctccaggcgcctacatattacccagttaccccgtgtcctcaccaaggacatcgcctaaacacacatcaccactaatcatctcacctaagaaatcccaagataatagcgtgaatttctccaatagctggcccctcaaatcctttgagggtctttctaagcccagtcctcagaagaagttagtatcccagaagtcctctgaccccactggcaggaaccatggagagaactctcaagaaaaacctcccgtccagttgacccccgcccttgtgcgcagcccttctagtcgccgagggctgaatggcaccaaaccggtcccacccattcccagagggatttcgctgttgccagacaaggccgacctttctacggtgggccataagaagaaggagccggatgatatttggaagtgcgagaaagattctctgccgatagatctcagtgagcttaatttcaaagacaaggacctagatcaagaagaggttaggcacatcagcaatatttgggtcaagactctgagcaacaaaacctttttttgtaaagaaaaaaatttttcttattgctag

SEQ ID NO: 184404 - DNA, 3483 bp, Artificial Sequence
  derived and/or modified sequence
atggccgccgcccccagcgccctgctgctgctgccccccttccccgtattatccacttatcggctccagtcccggtcccgaccgtctgccccggaaactgacgattccagagttggcggtataatgcgaggcgagaagaattattatttcaggggggccgccggagaccatggtagctgtcccaccactacgtcaccgcttgccagtgctttacttatgcccagtgaagcagtgagttcttcctggtccgagtctggaggcggtttgtccggaggagacgaagaggacacacgactgctgcaattactgcgcacagctcgggacccatcagaagccttccaagcattgcaagccgcgctgccaagacgcggtggcaggcttggatttccacgcaggaaggaagcactatatagggcgctgggacgtgtactcgttgaggggggttcggatgagaaacggctatgtctgcagctcttgtccgacgtgttgagaggacagggtgaagccggacagctagaggaggctttttcgcttgctcttcttccccagctggtggtgagcctgcgagaggagaatcccgcactgagaaaggacgcacttcagattctccatatctgccttaagagaagccctggggaggtcctacggacattaatccaacaggggcttgagtccactgacgcccggctgcgcgcaagcacagctcttctgctgcctatcttgttgaccaccgaggatttgttactcggcttagatctcactgaggtgattatcagtttggcccgcaagctcggagaccaggagacagaggaagaatcggagactgccttcagtgccctgcaacagatcggagaacgcttaggtcaggatcgatttcaatcctatatcagtcgcctcccaagcgcactgcggcgccattacaatagacgattagagtcccaatttggttcacaagtaccatactaccttgaactggaagcctccggcttcccggaagacccactcccctgcgctgtcaccctctccaactctaacctgaaatttgggatcattccgcaggagctccattcacggctgctagaccaggaggattacaagaatcgaactcaggccgttgaggaacttaagcaggtgcttggaaaatttaatccgagcagtaccccccacagctcactcgtcggattcataagcctgctgtacaatctcttggacgactcgaacttcaaagttgttcacggtactcttgaagtgttacatctcctggtaataagactcggtgagcaagttcagcagttcctgggcccagtgatcgcagcatctgttaaggtcctggccgataataaactggttatcaaacaggagtacatgaaaatctttctgaagctcatgaaggaagtgggacctcagcaggtgctttgtctcctcttagaacacctgaagcataagcatagtcgggtgcgggaggaggtggtgaatatctgcatctgtagcttgctcacctatccatccgaggacttcgatttaccaaaactgagctttgatctggcgcctgctctggttgattccaagagaagagtccgccaggccgccctggaggccttcgccgtcctcgcatccagcatgggatccggaaaaaccagtatcctctttaaagccgtcgacactgtcgagttacaggataatggcgatggcgtcatgaacgcagtgcaagcccggctggctcgtaaaaccctcccaagattaaccgagcaaggcttcgtcgaatatgctgtgttaatgccatcctccgcggggggaaggagtaatcatttggcacacggagcggacactgattggctgctggccgggaatagaacccaatccgcccattgtcactgcggcgaccatgtgagagactctatgcacatctacggctcctactctccaacaatttgtacgagaagggtcctgtctgcaggaaagggaaagaacaaattaccctgggaaaatgaacagccagggatcatgggagagaaccagacgtccaccagcaaggacattgagcagtttagcacatacgattttattcccagtgcaaagttgaaattgagccagggaatgccagtgaatgatgatctgtgcttcagtcggaaaagggtgtctcgaaatttgttccagaattcgagggatttcaatccagattgtctgcccttgtgtgctgcaggaacaaccggaactcaccagacaaacctaagtggaaagtgcgcccagctaggattctctcagatctgcggaaagaccgggagcgtaggatcagatctgcagtttttaggaactacatcatcccaccaagaaaaggtttacgcttcactgaactttggctcaaagacacaacagacttttggctctcagaccgagtgtactagtagcaatggccagaatccctcaccgggggcatacattctgccgtcgtatccagtgtcttctcctcgaacttctcctaaacacacttctcctttaattatttctcccaagaagtcacaggacaacagcgtcaacttttcaaattcctggcccctgaaaagtttcgaggggctctctaagccatcaccccagaaaaagctggtgagccagaagtctagcgaccctactggccggaatcatggggaaaactcccaggaaaagcccccggtgcagctgacacctgctctggtgcgcagcccttcttctcgccggggtctgaatggcacaaaacccgtgccccccatcccgaggggtatctcactgcttcctgacaaggccgatctctccactgtgggccacaagaaaaaggagccagacgacatatggaaatgtgaaaaggattcattaccaattgacctgtctgaacttaatttcaaggacaaggacttggaccaggaagagatgcatagcagtctgagaagtctgcgcaattcggcggccaaaaagcgagcaaagttgagcggttctacgtctgacctggagtcgcccgatagcgccatgaaattggatctgacaatggattcaccatccctttcgtcctctcccaacatcaattcctacagcgagagcggtgtgtattcccaagaaagcctgacaagtagcttgtccactaccccacaggggaagcggatcatgagtgatatttttccaaccttcgggtctaaaccttgccctacacggctctcaagtgcaaaaaagaagattagccacattgctgaacagtccccttccgcgggctccagtagcaatcctcagcaaatctcaagctttgatttcactaccactaaggcactctctgaggattccgtggtggtagtgggaaaaggggtcttcggcagcctatccagcgccccagctacctgcagccagtccgtcatctcctccgtagagaatggagacaccttcagcattaagcagtctattgaacctccttctggaatctatgggcggtccgtccagcagaatttcatcattagctag

SEQ ID NO: 184405 - DNA, 5162 bp, Artificial Sequence
  derived and/or modified sequence
atggccgcagccccttctgctcttctcctgctgccaccttttccagttttgtctacttaccgactgcaaagcagaagtcggcctagtgctcctgagaccgatgatagcagggttgggggaattatgcggggtgaaaagaactactacttccggggagcagccggtgatcacggatcctgtcccactactacgtccccgctggcaagcgcactcctgatgccttccgaagcagtgtcatcttcttggtcagagagtggcggtggactcagcgggggagatgaagaagacacacgactcctgcagctattaaggacagcccgtgatcccagtgaagccttccaggcactacaggcagccctgcctagaaggggcggtcggcttggcttccctagaaggaaggaagccctttacagggcactgggtcgggtgttggtggaggggggttcagacgagaaaaggctttgcctgcagttgctgtccgatgtactgcgcggacagggggaagctggccagctggaggaagcattttctcttgcgctcttaccccagctcgtggtgtctctccgagaagagaatccagccctgcgtaaagatgccctacaaattctgcatatatgcctgaaacggagccctggagaggtcctgcgtaccttaatccaacagggtttggagtccaccgacgcccgtctccgcgcttcgacagccctactcctgcccatactgctcaccacagaggatctgctcttaggcctcgatctcactgaagtgatcatcagtctagcccgaaagttaggtgatcaggaaacagaggaggagagcgagaccgcgttcagtgcactccagcaaatcggagaacgcctcgggcaggaccgttttcagtcctatatctccagactgcccagcgctctccgaaggcactacaataggaggctcgaaagccagtttggttcacaggtgccctattacctggagctggaggcaagcggcttccctgaagaccccttgccgtgcgccgtcactctgtccaactctaacctcaaatttggcataatcccccaggaactgcactctagactgttggaccaggaagactacaaaaatcggacccaggccgtcgaggaactgaagcaggtgcttggaaagtttaatccatcaagtacaccacattctagcctggtcggctttattagcctgctctataaccttctggatgactccaattttaaagtcgtccacggaacactggaagttcttcacctgttggtaatccgacttggggagcaggtacagcagtttctgggccctgttatagcagcttctgttaaggttctcgccgacaacaagctggttattaaacaggagtacatgaagatctttcttaagttgatgaaagaggtgggccctcagcaggtgctctgccttttacttgaacatcttaagcataaacactctcgagtccgggaggaggtcgttaacatctgcatctgttcattgctgacctatcccagtgaagatttcgacctgcccaagctttctttcgatttagcaccggcattggtcgattctaaaaggcgcgttcggcaagctgccttagaggctttcgcagtacttgcctctagcatgggaagcgggaagacctccattctctttaaggctgtggataccgtggagctacaggacaacggggatggggtgatgaatgctgtgcaggcccgacttgctaggaagaccttgcctaggttgactgaacagggttttgtggagtacgcggtactgatgccatcttctgcagggggacgatccaaccaccttgctcatggcgctgataccgattggctgcttgcaggaaataggacccagagcgcccattgccattgcggtgaccacgtgagagattctatgcatatttatggctcttacagccctactatctgtacccggagggtcctttcagccggaaaaggaaaaaacaaattaccatgggaaaacgaacagcctggtatcatgggtgagaaccagacctcgacatccaaagatatcgagcagttttccacttatgatttcatcccaagtgctaaactgaaactgagccagggcatgccggtgaacgatgatctgtgctttagcaggaagcgggtgtctcggaacctgtttcagaactcacgcgattttaatccggactgtttgccactgtgcgcggcaggaacaactggcacccatcagactaatttgagtggcaagtgcgcacagctcgggttctcccagatttgtggcaaaacaggctccgtcggcagcgacctacagtttttgggaactacttcaagtcatcaggagaaggtgtatgcaagccttaatttcggatcgaagacacagcagactttcggctcacagaccgagtgcacctcgtcaaatggccagaacccctctcccggtgcttacattttaccatcatatcctgtgtcatccccacgaaccagcccgaagcatacaagccctctgatcatatcaccgaagaagagtcaggacaatagtgtgaattttagcaacagctggccgctgaagtccttcgaggggctctctaagccaagccctcagaagaagctcgtttcccaaaagtctagcgacccgactggtcgtaaccacggcgagaatagtcaggaaaagccgccagtccagcttacaccggctcttgtccgatcaccctctagccggcgaggtcttaacggtacaaagcccgtgcccccaatcccacgcggaattagcctcctgcccgacaaggccgatctgagtaccgtcggccacaaaaagaaagagcccgacgacatctggaaatgcgagaaagattccctccctatcgacttgagtgaactcaactttaaagacaaggacctcgaccaagaggaaatgcactcatccctgaggtctttgcggaattccgccgcaaagaagcgcgcaaagttatcaggtagtacctcggatctggaaagtcccgacagtgccatgaaactcgatttgacaatggattccccatccttatcatccagcccaaatataaatagttattctgagtcaggtgtttactcacaggagtccctcacatcgtctctgtcgacaactccacaggggaaacgaattatgtcggacatatttcctacgttcggcagcaaaccatgtcctacaagactatcctccgctaagaagaagatcagtcacatcgcagagcaatccccctccgctggtagttcaagcaacccacagcagatctccagctttgactttactactaccaaagccctgtctgaggattccgtggtggtggttggcaagggcgtatttggaagcctgtcatccgccccagccacatgctcacagagcgttatctcctcagtcgagaacggcgacaccttctctatcaagcaaagcatcgagccaccttcggggatctacggtcgatctgtgcagcagaatatctcctcttatttggatgtggaaaacgagaaagacgcaaaggtgagtatcagtaagagtacatataacaaaatgagacaaaaacggaaggaagagaaagaattgttccacaacaaggattgcgagaaaaaagagaagaattcttgggagagaatgaggcacacaggaactgaaaagatggctagcgaatccgagacacccactggcgctatctcccaatacaaagagcgtatgccctccgtcacacactcccccgagataatggacctctccgagctgagacctttttccaagcccgagattgctctgactgaggcgctaaggttgcttgctgacgaagactgggaaaagaaaatcgagggccttaactttatacggtgtctcgcagcttttcattctgaaattctgaatacgaagctgcacgagaccaatttcgcggtggtacaggaggtcaaaaacctgaggtccggagtatctcgggcagcagtggtgtgcctgtcggaccttttcacctatttgaaaaaaagcatggaccaagaactggataccacagtgaaggtactactgcacaaagctggcgagagcaacacctttatccgcgaggacgtggataaggcactaagggccatggttaataacgtcactcctgcgagagccgttgtctctctaatcaatggcggacagcgctactacggaaggaaaatgcttttctttatgatgtgccatccaaatttcgaaaagatgctcgagaaatacgtacccagcaaagatctgccttatattaaagatagtgtgcgcaatttacagcagaaaggactgggagaaatccccttggatacccctagcgccaagggaagaaggagtcataccggtagtgtgggcaatacacgcagttcctcagtctctcgagacgcttttaactccgcggagcgagccgtgacagaggtacgcgaagtgacaagaaaaagtgtccccaggaattcacttgagagcgcggaatatctgaagttgattacaggtcttttgaacgctaaagatttccgggatcgaataaacgggattaagcagctgttgagcgatacggagaataatcaggatctggtggtgggaaatatcgtcaaaatctttgacgccttcaagtcacgactgcatgattcaaattccaaggtaaacctcgttgctctggagactatgcacaaaatgataccactgctgcgagatcatctgtcccctatcattaacatgctgattccagccatcgtcgataataacttgaactccaagaaccccggaatttacgcagccgcaacaaacgttgtacaggctttgtcacagcacgtagataattacctgttacttcagcccttctgtacgaaggctcagttcttgaacggtaaggctaagcaggatatgacagagaagttagcggacattgtgacagaactataccagcgaaaaccacatgccactgagcagaaggtcctggtggtgctgtggcatctcttaggtaacatgacaaacagtggttccctgcccggagctggaggtaacatcaggacagcaacagcgaaattgtctaaggctttatttgcccagatgggacaaaaccttttgaatcaggccgcatctcagcctccgcatatcaaaaaaagtcttgaggaactgctcgatatgactattctgaacgagctcta

SEQ ID NO: 184406 - DNA, 2988 bp, Artificial Sequence
  derived and/or modified sequence
atggccgctgctccaagcgctctcttgctgttgcctccgttccctgtgctgtccacctacaggctgcaatctagaagccggccaagcgctcctgagactgatgattctcgcgtgggtggaatcatgcgaggtgaaaaaaattactactttcgcggagctgcgggtgaccatggttcttgcccgaccactaccagccctctcgcatcggccctcctcatgcccagcgaagcggttagttcatcctggtcagagtccgggggaggactctctggcggtgatgaggaggataccagactgctccagctcctccgcacagctcgagacccatcagaagccttccaggccttacaagccgctctgcctcgcaggggaggccgtctcggattccctcgtcgaaaggaggcgctgtatcgcgcattgggccgtgtgctggtcgagggcggttcggatgagaaaagattgtgtctgcaactactgtccgacgttctgagagggcaaggagaggcaggtcagctggaggaagcattttcacttgctcttctgcctcagctagtagtgtccttgcgagaggaaaaccccgctctgcgcaaggatgccctgcagatcctgcacatctgcttgaaaaggagccctggtgaagtcctcagaacattgatccaacagggacttgagtccactgatgcccgactaagagcctctactgctttattactgcctattctgttgacaacagaggatcttcttctaggactggacctgacagaggtgattatcagcttggcacgaaagttgggagatcaggagaccgaagaagagtcagaaaccgcctttagcgcactgcaacaaattggagaaagactcggccaggacagattccagagctacatatccaggctgccttccgcccttcgacgccattacaatcgcagattggagtcacagttcggctctcaggtgccatattatctggaactggaagctagcggcttccctgaggaccccctgccgtgcgcggtgacgctatctaactccaacttgaagttcggaattatacctcaggagctgcactctagactcttggatcaggaagattacaagaaccgcactcaggcagtggaagagttaaagcaggttctaggtaagtttaaccctagctcaacccctcacagttcccttgtggggttcatttcacttctctataacctgctggacgacagtaattttaaagtagtgcacgggacactcgaggttcttcacctcctggtaatccgccttggcgaacaggtgcaacagttcctcggtcccgttattgctgcttccgtgaaggttctggcagacaataagttagtgataaaacaagagtatatgaaaatcttcctgaaactgatgaaggaggtcggcccacagcaggtcctctgcttgctcttagagcatcttaagcataagcattccagggtgagggaggaggtagtgaatatttgcatctgcagtcttctcacctatcccagcgaagatttcgatctgcccaagctgtcattcgatttggctccagccctcgtggattcaaaacgcagagtgagacaagcagccctggaggccttcgctgtgttggcctcttctatggggagtggtaaaacatctatcctgtttaaggcagtggatacagtagagctgcaggacaacggtgatggtgtcatgaacgctgtccaggccagacttgccagaaaaaccctgccccgactcactgagcaggggtttgttgaatacgctgttctgatgccgtcctccgcagggggtagaagtaatcatctagcacacggggcagatacagactggcttcttgcaggtaaccggacacagtctgctcactgccattgcggcgaccacgtgcgcgattccatgcacatatatgggagctactctcctaccatttgtacccgcagggtactatctgcgggaaagggaaagaataagttaccctgggagaacgagcagccaggaatcatgggcgaaaatcagacctccaccagtaaggacatcgaacagttcagtacttatgactttatcccaagtgccaaacttaagctgtctcagggtatgccagtgaatgacgatctgtgcttcagccggaagagagtgagccggaatctgttccagaacagtcgcgattttaatcccgattgcctgccattgtgtgccgcaggaacaaccgggacccaccagaccaacctgagtggaaagtgcgctcaactgggtttttctcagatttgtggaaagactgggagtgtaggctctgacctacagttcctggggaccacctcatctcatcaggaaaaggtttatgcatccctgaactttggatccaaaacacagcagacttttggaagccagaccgagtgcacctcctcaaacgggcagaacccttcacccggtgcgtacattctgccttcttacccggtgtcatcaccacggactagccctaaacatacatccccccttattatcagccctaaaaaatcccaggacaactccgtaaacttctctaattcctggccactcaagtccttcgaaggcttgagcaaaccctcaccccaaaaaaagctggtatcacagaagagtagcgaccctaccggtagaaatcatggcgaaaattctcaagaaaaacccccagtgcagctcacacctgcactcgtgcgctctccgagctctagacgtggcctgaacggtactaagcctgtcccccctataccacgcggtatatccctgttgcccgataaggctgatctgtctactgtgggacataaaaagaaagagccggatgacatttggaaatgtgaaaaagactccctgccaatcgacttatccgagctcaatttcaaggataaagacctcgaccaggaagaagtgcgacacatctccaatatttgggtgaagacactctcaaacaaaacttttttctgtaaagagaagaatttttcttattgttag

SEQ ID NO: 184407 - DNA, 3483 bp, Artificial Sequence
  derived and/or modified sequence
atggccgcagctccttcagcattgctgctcctgcccccattccccgttcttagtacctacaggttacagagcagaagccggccttccgctcctgagacggacgacagtagagtggggggaattatgagaggtgaaaagaattactatttccgtggggcagctggggatcacggaagttgtcccactacaacaagcccgctggcctctgccctgcttatgccctcagaagcggtaagtagctcctggtccgaaagcggaggcggactgagcggaggtgacgaggaagacacccgcctgctccagctgctgagaacggccagagaccccagtgaggcttttcaagccctgcaggctgccctgccacgcagaggtggaagactgggatttcccagacgtaaggaagcattgtaccgagccttgggacgagttttggtggagggtgggagcgacgagaagcgcctctgcttgcagctcctctcggacgtcctacgtggccagggcgaggccggacagctggaagaagctttctctcttgcgttgctaccgcagctagtagtttctctgagagaggaaaaccccgctctaaggaaggacgctctgcagatcctgcacatatgcctgaaacggtctcccggagaggtgctgcgaacgctgattcagcaggggctcgaatccacagatgccagactgcgggcaagcaccgccttgctgctcccaatactgcttaccactgaggacctgttattgggcttggatcttactgaggtaatcatttccctggccaggaagcttggcgatcaagagaccgaagaggagtctgaaaccgcattctcagctctgcagcagatcggggaacgcctggggcaggaccgcttccagtcctacataagccggcttccatccgccctgcggagacattacaatagaaggctggaaagccagttcggatcccaggttccctactatttggaactggaggccagtggcttcccagaagaccccctcccctgcgccgtcactctgagcaattctaatttgaaatttggcattatcccccaggagttgcactcccgacttcttgaccaggaagattacaagaaccgcactcaggccgtggaggagctgaaacaagtgctcggaaagttcaacccttccagcactccccactccagcctggtggggtttatttcactcctgtataaccttctcgacgattctaacttcaaagtcgtacatggaacgctcgaggtgcttcaccttctcgtgatacggctcggtgaacaagtgcagcaatttttagggccagttattgccgcaagcgttaaagtgctcgccgacaacaagcttgtaatcaagcaggagtacatgaagatctttctcaagttgatgaaggaggttggccctcagcaagtgctttgtcttctgctcgagcacctgaagcacaagcactctagagtcagagaggaagtcgtcaacatatgtatttgtagtctcctcacctatccgtcagaagattttgacctgcctaagttatccttcgacctggctccagcactcgtggactccaagcgcagagtgaggcaagccgctctcgaggctttcgccgtactagctagctccatggggagtggaaagacctcaatattattcaaggctgtggacactgtagagctgcaggacaacggagacggcgtcatgaacgctgttcaggcccgactagctcgcaagaccctgccccgtctgacggaacaggggttcgtggagtacgctgtcctcatgccatcatctgcaggtggcaggagcaatcacctcgctcacggcgcagataccgactggctgctggcaggtaatcgcacccagagcgcacactgccattgcggggaccacgttcgcgactccatgcacatctatgggtcatactctccaactatctgtacccggagggtgctgtctgctggtaaggggaagaacaagctcccttgggagaatgagcagcctgggatcatgggtgaaaaccagacgagcacttccaaggacatcgaacaattcagcacatacgactttattccatccgctaagctaaagctctcccagggaatgccagtcaacgatgacctctgcttctctaggaagagggtgtccaggaatctgtttcagaattctagggatttcaaccccgattgtttacctctgtgtgctgctggcaccaccggtacccatcagacaaaccttagcggaaagtgtgcccagctgggatttagtcagatctgtggcaaaaccggaagtgtcggatccgacctccagtttctgggaacaacttccagtcaccaagagaaagtttatgcgagcctcaattttggatcaaaaacccagcagacatttggcagtcagacagaatgcacatcctcaaatgggcagaacccgtcccccggtgcttacattttgccttcttatccagttagcagccctagaactagccctaaacacacctcacctctgatcatctcacctaagaaatcacaggacaactctgtgaacttcagtaactcctggcctctgaagtcattcgagggactgagtaagccatcccctcagaagaaactggtgagccagaagtcctccgatcccaccggccgaaatcacggcgagaacagccaggaaaaaccgccagtccagctgacacccgcactggtacggtctccatcttcccggagaggattgaatgggaccaaacccgtaccgcctatccccagagggatctccctccttcctgataaggcagatcttagcacagtgggccataaaaagaaagagcctgacgacatctggaagtgcgagaaagattcgctccctattgatctgtctgaactgaactttaaggataaggacctagatcaggaggagatgcatagcagtcttcggagcctgcgcaatagcgccgctaagaaacgggctaaacttagtggctctaccagcgatttagagtcacctgatagtgcgatgaagctggatttgactatggacagccccagtctgtcatcgagtcccaatattaactcctacagtgagtcaggtgtctatagccaggaatcgcttacaagctctctcagcacaactccacaggggaaacggattatgagtgacatattcccaacattcgggtcaaagccctgtcctacacgcctaagttcagccaagaaaaagatatctcacattgcggagcaatccccctctgcagggtcttccagcaacccgcagcagatctccagcttcgactttactacaaccaaagcactgtcagaagatagcgtggtggttgtgggcaagggtgtcttcggctccctgtcatcggcgccagctacatgcagtcaatccgtgataagctccgttgaaaatggagatacgttttctattaaacagagcatcgagccgccttccggcatctatgggcgatccgtacagcagaattttatcatcagttag
